United States Patent Application Publication US 2014/0057251 A1 - sequence listing, part 193

SEQ ID NO: 396103 - DNA, 1130 bp, Cannabis indica
ggaatgttcagaggaggaaaggtcgctcaaatggaaaaaaaccctcccggccgagcaaagacccattgaacattcaatccagatcagagagctcggtctacctgctcggccatccacccctgtagaaggaaaggggaaggccgtcttggaggagcgggaagattcgtcgaatgaagatgccccatcagttcttatttgggcaaatgcccctgccaaattgtagggttctccatcttgtatttaattttcttgatcatcatgtcttcatatctctcatgcttttttctgattatgttacttttgttccgtgcagacatgtctcagaaaatgcttgaggccctgaagaagagagtgggaggaagctcgggcttatctcctccggccaagaagtctaagggcaatgagatgactccgtctagagagaatgcaccagctgaagtggtcattgacctttttgaggaacaaactgtcgtggaccctcctgtcccaaaagttattaagtccaaggattcccaaggaggcagttcggacaggcctgaacaggcaaagggcggatctgagctgatcaaaagcagatctgaacaggttaaggcccctgctccacctccagtacttcacccgaagaccaaaagaggtagggaaatgctcacccattatgtgaatcggttgacacctgaggtgaacgaacagctggctggggtggacaacgacctttctctggaacttgttatgggaggagtcctgaaggagctttcgagggtaagtcttttctgacgatttccttttttccttctttaattagttcaaattttaatgtcctttctctgtacagactggtctgaagatggcttatgcttattcccgagctaagacggctgctgctaaaaatcttaccatttctaaacaatgcgaacagaagtggacttggccaagaaggacgccgaggaagcccatgtttagcttgggactattcagatggaactgggagaagtcaatgagaaactccttgctgttgagaacaaagtggccaaactgacgaaggagctgcaggacacgccatctaacgagctgcttgaagccgatattgcctctttatctaaggaagttaccagccttcaagaggaaagaga

SEQ ID NO: 396104 - DNA, 528 bp, Cannabis indica
aaaaccgagatgaattccaacttgggatgttcagggatagattatgtttaaaatcatgctgagataagatctaatcaagtactaactgagatacagttacctcagattcacttgaagttgagagtagttgtattcagaataatccgagatagactagcttgataccatgctgagataaaacatattcaaatatcaactgagacacaattacttcgaaatcaacacaggtcatgtttaacccaactcatggcaggataggttatgtcttaaggctgtttgagacgaaccaaggaccaagctaaaatcaaagttcatttatgactaagcctaataagcaaaaataaattaataataaatagttgatatatgagatcaaacaaagagcgcatcaaagtttggacactaccaagataagataaaaatagcatcaagttggaataaatcacatctcatactcgtaaaaaataatttaagtcaaataaaataaaattaatctaaagatagataatcataacataaaattaatta

SEQ ID NO: 396105 - DNA, 621 bp, Cannabis indica
caacaacaattaacaaagaatatttacaaattcacctcattccgtaaaattggggttctaacccttaaattcataaaatttcaccaaccaaacgcgtttaattaaaactcaacattatcatagtttaaaaaataattctatctttaaattatttaatctaatatacatttaaagaatcaaaatcccaaagaaaaacaatcatattttcaccaagaaaaatacttaataaacataataatgagagaactcacctcattatgatgatgaaagaagttaacgaagaggatagaatgaccaacctaaaatttttgtttgagtaatttgcggcttaaatactaaagtttaactctcagttgtaaataaatacataagcttaatttttggtggtaataatacctaagtcataattttgaaactcttgtgtaggtacctagttaaataaattgtcacgtgacaaattctaattggtccaaattattaaatttttattatttaaaaaaaaattagttcaaatataccaataagaaaatgacacgtggatattatagcttaacatttaacggttaagtacctatagagttctagaaatataacttaggtattatttccgccaaaaattaa

SEQ ID NO: 396106 - DNA, 556 bp, Cannabis indica
ctggtgatgcaaaatgtgcataaacattaaacatcaatcccttgcttgctactaatgactagtgatgagtacaatttaatgaaataaattcaattttgaatttggacaatcatggaggttcataattttttgttttttgaattttattttgttatatactttaacaaaatacatataaaatacacctaagagccgttgaccccaattattatatggcttcttcatcaatcccctatctttaacttctctattattagccatctatctatccatacaaatcataaaacaaatataaatatataataattatgcattgaaagtgatacatatatataaataaagggatatgattttgtctcgttattgtactttcacggattgtaatccgtgatgtacggcagccgtcagatgagagagttatttgatctgacggctgagattgatctaggaatagttagggttaaaaagtagaaacgtaccctaacactcatttaatgtaccctgagacccatctaatgtaccacggaatacattccgtgaaagtacatcacgagac

SEQ ID NO: 396107 - DNA, 1572 bp, Cannabis indica
gtaaaaaatttaggaaaatctcttatatttttactatatatttttcattttcgatgttttgagaaattataaattattttacattttataacgaactacattgtaattgtagtaggtattttattattattttttttaaatttattaaataattcaagataaataattagttgcaaatatggtaattaattattttgaatcttatattttataccataaattattcataaatttaaaaaaaaaaaagtgtagggtacctgctacaattataatttacaatcatataaaaaaatgtgaaatataattttctcaaaaatgcttctacaataaagacaaaaatattacccaacttctctataaattaatacatttttataaaaatacattaaataatatatatttattggtttaaaaaaataaatatatttatttatactatattatattttataaattaatctaatgaggtgactcttggttggactggtatggcatggcatacagacactcaaaatataacttttatatttcatgcaggccttcattttatgatggttatactttatatagccagctaagtgaataaatatctaattacatataatattattttttcattagaaagaaatatatttgtgttataaaatattattataaatatttaaattaatatataaattaatactacaaatacttaattatattttataaattttgtttttcactattaagattctctttctctccttctcatcatcttcttcctcttttctttttatccatttaaaattatttataataattttataacatgttattagtacgaatttttatccaagtctcaagatgaatatttagttaaacttcttgagtttgtcaaggtcacgatccattaaatatatatttatatatatttatttgaaataatttcaagaactattttttttattatctataaatttatatattatatatgtatgtatatatttttattgttatatgtctattattgaatttatatgtatacacatatatatattatgtatttttattatttataatatttacaatatattttatataatttgtccctatgatatgatagagaatatgtataaattatacatatattttggagattatgtatgtatcttcgataaaatcttgtataatcttgaaaattatgcaaacatgttatatagttgactgaaatttaataaaaaaaagatgaataacatatatatatatagaatatttcttaataggtaatacacatggataggtattaaaaaaaaagattctgtgtactctttgatggattacttttcagagttaaagaaaaaaataaattattatttgattttatggttggaaaaagaaaaaaaattagtagctttattattttttttttctctttgttcttattctaagaatattctattagatttagtgtttgaatttcttgtttgttggtggtaagtaaacaggtgattagtaaaaaatttgagtaatttgcggcgaaacccctttatgttttaatttttacaaacttaacctccttatctttttttt

SEQ ID NO: 396108 - DNA, 576 bp, Cannabis indica
ggtcttctcataatcaatttcaggagtctgtagataacctcttgccaccaatctcgatttgaacctgtctagggatccatcagcattcagtttgatcttatgaacccatttattgtcaataatgtgcatgccaggttgtttgggtaccaatgtccatgtgctagccttttttaatgcaagaacttctgtttgcattgaattgaaccactgaggatctttgagagccgattgcaaagactttggttcaaaggaaagcaaagactcgggcagaggatgctttgtggctagataagctttcggcttgattatgccatttttggatcttgtgatcataggatgtgaactctcaataatggtgggacctgtgtgaactaagacaatggtttggggtagatgagagggaggagcaggtgtgtttttcaggtggaatatttggttgtgaagatacaggctcaacattggatggagtatgtgtagttgtagaggtagggtctgtttgaggagtaggctcaggtacaatctgttggaaattattttaccaggatctatttactatcatgtatgttggattaacaa

SEQ ID NO: 396109 - DNA, 727 bp, Cannabis indica
aacttgaacccagaccttagacccgcactgagaccgagatcccaaaccccaaacttgaagccagaccccatactcgaaccaaaacgaactaggaccaggactgggtctgagtctgggttcgggtctgggatctgggtttgggtttgggatccaaggttggggtttgggtctgggttcgaggtccgggtctagttctaggatccaagtccaagtcccaattcggggtctgggtctcaggtccaattctcagtccaagtccacgatctgggtctagtcctaagtcttgggtctcggtttcaaggttcggggccaggtctgggttcgaggtttgggttcgagtctcagtcctggtctagggtttgagtttaggatttggctctaggtccaggtctgggttcaagtttgaagtccggggtcccaatttgggttgggagtcttagtttagattcaggttcaaaatgacttaccaaacaagcctatgacttaccaaatgagcccttaaaatacatcttatatttaatcgtattatactataaggataatttacaaaaaaaaaaaaaaaacaaaaaacataattaaaaaattataaaaatacggcctgtatagaattttaatatttttacaatttttatattttatttatataaaatacagttttttatgttgtactcttattattttgttattaatttttttattatttgtatattattttttatgatgtttt

SEQ ID NO: 396110 - DNA, 884 bp, Cannabis indica
agtaagttggtttttaaatgttacattttggtgaattaatcccaagactatctaaggctagcagggccaccctgataaaatctgtgggcctggctatgcctgtatatgccatacaatctaccaagcttttctaatcgcttgtgctcgaaaattgatggcttggtccgtgacttttggtggggtttcgaaaaaagataatcattgaattcacttgaaggcttgggacaaaatgtgcctgcctaaatcccgaggaggtctgggttttaggaaaacaaaagcgatgaaccagacctttttggctaaatgggactggaaactccttacaggttgtcaatctttatgttgtaaaattcttgaagccaagtatcttagaggccaaaatatcctcaagtgcagagctaaagttactgattcttggttttggaaaagtttggtgaaagcaactgagatccttaggcgtggggcctgtaaagtggttagtgatggtaaagatacgaggatctcggaggacccttggatcactcatggtcaagggttctaccaaactacgactagtaaccaatcccagaattttactatggtgtccgaacttttgacggaaattgatgattgggacatgattaaactgaacggcctctttaatcaagaaactgttaccgccattttgaaagggggccaaccctcagaccaagggagtgattactaggtgtggaccaaagaaggaaatggtcaatttaccagtaaatcggcatacttaattcaagcaatgaaacgagccccacactatgatgtggctccttctcattggaacaaagtatggaacaacaaaattctagagcgccacaatgttattgttgggttttatgccctaaataaaactcttt

SEQ ID NO: 396111 - DNA, 652 bp, Cannabis indica
ctataatacattcttctatattttacaaccacaaacatataaattaattatttaaaactaattattttattcttttaactttaatattaatgaaaaaataatatattatttttatatattattagtaactataatacatgacaaaaaaaaacttaataaattaatatatatatgtataacgttcggtttcaattttttcggtcggtttattaacaaaaaaaaaaagaaaaccgactgttcaatgacgattttaaccattaggggttttttcggttttttttaattttatgctctcccctatcttgtagtgagctaacattttttaagttctgttgaacttctttaatgaaagcttttcattataagaaagaaaaaataaaaaccaactctaaagaagggcgcgtgggcaaatggaatatgttgttgtgaaaaactaattatctctctttaagcgaaaaaaaaagtaaataataaaaaataattagttcttctcgtctcctggatttagtgctttctgattttcgtatgtcccgaaaagcaaggcagcagtggacaaaaacgtcggctccggtgcctcaaattcccagcgatcgggtcctcggatccacctaactctttaccttccgagagaaagagaagcagagatgtgggt

SEQ ID NO: 396112 - DNA, 963 bp, Cannabis indica
ggttcgggactgggtctgggtcccaggtctcagatttgggtctgtgtctggttctcgagtttgggtgcaggtccgagtttgggactcggttctgggcctgggtcgaaaattgatgttgatcccgaatcttttataaatattacaatataagttaatacagataatttgttatgtactaaattatacaacatacattttattaaaaattttagtcctaataattaatacaatacattattttatttaaaaatagtgttatttattatttaataaaatacaactcttatatacgacctacctaacaagccctaagaattcttattgtatattatttatagttttgtaaggtactcattaatcattatcattttattgttattcatattcccatttctttatactttttattattctcaaccatacctgccaagtgccaattaatataatttaatgatatatatttcattataaaaattgacaaggttaactttcatatctttcttgatcatatatatgattgatttaaacaaatttgacaaatttattaacaataatcttccacataaagggtatcttatctataattatgatcacaactagcatgaagacagatttagtcttcccacttttggcaaataatatatatataaccacccatatgtatatatatgtttcatatttaattataatattataattaattttagaaaggatgaaaacctatatgaaagcagagcgcatgatctcattataattagttttcatttgttggcatatagcctccaaaattagactaatgatcctgtcaaaggaagttgttatatatatatattagactaaaaatttatttagggattattaattctattttaaatttttattttacaaaaattattaattgaatcatttattttgttaaataataacaaaaagaattttgaacttaatttttgataatttttt

SEQ ID NO: 396113 - DNA, 1490 bp, Cannabis indica
ttttagttttttttatatgtatgattattgtatatattcgtatttttttttttgaaatttttttaaataatttaccgtgtcaaaaaatattataattcaaaaattcagttacactaatttcttttattttagaagtgtgtcaccaactattttaaactttattttcaataccgccaagtattcagattttttttaaaaatggtatactacaattacaatatattacattatttaaaaaaattgggtcattgcaaaaaaaaaaaaagggttataatttaaagaaaattgttaaaaggtactattggtggttagtatttttctcggtgtcatactactattggtataattaagtatcatgttttatataacttaagaaaataatttttaagggatattgctaaccaatagtgagaccttacatataaaatgtgttgggcgctactagtgtttaatagcaatgttttaaaatagaaaatgctcaagaatttttttaaaaatggtatactacaattacaatatataataatattatataaaaaaatcgggacataatttaaagagaattgctaaaaaagtactattggtgcttagtactcttttcagtgttatactgatattggtgtaattaagtatcaaattttatataaattaagaaaatagtttttaggggatattgctaaccaattatgaaacaccacatatgaaaagtgttgggcaccactagtacctaataggaatattttaatttaaaatagaaaatgctcacctaagaaactcttaagctccctacttatagaacctacttttcgggatttgttttttattgtgaaccaattaatcagattaatttataaattagtcattcaaattaaccgttttggtatcctatgttttcttaccaatgtgacttttgtgagaatgaggattctaataccttgctttataaagttttgtaattatgtctcaaatttctcttatgtttaggctagtaaattggatgctatttgcgtgcggttaggggtgtttattggatcacatctaatgaatttggatccaattgatccaatttaattatttattggatattgaattttgttattcgatccaatccaatcgaattgagtcatccgatccgatctaatggatgtattggattggatgagttccaaccattagatgtattgactgatttttcattggattggattagattatatccatctgttgcccatgattttgcccaatatacgtggaccaaccggacgaagacacgtggatcaaacaacttaacatttgaattatttgctaagtctttatgtaataaggcagcatccgggacaggcctcccggagaagacatacggagccccatacgctcccggaagcccaagtaatactaaggcatctccatgaggtgtcaggcttcccctgagcaatcaattcacatttaatgccgaatgggaggaaatgtgttgggactgctacacgcaa

SEQ ID NO: 396114 - DNA, 539 bp, Cannabis indica
tgtttttctttttggaatgattgattggtctttttgggcatttatggttgctctgtatgttgtcttgtaagtatctatcatttgctttaaggtttaagaaagtaactggttacgttttagttttaacttatgagaatggtaaaaaccattcttgtcagcaaagtattctattacatgtgatgccttagctataattgtatataaaatatgtatatatatatatatactcacgtttcaacattttgttgaaatggaaattcaataacggcggccttagctattttagtattcattttcatgtgcatagaaactttctcaactctttgctaagctttcattgaaaaacatattatcctttgttacttcaagttcaaatgtttcgaaaacttcattattttctcaccttactagctctattcaattctgtttgttttcacttctcttttgttatttctcatcatcatgatgatgatgagaatgagtttcctatcttggtcaagtctgatgtcaattacaacactcttggacctgtttcaagg

SEQ ID NO: 396115 - DNA, 700 bp, Cannabis indica
ggatttgaaaaataggttgtggtttcagtagtgatgggtggtgtttatcgtggttatggatggtggtgtggtgaccagtatgactgaagatgaagaatgaaaaaagaaatcaaaaaaatatgacatgttaggaaaaaatatatttttctaatattttttattttaatttttttaaaaattaattatttatgtggaccaataaaattgtgccacatgtatattatgttcacgtggataatccaacatggcatttaacaaccaaatttagatagaaattgtaaattactaacgctataatagttttgggaattttggcgccaaaatttgagttttggagattaattgctagagaaataaaattattggagatttttctgcaattaactcatttaaatttgacactcaattatctaacaagtaattttaatcaaccatcttcatttaaagagaaatactaaaagacatcagtagtgcttaggactacctaaaatatcataccgctattagtacaattaagtatgagataccacatgatttaatataataatttttagaattattaccatttttgccctggaactttttaaactacctagttgtgccccttatagtatacaacttgttaattataccacttataatataacttttacagtaacatggtccttctatcatattttgtttcaattttatcatgaga

SEQ ID NO: 396116 - DNA, 983 bp, Cannabis indica
atagacagtgaagcgtaggagcggagtgctatgtgaatgatatacatacaagaaagagatggaaagagtgtttgttttacagatgcattttttcgtcgtgtaggtctgatagcaacttgtcaacgagtgtagattaatgctcactttttgttgatgactcttggaaaatgcctattgaagatgaagagagtagccatagtggcactattattggattcgatgtggcatcaaaagatgatggtgttggttttggtgatgaggccaaaactgaacctttgggtcaaattgaagctagtgtgcttgggggagttagggatcagcaagttgctgatgcagcatagtcatcattaacttgagtatttgttttctagtatttttcttacgtactaaccacttgtcctttgttcaatagataagatgagttttcttgatgttatggcttcctgtgccaagaggaagaaacccataactaggtctgatgatcctccagaggtcgtcctagctattcatgtagcttctttgggtcctccaaagaagtccagaaagaaagacaagatcgttgtgtccaaaaatccttccacagtgaagattcacgcaaggaaaaagataaggtcattgatattgaagacaaaccttctacttctttgatggttatttctccagaagttgtggatgtggccgagctgagctcttgagattcagagcttgtgggcaacctacgtgcacaaggcatcatgctgctggcatccagggaaaccttgatcacttctaaggccgattttaaacccttggggtggggttggtatctaccaagccttctcatatattgctcaaaggggcttcagtgactcttcagggtaagtacctcaactcacttttacttttcttttttgtcaaagttattttctgaccttgttttgccccttgtcagcttgcatgggctttgcttatgctatggacaatgtgttggatatattttacca

SEQ ID NO: 396117 - DNA, 748 bp, Cannabis indica
atatatatatatatatatatcttttgcacttttgtaattttgttcttaatttgtgtagaatatttgctaattatgatataatccgatgagttgtgtatatgcatttttcctagtgtttcttctcataatgttgacacgtaataataagatttacattactcaaagagctaactttaataaattaattaatatatattactaaacattggttaattatatactcagaggagcatatatatagtactattactttaatctcaccatttacaaatgtaagtaagtgatctctagtagtgattctccttttcacctataaatattccatgttattctacaataaccaatgttgtcatcaaataaatatatatattattatataataaatatattatggtcattgaaattttgcattttcccccttcttctatatgtatgctttgataaattttgtacagatcatacttttctgacaaattaattacaataactacattatttttcctgcctaataatatataacaataaaaaaattgtgaattaatgtatatatatagtcatcaaaactggtttgtagctagctaatttagtatttatatatatatttttgtaataaacttctattttgtatttcgttgactatattgcaggatgccaaaaaatgaaataagcatgctgaaacagagattgaaatactacaaaaaggtactcaggtattagaaaaaatgaaccatttatatatatatatata

SEQ ID NO: 396118 - DNA, 702 bp, Cannabis indica
cttgggtccgggtttgggtcaagaacctgggtgcgagtcgggatctcgtgtctgggttggggtcctgagtcgagttcgagtccgtgtctaggtctgggtccaaatccgggtcccaagtccaggtccctagatccagttaagagtttggggtttccaaaatcttttgtaaataatacaatgcaagttaatacataccatttgttatatattaaataatataacttacattgtattaagatttttgatcgttaatatattattttatccaaacataatattatttattatttaatacaatacgatcttatactgccaactaaaagaacacttataaatttataaataactatattctaccaaaaaaaaaaaataattttaataattatactattgtgagctaagaagttttttctaaaaagtaaaaacaatttttgaattacgaagtcaaactattattattattattattattattatttggttgaaaggaactaactttttgttattggaacaatggtaattaaaaaaaaaaggcttgattttttgttaaattattaagggtaaatactattttagaccttgtgttttgcaaaagttacagattggaccctgtattttgttaaatgacaaaatggaccctgtattttctaaaatagtaaaaataggaccctgtattttctaaaatagtaaaaataggaccct

SEQ ID NO: 396119 - DNA, 1215 bp, Cannabis indica
ataactgtaatgaattgaaatatttattaaatggtcccaagacaagagctatatgtggctcgacattctagtctacaaatcacgtgaaaaagaagagaatctatctaaataaatttcctcttcattttttctcttttaattataaattgtaattaatcacccaaattaccgtttttagttttttttttttttttttttagttgagagagaaatagagttttagttttggctttgtggggttttctttgtttttagtttatttcttttgttgattaatcacttaaaaagtaaattttagttagttaattaattaaataagtaagtattctttttctattccttatgtgttaagcaataataatagtagaaggagaatgggacgaaagaaaacaaggttcgttgtccaatgagataacaactttttcatatgaagaaaccaatgcatatcactttgatgaatttaaacaacattaattagttagttatagtcctatatcataaataataattaggtagcccttcttagggaaaaaaaatattattaggcccttaatgtgccattttgaaaattaacaaaaaaaaaggtgatatttttagaaaaataaagaaaattttagagtttctaagtgcaagtctcatttgtcttaactcaatgccaaccttgccaaagatgtaaacaagacgagagaagattgccccacctttatctataatgatgaaaacaaaggtaaggatgcataatctcatgcattttacaattttaacatggtataaaaaaaaaaatagctaatgactattctattcaaaaaataatagtcaaatcaaaagaattatttagatgataaaccgaaaagagtcactcaaaattcaaaatgtagagccaaaaaaattatttatactttagagatagtgagctaaggagtgtacataaatcattcaatccaatgacaaccgaccgatccaattatagctgactgccaaaatattagatatccaattgtgatcggatcggattggatattatttttgaatattctaatggattggatcggatgttggatgaggtgtccaaaaatctaatacatttaacatctaattgaactaattagtattttcatttagtttggatgagtaattaaattttatattgttataaataatatatatataaaaaaattaacattaaattttactctttttttttttttggattgg

SEQ ID NO: 396120 - DNA, 1226 bp, Cannabis indica
gagtaccccaaaatactctagtaactctaaaatcaacttgctaaaataattccattaacattgctaactaaccctttctgatatttttggtctccgattggatttttaaggtcgccaaacctaaaaatattgttattccacaaacaacttacattgtacccacatattccaaataaatttctttaattaataaattatgcttatttattcacttatagcaaaattcacaattcacgctgaattaaataagtaggatcataatcctactcattactctgcaattaattcataatatataataaattctaattatttcataattagatttttgagatattacacatagttttcaggttgaattcttcgaactaagatttatttggtgtcatatgaaatgaacacgcagaatccaggatccattcagaatctaaattctcagaggtaacaagcaaagcactagccgagtcatcacaatcactcatcactactgcatctccttcagatctcgaatcatctgacttcagcctctccagacacatctttttgacatgactcaattttcttgcaaatatttaacattcttttggctaccacactaagatttagatcttgattttccttttgaacctttatgggtttcccttttctcacttctgcctctcgtatacaatccatcgccacttccaaagttctttaactaactcttttgattcaactctttcgaatttaagattgattgaacatcatcgagtgtaatcaactctttttcatatagcattgtatctttaaaatgcccaaatgactttggtaaagaactgagtaacaataaggcttgatcctcatcttcaatggtaacaccaaaattttcaagatccaaaattaacttgttaaaattgtcaatatgttctccaacagattggtcctccatcatattgaaagaatacatggcctatttcagatataatctatttaccaacgatttagtcatgtacagactttcaagcttagccaaatcccagcagccgtggcttcttttgcaacctttcttagaactttatctccaagagtcaaaatgattgtactatgagcctttgcaagaatctctttcttgtccttctcagacataaaatcaagaagagatttttctccaagcaaaacctcgtacaatccttggtgaactaacatagtcttcatcttcattctccataatccaaaaccattcatac

SEQ ID NO: 396121 - DNA, 813 bp, Cannabis indica
aatcgattctaggcacatttggtccaatccaagtgaacccaatggacttagcactataacaagctccaaatggagccacagccttaactgttggagcctttacagctttaatatatgcagcaacaacagctttgtatatagaagtttccaatgttgtgtatggatcaatggtgctaatttttgttcccccatgaccattttcgttcttgaaagttagtaatgttgtgttgaacttaactggcttatcttcaatgttaatggatttgagtccaatgaaatattcggttgatgggtttctacgaattaagggagtgtaaatcaaggaatttggatcagtaacatgaacaccatgaagcactaaaggctcttttccaaagaaaacgacaccgtttgaatgaccagataaacaaaggccaaatttccttggaaagttaaaagcagatgagagcacagaaggaagagcaactttgttcctaccaagcccaaccatgcccacagttccacttgcgagacctttcactaatgagtttggggcacaaacaaaggggagatttggtacagaaacagattttaccattgggttaaatccgttggtgggttggatgtaaaaaatgtcttggtgtaaatcaccactagtactaaatgaaaatgggttagtgggtgtcacactacaaatgtattcacttgagttggaacctgttgaacaccacaacacgtgaaaacgtaattactttattattgaaaaagcaattacaccaagacttgaacacttttttttattagaccacaatacacaccaagcactcactcttt

SEQ ID NO: 396122 - DNA, 1006 bp, Cannabis indica
taacaaataatataaaaaattatgaaataattataagaggtagcccctgaagatgtccaaaataacaatgtggaaagggatgaatgtatatccatatattatcaaaaaataatctatttcctcaattatgaactattatattaaattagatgatccgatcatctacaaaatcaataacaagatatggagatatatatttaaattgtgagagcaggttgagatttggtgatgacttgataacctcgatctttgaaaataatacacattttaatataattaactagctgacccagcaaaaaaataataatataactagctgttcatgattaataattgctgcaaaataccttattttatgccaaatatatgaaatagtcacgaattgtttcttgttatattcatttaatgtgatagagccataccaggatttgacatatggtttcaaaatctacatgggctcttacgttgtaataaattctatcattatgtgtacaacataattaattctaacttgtaaccagcctgaagtcaccacaatgaaaattatcatcatttaacaacatttcaattcattattgtatgtcatatcagcttttagtctcaacaaaaaaaatattaattgaaactaaaaaaagtatagcagtatttacaatattacttatttactaaatgttttcattggatcacatccaatggatttggacccatccaattcaatccaattatttattaactattggatttttccatccgatccaatccaattgaattgagtcatccgatccgatccgatccaatggatgtattagattggatcggttccatccattagatgctttaactggttttttattagattggattggatccatccaatgaatccaatggatgaatccaatccattttagccactatttaggctgatttcattaaaaagaaaaaatatatgaaaaatataatttaaaacctaataatccaataataaaaatagtttaatccaaattca

SEQ ID NO: 396123 - DNA, 842 bp, Cannabis indica
tttcctagaacaagttcaagaaccatcaaattttctacagtagaaatccagaaaatcaaatattcaagcataaaagaggaaagagatgaagaacttactcactgcttaaagctttagagttgttcagacgatactgatcggcacttcctggagattcttcaaagaatttgagagaaaaagctttcttgctctaaaatcttcaagaataaaaaatgctaaaagtggtttattaggaatttcttccctatttataagctgattaatgaagaagggcaatcgtttcaaaatttaaatgcctcagtttccccctaaaagtaaatgttaaacactcaaagtacctaaatggcagccgtcaaggcgtgccattttttgagagtaattcgaggtacatgccagtcagcattaatgagcgaaatattgaagagacccttggtcagaatcacgtcggatcaccaacagatgcttcaaacacgtgccacccattcaaataaagatccaaattaagtccacgtgcgacttcgcacagactttgagggcaaatgttatcccattttttgtactatgatgtggcagcatatacgagtgacacgtgtccatcattccttacatttgggcagaatgatattccgaatagacttcaagcaacataactgcacgcacaaagtctgcttatccgaggaaagaaggaggttagttatccaagctgtgtacaaatacttgactacttcagagtggtatcgtgaagcccaagagcgaaggcaatccctacaatcatgggattgtatcagagagatatggcaggttatctcaatcccccatttcatgtattctaattatgtaat

SEQ ID NO: 396124 - DNA, 610 bp, Cannabis indica
tgaaaaaatcattaataaatgagttgccttgaggaaatagtaaatggcgagccatatctgtcttgcatacaacatatgggatttgacaatgggtttgagtcaatgattagaaaactttctttcctcgatctagagatgataaaaatagaagtcatcccaggtataacaaactgaagctataacgctagaaaggataaataatggattctttaagagcttacaactcgttgacccgcatgttcgtgagtatgttgaaaggttaagagaaataagcaaagtgtaattaatcttagattctcaaaagaatagtccaagagtcgtcgtgaaagaccatagcaaggacaaacatcttaactagcgtctcacaaaatatggttagctatcctcgaacactgtcagacaatgtgagccacaattggagtgtgtgtgtgataatcagtagtcgtgtgatccgtaagggaaaataccgagtgagctgtacaattccacatcgcctgggaaaggtcaagtatgatgattcttagactgtgtaggtatggaactacacagttgaagatgacttaaatggattgattggtactacctatatcaacaaggtgcatcttgtttt

SEQ ID NO: 396125 - DNA, 682 bp, Cannabis indica
atgtagtgactcatctatgattgcgagagacctctctaccacggtagcacatcaccggagccgaacaaggacaaccggaccactctcctccagtgtccacatgctttttattagcacaataaaacctagatggatctgtaggaacatatgatttttccagatgcatttttcagtcctgtcctcttgagatatgaaaccatgacttttactaaaggaaaatgtaaaacggtaaatagaccaaaattggtgggtaacatcatcaagtaccaattatggtgaaatgagaagataatattacagccattccgaaatcaaaccgaatgcaaacattttatcattttacattttagcatacatgagttagttaaaactcgacgatgactagaaaacgtcttgcaataccaattctcgccctcgccgctagtcaggcaaggctgtaccccgctcgaggttgttcttgatctccagagtgtatttaccaaaggcacgctcaatctttttgttgaaatgttcattacggtcattgatcgagtcaatatccttctcatcatggaacctcctcctcctgctaaatgaccctcgcttctcgtctcggtccttgagttcctttaccatcttttctatcttatcctccgagatctttggtgcctgaaaaataaagaaaaaatagaaatcattgctt

SEQ ID NO: 396126 - DNA, 482 bp, Cannabis indica
actattatatgctgaaatttacttttttactacccgtttatacattgtatattgttttttttttaaaaaaaaaaaaaggcaacagttcacatgatctctttcttcccaataaaatatatttgtgtttatatatatattcctcttgaaaacatatatgtgtatatatatataaagtttgttatggtttatgtccatgagtgtggaagatagagatctcattttttatttttctatgttaaaggagaaaaaaataagttagaactagtaaaaatgtaatttttatcgtgtggcagtgtaaatgtaaattattacctaaatttaataattttgtagatgtctctattttttaatggcatggtacaatatgactcatattttgaaagcacaaaaaaatagggataaattgaaaaatatatcttttttatatttattatattatattttattaacaaatacctatttttatgagtgggttgcccaat

SEQ ID NO: 396127 - DNA, 774 bp, Cannabis indica
gacccgacggattccttctgattcgaaacattcggatacttattggattttggattgattcgctccgcccgtctaatttttttctggatcggatctgatagagctgaacatttagacctgcaaacccgcaaatccggccacccgctaccaaaaaagccaaaactttgaaaacctgtgtgtcgggttgggtccaacccgaaatactccacacgagttcgggttcgggttttaaagttaaccagaaacccgaaaattaggcacatattttcgtgctacaaaggaagaaggtacaattttttaattattataaaataaaaaactgtaagagtcactcatgcacctgtcacttataaaaagtaggctatatctctcatccacgtgggtattttactattttttattagatatgtctattcaagtgggaaacaagcttcactttgttttatttttaatttttttattttacttttatcaaaataaaaataaaaatgttattatttgtattttccatcccacagccgaacttttttattttatttttgtttataatgcatgctccacaaatttaaacttcaaactgtacactactgattttcttatgcaaatattaaatcgggtgttaatttgaacccgaccacagcaaacccgccatacccgaccctaaacctgtcaaactcgaccacccaaaaatcgagttcggttacacattttagacacctgaaatttgaaaacccgaacccgaccatcctaaaacccgaaaattcgacccgtgtg

SEQ ID NO: 396128 - DNA, 571 bp, Cannabis indica
aaataattttgtgatatttttacgtatatttgtaaattttaatgtataatttaatatgtcttaatattttttaataatttattaaaataaaaaataataataatattataaagataaatataaaatttaaaaataaaatagtaattatgcaagtcatttgcaaattagcatgctaattaaaatttagtaataaaatattaaaaatggtataataataagtataaagtataatatttattataatttaaatttagattattttaatttaacacatcaatcttttacaaagtgagcttaatttaaaggaataatgagacttacatatttaaatatttgtagtaaatgatttaattttaattataattaattataatgattttttttactagcaacataatgatttatagcaatgtcttattttaataaagtttgtcacataaggacataagggcatagtcatagttagggtcaaatagaccgtgaacattaaccaaaaactaagtgattataatattggtactgttataaatattaataattatgtggatgtccaaatcttttatttattacc

SEQ ID NO: 396129 - DNA, 552 bp, Cannabis indica
aacatatctttccttttgttcatactggtgtgtttccctctggacatgaatctttcttttttgacttttgtcatacagctgagcctaataattcacaggatgcaggtacatcctcacctgttcctgaacctgatattcctagttcttctgatgctattcctactcataatgttcctcattctacaagaacaggaagacaaatcaataaaccttcctatcttaatgaataccattgttatttggccactaacaactctgctattttttcttaggcatcttttgtcactgatcatcccttgtctcaggctcttgggtatcataggttgtcaccaggctacaaagctactgttcttgctatttcaagccattttgaaccagccactttcagtcaagcccatggaatccttgtatgggacaatgctatggatacagaattagaagcattggagaaaaatcacacttggattatagtctctctacggctgatcaacatgtaattggctgcaaatgggtctataggatcaaaatcaatgctgatgggagtgtgtagag

SEQ ID NO: 396130 - DNA, 1104 bp, Cannabis indica
atttcttatttcaaaaaaaaaaaattaatatttttgctcacatacccggacatagatcctggaccctagacccagacttagactcggacctcgacccgaacctgaaaccgaacccaaacttgaatcttaaaccaggtctgtggtccagggttgggttcgtatgtgtttaaggtccagggataaggtcgggtctagatcctagtcgaggttaggttcggatcgaggtcgggttcgagcttgggtcagggtccgaggtctggtccataatttggatctgaggtttgggttcagctggttcagcagtctggggtctaggttcgggtccgggtcgggtcaaggtttgggccaggggtcgggtctaggtttggggttcggggactgggtcagggtctgattcttggtctaagtttgggtccttgtttgggtttgggtccggtccagagtttgggtttagggcccgagtttgggttctaggtccgggtctaggttctaagtccaggtttgggttttgggtccggagtccaagttctagttctggggtccagatccgagtccaggtctagttccgagtctgagttcgggatcctagtctgggatccaagcccatgttcgagtatgggatccatgtccgggtatgtgagcaaaaatgttaaaaagaatacgttagacaaaaaaattgaaaataaaaaataatattttgatgtttttctgttttctagttttttttttttaagtttctattattcaaaaaattaattttgtaaaaaatttaagtccaaatgcccactattaattttttagtaagttgctttctttttttaagttcccctacgttttcggttcacttatataggtcattgctcaaagcacataatgtgtatgcgttcacaatatttattctttttctcactaaaaacagattacttcatcaaacaatttcgggagttgtcaaaatacacacatcattctaaaatatattttttattttcttctctaatccatataagatttgtcatcttctcttaaaaaaaataactctaatagttgacaaatctaaaagttatccactatggtctcacatcacattgaattaataattttttt

SEQ ID NO: 396131 - DNA, 594 bp, Cannabis indica
atttatatataaaaaaatatatatagtatttggatatccaaatattaatttttttaaatataaataaataaaataatttaagacaacttatccattaattcggttaaattttgatcggatccacacataatgtcacatcgtcattagctcaactcataataaaagtattttttgaacaaaaaaatatttttaattaataaattaattacactaaaaagatgtgtaaacaaaattactttaattcataaatttatatttatatttagtttacttaatattcttctctcctaccttctcttctttcttgttactattgggttgtttgacaaggaagacattgtttggctttggggctgcgccgggcattggagatcgggggcattggagttgcacatggaggttgattggcaatggtaagatctcaaattctgtttaagcatggggatttgaaaatttgtctttgatttgaaaactaaactttaagattaggtttaaatgtgaatctcttaatttgaaacttagttattttggtgtgaatgaattcaaatatatctttttgaatttaagtggcatttggttggagttaataaaata

SEQ ID NO: 396132 - DNA, 683 bp, Cannabis indica
  modified_base (38)..(38): a, c, t, g, unknown or other
ctccatgctttcttcatctagttttgttttgtttttgngtaacaaggcaaaagtagttatggctgagatgttattgaagatcatctaaatcccatccagtgggttctggtgtaggttgttttgtagccctttggtacagagcacttgactttatagtcaaatttttcagatggttgacctaattgaccaatatttttgttgcccttttctagccttttcttgagtcgttttcctggagtgggacatcatgaaggttcatcaacttatagacaattattgcagttacaaacatcctaatatttatgcctgtttgaggatttaaaagcataaattggcttctcttgggaatcaaagtatatgatctcttcatgtgttatctgaatgagtgccataacatattgggtgcgaaaacaactaggtggttttgtttggcttctgtcaaaaataatttcaatagaaccaccttattttgtgtggtaagaaggtccagttgtagtttgaattaggggtgtttgtcggtcagtttggtcggtttacgttgtattttattcaacccaacgtaaagatcgagttataaaaatctaaatgcaacccacccaaataataaaaaataaaattttaacctgcccaatgaattggttgttttggtcggattaacccgtccaaatcgagcactaatatat

SEQ ID NO: 396133 - DNA, 556 bp, Cannabis indica
aaatactaaggtagtgtttggttaggaggaatggaaataaaatggaataaaatttaacatgcataaaaaaattgataaaaaaaaagatagagggtaaaataaatattaacattattattttattatttttaatataattatatattttattttaaaggatgtaaaatttattttatatagtttttttttctaattccactattttgggaggaattaaaaattagtatatttgaagggagagggtctcgctccatgaatcctctctcttcccttttccctcttgctaaataagattaagggcattcatcaatctctctttctctctccctccacccatttctctccctcctaccaaacatagtgtaagactcaatctaagcacttgttgataatagacagacccacctgaagctgagaaggagtttgatcctccatagacacacttttaatctaaacaaaaatataaaataaatatttattaaacactaatgacggacccagaatatttactttgtgggagtttatttatcattaaaaaatatttatacttatatta

SEQ ID NO: 396134 - DNA, 869 bp, Cannabis indica
caacctattcttgcttattatttttgtattttaaatataagattaaaaaaaaagttattttcttattttaaaggggatattactttgaattagaatatattgtaagccctacattatataaaaggcattagatcacatgaaaagagacttgaactctaagtctcacacgccccatggctcctctctctcagtctttcacgctccctcactcactagacacttagcctattttcttcacaaagtcttataagttctgaatctataacactcaattcttattgttgtaatattgaagagagccatagctagaaattataatgtctaattagcttataatctgccttgtattatctcaagaataaatacaacaaaaaagagagtaggtcattacctattcattaaggaggctaaacctctataatttctatgttacttttattatttataatcattatttacacatggtgattatcagcaattaataagactctgttgttagttgaccaaatttcaagtcaatatttttgtgctttcattgagagttttatttgattttcatccatctcattctaatcaataaccaggaacactttctccacttcctcgggtcttcctcaaaatcctatgacaatcaatcccgatgttcgtgttcttcccatcatggaaagtcctactaatttgactaatactgtcaatcctaccaattctacagatcctgcagatcctacaaactttgcaaaccttgcaaattctgccaataccgataatcttgctaatcctgctaacccagtgaattctaatgatcctgctccatactaatatatattagtaagataaagaaattattaaaaactaacataaataatgtt

SEQ ID NO: 396135 - DNA, 1089 bp, Cannabis indica
tttatattgttatacgtcaaatcaatatgtatatatgaaaaattacattaaaattttactcgtttttttcttggattggatggatccagtccaatccaacacatactggacctaaaatattggatggatccgatccgatccaaaaaatattaggtctaaaatattggataaacccaaattaaataaataaatatatataaaatacatccaatggatagaaccgatatatgattgcatcgaatttggattggcctaaaaatcataatatagattaattattcactagtaaattgatggtacttaaggagtaagaagtaaattagaagagtaaaatggtaattcttctattctaatttatgaatcaatttattagagggttgaactagtgaatcaatgaacaacttaagaaaagattcatgtaaaagtaaatctataacataaagagtttaattctgaattcatagcggaggaatatcagaattaataaattaacaaacataattaaagagtttaattattcaatttatggtccccaagacagctcaataaaaaataaataaaggtaaatacaaacaatgggcaaatttgacttatatgataagtaaaatattttactatgccataaacacaattattaaataattatgagtatttaattaattcaaattcatcaaatacataaattaatttattttttggttatttggtatttaattattaaaattaagaaatcaaagacacatatatcctccttggcatatgacatatgtgtgtaacacgatgccttatcactatgtgttacacacatgcaacaaaatggagattttaattcaataattttatttattaaatatcaagttaaataatgaattattttaagggaaatttgcggcaaaaattcccaaaaacttagggttgatgtagattagtccccaatcttaaaaattagcgataatagtccctaaagtcactatatttgtaagtatgttgataccgaatttaatagacctgttaaatactgacaataataccacgtgtttaaagattattgggccaactcataattttaattaaaaaataatttaaaat

SEQ ID NO: 396136 - DNA, 850 bp, Cannabis indica
cattttctctgcctcttttggtcttcgatttgagtattggaggtggagcaagggccttaatatgcacggatcggcttcagatcagctcgaattcgcttttgattagctcggatcagcttctgatcaactcggatcctcccttcgcctgttcaggcctgtccgaactgccttctccagaatctttggacttagtcatttttgaagcaggagcgtccacgacagtttcttccacagaaaggtcaatgacgacttaagctggtgccttctctctggacggggtcgtttcatcgcccttagactttttggccggaggagataagtctgagcttccttccactctcttcttcaaagcctcaaggagtttcttccttttgagcggcctttcctcctctgaatagtcatgatccttatccgcctgctcaaaatattcttgagcatattgtttagctccagctcctcccttcaacttagcctcacgcttaagttgaaaaagctccttctcttgctcagaatactcctgagcatgctgcttggctcctgcacctccgttcaatttagcctcacgctttatttgaatgatctccgtctcttgctcagctccctcagcccggccagcagtagactttttcttcctccccttcataggcgaggatataaagtttgctggataaagcccgtactccacaaagttgacctccgagatcaataaattgatattccgagcagcatccggcagttggaaaatcctttgagccgtttccctacgggccatgtaagggctggatggtaatatatcgggatctgctgaaaccgagtataagtggtgcccatgccttccacaaaataatac

SEQ ID NO: 396137 - DNA, 1116 bp, Cannabis indica
caacagtttataactgtcttttacacaatttcccatcggttcctaaaatcgttggctatgtgggtgtcataaaaatgcagaactttaaaagacagtttataactgttgggaaaagtcactttaaatgatggtttataactgttgggaaaaatcactttaaatgacactttataactgttgggaaaattcactttaaatgattatttataattattgacaaaaatattatttcaattaaattaaattactttttgacgtatatttttaaatattaaatatatataattattttaattttcataaaaaatagtaattaaaataaatatatattttcaaatttaaatataataattcattaaaaataataccaaatcagacattattacacttgatgaaaaaaattaatatttcagaatatccataagatacaattcaaaaaaaataatacaaactcaaaataaataataaatataaatattacaatttaatctaaacaaaaattaatgtatactaaaaataaaaaatctgccagcaacgaagaccaagacagcgtcgtgttgtctcttgtgaagtgttgtatcatgagctttgtttcaatggataatgaaaacacctaaaaaaggacaaaaaaaaaaaaaaaaacctttaacattaaccactttaaaccaaaaaagcttggtaatctctttgaatgttctaatcgaatgagccaattgaaattctaaattttaataacatttacagaaatttaaaaccactaaacagactcttttacattggtgtgtgtggaaaatgaaagaaaaaataatgagaagtagaaaaagaatttacctgatggtgatggtgaaaagtgaaaggaggaaacgaataagataaacaaaggggagcacataggcaatggaggaagaggcacatgctatggtggtatatgggctttaggcccatgatcaaaaaactttgtattgatggacctggttgatgaacttgtgtgccccaaagacgacgactcaactagagacgtcgagatccatggatttcattgccggagactcgtccgagaaaatgagagagagagagagagagagagagagagaagagagagcgagtcgaccgtgg

SEQ ID NO: 396138 - DNA, 1011 bp, Cannabis indica
atttggttaagacgaatcaacttgaaaattggaaacatgaatagcttgtgattaaaattttataataataataataattattattattgttattattggaatagttcctccaaattaaaaggtctcaaaaaattattatcttttttgaaaagttgttgacttgcagaagcaggtcctggaaggctttcatgtccttccgagaagggtcctcaggaaagttagcatttctccggaaaggagttccagatggctagttgttttttctcctagaaaagagttccagatagccgactccaactagctctttcctattcggaaagctccttcagctagagtcttggtttgtgattccaaaagccctcagattcgctcccagaagaactcatacttatgctaacgtaaagatcttgctcaaaggagagttggttaaggtagttgttgcctaactaacttaacaacctcgcttcttgcagccaccgaatttaggatattgatcctaagcctataaatactaccaacacttaccattttagacacaacgatcaggttgagtttttgagacagagaaaaaaaagattgagagatagagagagaaatgtatagagaaaagagagagattggatttggattttgtatgaagaatcttatgtagatgaagattattcttgggtaagagtgtgagaggtaaaatactttgagagaaatcatatgaatcgatctcgacagtattgcacatgttcttactcaatcaataaagagaatttggtggtgttccaaaactagagtagagtcatatagatcacattgatctattggacttgaaccagtatatatcttgttgttaattttattattttactatactttaatcgttttttattttcaattctttgttcatccttatttttttctttgattattgattgtgatttgtgactcttgacattgctaattgtttgattatttaaagtttagttgatttgattctgcatctttagttgtaatttttcc

SEQ ID NO: 396139 - DNA, 1091 bp, Cannabis indica
tagcattcaaaatcttgcaaataactaggcggccgagacactcttgagcttcttctaggcacagcagcaggggatgaggagggatcagctggagcagatggtgtttcattctgctcttcaacgtctggtgctggtgtttcattctgttcttcaatgtctgctgctggtgcactattctgcaaaacagaatcaggaggaacaaggctatggtcttgtataggataatcctcaatatgagtgttagttatatgatcatttggaaaaataataagcaagaaaggatcaacattttcagtagcagcattaagtttgtgaaagagaaaaacatgttcatgaaaaacaacatttcgagaaataaaaatttgcttggtgttaagatcatataaccggtagcctttaactcccctaggatatcccaagaacacacaagttcttgcccgaggttcaaacttagttctgtgagaagtaagtgttgaggcaaaggcaaggcacccaaaacatcttaaactagtataatcgggttgtttttcaaaaaggatttcataaggagttttgtttgcaagatttggtgtaggcgtgcaattgattataaagacagcagtaagaaggcattcagtccaatattgaatgggaattttggattgaaaaagcaaagctctagccacatttagaagatgttgatgttttctttcagcaatgacgttttgttcaggtgtctcaatgcaagaaaagtcatgtaaaaggccatgtttagagaacaattctttgaaagtaagttcaggagcattatcggacttgaaacatttgaaaacacaattatattgggtttttatgtaagaaataaattcaggaataatagtaataacatcagacttttgtctaaggagataaatttaagtgaatcttgaatgatcatcaattaaagtaagaaaatatctatgattagaatgagaagtaacttgataaggtccccatatgtcacaatgtatgagaccaaaacaatgagtagtaaaacttttattatttggaaaaggaagctttctttgtttggctaaaggacaaatatagcaaggttcaacatcatgtaaatt

SEQ ID NO: 396140 - DNA, 1299 bp, Cannabis indica
ctcacccagccatttgttgcagcagataaaatggactttgaaacacataatttcaagtgtaatgccaaagaaagtggctgaaaaagatagactttggtttagcaatctttaaaagtcatttgtcataatacacataattgtatagattatacaaaggccttgattaaggtgcttttactttgtaattaaatgatcgtaaatgtttgtttgtgcaatgaaagtcctgattcatcaaaaaaaatatattaataaaaagatagctaatatacaaacacttagattaatgtaaatgtgtatttatttaacttttcaatttaatttttattcatgcttattatatataatttatacttaatttaattatattaatgataaaataatatatatatatatacaaattatgactaaaaaatagaaattgtaaagactaaaaatactaagaccctatggcgtcagtttttcataacaactaacaccatagggtccctatggcgtctagttttttcataacaactgacaccatagggtccctatggcgtctgtttttcataataattaacgccattgggaccctgtggcgtcagttgttataaaccttacagcgtcacctgaaacagcgtcggtagagaatttcacgaaaaatcgacgctaaaagcccttaaaaactgcctctaaagtctaattttgtattagtatgagtttttatttatattcatgcttattgggttcaaataatattgttacgcaatttttttttgagcaaatcaatgttatttgtcgatcttttttatggaaagagtttcagattatggagaaattgttatgtgtcttggtcagaactttgtaagtctcgaaaagaaaggggttcgggctttagaaacaattgttatggaaccaaccaactttgggcaaatatgtgtgggttgtggcaaacaaataaggaaacgtacaggtgaaatggatccactgtgtgtttgtaaagaatagatcttgggggaagtatactcccacagttaattacaattggtactggaggcatgtgtaaaagaaaagattaagcagatggtaacagaacaacaatttgtatcaactcgacactcaatcagtgttggttactctttgtcttaattaatccatgtaaaagccaagtcaattggagtgaccagatttagggacgtttcaacattaattgagagaaaccaagagagaaaacgagagagaaaagaattgattttatttctcagattcaattgaataaaaaaacagaggaagtgcttttatagcacttagtttacaaga

SEQ ID NO: 396141 - DNA, 1356 bp, Cannabis indica
caacagttttttgtttatttttatggctttgaatgcttcgaaaaaaatggtgaaaaacatgcaggtcgataatagtggtcaacggtacattcttgaaagcaggttagggaagaacattaatgtctgcatgcacaaaagatgtaataggtcacatatttctacttgcgttctgtgtcactgattccgaaaatgacaaatcttgaaaatagcttttcaaaaattttttaaaaaaaaacatatggcgtcaaagaaaaacagtgtctaatttcagacagaaatgagagcctcatcaaagcagcaatataaatataccctgaaattacacacgcatactgtggctatcacctgctgaacaaccttaaaacaaccttcaaaacacatgttgctaagtacaatatgtcattctttggagcagcgaaagcatacaaagaaagacaatttgagtaccacatggcagaactaaatggcttggacaaatgcatataagaccgtacttaaaaaaagtcagttatatgagaaatggttaagaattcacaacgaaaacaagaggtattccaccatgacctcaaacataacagaattactaaactggcaaatttagccacaagggagcttccaattacaacactgctataatgcttgagagcattatagtgcaacaatgaacacataataataggacaaaagtacaaaacacatttactacattcgcacccctgcaaaacagatgttattgaaaactacacatactcattgaacttggaggtcagatctagatttctacaatttaaattctcaaacataatcattctggggctattatagttttgtttgataaaatttgatacgcaagtatacgcaatcgaaataagtaatataataataaagtagagtatcgttcccacgaggattgattatcaagtaccaataaattaattaattatttatatctaataataaaagtattggagaaaagtaaataaaataaaatattaattaaaatttagaaaaataacaatgataaaaacaagaattattatgatccccaactatcctttattttacttcctaatgtaattacttaatttctcttctttctattcaattaataagttcagctaagaagtttataatttggttaagacttataaactcaatctatatgagaacttcttatatttctatggtaagtttaattgcaaagatagcattaagcatagcaactaataaaatcatacaaacaacttaggtactttcatcctaaatcaatttgaattcatatcaatcagagcatattcaaatctcaccttttagaattttgatttgaattcataataacaattaagggtgatcagt

SEQ ID NO: 396142 - DNA, 1009 bp, Cannabis indica
agcattacatggtatatatatattttatgcatatcttactaagtctgttgactcatcagtttgctaccttgtgtaggtaagagaaaagctaaataggaggaacagtgagttgaaggctcaataatgattgtacatatcgcggcagtgcaacttggagtgtttcgatcatattgtattttgagtttagcttttgttgtcacgatgtgacaatgtaaaaaataaaagtaatatatatacatatatgaacgtacgtattgtataatctgaaaacagtattttaatacaggatcccagcgtgtaaaaactttatatgcgtatcaatatataattataaatagtttatatagcttaagtctatattcaagtggttttcaagtttgggtgtaacataatagctaattaggagttttatgttctcaactttgacacgtaatatgcatttaaaaaatttctaattgttattttttttcaaacaattgaaattattaaattcaaaaaaaattatttcgtttcgttcaatttttactaatatagtaatggtctttgtatggaatcgtgctgccaaatagagaaatgctaaaagggaccagtggtgcttagccaccctccttcgtgtcaatgtcggtattagttaaactaagtatcaagttccatatagtttaaaagaataacttttagggagcatcactagccaaccgcgcaaagcgacatatcttgatggtgctaggcagcactagtgcccagtaggcaatagcaatatcaaatcttgtaccccaaactttgacatgtatcaaatcgtgtctcttaaacttttatcacgccaggtcgttagtaaaattgaaaggaagttcttgaatacaggaatcttgatagttttggaaaaagtttaacgcctgaaaatttaacgaacacaatttgatacatataaaaaactaataaacaaaccgcactttgtgtgcggttgtattttatttagtgataattaaaaataaaattatattaaatcaaa

SEQ ID NO: 396143 - DNA, 672 bp, Cannabis indica
tatagatatattgatattgattaattttatgatctaaaatttgtatttataaaaatatactctcagagttttaaaattacgaagaaaataactaaaaaacaatcaaaaattaacatcacgataactataaatcaactattgttatcccaagttttgcccacacttgacgtggcatgttcacatacgcaaaactaaggccacgtggagtacaacctgtcagtgacttgacaaatccgcttagcgcagcatgccaactgtcaaggattccaagcaatcaagcaagattaaactaggaagaaatggccagccaagggatcctggtcggatcacccctagccggcctatgaggatctatataccggcaagaccctaaaaatagtattggccggccagcacgtacgattaagcctcgcatagaggccggatgaatggtgggatccgcatgcaaaaattcagttacaagacaactctatcgacccacaaaaatagggattaaacgtcacattatctacatattctttagtgcttatctttttgtaatttaaatataagataaaagagttagttttcccattttggggggatattcacttatttgaatattgatattttgtaagtcctaaattatataaaagaccttaggcaagtagaaaagggacctgaattctaagt

SEQ ID NO: 396144 - DNA, 826 bp, Cannabis indica
attatagaaagtaaactgattttccattttccattttattccttgttgaatttggaaaaccaatttgatgtatttactccctataaatagtggactcatctcactattcaagaacacgaatttcattcagatagaaaacacgagagagaaatctaaatttaagagtaaaatacttatagcgatcattgtaagagctttcgatggagatcaatgttttcttgttcatctactcacatctcattgcaacaaaaagggagtaggctattaccatcatcaaggggccgaacttttataattttggtattttctttactttatattacttatatttggtatttcaatcattgttaaattgctttaatttcactcattgtcgttggctaaaagtgaggtcaatattttagtgcttttattgagagcaaagaaacacaagtatttgttttaagtcttttttaggacacgggatggttgtacaaatacagagaggaaataaaattgaaacaactgatctaatgactacggatctaaacgtgtagacacctacaaatcatagagttccagtcaggacggaccccacactgactaatcctcaaccaccaataggctcacaaactgtaggtcaaggagtgactacccctttggctgggttcactctgggcgtgcaataaactagaaccactagtactcggaccgagcaaaatgccccggtactggaatcccatctgctataaattctcaaaggccaactagcgatgacaccaaactacagaatttgcaagctgcattaggaaaaatacaaggccacaataacactcttcattacgat

SEQ ID NO: 396145 - DNA, 1044 bp, Cannabis indica
tttttttttttttgaaaaggaagatagttcataattaaagtcataactaaatatactaataaaataataagtgtcataaaattaattaataaagttgttcatttatgatgatgtaaattttgcatcataagaccatctttaatggaagatctaaaatttgtgctaaattttgcataaaaatgagattgtgctatatttgacccattatttataattgtgctctaatacacaaaatgtaaaataaaaaaaaataattatattaatagtcatttaatattttattgagaatatataaaaattattgttatacccatatttcaagcaatcaatatggttgtgacacgtatgaagaagctggaaaataaaccaactctggttatgaagaaatgaatacgttcaaatatcttgcctcaaatacaattggtagaaatatttaaactcatccttttaaagataagagcgagtcgtgaataacaactactattttgtaagaccagtgagatgaataatcaacgtagaaggtctatctcgggatacacggagtatacgataaaatgacagttgtaaacacagatttttgttaactaaaaataatgagcatttacgtaataaatatatcacaaaaataataataaatgattaaataactccagttatttttacgtggttttacagttaaatctgcatactccacgagtctatcttgttaatgatcttttctgaatacaggatacaatacttaattgataatattttttctctcaaaattctatccctttttctatggaatttacccctatttataggaatataggttgacagttatttacttgggatcaatttaaatataatagttcatgaaacctggacaattcccacgttacatttaattacatgtaagataatatttgataactgcttaattacttttttgttcttatccttttcgatggttaatgctaatttggacaattgtatctcgcttaacccgagttattctccttgttcatcttgatgtggaaaaaatactaagtgttagcagat

SEQ ID NO: 396146 - DNA, 785 bp, Cannabis indica
tgcaatttagtttaaaaaaaaaatagtctaaacccgcaccacccacaccacaaactctcttatcatgtggtgtggtgtaactataatcagtgctaattaattggacaatatgaaataccttttaatgggtattatccattaataaaaactaaaattttgtaaatagtatctatttatgacataaagagttatgagtatctaatatcctattttttttttaatatttttaatatcctattaaaagtgcatatatatgagatttttattgttattatgattacatagcgcggtgattgaagcttgctgtagccatgtgtataaaaagttacgtttttgtcttctaattaaacgtgttgatgatttcggttctcattatgatcaattaattgaaagagaaatgtgtacataaatatatatattttcaaaaagtaaaaattgtgaacgtgtttcataatttaacatttaaagaatcatgatagggtagtaaatattaataatgaatgattatgttatggaaaggagaagaaataaataataatagagcagaaaatgaggatatatgtaggtaagtgattatatatttaattattacaacgaggccagctttgatgtaaatgaaaaatggtggcattgttactgtcgttgtcgtagtcttttaaatgaacatcattgtcgttgttattgtcacctgtgagtgatcagtatttattattatgtatggaatatggaatttttttagttataattttataattaattttttttatttatttataaaaataaaa

SEQ ID NO: 396147 - DNA, 813 bp, Cannabis indica
ttggagtaataatcagacaagacaaatcttcgaaagacactattttagacaaaagaaatctttaaaatacactttttgagacattgccaatctcaaaatgacatatttataggttttatccactaactacaaatcacttattcatagtgtaacagaaataatttgtaatacatagattttcaaaaatatatgggaagaatgctgtaaatattagtatattttagttaccacttgaaattactggccatattattttcaaaagaaaaaactatttagataacgttgtattggaacatcgcatcaggggtagcatgccttttgatttgttataattcttggtttgtaatttcgtggcattaacgtaagaacaaaaaattccaaattagtggtagtggaagagcccaaaaattattaaagaaaagaaaagtgctagttcaaccgaaaaaacattaattcttaaatgttaaatgaaaattataaaaatagtagtatatggatatgtatttaatttaatgcgtgtttgtaaagtcgttgaatttgagtataatccgagataattacacaattttcatatttttcgaattatgaaattacatttggtaattattaagaaaatttcattttaaatattaattattaaaaaagtattattaaaaattcatatataattattagaagaattaccccatatactatttttttaactacactttagttgctgatttctatacgatgatagttgcaatagaggaatttacgtaaaattttgtaaaaatacaaaaaaaaatatattattttaaagtgtaaaaatga

SEQ ID NO: 396148 - DNA, 720 bp, Cannabis indica
attatttttatttatataaatatgtatttttaatccatctttaacgtggagagaaattatgtgggaaaagaattacttgtcagagaacttcgatggaaggttggtaatggggatgaaattttttgcgccagagacccttggctgccaggtttcacctcttttacacctctagtttttcaaggtgatgacaaaactctaaaggtttcggctttactctcggacaatcgtcaatagaacttgtccatgttaaagtctttatttttagactctgctgtcaacaaaatactcagtatttctcttactcttgatgaacaacaagacacccttatgtggtatcatgaatctaatggtatgtatacagttaaatctggttattgtctggctatgcagttaaaagaccaatctccatcagctagtggcattcttgcccaacaatagtggaaaaaattctgggagctgtccttaccctcaaagattcgaatttttctttggcgtgccatccatgactgccttcttgttgttgaaattcttcacaccatgcatataaatgactctacaacctgttctatttgcaactgttacaaagagacaatcattcatgctctcttccttcgtaaacgggttcaacaagtttggaatcactccacttttagtcttgaaggtttgtcttttaacaataggagcttgaaagaaattgtaacaccctaactatcttaggcg

SEQ ID NO: 396149 - DNA, 508 bp, Cannabis indica
atatcccaacaatcccccatcaaacctaggaccactactacgtggtctacccttgacgtgaaactataccttgtactaccactactaccaacgaaactcactgcctgaccatcaacattgtcaaagagactttcgatactaggtactaaacacagatctccatctcatactattctaatcaccaacaagacacaccacctgaccactacaatatcatgtaaagtttggatataaagtaccatacaattcttcaatcacaagatcacattgagggcttctttcacacaaaagcaaatgcagcccattatcccaacttctgaacctttagccttcataccacttgttaggccccgttcatccatcttgttgggtcacaagctcaccttaactcccacattagtatactattgtccgctttgagcctattctacatggatttgtttttgggtacctccccaaacgacctcatactaatttagtcagtggaacatttatattcaaggcaatt

SEQ ID NO: 396150 - DNA, 1175 bp, Cannabis indica
ctgattacgtacaaaccaccagaaaagatggacgaagcatttgcttcgcccaccattcctacaactttcgcttggaactctttataatattccaattgcttatttagtgatagtgatagctacaaaatatttcaatatgtaaatatataattaatcgtagttaaaatattattaaattaataatatttttaatttagagtttattcttacatataaattggctgttgagtcatcataacccgaaccagctgaagcaaaattggctcccatcaaaagatttgtgcctgtggcctctttacttagataggcaaccggagaagaattgaaccctaaattattaactgcacatatataacaccataaaatttaaaaaaaaaaattcaaataattttaaatactgaaaacaaagtttaaatagtcaattacatgcacgcgtataactttatattattttaaattttatatccaataccataaattataaatttaagaataattttttaatatctaaaataattactagttatcgatagatcatatatatcgaagttacatacctagaaaatctatggctaatttcccgttagagaatctccctgtgggattgtggccgtcgaaatctcttccgtagggtgggaaatttgatttgataagcgttggtaaaatgttattatttccgacgtctagtgtagagtcgccgaacaagattactgcggggactagggcacaccggcaaccattgatgaacaagaatataattaataataatggtaatgataaatacattgaaagatcatcgcgaccattcataacgaaagccatttaattatatatgatgtttatatgtatgtataaagctgtatatttcgatgagatatataactcttagttgtagctagcaataaagatcgattaatatggtaatgctacataaggtttaggcatgcatttatatacatccatggtcatgaattagcatgatcaccatctttgagttttcttgtagtttatttttattgctatctcaatgatcaatatttatataatgcataccaatattgacatttagaggctgttttttcactcccacttataaaaagggaagctaaagggtgtgaaaatacccgtttttttcgaaattgacatttagaggcagttttttgataaaaaccgta

SEQ ID NO: 396151 - DNA, 922 bp, Cannabis indica
aaaaaaaaaaaaaaaacattgtcctattgcgtacggtctatcacatccccaaatcaatcacatttgttacatcaaattaaactcacacattctttattccattttattttatcaagttaacaataacatctctcattttcgttgaattaatttaactcaatgaaaaaggaaataaaaaagagaatatcagaatgtattttcatgagttggaacccaacaactagattgatatattattgataagaatgaaaatttagcttttcgggcttgcttggctacaaattctgttacattgtactacggatcaatccgtcatgtaaaaagattagacgttgggcctttttgtagaggaataccttttactgactagctatagctataagcctttgcagcttgcggtgtttaaaaggaccacttttgaatttgattagtgttgtaaatacgggttggactttttgacacggcacgagcctaaaaggcacgaatatcattaggcacgaatatgattaggcacgaaaaaatatgagtttaggtatgacacaacaaaatactatgaattggcacgacatggcacgaaaaatatgtacttaaccacgatacgacaaaagaagcacaaaagacacgacatgtaaacacgaataaactaatccaaaaagtacgtaatgtgacaagcccaagaaatacgacaatacatattaaaaaatcttacaatttagagtaatttgcggtaaaaatacttaagttttattccgagtaccagataaatacctaagtcgtattttttgcggtaaaaataccttctgtcacacttctggaacttccgtaggtacctctccgttttcttccaagtaagtgtccacgtgtcatccttttattagtccacatcattaattttatttttcattaaacttatttaaaaatc

SEQ ID NO: 396152 - DNA, 653 bp, Cannabis indica
ttaataatcataagaaatacattgacaagcttgaaatgacaaaaacaccactcacactacacaaaagaacaacacttttatgaattataggggcccatagaacttgaatacccgttaccaaaaatccctgcaataataataataatagagtctcatacaatatgaatacacgttacaaaaaattcgtgaaataataataataataataataataataataataataggattagagaaacattttccatgtaatctaccctaaaccccttggtaaactctttccaaaaaaaaaaaaaaaccctttggtaaacactaaatatgtataaattagagtattgttattgaatactagtggtgcttaggagtgggcataaattgatccaatccaatgacaaccgaccgccaaatattaaatattcaattctgatcggatcggatcgcatgttatttttgaatatccaattggatcggattggatgttggatgggtatccaaaaagggaaatttgattttctatacttaaaaattttcaaaatttcttttttgaaccaatacattttacactatgaaaaatatgactcttttttcaaaactccaaaaatacccccctctatctactttgtctctctctctctctctctctctctcgtacg

SEQ ID NO: 396153 - DNA, 534 bp, Cannabis indica
attatgtaaatactttgtgcttattactactgtcttagtatttgtcatttgtcatctaagctgtgtttagttacatctgacctctttagatctgtatttgttgccatgtcagctattgggtatttgtcagcttgtgccagttgtcctttgctggtttgttacttaatcgatttatttctctatcttcaggatacatatatattctgtggttttagttttctaacgaactctcttctgttagaatcgtcttcttgattcttgctctgctagggcaaaatattcgtttgtttcttatttggtttatatgcagatggaaatttcaagagtcttcaagaggttgaagaggggagttcagagtaaactgttggaggttcttcagctgtgtgaatgcaaggtgttcttgtgttcttagatctaaatgagtttagatctcaaaagttgagtatgttcaagtgttaggtaacattgtgtaaaagtcatttcagattacattgtttgatttgtaaaatcagaactggtgtttgtaattgattt

SEQ ID NO: 396154 - DNA, 809 bp, Cannabis indica
caatgattgttttatgtattaaatcatgctgaccagacttgatatctaccaaatcatgccccttaaaatttgatgtgtactaaatcatgcccctgaactttcatccatgttagaatttttttttactaaaattagacaaaagttcttaaatttaacaatctcaatagttcaggggaatttttaacggcaaaaaaagtttaggggacataatttagtacatgtcaaaattcagggtgaaaaaattctaagtagccatttgttttgtgaaatttctctcaatttttaaattataaaattaaaattgtaatggttaaccaagatatttttatcataaaactaattataatataaaattagtaaaagattaattttttttttgtagtctaagtcaagggtgattggtgatatttatgtgttttaaattgaagaaaacaatttactcaaataaaaagcactttttgcttatgatggggtcatagccatatagaatgaaagagtaagagcattattttccgtcaattcggccgtgtcaacagcttaactcaaaatattctcaatcatatataaattatttatttatttaaataaaataaaataaaaggttaaatttcaaacaattaattataccatttaattgagtggtctttctagcgtgatgcactagttcaaataataaagggttgaaatgagtcgttcctcaaaagtcatccaccacaaagtataaaacatagggccatattaatttttttgggaaattctataatacaccagatacatctctatctattttagtatacgaaataattttt

SEQ ID NO: 396155 - DNA, 933 bp, Cannabis indica
cctccttcatggacagcgcctcaacaacaacagagtcaatatctcctcggtgtttgacagctgtcgcagcaacacacagctcagcatgatccgtggcaatacaactatacccattaattgttgccaatgccatagtgtgaaacttctggctggccataatacacgttgcatgcgattttttgggtaggttatttcttttatggacttgaattttattttaactttttttttaatatgaattattttatttttctttgtggaaaataaaaaaataaaacaaatatttatcttatacttaattagagtctttcttcatgtgagatagagatagtgggaaatagtttaatcttttacttatacatgttttaagtattatattattctacaataatattggaaaattctataacacacacctttaaaagggatactgatatatctttatttgtattagtattcgaaataattttttagtcaaattttttttatagactgtttgaatattattttctatattgtaaattattctgaatttctcaaaaaattttaagatatcttaaatagctataacgtacataaatatgaaaaaaaaatagattaaaaaattcttctaaatgccgaaacaagtaaagggtgcatcagtacatcccttttaaaaggatgcattgtagaatcaccctataatatttggttgattagttgtattataaaattatttaatttagtaggaaatgttataaaaatatttattacaaataacattatttaatatagtgggaaaatgctatattatttatatatataatataatattggaaaaaagtccttaaatccaacaatctcaatagtttaggggacatttttaacgactttaaaagtttaaagagcatgatttggtacatgtcaaagttcaggggcaattaatctaattag

SEQ ID NO: 396156 - DNA, 529 bp, Cannabis indica
tgcccctaaaaactgggataaaaggcttatttttgtaatagtgtaagattttctcctcacataaccaatctaacattggtgagaaattgagctcaacaaatagttcaaaacaagaaatccataaacacaacttaccatacaataagaaaatcaacatagcacaataatcttcaaaccttggaacccaaaaattcaaagctcaaatccagaaattcaaagtgttatcacaaaaaataaacaccaaaacccaatccaaagattcccaaaacttcaaggatgattctagcataaatactatcacacaaccatagcaaaatgatcacaattcacattatttctactaacatacaaacaccacacttaagcatacaaagaacaccaccaataagcttaaatctaaaaattcaatataagcaaaagagatcaaagatagtgtttgaaatacactaaaattcaaagctttttcccaagaattatgtttgaaaatataaaatagagagtagagagagagtagagagagagagagaga

SEQ ID NO: 396157 - DNA, 717 bp, Cannabis indica
ctttcttttttttaaaaaaaaaaatttgtcttgatctggtctagtttgaatttctatttgaattttttggatctctatgttgtggattggattttcaaaatatataccatatttgaaattgcacttaaggttactaattaggcaaactatacatatgaaatctcataaaatttgattaaagcatactaaatttaactggtagtagtaccaactattaataaaaatattatgttgtattcaacaacttctataaatttgactctcgtttcttcatgattatttctgaatttcttgtagtattattaccattaattataagtcaagccatcattctgattgtttattttaattataaccggaagttaatgtgtattgtatgtttatacttattttattgttgagtcgtgatttttttttttattagatttggtttctgagttatttttaaattagaaccggatatgagttattgtgttttttgtatgtttttattcattttgttgtggaactggttatatgtaatttatgtatcaatattttttaaaattgattcctccctccccatttttttaaggctaattaggatttttgccccctaaactttgacatgtaccaattcttgccttctgaacttttaaggtcgttgaaaatgccccctaaactattgagattgatggatttaaggactttttttcaaatttagtaaaaaagtctaac

SEQ ID NO: 396158 - DNA, 862 bp, Cannabis indica
aaaaaagtaattaaatgaaaatgggaaagagtaataagtgggatggggaggcgtggggggtaaaaaggagaaggcccagtgggccaggtggggtggaggcccagaaagagcccatcccgagttgcgtcaaaaaggtgatggtggtgtgtgtgtgtgggacgacgaaatctatagagaagaattgtgtgggtccctcaaatctatcagctgagctgtcttttttttactcaaaatccattccatccatctctatctattattatttatttatttatttattactatgattgatgtgagagagagaaagatatttgagtgtgagaaatatatatatatagagagagagaaaccaagtgatattgtactcatcaatcatgaccccacatattaggagagagaaacaaaagaaagaacgtacgaaatttataaaaccccacacactttcatgattcatatgtttctctctctattatctattatgtatgtaaatgtaataaaaaatgctaatcaattctatatcgtatataatttaatgtaataatttttaatgagtttctacatgttaatattgattttgatttaatcaagtatcttatttcatataatttaatgtaataatttttagggagtatcactatcaatcgcaaaattacatatctaaaaaatactactcaccgctggtacttaataacactgctcaaatgtaatttaacttccttgcaccacccaccacctacccactcaagtattttttttttcacttctattatttattctcattgcaatttatattacactaaaattttaaaaaaaattaaactattaaattttaattcaataacattgttcaaaaaaaaaaaaa

SEQ ID NO: 396159 - DNA, 930 bp, Cannabis indica
tctctctctctctctctctctctctctctctctctctctattgttcacaccccccactatagcacctctcaacacttgagattggccttcttttgaaacctactttgtaaccttaagatattgatatcagatcctacctatagtgatctgaattgtattatctcttagtatcaatacaactaaaaggggagtacgtcattacccgccaactaagggagtcgaacctctataaaattctttgtgttccttattttgaagttctaattgtgtaacacgtggcaaacatcagatttaaacaatctcgctgttggttggccactttttgaggtcaacagtttggtgctttcatcgagagcaagtcaatatcatatctgatcaaacgccatggttaacataagaagaaccctgattgcaccatctgcatcttcaagtcttcctcaagacccacaaactgcagatcctgatgtccatgttccaaccacaattgaaattcccatgaacactgcagatgtgatcaatcctactaccacgacaggtattttgaatttggccactacagctgcccagagtgatataaacatctcggtagatctaaacaacaagcccttgcctccaagggaggctccaagggaggaccccccattggcgcctcccactgaaggaaggacccttggggagcagcccccaagaacaacaatcggatctcgtctccggtactacactggagaaacaggacaaggaattggcgagccacatgtggacttgggagaagatctcgagttagccagacttagaaaagtcgtcagccaagctggcttaacttgttatagtgagatttctctcacctagaaactcgagaccagacccccactaagaggacacgtatactcagattttccacagaaagctgagatgtccctgagggactcc

SEQ ID NO: 396160 - DNA, 629 bp, Cannabis indica
gatcttcatgacaacaaggctaactttataaaaaaattataaagtaaaaaagaaatgcaaaataattaaataaagagagattattcaaccatatattataaacttttaacaagcaacaatactatatggttattatatataatttacacaatatataattttaactaattatttttatttaagataaatttcacttatcaaaaataatttacgtactataagaatatgtgtatttatgtgtaaattatgtgtaaatatcattattaaaaaaatacatattgtatatggttattatcggtttttaattaattattttctttttgaattgctctgatctaccaatctggtgtaatctcaacgttaataaaaatactaattgtatccaatttatactgacttgtttaattatccaaacttattatgtaattattagtaattatataacctagtaattacagcactattttaaaatatggagaatgatagcatcaaattgtaaatacatataaatttttgttgctatgtttgataaaaaaaaaaagtaaatagtaattatgccgaaaaaaagaatttttaataatattcttttttatatatatttgatttataattttacgacttaaaatttt

SEQ ID NO: 396161 - DNA, 1077 bp, Cannabis indica
agagagagagagagaagaggtgtaaaccctagttcgaagcttcaacttcaagatccagagagaggaggtccaaacagagagtaatactctcgtggtgaggagtttcgaagaggaggaagtacatgcacaaagaaaaacaaagttagatcaagctattaaagagagaaacaaaaacaaagctgtaaaatttgaagaaaccgagtcctacttggtcaattttgtggcaggaagctccagaaagttgtaaatcaccattgttgatagtggatatcaagctatagatctctgagatgagcttgacagagacgtaggcctaattttttggggtgaactctgaaatatttttggtgttttctctcctatattctttcttgttttcattaatctaacttgttttgtgagtgaaagtgaagatcctagggtttctacttaggatcgatcgagcaagttcttgagaagaacttgttctgctagggtttcgagaagtagagcttcagtgttgtatttgattcttagggtttctaattttttccttaaaagtcttttaaccgaggatattaaacgacactaagatttttgtcgtgtggattaaagcattgctgtttttgtctaaattcatttaggctaagaaaaggtcaattctgaccttaaacactgataattaatatttttgttggtgtgggttaaaacaataaaatcctacagaaagtgattataattttttgtttaaactaaaagaaattatgtttggtccaaacaaaatctataaatgaaaataaacaatcttctaacgaactttccaagtccaagtctatgtcatttcctgtgcagtttcttatagtcgatcttaatatatatatatctaataagaccaatggcgaaagcaagagcaagggaaggtgacaatactgcgtaggtacccgtaacaaatgctatcaccattaatcccatagccaccatcgctaaaaccatagacacaatatagcatgacacagtaagtcttcactaactagtatatgttttgttgatgagaaaatatttacagttatgtataagtgatgatgagaaaaaaaatta

SEQ ID NO: 396162 - DNA, 552 bp, Cannabis indica
taactatcacacaatcaagaatctcatcattaacaaaattattttccacaagatcatgcataagacaatcaaagtaaaaataatatatcaaacatgagcaatcattgtcaatagaatttcattcaacccacactcactaaaattaaagtaagaaaaattaataataaactaaaaaaaaagaataaaaaaaaacaactaagaaaaaaaaactaagatagacacaacaattgatctccccttgcacttaatataagcattgttcttaaggctcagtcaaataaaattaatgcaaaataaaaagaaaagggcaagaaaaattctcgtaagttcgctttgttcaatgttgttagctcgactttgacaatacctctggtgctgatgttggattatcaaatttaaatacattgaaatttatttgatcaccatcaaatttcatcgttaatgttcctcacttgacatccaatttcatactcgttgtactcataaatggtctatcaaacaataccagtattgtgcatggaatagagtcatcttccatgtctagaacataaa

SEQ ID NO: 396163 - DNA, 901 bp, Cannabis indica
ttaataaatataaaaaacaatggaatcgaactctcactatcaaaattcaagcctaaacacaaaaaattaacttaaaatcaaacaaatttccttaatctcaaacataatcaacaaaaccaccacaaaattccaatacaaaacctaaatattagaagaatcactcaaaaacaaaaaaaaaataataatacaaactaaccagaaactgtgagaattgtggatgggtggcaatgggtcgtcatggggatgtcgtgggtcatcatggggatgtcgtgggtcgtcatgggtcgtcttaggtgcttctcgtgggtcttcttggttgtgggtcgtcgttgtcctgagcaacagtctgagcttgcaagatgagagagggtcggggatttgatgcttctcattttgatgttgggaattttggggttaagagagaaaggggggagttagacataaagagtgggagaagatgttttgaattgtaagggtaattttgggtttaagggtatttgaagaatatttaatatatttatttaaaggtggtatactaagagaatggtctaaatttttaagtatgctttaataaatttctttgaaataaatagatatcattgtgcttctcgaccaatttgataatttgttaaaaaaattaagagtattaaatttttttttaccttttaaaaaaacataataattctttttttttttatagaatcgtaattctttttgaataaaagtaaagtaatgaataagagtcatttttctttttttatttgatcgaagcataattttataagtgtaactaaattaggtcttaaaatcattacaaataatattattattattagaaattatagtaaatgacccaaaaatatactaatatatagaggtattggaccacatccaatatttt

SEQ ID NO: 396164 - DNA, 875 bp, Cannabis indica
tcttcttttccaatcaaattttgtcgaaatttgtggttgttctacactcgatctggtttcattctggttgcgtagcagattggatcgatggaggtttcttcatcatctccgttcgtgacgtgtggcttaatgtatagaccaagttgtatttttgtaattttttcaatgtgggatgtataaatgttgattgggccagcccatagtaatattgtaatattttaccctttttggaattttcctgtttttttccctttggactttaagttttgttgttataaaagtattctagaaaagttaataatggaaataataataaaaaaaaatattctatagaagtatacggatctcaattattaaatttagaattcttagtcatgcaaaaaaaaaaaaattagaattctaagttaataaaattttctatgtatatatctttaaattttaaagatatttgtatatattgtttgaaaatactaatttattataaaaaaaacttaagtgctttaataaatttaattaacaattctatataagaaatatatatatatttattaatataataaatttaattgataattctatataagtatacatatttatttattatattaggatatagaaaagccaccattcataacctcttaaactagacatgtacattaatattattaaacaccaatatccatccgtatatatttttttttataaataatatttttcaaatttactttttattgttattgttattagattttattttattatttcaacacatgataaaatatttttttaacagatatttggattaataaaatatatttaacatttttattatattaaaaatattcttgttttagttttaaatccacggatttcat

SEQ ID NO: 396165 - DNA, 801 bp, Cannabis indica
actgtgtttcttaatgtcaattccattttatgggactgatttttttcttttattatgttaatgcattaaatttaggtggcgtttggtttggtttagtaaaggaaaatgataatgataatagtaatggtaatgataatagaaataataatgagaatgatattatggtgttttgtttatttttggaacctaatagaaatgagtggtgtattggcaaaaatatcctttaaattcttagatggattttatataaattgtgtattaattgtgattatgtaggtaaagagttgtaatccttattcatttaaatgatgtattgtaatggtgattctgattacaattatgtcaaatcaaacatgacctcaagagaagtgtttaaagttttggttaaattagaaatgcttttgtaatcttaaatgcttcttaattttgattagtatgtttccatgatttgtatgatattataggcaaagaaaagaagtgtttaaagtgagtgttttgtaaaaatatccttcatgaaatttttaattagcaaaataattctacaaaaaaaatttattagtaaaataaatttgtatgatagtaaaagcaatcaatcaattacattgtgccactataaacaactataaatttacactgtacaactatcattatggttgcatacactacaaaaaccagttacaactttttagtcatgacataaattttttgtgacgaatatgacttttagtcacaacaaaaaagttacttttgactaaaacatataatatttagatacaaattgttactaatttagttttagtc

SEQ ID NO: 396166 - DNA, 1096 bp, Cannabis indica
cagtaggcgacactcgagagccccagcagcaagccactgtgatgggctctaccccttaacaaaaatttaatttaatatcgtgtgagtcattgactcacatatcagatattaaactgataagaacagatactacacttgatcttagaccaaaaggccgagaaaggtatgaattgttcactgttcttcttcttcttttatgactacctttgtcttctttcattttgttacgccatccatgtaggactaactaaaaaaaaaaaaaaaacactgctgctaaagagtgagttgtgtatgtcagtgtatggtgtaatttgactaggaattatttctcaaaatccccaataaacacaatcacttcatttaaaattgtttagtttctgaaaactaatgttttatgagagattaaccaaatgaatataaaaactggaaagcttagtctgacatgcttgcatactaacatgttactcttggatcttgattcaaagtgaaccagagaaaatgatgatttactaagatttgaaaacaaattgtgtcttgttactccagaaaattcagtatcgccgggttggtggttctttagagcgagaagaggaagagagcgccgaaagcttagcctagcctaaatatattggtaccatttggttctgttttgctgcttaattaaatcaccaaatgaagtctcaataataatatttgggatggccaatcaatattattgtgtgaatcttttctagttaacaaggaaagtaaataaaaaattagcagtaacaaccagccatatatgcaagaacaatttcattgttacattttgaatatatgacatcttttacatgaatgtacctaaagctaaaagatggacaagactgtattttgctagccagcttatttacaaaactattaggaaatataagattgatcttattgatggagtattataagatacttgtgtgttatgaatacaagagaaaaacaatatctaaatataaccaactaactagttgctacaacaaagctaactaacaccttaaactataattcctaatatgacccctcaagatgaaaaatgtactgaatagaggtgtaagaagatcctagt

SEQ ID NO: 396167 - DNA, 890 bp, Cannabis indica
tataaattttacaaatcatatatatatataaataatgggggacaattttttttagattaaattgattaatcccatcaaataaagtatttactcaattactaaaattatattaaattattattattattattattaaataaatcttttatttgaaaaagtaataaatttcagattgtgtaaaccagtattggacactaagattgattctttaaatttgtacgtacaaagacgaatgttacacaaagaataacaaataaagttttacaatgtataatctttctaaatctttatatatctaaaatttcatgtaaaagaaaaaatatattatgaagaataaattccacaaagatatatccaactcaacaaaatgctcaatatttctcttcactatataaaattatataatattgttttaaagattctacttaaaagtgaaagttactaaaaaaaaacagatgtagtaaataaccaattttgttaccaacggttgtactaccgacgctactattagtgcataaccaacattattaatactactatgaaggtagacattattaataggaggtgttagataatatgagagttttactatgatgactgagacactacctacactaatggctctcagttcatttacggaaacaatttagactttagaaatctactgtaaaattatagactacttatcagttatgttcataacaactgtaaaaggtaagttaatgttttgtgggctaattgcaatatatattcaataaaaccagttcttgtaagtaatattatccaatcaagaatatatatttgttaactatttcgaaccaattatggaattttgataaaattttactaaataactataggtgcgtttgaaagtaactgtgtaattacta

SEQ ID NO: 396168 - DNA, 606 bp, Cannabis indica
atatttattactaatttaatattttgatcaagtgtagagttaagtattgtgattttgttattgggttccaatagtacttaaaactttttatagatgacacgttataattggttaatgattttttaaaaactatttttttaaattatgtgagatctgatacttaattacatcaatagtaatatgacaccaaagaaagtactaagtactaatagtatttttttaacaattctctttaggaatctatacccaagtgggatgggattataataaccaattctcacttgccacatattataatgacactattttcaataacattaatatgatattaatttttggcttatctatatttctttaattaaaaaataatccatttattaaaatttgaacataatacaattatatttataattggtctctcgtggaatgcactagtctagcctagttgcatgattttttgttcttttggtactactttaactaagggaggtataaaaggaaatttgtggttattattattttatcatattatttactattattgcttgtatattatatatttgctattattatttctataatatagaatatatatataaaaaaaaa

SEQ ID NO: 396169 - DNA, 675 bp, Cannabis indica
cataatctaacacattcatattttatttataaattaattttcataattaatattcagttagcttgatctattaaaaagctaattgagcatctcaacactattaaaaagctaatattgaacaaggaacctagtttgcaaatatttttttttttcaagaaatttagtcttgcaaatgttgttacttactgttttgattcttcaactttctcagaaaatggatcatatgacaataatactattttacaatagattttgggaagagaatatcaattatagaaactatgaagtggcagacatattacatcaaaggaatttcttttatggaactcttgttgacacaatctgtaaaagtttggaactggacaaaaacacatgaacttattgtttaatttcaagtaaaaacaggaataccacctataaagattatcttggattatattttaccaggatctaaatttactaacaagtattttttaacatcttagatatgaacttctaaaacgataaaaattaaacacatataaagtatgagaaatcttacattggttgcagcggaattaaatgactcattccgctcaaatctctaacccttgtacctttctgtcgcgaagtataatcaagatctgagcccgacactccttcagttgtttggattcttcacagtcttacacacta

SEQ ID NO: 396170 - DNA, 883 bp, Cannabis indica
aaatattattgcattttttatttgtacagtttaacaattacaataaaatattatttgtaatttttttaaagatttttttcaggtgacaaatgctaaaatgcacgctagtcctcgttaatctattgaacaattatgtagtttatatatttaaattaattttaaatttaaatatacttaattattaatattttttgcgtattttcataaatgatttggtgattatttttttaaaaaaattattaaaagatattaatagtaatattataatattattagtataatttaatattaaattttataaatattaactaatataaataatcgttaaccgctaaccacttataatctcataatgatttgagtaatattgatacttatatttgaccagatagtcaatctggtatataaggagactattgagattatgggaaaggattaccttattaagcaataatggaaaggcatactcacccagattgggggaaagacttataaattgagatgcaatttaatggatatgtattcgagtgattggtgaatgttgggtcacaaagtaggttatttattaaacaatggactacatatttaaggataaaatgagttttagaatgattagccaagtatgaagacagtgatgattgctaggaagcaatagtagcgtacgaatcatggagtaaaacctttgtggtaataacaggaaaagaatataagagtcttagatattaatgaatcaacaccatcgacgagagactcactacaagttggagtggtagttcataccaagggattatcaatgaagcaaagaatatacttgaggtatttctaggtgtgttaaaaggagaattttaggatttctacctaacacagatacgaagctttgaga

SEQ ID NO: 396171 - DNA, 588 bp, Cannabis indica
gattcttcatcttgccccaatgctcttcttgccaggttgtgcgctctgcaattaatagttctgtttatgtgccgcagacgaacatcagggaaagcagataaagaacatcttatatcttcgacaacatctgagagtgctgaaagatcggctttcttattgtggactttgtcaaccagcaattttgagtccgtctcaaccactgctataggtatgtgaatgttgatgcaccactctaaactggcccggaaagacaaagcctcagccattataggctgcaagttcccaaccacaggtgcagaaaaaccagctaccaaattaccttgccagtcgtgaacaacagctccaagacccatcttactttgtgtcgtgtgaatcgctgcatctgttcggagtaggtactaattttggggaacaactttttccccctgcccgaaacctgcaatttgtgaactccacaacatctgttggtattagacatggctgcttggtaatctgaaatgaatgtatcaatccaagcaataacatcagtaggggtcaaatccaaatttgcaaataactttttgtttcttgagtgccaaatagcccata

SEQ ID NO: 396172 - DNA, 727 bp, Cannabis indica
  modified_base (204)..(204): a, c, t, g, unknown or other
aaaattctgggtccgtcactgaatagatatatatatgagggtaacgttatagacttatagtatatagattataaataacgtattttttcattcactttaatatgatggtttatgggtcattacaagaaaaataatctcctggcacgacaaaaaaaggactaactctagacacactatttacaacttatttctatatcatttacntatatatatatacataattgaatttcatataaaagcaattgaatatataagtataaattaatgttataacgtatgttacatgtgttaattatatataattaattagtaccatgccatttagttttggaaagtaattataattttacatagtttaaacgttgatcacaagtcaattttattgactaaacaatttttctttttagaaatttacaagttttttattaattaataacatgatttacatgaagaaaaaaattgctagcatgcatggaaaaaacgcattacatgtatgaaacatgtggacagcataaatggtgaggcctaaatagctaaatagtagtgttggtttgattcatattttgaaaagtatgtaataatatgagttttattgtactgactcataaaaagatatgaatcatgttaggttatatatgccaatattttgtgacagtcagtagtcccgtgatccgtaaaagaaaacaccgggtaagttgtacaatcccacaccgcctggggaaggtca

SEQ ID NO: 396173 - DNA, 865 bp, Cannabis indica
acactttcgaatcaagtatctagtcactatacttttacaaaaacatgtgtattatttcattcaactatatatattaattggggaccgatctcatttacataattatataactatatatagatatatattttacaagaatctaagaaaacttatagaagaggtaaaatagctaatgttaaaaaagtttagctaagaagtaaaaaataatgaaaaataatgctctatatcaattgagttattatagctcaaagatttaactcataaatagtacttattaactatatgtatgtgtgtaatgttattatatttatttatttattaaaaaaatgaataaaatatatttaaaggaaatagtttttaaataatattaaaaaaatatagagaagttgaaacgtatgaggttaaatagaaaaaataaacttttaataatgtattataataaataatagaatagaatagagaagatgatgtgagtgttcatagcccccagcttttgaaatattgattggcaaagtcttgcatcataatattttcaaagttacaaaattacatccaaatataatttatttttctctacttctatatctaataccactaaaatttgtgactaaaaaaagtagtacattattataaatataaaatttgtgatataagtaacttttatttaattatatgaactaaatgtaatatttaatgaccaaagaaaataatgttctgagaccatagccaatccattgtaaagaaaaattgtttttttttcttcttgaaaaatttgtaattaagataagttatatatatgggtgcactcttaatgggtattatctatgaaaaggtaaaattaaaaaaattttgagtttttatgctt

SEQ ID NO: 396174 - DNA, 695 bp, Cannabis indica
ttttttaaataagggttttttttctcttcaacttgagtgatctattcaccatatgcgaggatcaaggaattggggccaactcttctatttagcaattcacatctttactcaccaatataattttctcattgttgctattattgattatattttaagtgaactcattcccattaactttattttggatgcttttttatgttatttttatgttttgcaagttttgatatatcacaatatgcaagagccaccacgagaagattaattcatgtccaattcctttagattcaactagagaaatacttatagattattatgagaatgtgtttagtcacatgaggaggtttaaattgatttctattcattatcaatattttaagaaattattaatatatatggttttttataaatttgttgcctactattttaaaagttttggtattattttttctgtttataattatatggtgagttttatttaattttttttaatagatttctattttggggtactatattctcacaactctttccgtctataattatatggtgagctttatttaattttatcaattatttttgtagatttctattttgatttagtcttttattactctatgttatttcacaactcttctttctctttttgttttgagattttttctataataaaccaaaaatagatgaaatttacattt

SEQ ID NO: 396175 - DNA, 966 bp, Cannabis indica
agatggatttactgtgtttcacataacgagtagtgagcttgaggaccaagaccctatatttatataagtgagatattccatcaaagtttctaccacgattaattgtcagaatattttgataattaattcagaaaattaaattgggtaactgaaatatttgataattaagtctaacgataattagaatattttaattaattagtaaataattaattatatattataaatcaaatcaaataaaatatttgatttgttgcagtatttatttaagtaaaataaataaattaaaatcagttaacatatatataaaaaaaaatgtatattcaagtttttataataattatttttttttgacgtgttataattattatttttatcataggtatttatgaaaatatccaaatatttaagagaacctttaaaaagatcaaataaagaatataaaacccaaacttttatcaaatatcatttcaaacaatccatgcatatcttctttgggctgaatgggcttctcattttaggctttctttcatttttcaaaaatgccaaatttcatagtttaatgggcttaagttttgttacattatttacaccacatactaaaatttctaacttttttatttttttaatgtagagcagaatttttgtcaaaaatactgtataaatttatactgtgtacaatgttaaattttcaatgttattttacggttattttttagttgtttcacttttatttgtagatgttctctttgcgttccacttttgttttataaaaatataatatttttgaaaaaattcgcatatgataatatttttataaaaattaaaccaaattccagtatttttataagtttctcctgtttataataatatatattttttaatccattattactattattagtatgtcaagtcagccaaatatgacatttttctagtttttttttttttatttattttttctac

SEQ ID NO: 396176 - DNA, 609 bp, Cannabis indica
gaagaacgataaataacttgcttatttttttttttttatttccatgagacaagggaactgccgaggaataaacaatagggagatatggagtgtcgtgtgtcttgacagccaccctagtctacatcaagaaaaaaaaaaaaaagaaatttgaacatttgatggggaaaggctggtttcagcatatgctgtcagctttggagatgcgttcgaggggaaaaacaagccttgtccgggtgtactcttgaggtattggaggagtctgtgagtagcatgaagatgtgggactctggggcaagttaagaactgacttaaataattgacaacatatgttatgttagatcttgtgattgtgaggtaaataagtttaccaatcaagctacgaaaaatggtaggatcagcaagtaagtcccctttgtctttacttaattttatgtttatttccataggggtagaagtaggtttggctcctaagtaccctgtatcagctaaaagctgaagagtgaagggtctttgggagattgatatcccttgttttgtccggccaatctcaagaccaagaaaaaaataaagtacaccgatgtcttttagtttgaattgagcatctaagtg

SEQ ID NO: 396177 - DNA, 864 bp, Cannabis indica
cattatacgttattagatcaaaattcgatagtttgatatttttaaaattaatatttatagttaaacttgtttagtaaccattcatgggtaatagtcattaagaagtgttccatatatatattgttatgtattagatgctattgtcaccaaaaaaaaacataaaatgaagtgcttaaaaaatataattttaaaagaactatatctttagttgttaatttcttataaataattttataaaaaaaaaatctcttgtaaataatttttaaaagcattttcaatagagagctaaatatagtgtattataatttttttttttgaatattttgttaaaatttaacttcaaaattgatgtaaagtgcgtgccaaatttagctcaagctaaaaattgtgtcaaatttgatataaaagatagcaaatgataaattttatcccacaataaatattatattttttaattatttctctaccacttataaatactattcactaattttcaataagatttatttgtaatatattaaaataatataaataaaattaattgatttgtatatttttaatgagtattaatgttaatattgatttttatagttaatttgtactatgtgtattggagcctgaatataaaaattgggtcaaatataattttatggtatattttaaattaaatattttaatctaaaatataggtcatgaattagaaatggtctaaaatctaatagtatattgtcgacatattaaaaagaggaaattacacttagtatgggattttaaaagttcttatgataaatatggcacatttaagtttggccaatttatatggtatttttttgtttttaggtttttgtatggtatttgatatgc

SEQ ID NO: 396178 - DNA, 568 bp, Cannabis indica
ataactctctctctctctctctctctcgtcctagtttcacatatctgataatttctaccttaaaaaaaaaaattaatgggtaattttagtacaaataaggtttgtttcggtacctaagccactgagctaaagaaaagatgggaaaaagggtggagtataagatccaattcacgactcttactcacattagtttttcttattttattttttaaaatatctcattacaattttattttctttaactttcagacttttatattatattatacaccattttttttttattatttgtatctgtatcattaaaatgatatatttttaatacattaataataataatatatgttaataaaatattatattatacattataattaattataaaaagttattaaaaccatagtaataaagctaataaaaaattagggaattatttcatatacagtttaggttgctttagtggttgatgtgtaggttgtcatattaaatttaggttactccatatatttttgtataaatgcaaaaaaaaaaaaaaaaaaaaaaacgaaaaaaaaagaaaaaaaataaa

SEQ ID NO: 396179 - DNA, 1482 bp, Cannabis indica
ttctaatttgtggtcaactaaatattatttcatcttaaacaaaatcaactgcaatattactatgacatgagaattttttttaatggagattagcattgttgattcaaaatttaaattagacttctacgctatattcatttgttagattggcgtgatagcattggggctatatttacttcaaatttttatttcttataaaatggtaattacatcaattgtttaagtatcagaagctttgaattctagagagagaagttttgactttgtgggtagttttttgaatgtgaaaaatgagttaagggagtttttcttttatagatgaacgaggcccacaaaaataaagaaaaaaaaataacaagtaaagtgttttccactgttgatgatgatttaacggtaaaaattaacttctggtggtgatagcttatttttggtgcatgacagaacccgttgcgagttacccagagcttatttttataactcccttaggagtaaattttgatgacgataatttcaaaatttcgactagggtgtgagacatgacttgatggagcacttaaataacttcagaatgcaagttaaattgcatcaatcggataaaattgagtgagttatgaccgttatactgaaggcagttcaggtcccagcgcccaagttgacatccaacgcccaggttgaaatctcagtgcccaggtagatgacatcaacttggacgatgtataagtgtaaaaacgtccaagggaagtactttgagatgcctaagtggtcgtttgacaccctttagtccttttataggctttgatgaagctggtcacacgttcttagagatgttgttgttttgcaaaaacgaaacttaaaactttcgatttctgtgtgagtcaatttgccaaaaattgaagttgtgcaattgatttatctgacttcatggatcattgcacttgtgaaaaatttgatggacggtcgaaacgacatcagattcgaacaagcagaacccagcaaactaggtcatttgttgacatgggcgttagggccttttaactgagcattcaggaatctatttttgatacttccaaggcttctgaacttgagacaggatctcttcctccattttgatcatgtcagattcaatggtcgcatcagatttgacatttaagcaattgaaggaaacatcccaggttgattgtcaacttcggcgctgggccaacaccaggtcaacctaggcgttgggccctgtttccagggactcaagtttgtagttttctctccaagtttacttgaatcttcgttattcctaataatagtgaagatacccaaagcactttttgttgaatttaatcagacacagcccagatcgacaaaatgtcaacctgggcatagggcctaatcacaagtgtcaacctgggcgctaggtgttgggttttatgccctaaataaaactcgttacaatctgattagttatcaatttagaagtgaagtatgtttaca

SEQ ID NO: 396180 - DNA, 727 bp, Cannabis indica
atacacttttgttaaagtggtgatattaaataccaacgtggactgttgatgtgtacacaagtgtacacgtagcatattttaattaggccacgttattttaaaattattttaaaataatttagaaaaaaaaaataaaattaaaaaaatgtatgtatatatttttctttttctctgaaccatcgagagcccaccgccaccaccccatctcttccctagaataccagcatgggttagctcttcggcctaaattatgccccaattcttaaaacgcaatcctcttggagaattgtatagaaccaggtgtagtctgtgagattttgaagattctggtccagactgacttttcgtctctgagttgtagcggtgacgatagctccaactctagcagcatcagttgctactcgaagagtaacaccatcgccttcattaattttcacacactcaaaaagaaaaagtgtgagtttttggtgtcgtccatatcggtgacttcactaaatagctcaaaattttcgatttctttggagatacaggtggcagagcttggttattgagttttttttttagggttatttcaagatttgtgttttgggtccgacatttgggggagttttgaaggtttgatttcaagacccgaacccaagcactagttaggcaacaagacccaaacgacaactgacgaggccccaataccccaaaatagggatgcacatagggcggggaatttgcg

SEQ ID NO: 396181 - DNA, 720 bp, Cannabis indica
gttctccaatgcggtttttgctcagtcttgttggagagtttccagttgtgaattttggctatactagtttggatgttaatttcagaagctggtttttttaatgtggctgagactcaaaagtgagatgttggtgcttggagatgccatggttaacttagaaaatttgggcagctaggaatgatgtgttgtgaaagaaaaaaacgtgctctgctaaggaggtggttcggtcggttagagttgtccttgaccaatggaagaatgctcaatctcgaaaaggtggtgcattgttagtagatgttattaacaatgttagtgagctttggaggaaaccaatgttgaatacagtcaaggtaaatgttgacagagctatttttgaagcacagaacaagtttggatttggttgtgttggtcgcgattccaatggtcgtctgcttacgaccttctttgcaagccgtgttggcttagtcaaacctgaaattgctgaaacaattgggatcaagaaagttttgagttggataaagaaaaaacagtgggccaatgtcataatcgagattgatgcgttgttggtggttcaagctatcaaaagctctattcttatgcatgccttcccagtttgaattattagttcgagattgtcgtatgttgatctcttctctaatgattgtgtctttagtttttgttaaacgatatgctaataaggttgttcattgtgtcgctaga

SEQ ID NO: 396182 - DNA, 1004 bp, Cannabis indica
tttttttttattattttataaatgtttgacaaatattctattccaaatttaatacaacatagatattattttatattttgttgtcaaattaatagaagtaaatgttgggttggatcaacttggtatgaaagaagtggtagaagtagtttctgtttggagtagcaatatttattcatagaaagttgttcttattttatttcttttaataacaaaaattattgtcacaatagagaattctaagttaaaatatacataattttttagtgaatatgacaggcacatgggagcaccatttatttttttcttcttctatagattctcattcatagattagattgcccacaaaatatattataggaatatttcttttttattgactggccttggttgagaagaccatcacatcccaataaccctagtttaagtatcttaagtaattataggctacctatatatgtacctatatgtacattggagcgcattattattattaaagcagccttacttttttgtcacttatattgaggacaattatttatttgttttaaagtatctatttccaagttgcaatatactagcaatatacaatagtgtatgttacttttttccactaaagttaatttgagagatagaaatactgaagagcatcagcggtgtttagtactctcctatgtattaatatcgttattggtctaactaagtatcgagtcccatataatttagggggtttttcaatattatacctaaaagtaattttatttataaaaatatctttaagaaaattatttatacaaataacattgtgccaacgtcagcatacataccagaatttaaaataattaccgaaaatggaaaaaaactggaaaaatctcgtttccagaaattttcgcttttaaggagttttgaaaaaagcaaccttttagttgcttttgatgtgaataagatatcaattggttactttttattaaaaaaaaattaatttcaaaattttacacatatataaa

SEQ ID NO: 396183 - DNA, 1297 bp, Cannabis indica
ttctagctatactattatgcactttcgtaagcaaatataaacaaacaaaagataataacatagctctatgggaccatgacactgtattttatgtgatattgatctcacatcaaattgatttatgatgaattaaatgatattgacttagaataaatataactgtaggtttataacattttttatactgttaatatcgaccaagtttaatgtaaacattatacattcgatacaagtttactttactaacgtcttaaaaaagatattctacttgcttaagtgtaagtacaccacatagccgattattacgtcaatgtaaatctggtgtactaataaatcttgggactaagtaagttcgaaacatataatcataattattttgtactgtgatgacattactataattgtgagtaactttatgttcaaaatttaatagaatttaagtattaaacatataatcacgtaaaacaaaatgaattttgttattatgattaccgaattaattattcaaattaattagcgtacttttacagagatgtttaaaaaaaaaaaaaaactagtttgaacagaaataagatatgtttaaactgataactaacagaaagtaaaaacgaacataaagtatagatcacacaaaattatacgttgtattagcaatcttcttagattgctattagtccatgggatcacacccataaaataaaatttattagaagaataacaaagtgattacaaaactgaattgacttatacaaataaagactctctttttaaatttgtcgcaactgttgtaatctaagtttcaaacaaatttctgaagtactaaatcttgaattctcttcaaatggtagcacttacactcttcctcctgaaaagtgactcacaagcaagtcttctctccaagcttgatgaatgatgcccaagtgtgttcaacctacacaatttccataaagaaacaatacataaataacgcagaacttgttgaactaaagttcctcacacaataaaaacactctctaaacttgaaaatgattttaaaaaaaatacactaagagagctaatgaaaactagcgacctaagaataactttatatcctctagaaaccttttaggttattgaataagaatcaggaaacaatcagctattaaatgaaaaatctttccaaaaaaaacaaaagagaaaatttacaaattacaaaccatgttttcgaacaaaatcaatttatttttaagtggtttggtttaatttggtttgagttgagcacttaattagtctggtttagtttggttttaattttttt

SEQ ID NO: 396184 - DNA, 1955 bp, Cannabis indica
ggaagaggagactattgtccatatattacttttttatcgtttcctcgctcttgttggaactgtttcagtgttgatttgggttctaataatgggtgattttaacgcttgatttgttaatatggttactaggtgtcgaactggtttgatggagaaggcggtgatggtggcttgggctattggaggggcttagaatgatcttttatggcgccaacatgctcgttcagctgctgatgtggttctcaaggcacatattgttcttgatcaatggaaacatgctcaagctcgtaaatttgagtcacttctagttccctctagaactgttcaatgtgagaagcgatggactaaacctgctaataatatgatcaagataaatgttagtggagctatttttgcagtagaaaaagcgtttggttatggcattttggttcaagatcatcatggtggagatttagaagcttttgctatgtttttggttagttttgggcaactagaggcagcaaagattattgggattaaagagtcgttgagttggatgaaaggaaagacttggtctaatattgtagttgaaactaattgctttgttgctattcaagctttacaaagtgcagtttgtatttgtttgttttagactacaaaaagttatcatcttctcttcttaatgttcatgtttgttttgctaaacgatttgcaaacagagcagcacattgtctcgcacgtggttctcgttcttagtcagattgtccttttactgctagcagtttgcctgtgcctatgtaatcttttgttacagccaatttgattgtttaatgaaattattttaataatgataaaattaaaataagtggttaaacaattcttaattacattgataagtagtatgaaaaatacatcattgcatttctcactaataatagtacgacaacacatcattgcattttttattaaaaatgtttggggttatccgtcctaagggtgttcatacaattcaatttgtattattttgttcatagtgtatctgtttcgcactaagtgtggattttatattttggatccattgtaatccgcacaatagctcaaatctaatccacttcaatctgtaaaagtacggaatcggtcgattattttagattgattactttaaaataattaataattattaaaaatatgtattttttacataactaacaacaaaataaaacaaactatttttattttatttccaataataaattcaaaagaaaaaaaaattatgtagaaaaatgtttaattttatttaaattgtatgtagataaatatatatatataaatgaaatatacatttgatttgttaagttttgaaatatatttatattatatgtattacatttttaaattattaattattttttacattaaaatagtaattgtatatataattttttaattttttttttataaatatgtatggaatatattgaatctgttactttaacatgtcaatcaacattcaatccacacaagtataaattttaaattttttaatccaatcaaattcgtacaagtataaatatctgtacttgaagattgaattagatttaatagtgcaaatactcgtaatccatcctttgtgcatctgcaattacgtcgactgatttggttagtgttatgtttgtttggttcaaggaatttattccatttaaaaaagaaaacaaaatatagtaagagaaaacaaaacctcgtattggaatgggtgcattcaacaaatgtctgaaaattttcagtgtctgaaaattaggatcggctgctgtatctcacataggacttggatctaaatctgttaagaaatggtcatattcgcatatccatgaacccatggccccatggcccacgggcatcaaactaacaaaagcagtccattttatcttttcttatttccattccaccaaattctgttgggaattattttaccaggatct

SEQ ID NO: 396185 - DNA, 745 bp, Cannabis indica
cggaaatagactagcttttggttggtaaacgataatgtacttaacctttactttcccctttcccgttttcgtcgttttaaattagttacactcggattaaactttttaaattaatactttctagataacatagaattggaaaaaaaaaaaaaaaaaaaaaaaacatatacaataaatcaaaaacaaaagtggttaaacttaacacgatcgatcaacaaattgaaactcacaataattgcccaaaattgattctaacttcgaaaatatatgaagaccgacttaaatatttgcaaccgaatgaaaacccaatttctatgaattagaaggaaagcagaagaaagaggaaaaagaaacaagtaaaataatgaagaataatggtgaagagactaagacttggagattaagcaaagagctagtctactacactatacttagctactcgagtacttgctctgcatggcagaaccattttgtgcgttttttaatattttaataataatttttgtaaaggataaagagaggaaaagaaaatggtatttcaaaattttattacaaaaatatgatatatttattctatataaagtgtgcctatataacagaatttttcgtttacgagaaatttatgggtggctttttatttatattaaaaataaaatggtttattattaaaaataaaatagtttatgagaaattcatatgtcactttttattttatatataataaaataaataaatgattctaagt

SEQ ID NO: 396186 - DNA, 1023 bp, Cannabis indica
tataatttgtaatcaatcaataaaagaattatttaattttgtgatttcttaaaattttattttaatgtcaaataaaagaaattatttttattttattttaaaaacatgtccatgtaaacagctcattacagaataattttttagtttaaaataatctttaaacgttattatttaatttttatattactttaatttatgctctaataatatcaataaaattgagatatgttatttttaattaaaatataatttaaatgtaagatattgtgtggtgagtaatataaaattaaaaaatataaaatatacacaaatttaataaaataaatagagtgtaatttacagttacaaaatcaatgtgaatatatgtatttacttatagacataaaaaattaaacaaattgaataaatagaatgaatgaattataataattcttctcttactatttcaaaattaatatataaaactcttgatttttcttgaaagaataaataataaaaaaattaattaaaagccttcttatatattaaattgatgttttaattcaaggactttatgatcatatatatacttaaaaatttatcacatgcatggatacttttatgaagagccactatatactacggatcttattgatatagactatctctatattgagcaaaagtttcctaatagtatcagttaaatacaatctaaaagtggcttgaaagtatcattatagagtttaaacaaagtccacctttatgtgaaacatagagaatgagtctgttgaaaacataggcttgcctataacaaactccgaagctctatagaattttcatcttccaacttcaataaaaaacaaacttaaatgtagtaatctgaccatccaaagtctataagaaaatcagttgcagaaactacgaagcttgatttcttcatccatcaataatatatatgtatatatatatacgtgataatattgagaaaaacatttcgtttcaataaaatctcacaacataaagtaagacaataagaaaaaaaaa

SEQ ID NO: 396187 - DNA, 721 bp, Cannabis indica
tctctctctctctctctcaagttgtacaagtttgagttttttagcccacacttagtttagaaagaacaaagacctttgtggaagactttggttctttagttttctaccattgaagatcgatgtcaatcatttgttattgctttacgacaactgttaggattttatgccaaaattaaaaccctaattcaatttgtaaccttaattattatcaataaataaaaacgttcagtttttagattataaccatgaaaattgaaaagcaaattttagattttttttgtgtaagaaaccgaccgaatcgactgttgctcacctttattaaatcgaccaaacagtagagtaaaacgatcgagtttttttatatttatataatggtcggtccgttttcaaattataatcctgtagactgaaaatcaaattttaattttttttttacataaaaactcgactgaactcaccgttgctcacccttagagtatagcaatgctcttctaatataaaacataaaacgcagaaattgtggagtttgagtgagcgtgatttgctcaatcatccgtcatcatcgctctcttctccgcccacgtggcttgtcccgtgtctctttcccacctccaaaaatggtttttatctttccactttttgttttactttagtaatattcttttatttttctactatattcacactgtgtatggtttaactaaacataaaaaaaaaaaaa

SEQ ID NO: 396188 - DNA, 658 bp, Cannabis indica
gttcattctgttttctgtggaatcctgtttggctacattgctataataaaattatgtccttaagaagtagaggatggggtttaagtttctgctcaaacttctaagctttgtcaagttaccaaatcattatgaatcggcactatgttagtttgaatattcatttcattatttcttaagtaatgataattacatctcagtggcttcacctggtctcaaggatatggaaaaatgattattacacttctcttccgcgaactaataacttcttcacacttgaagttgctttttgatccagtctgatcaattttttgtcatttacaacctttaataatttgtctgattcttgtaactttgtgactttgatcaggtacctggggttactgatcttggtttggttccaagaaatgtgaagaaggtcgctataattggaggaggattgatgggctctgggatagcaactgcattgattcttagcaactatcccgtgatcttgaaagaagtaaatgagaagtttttgcaagctgggattaatagagtcaaaggtaaggctataatggattacaaatacacacatattcataaagcttcggtgagaatgcatttttgaatatggagaaatagtattaacagaaggcaaaatggaaaagagaaatcagca

SEQ ID NO: 396189 - DNA, 1161 bp, Cannabis indica
gaaagatgtagtagattacgtgtttaaatgtctaatttgttaaaaaaattagagctgaacaactggggccagcagggttaccgcaaccattagcccttcctacatggaagtggggatattgcaattgacttcgcagttggattgcttagaactaagggaatgtatgactcagtatgagtcacagtggaccattttacaaagtcagcacattttatgtcgataaggattatttatacaatggatcactatgcagagttgtatgtaaatgagatagttcatctccatggagctcccaaatctattaatttggaaaatttacttcaaaattctgagcaagacttcagagaactatgggtacaaaactagagttacttttcacctcagagtgatgagcaatcaggaagaatcattcagatattagaaaacttactgcgagcctatttcatggagtatgaaaattttcctacaacaacatctgccggagtatgatagtaatggctccttatgagatgttgtatggtagaaagtgtcgttcccatatctattgggatgaaactggagaaaggaactgtcctaagttagtgatcgatgaggcaatagacaagatcaaggttcggatgcttgcttcgcaaagcagacagaaaagttatactaatccgaagtgcagagatattgcattttaggcaggaaaacatgtttccctgcgattctcatcagtaaaggggcattaggcactttggtaagaggggcaagttaagccctatgttcattgggacatttaagatactcaagaaggtcggtcaggtagcatatcagctagccttaccaccaacgttatcggttattgctaacgtattttatatttcgatgttgaggaaataagtttcagacctaactcatgtcttgagttacgaagcccttgaactgcagtcagccttattctatgagcacatcctcgaattaaaaaaaaaaagaagaacaaagttcttcgaaataagaccatagccttggtcaaagtgctatggaaaaataacaaagtggaggaagccacttgggaattagagtctggtcaatatccagagttattcatgttagattttgggacgaaatcctttttaacggggggataattgtaatcaccgcatactagaatatggatta

SEQ ID NO: 396190 - DNA, 816 bp, Cannabis indica
attaatagctaactggtaagtgtctcactaaaacactttctaggattaaaatccaaaatttgaagtttccccatttctaaatagggtggcaataccctaaatatctctgatatgctaggtatattagataccattccctttatcttaaaaagttcttcttagtaaaaagagctttttaataattccagagggcattttcaacaagatcttttcttggaaaaaatgcatcctttgattctggcgattgtacgatttcgagggtcattatgaatcgtctcttcatattctgcaattctcccaaccgttggatttttcaatacttagctttcttgtcactggactttgtgtatgaaaggacagcttaagcttatcatttttcataaacctctagctctttagtgagatccattttcaaaatggatcatctctttcctgccaaaatgtcccttctgagttcaaaagttcatccccccaaactcataacatccagacacaccaacccatttccatttgtttccaaggacttcaagcctcaaccgaagccggaaatgatgaattccaaggctgaggagcttccgaccaatccaaatcaggggaaccttgtagcccgccatgggcgatcctcacaagtgatccctgagggtatagatcttgtgagcgatcctaaaggtcctcctcaggctgataaagaatttcagaggaaggttggcatggttgcagatgaagctaggaagggaattgacgtggtttctatcaaagaatccagccaacccaagacccaaacctgtgccagaagatcttggtgccaacctcttt

SEQ ID NO: 396191 - DNA, 819 bp, Cannabis indica
tatatatataaaaatatatgtagattgaattgaattgattatttttacatgtcaattaacatctaatttgtacaagtgggaattttagatttttcaattcaattcgatccgcacaagtgctgttatctgcacgttgtagattgaattggattggatagtgcatattggacttgattgagtattttatgaacgctcctacgtatgaccatctttatataatatatatatcttatatttaatgtggttatttaacgaaaagtgttggtttaattaaaactaacactgttaaatcaatcaattaattgtcttagttttttgaaaagaaaaaaattttaaattctaagtaccaataaaattaaattatctttttataaaatcttaatttaaatttaaattagattttaatgtaattaattaatcatattttataaaaaaattattagttattttatttaaaataaaataaatgaattattagatatattttctcataaataaatttaaaattagattaaattttatttatttaaaaaatataattgaattgtattaggtttaatttttattattatttaaaaaaataattagataatagtaactctaatataactcaaagcaaatgtaataaatatgcattacatattactaatacttattatatatataatgtatggttggatgtcacagtaattacatttaagtttttatttttggacgcgtttggaaagccacctgggaattggaagtagatgtaattggaggtaattacaaggttttgcgtgtttgtctggccacgtaattacatagtaactgtgtaat

SEQ ID NO: 396192 - DNA, 975 bp, Cannabis indica
agaatgtgagcatgcatcaatagctgaaggaattttactacttggtgagttttagagattatattggcaaggtagattacaaatggttgcgttaaatcattagagggagtctaattttgtttaagtcaattgcttttataatctttaatgctttactagttaattttattttttgggcgtgacctctagtctaggagtttttgaaagaacacaaatatcactataattctcttgtgtcaagtttttatctgtactatttttctgttctgttactgcaaatttgtattatgcggtaataagtatccaatctattattacaaatctttaccgttgtacttttctttaatatttttaagaaaatctattgaattgacatatgccaaaaacggtttttcagttgcacatagtcttgctaaggccatctctaatgggacactaaaacactaaatataatgtagtttcacactatttttacttcaataggacactaaatatatcctcataaatggctttgtctacagtgtcccacctaatttagtgggacattgtagaccacactatttttttaaaaaaaaatttaataattaaataatactttaaagaagaaaaagtaaataattatatatatatttagtattaaagtattcttattatattaataaaataataaaataataaagaatataaaatttagtgtaatttttagtgttgtggctggaattgaaaaaaaaaaaaattaatgttgaaatagtaattttttagtgttgatttaataccaaatttgagtttcctcattagagataccctaacggtggttctttccttagacatagctatggtttggtggccagcgattccagactttgtttgagtccttttgactcatatttttttggcttttgccttctaatgagaatatctcattttccttcaaaaataaataaataaaataaaataagaagaagaaaaaagaaa

SEQ ID NO: 396193 - DNA, 1193 bp, Cannabis indica
aaggggatctctatcgcccgtaatgctcctcccattaaccatctcatgtttgctgatgatacaatcatatttgcttgggcaaatactgataatgccagagctatctgtcggagtattgaaacttatgagaaatggtcgggacaaaggtgtagcaaaccgaagtcaaatcttctcctttcatcaaatatcaaccaatccttaaagatggaattgcttcgtttgatggaggtcaatgaatgttccggtaaggagcaacatcttggaaacccctttgttttcaagcgaaggaaaaatgaggattacaatcgactcaaggaaaggatgttgtctcggcttgagggacggaaatcaaaactcttgtcttacgctggtagagcaactttgatccaatctgtggtgatgaacctgcccttgtactcaatgtcgacttcaaaagtccctttgagtacttgttgtgagatggatgcaattgctcggaaattctggtggaccggggggacggagaaggaaagattcaatgctaccctaagctgggataaactatgcagacccaagagatccgggggcttgggttttagaagatttgaggatgtcaacaaggcccttctttctaagcttgcttggcaggttgctaacagtcaagacaaaccttgggttaggtgcttaatggcaaaatactgtaagaagaaatccttctggtctgttgagacagcaagcaatgattccccaatgtggagagggattttacatgctagaggtattgtgcggatgggtagtatggcgcttgtaggagatggtaaagacattgagatttggaaacaaccttggatcccttggctagattatcaggagtttaccagcctaatgagttcggtgttgccccgaaatccaagtttgagaaatgtagctgatctttcccttcctgggaatacttgggataaacagaagctgcacaatctatttggaaggcagctgggggatagaatagctatgatccctagactaccacatcctgaaaaagactgcctaatttggaagaatgctagagatggggagtgttggaaattattttaccaggatcttagatctactcacaattatgttgtttaaacaccctaaatatgaactttctaaaacgataaattaaacacatatacagttaagaaaaccttacattgatgcagcggaattaa

SEQ ID NO: 396194 - DNA, 897 bp, Cannabis indica
gtaagattacataagtgacgaccatgctcgttttttggtacgacaccaggttttgtccccccacgttaagccatagacaaaggcatgcacaccatcatacctgcccatagtccagtggccattcgcaggggcagtccaaaagtaaaggtctttgagtgacacgtatggaatgtccggacggtacaggttgtcatcttggcacactgtacgatggagcggccacctaccagatcaccgttcggatctcttctagcaagaccagctcagaaagcacgtgaatgaagagatcgcctataaagacccctgtatttcacaagatggtggacgactcattggagtctagtgaacaaatttagctggcgataactctaataaaattcttagagagctttatcttaaaagagaaataaaaagaatacagagattgctattggaagcacttgtaatactcaaattgtaaagaccgcttagttttatttttaaattagtaaataattaaagtttaattatgaaactagattattatttatgatttatgattatatagagatttatttaaatccagggtgtattatttatgtcatatgtgaaattttatatttttgcatgatttgtgtccgacaatattagaacgcgacgtttggccattagagttacattttgatattttagtaacagcggggcaacctagatagacattggtattgtcgagaaaatctaaggtttttgaaatgaccattttacccctagaacactttattagttaagctttttgagaagggtatttttgtcattttttcttgggtgatgtggctgactactacaaaattgggctttagaggcaggtttttaagggctttcagacgtcggtattggcaaaattcgctaccgacgctg

SEQ ID NO: 396195 - DNA, 971 bp, Cannabis indica
atttattataattaattgagcacccaaagtttatcaagtaataagaaacttaggaatattataagcgaaattgctaaaatatattactgatgccaaatatttttttcagggaatttacatcccatattattttttcttattttcttttcaattttaatgttgtaaggaaatattacttttttactctattttcttatattgttttctatttgttattttttttttacttctgacaaccaatctacagtttatccacattgtatatatatatatatatattatataagggagctaatataataggtattttgatttaatcaaatggctcaaattaacccttaaaaactacacgataattaatatatttttttatttataattaatcttgaatattattaattacaagttcaactaacaaactccaaacctataattttttttacttatttatcgtatgactatttataattttcaattaattatttttttaatttgaaatttatatatttatttttaattaattttactttctacttaacacaataattgtagccagaaaagtacaaaatattcaagttatttaatcctacaatagtcaatacaaccaataatataataagggataattgcggtaaaagtccccataaagttagggttgatgcagattagtccacaacctcgaaaattggcggtaatagtcaccaaggtcacagtttttttgtgagttcgttggtccctaagataactgatccgttaaacctaaataaaataccacgtgtcaatttttattgggtataaataataattttaattaaaaaaatttaaaataatataaaaaaaaatttgatagagaaacttgttgggtggttatattaaagaatcgatatatatatacttaattagtatatatatattgacaaagtaaactattttaaaattttataatagtatattaattaaacttattatta

SEQ ID NO: 396196 - DNA, 830 bp, Cannabis indica
cataatcattattaccatacaacttacaacttattactataatattttactacaaatactttaaaaaaaaaaaaaaaaaaaaagaaaaaaaaaaacaacacccccacacaaaacacatccaatattaaaacaacattttaaacacaaaaattacaatttaaaaaccaataaacaaagcacacattacctttcttttctttaatcacaaaggtggtttcatttttcatctccaaaattatcatctctatgatggcaactacattggctcctaaacattgtagagggacaatcgccatgactatcatcatagctgcaagatggagtagatctttgttgctgctaagaacaacacccactcataaagactttccctccatgaatacaacatccagctccaaaattgggtgaaacacttcaggatccacccactaaaaaaaacacaatcatgttgataaagttacaaaaatcaagaccaattatgttatttggccaagaaatagttgaaatatgaatatatactagagaatgggataaatttttttcttcttctgcaacttttcacaattattgtctaaggttttaaacataacttttaagggaagtaatgatgtagaagacaacaaacttgttggagattattttatcaggatctagatttactaacatgtatgttgtttaatatcctaaatatgaattctctaaaataatagaattaaacgcatataaagtttaagaaaccatacattggcgacagcggaataatgtctcattcgcactatgattgaatatttgacttgctatgggtagacattgtaacaccccgatttccc

SEQ ID NO: 396197 - DNA, 519 bp, Cannabis indica
ctcacacacacgcacgctaagcagtatttatatgtgtgcgcgcgcgcgtgttgtgtttgggctggccctcggtggagacggattgcacaataatgagtcccacaagcatcacatcgttacatactcttctctttctttatctatacatcccattggcaatttttggctagtttttgtttgatctaacagaatttaatgtggtcattttttattcggttaatttgtttgtgcatgttactttagtatttatattacatatataaaatttggaggtatctttatcttaggacttttggaactaacccatgtcaagctacatatgaattcaccctatcatcatggaagaagagtgtgtgaaaggccaatagtcaacaagctaggccactttcatgttacacacttacactcactcccctttcttctcacttttgagttttgagtattgagtttattttagttatttttatttttacacttcaaaatagttttttttttttacatttttacgaaattctacat

SEQ ID NO: 396198 - DNA, 552 bp, Cannabis indica
agtgatgtttcacccttttggtcctttaaagcgaattcatcgtttgaattttagtgcaacttcagccttccttcacaaaagcagaagtctgtcacaaaaaattcaacatgactctcgcactcacaaagttttttcgtgcgcagaagacgactggggcttcaatacatctttaacccttcttccctgaagagaaagattgcttgaattcatcacacgtccagtgatatttcaccctttggtatttttaagaaaagtcatcgcttgaattttagtgtaattttagcctccccttgcggaagccaaagtctgccacataaaattcaacatgactcttgagagcacgaagtttttttgtgcgtgaaagatcactagggtttcaatacgtcttcaaccctccttcctacaagataaagattgcttgaagtctgccacatgcttagtgatatgtatcaaatctgtaacttctataagtatttagaagtgaaacgatgatttacatcgagcttggcttaatagagataaatgactgagatctcatttcagtaattatat

SEQ ID NO: 396199 - DNA, 765 bp, Cannabis indica
aatagtgttacaaactaaattatcacacccttactaaatgtgtcaggtaccttaaaaagtgtgatgatcatccgattccccctcctctgcattataaaatctcgttgaaagcccctcctaaaaccaacttcaaaaggaatccttttgacctttccaactctttccctcttgatgaacttactcatcctaactctaatgtggaccaatcccttgctgctgctgtgaatcagtttctttccacggaagatcatggggctgggtcttctgtttcagcccctcctggcagtgtgactgatgatagacctttgggaatggaacaggtcatcatttcttctgatactcagttaaatacatctactctgaatcctgaagttcacactcactatggtgaaagccccaacggggtcctttgtgatatgcctactatgaatgctcatccagctactgttactgtccatgacaatagcagtcatgaggaagcctttgataatagtctgtctagacttactgagaaagctaaaggtaaagccgtagctggtgttaaaagggctacttttcttcctcaaactgttgtggttggggattctttgcgaaacattctcaaacgtgctcgggccggtcctactatcgctgaagtctcatctgctatcaatgcttctttggaacaggcgggtgttgcggagcaaccccgcccagaaaaatgattctcatgtgctggaatgcttgtggtttggggagtccccgagcattctgtaacctctccct

SEQ ID NO: 396200 - DNA, 878 bp, Cannabis indica
gctaataagccaagttgcatgatcaaacttgatctccaaaaagcctatgataatattgagtgggatttttttggaggaactactagtagggttaatgttccctaggaagtttatgcagttagtaatgaattgtatcataacttctaaattctctcttatgtttaatggaacattacatggtttctttgaatctaagagaggacttaggcaaggggatcccatgtcccccctgttgtttgtattgggtatggaatatctgtctagactaatggggaagattggagagaaagaagactttcactcatgacaggtgctctgagcttaaattgaaccatttaacatttgttgatgatgtgctattgttttgtcatgggataccaaaagtattgtatacaccaagatagtgtttaatcagattctgcggttgtttgatttctctaggcaggccttacatttcacatatctggggatcccaatctgtgcaaagaaaatttctagaaaagagtgtgaattgttggctaaaagaacgaaatccaagatcaagagttggagctctaggaatctttcttttgcatgaagaataacactaattaactcagttctaattgctatccaggcttattggagtcagatgatgattatgccaaagaaagtacttaaatccatagaagcactctgtagagcttttctatggaaaggaaaggctttatttcatggtgctggagcagtagcttgggagaatgtatgttagcctaaaattacaggtggcttgggaattaaaaaactatagagtggaacaaggcagccatttgaaagtatatttgggccatttcaaataagtaggaaagtctatggttaagtgttgggttttgtgccct

SEQ ID NO: 396201 - DNA, 721 bp, Cannabis indica
taatttgtgtttgttatctgtttacagtacgtacgtagacctatataatacagtcttttgtggtacaggggcttgattataagctaaggggacctagatacgtgcatagtaacccacctaatttaagggccaaatagaaaaaaattcttttaaaaatttcatataattttttaaactatctcacctattattaaaataaacctaaaaaaatttatttttcctaataccaggccgacctagcttattattcatatacactactatttttggtctattatatataactttctgataattataaggctttccatatgattcaagatatttctcaactactccattccatccaaagaatatatatgactagaatctgatactttcctttattctcgaataataataattccagaaaatatatatatttgacacctatcaatatataatagataatttgtatatatgtcttttactactacagtctacacgtacgtaagtgtgtcatggcttcatcattaacctacacactatactacataaagccacacaaaattaaacttccactgctccttgaaatttcattcacatatataaaatcaaaattaaatactaaacttataatgttttatgcatgcaggggcggactcacatataaccgagacgaggcagtcatttctcttgaaaaaaaaaatctaaaaatatatatatacaatttaattaatta

SEQ ID NO: 396202 - DNA, 636 bp, Cannabis indica
ttgaccgttagtttctgttgattcatgtgtgtgtacgcgccttttcctgttgatattgcgatttcaataaatatgtgaggtgtgccttccctgatatagcgagatctcttttagttaatattgcaagatcctttcaatattgcgagttctctatagccaagtcctcgcagggagggtaaatttatgccaataatagtatatattatatgcgaatattataaataatataaaatagacacaaaaaagtatagtggttcagcaagagttttgggctcggcctgcctaattcactcttgaaaatagtactctggctctgtatttttattatgatcagcccctgttgaatggagagagaagcccctacttataggtagtaggcatcggttataaataatggtcataatgagaccgttccaacaattaatatataaattgtattgatgacaatagctataaattaaaggggtctttttaatattataccaaaaattgattttatttataaaaataccttcaacaaatttttttgcgcaaataccgatatgccacatcagcttaaataccgaaattcaaaattattaccgaaaataggaaaaacttgaaaattctcgcttccagaattttcagtgttttgca

SEQ ID NO: 396203 - DNA, 792 bp, Cannabis indica
aagtttttattaatttttagtttttgattctcatcatcttacatatagtgggatgatgttcttgtattggtgtagtgatttcaatacaaattatattgaaagtggtatataaaataatatagacactatttaataataagtttcaggtgattgatttatgaatcacatttttaaatgaaatctccattcaatagtaattgaattcaaaatttaaatattaatactgttaaaatatatgtcttaattactccatcattttaaacagtccaccaaaactagattttttggcagtactgtgatattatattctacccattccttgtccttggttagctaggctaatgatcattggtgccctttttattttcttaaatttgtttagatgagaatttacaaaattcaagtagtttgatgataattaagatttcttgtaaacaccagaatatatatatatatatatatttatataaatatatataatggcaatatatatatatataatggcaaacctaaattataaattaaggggtacactaacactacccttcaacaaagtcaccctacctatactttttatatatgtatataattaggggtgtttataaaattgccgatcaaatccaatttgcacgattcaatccaatccgcacgattcgatccaatccaatccgcaaagtgcgaatatccgcacttgtgcagattggattggattggaaaattcaaaatccgtacttgtgcgaattgaatgttaattgacatgtaaaagtaaccgatccaatctaatccacacat

SEQ ID NO: 396204 - DNA, 595 bp, Cannabis indica
atttgcattaggagttaggactactcttgttttctttttatctttctacacacgataaattattttgttcatatttaataattaatttaatattacaccacctaagatgattgttttcataccctatctatccagaaaagatttttaatttagttatttttcatggttagatgttgtaattatttaaaattattagtaaatttttaaattttttttgattaattttaaaagtttaaatattttattaaatgagtgactatttagagtgtattataaatttttctattattacttattagtgttgcctaatatatatattttatttaatgagcatgatatggcataatttctcatataatttatctaaaaatattgtaattaagcatcttataagagtgctcgacaccatattgattttttttcatattatttttgcgatcgaggttgttatggcttctcttgtaagagcatctccaaggagctcatcaaatttggtgtcacactatcaccaaatttgatgttaaaaactatcttcactccaaccacaacaccaaaaattacactaaaaaaatattccttattattatattaattt

SEQ ID NO: 396205 - DNA, 901 bp, Cannabis indica
cactactacttctgttaaagttgaagatgagcttagattagatatctggaaatataaaaaccgaaactttaaactaaatgctcttcttctgaattatgttttcacatgggtactgataatcttatctcagtgatcagagaatataaatagacttacagtatatagtgaaacggaattggtcgtctccgatgagttagtgaagcaagaaaggcgaggacttggccgatagagaagagattgaataacggagatagagggtgggcgatgggtgatggagaaagaaagctgtgctatgtaacactcgtgttcaacaatgcaagatatttttctctaattatttcttttctttttatgaaaccaattaataataaaaattcacccaagtttctctaaatattttatttcgtgtgctttctcgttcttaaatagtttttattgcaattagtcttgtctttctagcatgacttgaagcttatttttgtaatttctttgaggtaaattttaacgatgatagtttcaaaattacatttagagtgtaagacatgacttgctttgaaacgcaagttgaattgcatcaatcagatcaaaattaagtgagttgtgactgttttactaaaaatagttcataacccagcatccaggttgacatcccagcgcccaagttgacatatgacgtcaacctggatgctgggtaagtgaaaaaatatcacaagaatgtactttaagatgcctaagtgatattttgacatcacttagtttctgtgttctagcgaagctagtcaccagttttcgaaaatattgttattctctggaaatgaaagactcaaaactcttcatttttcaggtgagctagaaatgagaaatgcaaagttgttaatttgactttttgacttcatatatc

SEQ ID NO: 396206 - DNA, 787 bp, Cannabis indica
atatatatatatatttatgagaaaaccctaaagtatttagtattgacaaggtgttaccttctaatagtatttttattttattttttgatattgggaaaaggatattaggaacttttttaggaagaaaaatgtgaaaccgcatatttatgaccaccaccttctaacagtgttgaacaatgaatccaatcgaataatatattttaatctaataataataataataaaatattgtccatgtgtacgtgccttataaattttttaataaatgagttattactagtaatttaattggcatatgtcatattatgtgtatctccgtatctcattattatatattaaaacaatcagtcaaactaatcgtgctacacaaatcaaattgaaacaaaagaaagttgagattttagttatgggatttagtgtccaaaaaatatattatcttttggtagctgttagaacatagaagaagactatttattgtacaggtaccgacattaaaaggctttatgggcatgaaaaatttaaaagaaaaattacaataacaatacttctgccttgtggatgtggcaatatgggacatatatacacaaatcataacaatattttttttttttaagaaaactaacgtgccgtttgttaacactttttatatcagttttgtgtttttaaaattgtaaatgtaaaaatatttttcaaaaacatctataaaactgtttttactttttattttttaattgagaatcaaaattttaagaataataaaaaaaaataactttcaatattttttaaa

SEQ ID NO: 396207 - DNA, 694 bp, Cannabis indica
ttttttttttattttcaaatattccaaaaataaatatatctaaaaattattaaataatattatattattaaattttaatataataataataataataataataataatattgttagacaatttttattggcatatttttttactccaataataaacatcaataaaaaaataaaaatatacttaaaatattctttaaaatatttttttttattctaatgatattggctaggatttgggatgggaccaatgttcgacccttacaaattaagacttttattagtctcgatttaaaataaaatgtcctaataaaaatgattgagtaattctacgatggattcatttgaaaagaatgtactgatgcactatttacttgtttcagcattcagacaaaaaatttagtctaattcttttttatatattcatatacgttatttaagatatcctacaaaattttaaaaatttgaaataatttacaatatagaaaataaaattcaaacaatctattttacatgcgtataaaataaaatagtcacgcgtgcaatacactgcttgaacacaattttcggcgtattaaattttttcgaattttttaaaattttacaagatgtcttaaataactataatttacatgatcatgagaaaaaattaactaaaaaattattttagatgttaaaacagatagagatttatcgat

SEQ ID NO: 396208 - DNA, 876 bp, Cannabis indica
agacaaaaacaagttctttttttatctttttatagtgatgcatccttctatggatgttatatgatatatacttttaacgagtattatttaaaaaatttgaatttctatccttacttttgctatttaattaaaacaaaatttttatttttgaattatatgattaaggttattttataggggctaagagagagatgaaaaaaaaaatataagtgagagaagaacataaaagtaatcctatataaatatatttttaatataatttagaaagagagaattttttaaattaaataataaattaagaacataaattttagtttttattattggttattagattaaaattttatcttttaaaattaatatttaattataattatttttaaagagttttcattaatgggtattagcttttgaaaaataatctatatattaacttaatattatgtgtaatatatgtatatacaaagtgacaaacaaaccaagaagaacaacatcctcaccttaaatacacaattcttttgctattgataaatttataaacatgtaagggctcgtttggtacgtcgtattgtaatgtattgaattgtattgtgttggattgtgttgtattgtattgtattgaattagtattatttaatacaatacaatatttagtattgacttatattaattgattgtgtaaagttataatatattttaatacactcgatcccaacaccaactacgggtccgggtccacgtcccgggtctgggtacgagtccaggtgcgggtccgggtctgagtctcgggtttgagtctgagtctggatccgggttcgagtcccgggtccgggtctgggtccgggtccgggtctgggtccgggtccgggtccgggt

SEQ ID NO: 396209 - DNA, 1309 bp, Cannabis indica
tatataataccacttttcctttttcttcattctttcaatattttcctagacatggggttggtgatgcctctttccaatattttggagtgctattatgaaatgtttaatgttgattttttagtcatctaagtcatctactcatacattattgataagtatgaaactagttatttattgttttaattttactatttgttatataaatatggccttatgctttctaaacaaaaaagtttccctctcacatcatgttcttcctttttctctctcattctcttcccacccacccaccctcctccacatatgccatcaacaccattacctaattccttctctgtataaccacatcctccattaacgccgtcaatatttttatcttcatatttttaatgatttcaaaacttaaactcaagaaatatttacttaattagtacattcattcatgaattttgaggacttcggtataagatttttttggtttattattattattattattattggaaatctgtagattttcaaattttgatttttcttttgaagaaaatagattttccaaattttgattaaaatggattcttaaaaatagtatagtgatggtcctatgaaaatttgatttttgaggccaacaaggaaaaacaaatactaaaacattgattattgattgtcttatgaaatcttaagttttatgaaaaatacaatgttaaattcatgcttaacgatgattagcgatagttttataaaaattgattgtcttatgaaatcttaatttttgtgaaaaatataatgttaaatccatgcttaacgatgattagcgatagttttataaaaacttgattttatcgcaaatcattgttagaccatgttaagaatcaattttagcatcgttttcttaccttaaatatcaagttatcatgagaccataaataaacatcaatctagcattaatttttacctcaaaaattaagtttttatgagactattgctagaccattgctaaacgattgatttaggatcttttttgccttcaaatattaagttcttataaagacccttagataacctttgattttactttgtgctttttccctccaaaattttcatgacccttgctaagcatcaatttagtatttttttctttcaaaaattaagttttcatggaactatagtacttagatcattaataagtaatatcatcatgtaataaattatatttaatttgcttattaatgaatatttttatttatctttcatatatgggtaaataccattttggaccctgtattttgcaaaagttacagattggacc

SEQ ID NO: 396210 - DNA, 816 bp, Cannabis indica
aaacatatcttgggctaacatcaaccacacaagctaatctgagtaagacgccaaccaaatgacgttaccaagccaagaatgaataacatgcatgagttgcttgaaaaaagaataatcaaagaaaagatgattatgttagtcttgaccaacctgacaaattgggcagctagtagaattaatggcgatacctcttgctaataggtgatctcttgtcttgcttaaaaataattctatgctttggtacgaataatccacactaaattattttgtgattatcaattttagcataaggagtaagaccagaattataaagcttactgacctaaaatcttttcccttttccatctccaaaattgtctctcgagtaaacacattcctaagattaagaagtttgtgctagtaccaactcacattacccttttgaacagtcacccaaaagcttggtgttttaagtatataacattgatctatttaacccacaggacatcttatttcgtagtaatagcccgaatgtaacgagcaatcgaagccttgttccacttggacccttcggaaaacccaaacctccatagttcttaggcttgcagacaagatcctaagaagctagatgcatcttactagtattacctttcacactccacaaaaagtctctgtagagtttatcaacattcttgactactttttgtggcagcataaagatactcatctaatatcaacgaatgcccaacaatactgaatgaaaattgcactctacctgcaaaagagagatgcatactgaagcaaatgagataaaatagtttttatttctaatgatgt

SEQ ID NO: 396211 - DNA, 1264 bp, Cannabis indica
gccaatgaggtttcaaatacaggaaatgctgcaagccatcctgctgtagactctgcttagaggcaacatcacccaccaaaaactgggcgggtactgtactcccaacgtgcagtcttcacagtctctacataatttgacctgtgacaaacttaaccacgtcaaaatgtaaacaagcagcagcaaataaagttcagcatagtttacagcagaaattccttttccaaacatagcactggttagtcgaatgatggaaacatgctttaacaatacaaaacaaatagagtaacagagtcgtacctgccatcatcacaaatggaaccttgatgccaaagtggtgtgacttgaaaaccttctaacaccctcctgttgaattcctgtgaataataaccgatcatagagagcccaaatagtaacttttctacaaaaaaataaaagaaagaaacaatgcaaagccaatgacaagcagagtacaacatccttgcaaaacaataaataataacgccctggtatacaaaaaaacaacttggcaaaaacaaatttgttttaggatagaaatcagataaaccaataggtggttagtgaattattaaagccatatgaataatctgcagcatacataaaatatgattgaagttgacaaaacatgtgtaaatagatattctaccattcagtgtagaaatttcctttggctgcatcaagcttgcaaaagacaatataaactaggaaaatatgtaacaggacaatcttgtgctacccttactaaaacaaagaatacagcactaattcaagaatatgttcattatatgcagatagctagttaaacagataaaaacataaaaggaatatcaacctgaggaggaacctctttgtctggaggtggctgtccttttcctgccgtaaaagtactccctaacatcagttcatgcctacctatgcatgaagattttaagtaaagttagactcaatagaatgaaactaagactagtagattttgtgatggagatcataaatataatttacatcataatcttcgatgtaaatataaggattaattattacattgtcatgactttatattaagatctctcttaagtctttacaattaggataaacatacatgcaacaaattcgaaacaaatgacttaagttactaaaatcactgtgaaagtttactatttacacagaagaaatgggttcgggtgctcatggaataatcgacgggaaaaaaaaaaaggggggggggggggggggggggtaggggggg

SEQ ID NO: 396212 - DNA, 1171 bp, Cannabis indica
cgagtcaaaaaacgaatcgacacgcttgacacgaaatataaaagcgagtcacataaaatataacccgaacatgacacgatgacacgttttgtcacccctacgttaaatacaatctagacctaatatataattataagaaaaatttataacctacctctttatttacttatttcgtaaatttttagaattcatttactatatcgtattatactgtattatattgtataatattaagaagtggccttagcctccctaaaaaaaaaatcttatcaaaatatatgtgcattatttaaaaattagataaacaaatatatataaatacgtatatatacaattgaaaaaattacccctcttaataagttcacctagttctgtcactatatgatactatattgaattgtatattatacaatatatgtaaaattatatatggtattaacttttatagatacctaaatatataatattttaatataaattaaaatttaacattatattatttagtaatatgatatataatctaattaaatacaatacaatataatacgacttaatacgatatagggactgttatccgtatttttagataggttacacgtgtacttctaaaaatcaaaattctgcaaggaccaattcacaagcccaatcgaactagtgggtcagtccatcatagagttagaccatggctccaaattcagctataaatccaatgtacatgcataataaagtcagacattattggttctggaagggcgactagcccagaaaatgtaaggtccagcaaagcaaagcatatctggatactctcatgaggtaatctagagagggaaaccgaagaggcatccagatatcaacctacatggcacatttgtgagtatgggtattcacaaagtatccgatccaatccaatccgcacgacccaatccaattcaatctgcaaaatgcggatatccgcactttgtactagattggattggattgaaaaatctaaaatccgcacttgtgcagattggatgttgtttgacctcaaaaagtaaccgatccaaaccaaaccccaactaaataaaaaaaattttaaaaaaattataatatgtaatatatattatttaaaaaaagacacaaacttctaatttcttaatcttttttagtaatatattgagttggtacattt

SEQ ID NO: 396213 - DNA, 930 bp, Cannabis indica
acaaatttagagtacaacctaagcttttgtagctccataatttctctaatataatactaaacatattgtatactttgaagaaagacaataaataatttactatatgagaaagagtgttaattacaatttctttctcaacttttatgtttcaaaacacatgttgataaatatttttctttcaattttttttatagtatttgttatagttataatatcatgctctatatatttttgaaaaattctgaataatttacagtataaaaaatatagttaaatttttttaacacatgataaacttaaatatcagaaatgataaaactttgttttcgatactcgttctattgacaacattaatgaaaagcatatgtttgttgctttcaagtccacttaatacacagatttttaagggtttagttgagtatgaatttattaatcaaatcaaaatatatactttcatttaaagtctaataatgtcataaaatgaaatcaaaaatggtgttttggaaactaattcaaatcatttttttttattggaacttcaaatcatcaaaattaattacgagaaaattttatctaattgtgtgatttatatatagccgatgtatatgttatacaaatgatgcaaattattatatgattgttgggaactttttaaaaatatgatttctttcaataattcatatataatattatatacgtgtgtataaatgagggtgatatgttgatcaagcgagagaagtaaaacactatatatgaattccaactgtataaatagttgcaaataaatatataagtttaactttgatgataataataccatattgacatatttgaataaaaatatcatcaacctatatatggatataatgagaaatttacataatatatatatatttacattttgatgaaattttttatttatatttttac

SEQ ID NO: 396214 - DNA, 918 bp, Cannabis indica
ggtgatttttgttccagattagatttgagcaatgagttaattaaatgttcaacaaatgttcgtcgtatgtcatttaagggaagcaatcaaaaacttaacaagcttagcagcttgagtaaagctagttgtttgcgtacctttatattattgccatcttggattcaagaaagaccagtctctaaaaactactcagtcctctttgagatcttgcttacaaaggtaagttgtttaagagtgctttctttaagttgggcttcttttaagaagttacctgattcaattggtagtttgatacatttaaggtatttggatttgtccagtactaaaattgaagagttacctgattcagtttgcagtctgtacaatttacaaactttattgctttcacggtgtgaaaagcttactcagttaccaaagaaaatgggaagcttgatcaagttgcgttacttagatattaaaggtgtacctctgaaagagttgccaaaaggaatcaatgagatgaaatacttgcacatcttaccaaaagtagtattgtgtgacaagcataacgatgatgtatttaaaattacagagttagcagatgctgaacatctatgtagagagcttgagatttctggcctggaaaatattaatgatgcaatggaggcttcaaagggtaatttgaagggtaagaaggaccttacgaaactaactttgaggtggaacaatgatgttggagctgatagttcacaaaaagaattagatgtacttgacgcacttcagcctcatacaaacttgaaggatcttgagattgaaagttatagaggtacaacattctcgaactggattactgattatgcgttttctaatttagtatcaatcagtttgaaagattgtaaaagctgctggtttttgccaccactcggacgactaccttct

SEQ ID NO: 396215 - DNA, 668 bp, Cannabis indica
aaaaaaaaaaaataaactcaaacttctttgcgtaaaatttaatttttaatatctaagaggattttttaataaaaaaattagtgctttattaattttaaaatttaatttctctttcaattttcttaatcattcaaaaaaataaaaatttaattaattgtttaagatttaataaaaaaaaatgttaaatctttctcatttttattttgaaagggtacgatttgataattgtcaaaatttaggaggcaaagttactaatttacaaagacacgtcaacatttaaacggaataatgggacggaagctaatagaaggactagatttctataaatgtaaaagttcacgggaaatttttaacaaactatatatttcaggggcgaattcagtattgttgaaagttcagtgagcaaaattactaattattttgaaaaacataaattctcaaataaatgaagagcaatgcttccatcctcacaaaggtgattagtaaagccacacaacaattggattttagtgtaattgaaagtaattacacaattttgtacatttgtctgatcatgtaattacattataattcaaggtaattgcactgtaatagtgtaattgaaggtaattgatgagttctaattacactctctaattcttatggccataagaattgagtgtaattac

SEQ ID NO: 396216 - DNA, 524 bp, Cannabis indica
tggtatttaccctaaaaaaaattgttgatgtagagagtagctagagagtatgcatgggaaagttaatggaggacaccattatttgagtggaggcacgcccgtatgtttgtgatcatgcaaatcaagctgcatttaaactcaacttttctttgcactatatccccaatttcctttgtctccaaaaataaaaaataaaaaaatgtgtaagcatcagtcttttcctacaattgtcatgtgtgttatatatatatatggtaaaaggagatcgtaatctcttatattggttacaccgtgtctttcaccaagattgaaagtaccaaaagtaacacacaatatattatatatatctatagatatagggatatgattttgtctcgttattgtacttttacggattgtaatctgtgatgtacgacagccgtcagatgagggagttatttgatctgacggctgagattgatctaggaataattagggttaaaaagtaaaaacgtaccctgacactcatttaatataccctgaga

SEQ ID NO: 396217 - DNA, 734 bp, Cannabis indica
gaaattgaccaagaattcgtatcgcttactgattgactccttcatattcgatttattaaggtcaaaggtggatggaaacaatcataagtgcaagaaaaatcgagaaatgaacttcagcgcaacgattagggcacgtgtcggaggagttacgagtgtagggtcgtcacttagggttcatgaatgatttgatctagtctataggccttcttcgactagctcttaaaaagaaaagactatttcaatgtatgcctcacgacctatgagacttacctatttgaaacgaatactcatgtctgcctaccctgcgctttcatcttcctactcaaccagactaatgaatgccaaacatttatatataattaaatcttatcaaattttgatatttttttgggtccgtttttaatgcaaggtccaaagaataccttaaaaaaacaaaactagagtgaaacataatagaaaagaattattttgaaaatattaaattaattttcgtttgttcatattcatataaaaattttaaagcaaataacatatcaacaaggggttccatggtctagtggtcaggacattggactctgaatccagtaacccgagttcaagtctcggtggaacctaatatttttgcaatttaatcctacttttcaaacatacacaaatactttagtgcatgtttggcatcataactaaaaaaacagttttttgtttttaaaaaacagaaaaattgtttttaaaaa

SEQ ID NO: 396218 - DNA, 531 bp, Cannabis indica
ttatttttttttaatttattacacatgtgacgttgatatagcactgatgtaacaattgactaagtaactatgttattattttgcttcccatatgtgataaaacttgatagaatgattaatttataataatactgtaaatagttcaaggatatttttaatatgtttaaaagtttagggatataataatacataagtcataattatatatattttacattagttttgggtgatcttattagttattttaaataatgacagttattgaagttagtagttattattattatctaatgttttttttttagagttattagttattgaagttattggattatggttactgatcgatgcttgaaagtaatatatttcacatagattaagtttttttttccacactctttattgtgaggttgttattatatattatttataaataatttctatgtaattttatctactaatatctattttatataaagtctgtctatataatacaatttttagtttttgagaaattcatgggtgactttt

SEQ ID NO: 396219 - DNA, 524 bp, Cannabis indica
atatttaaaaaaaaaaattgtgttaaacgtgctaaattcgtgttaagcatatcgtattgtgttttgatccgtttttatttcgtctaaagtcgtgtcgatctgttttccacctgcgtctaattttctcgaccttaacctataaaattcatattgtatttgtattcgcgtgccatgtcgaaatctattttgccactcctattgtgttgtgtcattttattccaagaaaaaaaatgaaacttttatttcggtatacgcatacacagaatgattacgaaatgctagatattatttcatattaataaagtaaaacgcattttcataaataatttaaaaagaaacgcgtatcctcaaattaattttctcttgtttttatttataagtgacccaaggacttaattttctttaatgataatttataagttattggtatttttaatagaaaaatgctaaaatgcacattcctatgtgtcaacagggccggccctgggcataggcgggctaggcctgtgcctagggcccaccta

SEQ ID NO: 396220 - DNA, 851 bp, Cannabis indica
tgagcaattcaagccttgtgaacaaataactcttgcgccatttgaacgtggccatgcttgtgttgttggtggccaccaccacatgcccaagaaacaaaagcgtggagggtgtttgacaccataactaaaaaattgtcctttctgtttttaaaaacttctctagctagacttgataataatatgtatcagcaaagttagcagagaactcgttttgactctcaaattatatatgcatttctgctcccccaaaaaacaaaagaatgaccaaaagcataacttcaaatgaaaaaaaaaaaaaacaaataaaaatgacttgaccacccgtttcaaaaaaaaatcacactgcagtggggtagaaagcactcgctacatcaataaataagcaatgtccaacaaaaacaagcattaaaccaatgggagttgtggcatgattcataacaataagcacctaacagtaaagttactagtttaactccaattctacaagaagtttggcatcttgtacttaccggtggcattaacaccttgaaaagaaaaaacaaatcatcgtttcctataagagcttcataagaaatagacaccatggtcaatcaaaaccatgagcctaaatgatcccaatgtgtagatatataagacctgacgagtaatcaaatatcaatactatgtaatttcagcaaaactaacgtagtaatagtaagtatgaccatactacttacccgtatcagtcgctaaagtcctcagcagaagcatccgtatcctggtcttcttccaccaccgcctcagcctcagcctcaccatcatcatcatcgtcatcttcttcttcttcaacatcatcttcttcttcttcttct

SEQ ID NO: 396221 - DNA, 830 bp, Cannabis indica
tataaaatttttaatagttaaaaaaatttaaagatatgatttaatatatgttaaaatttaaaatgtaaagattaataataattgagtgtggagaggatcccacttaattataacacattatatttctactttgttgtcttttccatctttttatattgtaacctccatcaagatgtacataccttattttgtttaaaagaaaaaataaaaacaaaaggaaagatgttatcttaaacttaaagaaaaagaaaaataaaaaagaagtagaaacaaatcattgaaacagctcagctcatacatttattttgctttatttatagtgttacaaaacatagtgctttgatataaaataatataaaaattaaatacaatataattattgtattaaattcacaaaatgatttgccaaattcataaaacgaattgttcacaatttatttttactcaaatacataattataactttgtcattcatttgtttatttatctatttttttaaaaaataaggaaatatcgctaactaatcatagtgtaccacttatcaattgtgttgggcaccactggtgcccaatagtaatgctctttaattataattatgtgatacttgacattgaaattatcatttcaaaaaaaaaaaactgtaaagtaggcttttgttaaaaattaattaatattttttaatgaaaatttaaacgtggttgttgcccctgatttcgcccaaaatacgtggaccaaccggatgatgacacgtagatggaaagggtttagcgtttgaataaatcagctaagtctccttaagcgcaggatcaaacacttagacatgcctccca

SEQ ID NO: 396222 - DNA, 767 bp, Cannabis indica
tagttaattttcttataattctcgtaagaaataaaaattaactctaatattatcgtgatatgggaaataaattattattttatatctctctttttattattaatttttacactttaaaacagttttttttttttttacatttttacgaaattttacataaaaaaatcatattgcaactagcgctgtaacctaaattgcaacaaaaaatcgtatagaaaatcctattgcaatttgcgctgcaaccactttagaaactcaaactgtaaatttgaaaaaaaaagttaaaataatagtatatggggtaattcccctttattattacttaactcattacttatctcgataatctagccagggcgtgtttaccatatttctgcggcaacactaagatgacgtttagttgggaagaatataaatataagaatagaaatgagaatgagaataagaataggaatagaatagaataaaaaatacaaaaaaaattatacaaaattattaaatttattctcatcatgcattagaatggtctttgttttcattttaaaattgaatagtcattctaccaaaatggtcgaaaggacattctattagaatgatatttcaataccttaatatgcaaccaaatagaatgaaaattagttcttttctattccattctatttcattatttttaaccaaacgccacctaagtagggcaaatactattttggaccctgtgttttgcaaaagttatcaattggaccctctattttgctaaatgacaaaat

SEQ ID NO: 396223 - DNA, 1411 bp, Cannabis indica
gtcacgtgacaattcttgattagtccaagttattaaaatttttatttaaaaaaaaataatttaaatataccaatatgaaaatgacatgtggataatgatttaatatttaacagtcaggtacctataaaatttcaaaagggtaaataccattttagaccctgtattttgcaaaagttacagattggaccctgtgttttgttaaatgacaaaatagaccctgtattttctaaaatagtgaaaatagaactctgagcttaatttttgacaactttttttttaatacaaccaacttgcagacaatgcttaatacgaacagatacaaaaaatgtaaacagttttgtcatagcacttttagatcggattataattaaactttattttgacaaaaatcaattcagggtcctaattgtactattttagaaaatacaaggtccattttgtcttttaaaaaaacacagggtccaattggaaatttttgtaaaatagagggtccaaaatggtatttacccatttcaaaaatataacttaggtattattattgataaaaattaaattaatatatttatttgcagctatgagttaaacttaagtatttatgttacaaatgacactttaaaatattggtgcacttataagtaataaaaccacccaaaaaaaatccatgtaaattacttgaataggataggattttccactgagtaggaatttttgaattcccacatgcgtgacaaaattaattagaagttgtgttgctattatataaaattaatttgaatttgattgaaacaacatttgtgatggttaaattgattaagagagaattttcatcaaatttaagatttggttatgaatgctaataaaataatttaaccacatttaaagggagagtcatgtgacatatcataatctgaacataatttgccataaacaaatttaatgaaattgattgactaataaaagttgtatataaaatttgcacatttgactttacatgttcacctattattagaaaattaaactgggatctcttagcaagtttcatgccttaatatcatacttaattcaaaattacaaatgttctattttttttttaatttttttttcattcgcattggttggcatattttgatactctatgatctggttcctttttcttttataaattgattaataaacacattttgatttggacggttagttttggagtagccagggtgccaacttagtaggatttatatgttagagatattattacaatggaagataaaccaagatatatacaactcaattgtaaaaataatacaaggacaataaaagagatttgattaaatatatgttacaatacatatatatacactatatataatacatatatatatatatatgaaaggtagaagagaagattacaaca

SEQ ID NO: 396224 - DNA, 751 bp, Cannabis indica
tttttttttaaaaaaataaatcaatattaaattttattattgattaacaataaaaaataatttttatgtaaaatatacaagtggtgacacattttatttaaaactttataggatttggtagtagtaataattccgcacaaaaactctaattaatagtcatataaattaggttattaagatttttgtttcttaaactttaacatgtactaaattatgtcttttgaacttttttggctattaaaaattctctttaaactattgagattgttagatttaaggacttttgtctaatttcattcaattttactatttcagtgattgtttatgtactaaatcatgctccccagactttgctatctatcaaatcatgccgctcaaattttgatatgtactacatcatgccccttgaactttcatctatgttagaatttttttactaaaattggacaaaagtctctacattcaacaatctcaatagtttagagacttttttaacgaccttaaaagtttagagaatataatttaatacaccccaaagttcgagaaaaaaaaatcttaattagtctataaactaagtttgattatgatatttaattatattaaaaataaatatcaaccatgacgagatgacagcacgtacgccaccctaaagtcgtggataattacacaattaatattactatattattatttactagtgagactatacgtgctccgcacgtgtgaactatttgcaaactttcaaagattt

SEQ ID NO: 396225 - DNA, 1095 bp, Cannabis indica
tttttttttttcatattttgtttagacaaccaaaattataaaaatatggatttataacatttttatggattttttcttaaaataaaaataccgactattgtttttacattgtttatgttgtttgcatattgttgctacgtttatgttgttttacatatttttagtaaaaatataaatccgtaaaagtaaattataatctctaaaaatagaaaaaaaaaaatctatttttcagtaaaagtattttgtttaaaactcctctagaaaaatattaacgattaagtgtagtgcttaagcacaaatctatttatattatttgtagttaaatacacctttcttaatatctttattattatgaaagagaagattttttgttttcataattaggagtgataaggcataaagaagaaaatgaaaatatacctgtttagaaataaattgcttaatttgatcctcagtgacctcggagttatttgaacgcaccacaaaagcaacaggaacctccccagctgtttcatccttcattctgaaaaccacataacaacaaatatattaattaattaaagagactacttaattaattaattaattaatgaatggattactaattaagtactacttacgggacaacagcagcatcagagatattggggtgagtaagaagcaaagcttcgagctcagcaggggcaacttgaaagcctttgtacttgataagctcctttaatcgatcaacaatgaataattcatcatcatcatccacaaaccctatatctcctgtgtgtagccatccttctttgtctattgtattctttgttgattctggatcgttcaaataacctgtcatccatcattccaattttaattcattatactttattattacaaaagaaaagataccctttatttaatcatacatatatatgcacccaaccacccacctcaatgttacaactcatgaccatacttaaataatatatttatcgatttaataaggggtaagttgaaaaataccccttttattaatcaattaattaaatttacttttaattttatatttattgaaaacataccttttttttatatgtattgtacccaaaa

SEQ ID NO: 396226 - DNA, 1500 bp, Cannabis indica
gaaatattttgaaaaaaatatacacggtgattttccttcaaaatttagtaaaataagatattaatggtaattttttttttttggaataaaggtaaaacttttactaaaccgaaacatcatttattacaataacacgtaattcaagaggtaaagtatgctcctgacaaatacaacctatgaaaaaacaagagctacgagtcaaatagtggacagctttgtttgcaaatcgttcaataaaccgaatagtgacattactcaaagataataaaataacattgtaatcatcaatcaagagtccaaactcaaaaaggataataaaataagacattaatggttaatatttttaaaaaaaagaagaataataagaaatatttgtgtaacgttacataataaatataaaaaaataaatggaaattttggagaaccaaaaaaagaaacaaagttaaatatgaataaccaaataaaattaaagtgtacaatggaatttttaattatccacaaatagaagaaaatccaaaccctatatctaataggatgaaatactatcttttttggccatttttattacattatattatcagttacaagactataacaggaataaatggatatctttattaatatttatttatataagactttcctaaataataataattaattatttggctaaagactttcctaaatacatactaatatttattattaattatgatatatgactatatttgactaatacagctggtgcttactatatgattgttattattatcatgattaccatgtgtgtcatagctgtattgagttaattataattactatatatatatgcatttattataaccaagttttatctcatatttattacttgcaaaaataatatatatatttttacacaatagtaattggtcttagaaagtttattatatgagacactcaagataaataaaacattaatgttatcggaaatataggtaatataaatttatggaaatatttgaaatattttcaatatcaacaaattatttaaaaaattatgaatatcatatatatttgacttttgagtaatagaaaagaattctaaaactattttaaaatataaggacaatttgtgaatattaaacatcccttttagagtttacatgagtaatgtattttttcaaatgttcaaccgattaaaatttgggaaattatccatatactgttttttaaatttttatttttaaatttacgtttgagtttcttgggtaatttttccagtgacttttttaacttaaatttttgtgttttaagtaacttttccaacatattatctaattattgaaatttttttttggaaaaattggtaatatcatgtcataaaaatattaaaaaaaaaaggctaattagtaatttttccctctgaactttgacatgtactaaatcgtgccccctgaacttttttggccgttaaaaatttctcctgaactattgagattgttaaatttaaggacttttgtc

SEQ ID NO: 396227 - DNA, 800 bp, Cannabis indica
gcttctaatgttagatacttgataaagtgcaatcatcccgtttttcaaaacttgaagaagttggaactcacaagactgtcacacctgcaaaagatgtatgctggagaactggtagcaggtacattcagtaaattaaaagaggtgaaagtaagtgaatgtcacacactgaaaagtctatttccaatctcaaatattgttgaacagcttgaagaaatgaaagtagagtcttgtgatatgatggagaacattgttttcgatagaagagcccaccagaagattgagtttctcaaactacagaaattggttctaaaaagattaccaaaattaattcaattctgtaaggttgagccggagcaaaatttggctacttcatcatcatcatcagattcgtcaccaagcaccagtatattcccattttttatggaggaggtacgtttcttgtttcaattaataatactattatatatcttttaaactaatttaaatgaaattttatttttagagataaagtttggttgaatatgcaattattatttttattgttttttaatgaaattaacgagacttttatgttgcaggtggtagcatttcctatgttggagaaattaaagttgttttcacttggttctgtagagatgatttgggcagatgaacttgaagaagtatcttacatgcagaatttaaaagatttaactgttaaccaatgtaacaagttaaagtatctttttcttctgctgtgacaagaagcttcattcaacttagaaaactaaaggtaagtaactgtgacaatatgcaagaga

SEQ ID NO: 396228 - DNA, 705 bp, Cannabis indica
tttcgtttatttttactaatacaattattgttattattatatcaaatgatatctttaaattttaatatgtaccatattatattttgaattttgacatatgctaaatcgtacctactgaatttttatctacattagactctcgttatgcttaaattggataaatatttttaaattcaacaatcttaatataatttgaggaaatttttaataatataaaaattttaaaaacataatttcatacatgttaaagttgaagttgtggaaaaaataaaaaaaaaaaaaatatattaatataactgtaagtttggaattttgttgctgattaacatgtagctataattcacttataataaccagtttaataatatatatttactttaactttaaccatgaataaaccaaatagataccaacaattgtaataattaaataaaaaattaaactctcgtttataattagaatcacaattattgtggggtcctaattcttttatttacctttttagttatagtcctcttcccttatcaactaagctaattatttaattaaaacaacatataaatattaaaaataaaagaaaaacttttctaactctaagcatgcactttccttttctatcaaacaaaattgtattcgaaagtgataataaagaggaatcctaagttaaaaaaaaaaaaaataattccaaaagccaatttttttttt

SEQ ID NO: 396229 - DNA, 625 bp, Cannabis indica
agagagagagagaggaaatcgagattgggatggaggagctcgggggtcctcggcaatggcgcctagctcagtggtccttggcgacggagtgggtacatgcatcgagagagaaagagaagagggttgagagaaagagagagaaagagaagagagtcgtcaaagagagaaagagaagagggctaagagagagaaagagagacacagacagaggtgatagactaaccttggttgggggtcctcagtgacggcagcaggcagggtggtcatcggcgacgggtctaggttcttggctccttgcatcatcaacagaaagagcaatgaaaagaaaaagaagaaacggaggaaaagaagaaagaaaaaggagagaacgaaaaagaaaagaaagaataatagaaaaaaaaaaagaaaagaaagaataggaaaaaaaatgaaaaagaaaaaaaaaataggaaaaaaaattgatctttttatttgattttattttttaaattaattatttacgtggaccaataaaattgtgccatgtgtacattgtgtccacgtggacaagccaacatggcacttaacagctaaattttgatggaaacagtaaattgctaacggtatcgtagttttgggagtttta

SEQ ID NO: 396230 - DNA, 384 bp, Cannabis indica
gttaaatttttagctgtcgtattaatattagtataattaagtattaaattttataagaacagtgttaattataaaagatcgtataattattcaccaaatcacatctcataataatattagacagtgacgaacctaatatatagagctagagtgacatatttcgtatatattttttatattttacattttatttgtattttttttaatttataatttttttcacattaattttctatgtctttttttgcctctgcctgaacaaaatttctacgtctgctcttaatgttagacactatactactactgtttacgtgaaaagttacttttgaaaggtgagatccatcttacaaaattttttacttttagtcataacaaaatttgtga

SEQ ID NO: 396231 - DNA, 743 bp, Cannabis indica
ataatataagatagagtaattacattcaaattgtgcacatcaatgactgtatgtaattttagttacatataattttgtgtagctagttaggtacattgttttaaatatatgattaagatataattacaaattatgtgtaaaaatattaagtgtgtatatattttgaacacttgtaatatggatctagtattacatatatacatattattaattttattcattaattcattttaattaaaaccaaacataaatattcccaggccgcgtaacataactgatcatatatatagttgagatccaaaaatttatatgtataataattgtcggttgatataaaatgtaaatatctataattaatcagtgatacaaaggttaattgtagttatatgtatagtgaccaagttcattaatttttgtatggtgaacatcggtgatatacagtatatatatggtgacaaaagtgatagtcagatatgagttaatagtgtctactatattatgattatatattatatatatataggcgtgtgggtgatctatacatatagatatataaccattgaagtacatggcatcaattaaacgaagcttcgtggcaccaaggtttcgggcaccgaccttctaagccagcggaaaactctcatttactactaatattattattattattattagaataaataaatattattttgagcttgtgtttttataaaatttattaattggattatttattttgttaa

SEQ ID NO: 396232 - DNA, 1448 bp, Cannabis indica
taggagaagaaaaatgaaatgaaatggaaaaaaatgaagactcaatctcagattggctttggtctttgctttatataggatcgagtacactgtaacagactgaaaagaaaatacataacagaaaagacaattatgtaacaaactaaactaacagatttaacttcctaaactttccctaaactgccctaaacccaaactttctcttaaatatacccccccctcaacgtgacacttggctatgccaagtgttaacttgtcatacaaagattgaaaaagtagaagtaggcagtggtttagtaaatatgtcagcaagttggtgttctgaagcaacgtagcgaacttcaagttgttgagcagtgactcgatcgcgaacaaagtgcatatccacctctatatgcttcgttcgagcatggaaaactgggttggaagctaaggatcctgcccccaagttgtcacaccacagaatcgggcagtgagagatgtggatgcctaattcagtgagaatggattgaagccagatgagttctgatgtggctaatgctaaagctcgatattcagattcagtgctggatcgagcgaccacggtttgctttttggagcaccaactgatcaagtttcctcctaaaaagatgcaatatccagaagtcgacttcctatcatcgtgacaaccggcccaatcggcatccgtgaagccttggagatcaaatatttttgctggtttgaagaagagaccagcatccattgtgccagcaagatatctcaagactctcttgcaagcagcccaatgttcagaggtgggggactgcatgaattgacttaatcggttgacagtaaaagcaatgtcaggccttgtcatagtgagatattgcagggcacctatgacacttcgatacattgtgggattttgcataggagttcctgaggcagcagtcaatttggtggtggaacacagtgggggtcggttgggtttagaatcaagaagctgggttcgagataggaggtctttgatatatttctgctgggttaagtgaagagcagtggctgtcttttacctcaaatccaagaaatagtcaactggacctaggatttttagagcaaaggcctcgtggagattagcaattaatgttggatgtgagatgaatcagcccctgtgatgagaatatcatcaaacatagatcaagattagtgtcaagttgccattgatgttgttaaagaacaaactggtgtcagctttgctgttttggtaaccccaattgagtaacttagctttgagagtatctaaaccaagctctaggagcttgttttaagccatagattgctttgtgcaatttgcaaaacatgatttggatattcagaactaacaaaaccttgtggttgagccatgtacacatcttcttgaagatccccatttaaaaaggcattgttgatgtctatttgctgaatttccc

SEQ ID NO: 396233 - DNA, 1294 bp, Cannabis indica
ggtggctacgaacagtgctggtgcactacgtggaggctcggacaaaccgtagtttttcgtggtgtagtgcacgattatggctgaggcagtgggaataaaggaggctttgagttggattaagagcaagggatggagagatgtgattgtggaaaccgattgccttaatgttgtcaatgatattaattctaacaaaccaatgatttctccatatgggtttgtgattcatgattgtaaggcactcttagtagatttatgtctgtttcaattgttttgttaagcgatccgcgaacaaggttgcgcatgctttggctcgtaattccgttcatacagctgattgtacattcagcgtggctactttgccatctgaaatttcatccttgattttggatgacttatgttaatgaagtttcttcttcttttcaaaaaaataaactatttttaaaaattctaagggaagagagagaagagcaggagcgactaagacttaatttttcagagagaatttcacaaagttttagccatgtaaattgatgtgtatgaaagtttctcataagtcttgtattaattaggagtgtaaatgggtcgggtcagatctgatccggctacgatctgacctgatccttatcatgtaagaatccaccccgccctgccctgttagatcatatactcggatcggattagatttgactcgacttattcagatcggatatgatccgacccaatttatttttttttcaagaattttaattttatatctaaacttataattttctatctattttaattttgtataagtattatttaatacaatattatgtttgatattgacatgtattaatagatgtgtaaagataatatatttttaataaactcgaccccaacaccaactacgggtcaggtttgggtccaggtctaagtccgggtttgggtctcgggttcatgtccaggttcgggtcctgggtccaggtctgagtttgggtttgggtcttgggtccggtccaggtctcgggtccgggtttgggtcccgggttcgagtccagttttaggtcctagtttggttacaggtgtgggtttgggttcgggtctcgggtccggtctaggtcttgtgggtctgggcacaggtccaggttcaggtcctgattccaggtcccgggtccggcccccgggtctaggtccgaatttcgagtccagtctgggtcccgggtcttggtccgagtctaagtcgggttcaggcccaagtccggtcttgggtccaagtctaggtctggtcctggggtccgagtccggttctagg

SEQ ID NO: 396234 - DNA, 1115 bp, Cannabis indica
gatcgcgttgctggaacttcataaggcgaagcccaccgttggattggtaggtggcatattttccatgtggcctttatcaatattagatcgtactggttgacttgacgatgctttggacgtgtgtcagtactcaatggttgttcttatttgaattatacttattcttagccgttggatcatatacagtacacaaggacacccatgctttgccaggtagtgtggcatgggagagatttgacatcgtacatacaaaagctccaccattggcttcgtagcttgacacacgtggggagaggctccgcgggtcaaaggcgtaccctaaactaacgaattttggtggaaggtccatgtccttcgcaggagcaaagggtcttgtctcctagaagggaaaaagctacaaattcgcggacatctttctcgaagctcacattcaagggaatctctctcgtggaggcctgggaggtctgatccacaaggttagagccttaatcctctgggggcacggagtgaggcccttgggcggctttaatgatttctcgcttttccttaaatattgtccccgtgtcgtgctagtgaaaacgcggataacatttacccccccaaggtttcaagacatgtcatggtctgggagcttacagtattttcttttgaagcggatgttgtgcatgcccatcctctctgccaggcgacgtccaaccctaatcctccggccggctcgcttaaaaatttgtttgttcaatttgtttggtgaaatatcgcattcaaattaataactaatagcttcatgtggtctctcatcaaattaaatggaaagatatatatggacaggccaagtcgtccattttgaatgaataattataatttggtccaaagccaaattaatattcatggtattgaacaacattctatataattacagttaccactccattctaccaaaaccctatatatttatatatataccaaattgatgttacgtccaatgcacgtataattagttttctttttaattaagtttaattacgtaattttaagtgtaatacatgtatgtttaattttttttgttattaagtaatgtattttttttttaatttttgaaatagagtttgagattt

SEQ ID NO: 396235 - DNA, 640 bp, Cannabis indica
cttaataaaatttaacgtacattgtaaattactataaaaaatttcattctgttatatttaaaagtagatacgatatactgataaaaaaattagttgataaaataattttaatatattaatataaaaaattataaaattactaaataatattttatacataatagaattagttatattatcaaaattattatatatatactaattcttctactaagctattcttctactaagctatatggtaagtgttactaataaaaagatcacataaaaatatcttaacaaaagataatatagtgtacttaaaattaagtttttgtgttgtaatttcagcggaaataaccttgaggattcaatcataaaatctgcaatgaactcacaactttgacagtaaaatgaacataaaccaattaatctccacaatgaatcaaatctgaaatcaaacaaagaacaacacacaattttatcttggttccggtcctagagatcaatatgatccctggccatactccagctgagaaacatcaccaatcttcattaatatgtgaataagagagcaacagtacaattacaataaccagagcaatcacagctcagatggtactcgatacacactagagaaaacagtcacagttttctctct

SEQ ID NO: 396236 - DNA, 582 bp, Cannabis indica
tatttttattttattattttaactattattaaataaaattatgataaactattttattatatatttatgacatatacttaattatatatgatatattatttattttataatttaattatttttattttttgctgcaaattattcatttttatttatttattattgtatatttttattttaatttaaattttttaaaaaaaaataaataaaatagtctagtttattcttaaaccaaacacaaaattatttacagcataatctaatcttgtccagtaaatatttacgtacaaattaatatttactatggaaagtgatacatcaaattaaaactaatataacctaagttatagattttggttaaaaattctataatataaatttatttctataaaattatatttatttatatatattatcaaaaataaaataagtaaataattaattaactatataaaaacaaagttgagaagtagatttgagattgaatgagtgaaagtcaaagagatccacgatggtcttagatcttttttgtaaagcacgcttagctaatttggaaattatcagttaattatgattaattat

SEQ ID NO: 396237 - DNA, 782 bp, Cannabis indica
aataccaattaatattcgtttcagtacatacacatacagtagattgaaatattgaaattttaatgcaaatacaaatactggaaaaaaaaaaaaaataaaataaacaagtattatactatacatacacacttaaaacatgcaatcaaaagtaataaatagaaccacaacataaaaatcagaagatcgaaatagaagaacccaaaattgtatagaacttgaatatctaaacctgctgcaaattttagaagaagaaaatattttcaacgttgcctcccaaaacactaacaagcaatgtagtgaaaacagcagacactcatatatcatatatatatataagaaaatgtttacatatatgtattatatatatggggtataatctatttcgtgttccaagcaacaaagaaaaaaggaaatcaaaaaataattaaattactatttacccaaataaagaaagagaatcaaaaatttgaaaagaaaaacaaggtgatgagcaattaatcgcatacctccataaggtaattttcttctttgacgagctttttcattgcgacccagaataggaaactaacaaaagtttccatctttatcattatgatcgttgacccacctaagaaaaggaaacccagaaaaaaaaaatcattattaccatgaaatagaatcttcaccatcaaatatatatatagaccaacaaaaaaaaaaaaaaatcaaaagccccatatctaaatagctcattaattaacaaggaaagatctttttattgaaaaataaaaacacaaaaaaaa

SEQ ID NO: 396238 - DNA, 786 bp, Cannabis indica
catcttatgtaaagccatcacccgtgtccttggctccacctcctccaccaccaccaccaccaccactttcctctttgtccaaaactctcacgccctctactggacctaccccaccaccaccaccacccctcccccacctttttcatctagtaggccaaacagtggggctatgttgcctccatcgccatcaccttggacgtctatatcttctcttgttagtgccacaagctatcaaccacccccacccccacccccacccccctattcccttaatatgtcaagtgcatcaacacttactaataatagagctgatataccataccacactcttactctgcctactcgtggtagccaacctccacctccgcctccacctccacctttgcctacatctttactgccaccacctcttcttccttctcgtggatcttcgcttccagcttctttgcctagtgcgtcacctcctcctccaccccctccacctcctatgtatggatcaccagccccaccacctccatcaacccgtggagtaccaccaccgccgccaccacctccaacatgtggaggtccacccccaccgcccctaccaccattgcgtcaaagcccaactccaccaccgcctcctccaatgcctggagttccgccaccacctcctccaatgcgtggggctccaccgccgccaccacctccaatgcgcggggctccaccgccgccaccacctccaatgcgcggggctccactgccgccaccacctccaatgcgcggggctccaccgccgccaccacc

SEQ ID NO: 396239 - DNA, 712 bp, Cannabis indica
tagaaggaaccagctgcaatttgagttttgtggagcaaattttgtggaattctagctgaattcaagtagtaataatcaaaggtaagaaccatagaatctatctctataagttttttttttcttttagtttcaagcatgcaaatgttataattcaattctattcaaaccctaggagttagggaatgttttctaaggttgatttaagttggcttaggcttagttgagttagatttaagggttgtagttggtgttgagcaagcttgagttcaagaactcaaacttggctcaacgatggtggattgtgtaattttcagtgatacttggtcttaccacatagaaatgatttatatggataattacaggtattctagaaataacctatcatttttactggtgcaaaacccaaaaaatggcctgccattttttagaaaatagcctatcggtttttgggcagtttcctcgtttcttagttttttctcatgtttcctcaatatttagggctttgtcatactatttatcgatagtggaacttttagttttgagtttagaacctcctgtttcgtccgttcaatgcgtgatttttcattcaagtcaaccgacacgcttaatttcaaaaataaggtaagactagcatagaacgtatttgtataggaatatgtgtatgtgtaatatatgcatgttatctgtgattcgtatgctaccaacactagta

SEQ ID NO: 396240 - DNA, 530 bp, Cannabis indica
gagcgggttacacttaaattttagcaacccaaactttagattgggttagaaaatatgtaggataaactgcccaaaccttaaagggaaggagttccttaactgtagatataaagattcagattcttggttttggaaaaatgttgtaaaagccaactctatcttaagaaaaggagcttgtaaattggtggttgatggtaggaatactagtatttagggggatccttaaatccctcatagcaatgatttcttcccgaaaccaaaggctcttccgctagcaaagttgctgatcttttgttaaacagtggtggttgggatgtcaataagttaaacaacctttaaaaggtggtagtccctctgaccaaggcaatgataggtgagttagactcttgaaagcaatggtcatttctcatgcaaatctgcctaccttacccaagctttggaaaaagggctcctcactgtgaggttgctccttcgctctggaataagctatggaatagtaaaatcttggagcgtcataaagttctttggtg

SEQ ID NO: 396241 - DNA, 545 bp, Cannabis indica
attagcgtaactaaatcctacatcttgagaaaatcacagaaaataaaattttgagaaaagtaccccaaaaaacggcaggccatttttgtgaaaatggcaaaccgtttttctgggttttctgcctggaaaaatggtaggtcgttttaccagaaacggtctgccatttttatagcaaattttccccaaaacctcaaaactcaaccaaaacgataccaaacctgccaaactgtccagaacttcaaataaggctaaaacaaacctattttaacaactaaaaacatccttaacccctagaagcaaaatcaccattaaagatctaaacttgaactcaaaagcccaaacctagttcaatctcaaccataaccattcaaaccagaatataaccatatatataacttaacaacaacccgagaaaatattctctaaaactccaaaacaaccaaaattgaaaatcccacaaattgcatgaaaatctaaactttcaactataaaattcaagaaagcaaggttactaggcttaactttgatcttcctctccaccaacc

SEQ ID NO: 396242 - DNA, 1247 bp, Cannabis indica
cgaaaaaattttaacaaaaatactaataaaatagaagaaaaagttttaacaaaaacactataatacagtaattttttacatttttactgtaactaactttaacaaaaatacaatatttaaaatttacaaaattacaaaaaatactttcaagtaaaataaaaaaaaaataactacataaacaaattaaaaaataatttttttttttggatcaatcaagaaattcattaccaacaaaatctgtacagactatcagcacctccagccgaggcctgcacaatcaataatttatacagaattttccttgtcctctaaaatctatacctgctatttacggctatagaatattttttacagcaaattttggcaacagtcagttttcccaggacaatattcagccaacaaaaacaaacaggaaagaaatcagcaacagtagaaaaaaaccagcaaatagatcacttcctggattgcaattttgagaaccaatccttgtcactttgtttggttgtgcttggccagcaactcagtactctaagcttcacctcctcctttgttttcctcactagctgctcaactgatgaatgctcagaattccacaaaacaccattacggacctgccaaatctgataaacaacagcagcaactgcagctgttaagacagcttttcgaaatctgctgatttttgctcttccaatccacctaattaacctgttcaagtccattgtttccactctctagttcagccattccttaattttagctaagcaaatgtgagaaaaggaacagagaaagaataaatgcttagatgattcagtttgattactacacaaaaggcaggattcttccccaataatattcaatctatgcagcctctctctagttttaagtctatcctgtattgctagccacaaacagtaactatgtctaggaacatttaatctattccaaacctcatggctccaattcactttgttctgtaagggacaaagtgctttgtaaccattagagattcgataaggaatagttgaagcttgctgaacatccgttacttctaagacttggtttttaacggccattttttccaataccaactagcctgaggagaagcttaatagttccaccataaaaataattttataacaacttaacaaacaacataaaaatatggttataaaacaacaaaaatataactacaaagcaacagaaaaataaaaaaaatattgaccgaattgtaataagcaaaataatat

SEQ ID NO: 396243 - DNA, 772 bp, Cannabis indica
atgcccttccagaagggctgttattaaagacattaatcattagtggtgccatttggtcctacttagccaaatgttttttgaatactttatttaatatattttttttaatgaattaaattatttattaacgtggtcataaacataattaaactcatagataattactgtattttttgtcggagagaagaaaaagtgttggacagattgagattttttaagatttggggtgtatgatattattattaataatttataataagttttttttatttaagtttaaattgttatattatatttggtagaaaaagatatatttagtattataaattatattctacatcattcgtaatggtacttttaaaatgttttgttgtgttgtagatcacttaaaatgtttttttaaaatataatatgtattattattaattatgaaatatgaataattttatttataatttaaatgaacatttagattaaaaaacaaaattaaatcattgatattgatctttggtcgagtttgatctgaggaatgaatttgcttaaatgcggtcttcggaggaccattagagatggatcacaagttagagctttcaaggacccatggctctctcgttcaaggtcttttcaacctgttacgaagaggattaataatgactatcgggtgaatggatttattattccctctggtacttgggatgtgaggaagcttcaacaggttttttggctaatggatgtggacataattctgtctattccattagcgaggcgagag

SEQ ID NO: 396244 - DNA, 1091 bp, Cannabis indica
acctaaattatatttgtggaactttataggtgtctggttgttaatattagataaattgtcatgtgtcaatccctgattggtacaggccatatatttgtacctttttttaaaaaaaattaatttgtatacaccaataaaaaaatgacacgtggataattatttgacatttaacgaccaggtacctacagagttccagaaatataacttaggtattattaccgccaaaaattaaatttaggtatttatttgtaactgaaagtaaaatttaagtatttatgccgcaaattactgttacaaatttacatcttaaaatttttattacgaaatatgcttataaattttaaaattacaaagatacattttactcaataaaaagtaagaaaataacgaaagattaacctcacgacaattataaataaactacaaaattactaaaaaaaaaaatgatttcatgacaactataaataaactatatataaaatagtttattgtttttattgaatctgaatttttataaataaaaaagttcaaagtgtaaaaataaaaatttctcgtagtattttgttgttttttttaaaaaaaaaaaattagtttattatataaccttttctataaaatttataagaattatgctgaagtttagtaatatttttttaaataaaaataaaaataaaatttttgtttttgaaaaaaagaatgtatttagtaattatatttgtttttttaattttaaaaacaaaaaaatggaagtgttctgtaaattttattttttatttttatttaagtcaggtcgtggtctagagttagagtctgggttcgagaccagatttaggttcagggtttggggtttgggattcaggcaacaagcaaggatttggggctgaggtccggggctgggattcgggtccgattttgggtcgtggtttgtggccaaggttcaaatctggggttcaaatctagaattcgggcgtgagttctgttaggatatttttagtatttaatttaggttaattttagcacatttttcggtttaatttaaattatggttggagcatttttacgcttttatcttttagttttgcagatttaaa

SEQ ID NO: 396245 - DNA, 950 bp, Cannabis indica
aaatttatttttttaataataagtgtactatcattttatacaaagtaacaaataaaattttaccaaaacaaaatatcaactaaaataagttaaaagactttaacatcataataattcaactagcactgtgacgtgtacatacgtgtactgtacacgtcacacaattattacatattcaaaccatctcatatattaaatttctttttaaaaaatattatttatgaagaaaaaatatatatttttaaaaatatatatttcttttaaacttataccttaaaaatataaaaataaaaattctcattaaacttggtgttgttatttaatatatatatatttattttttactgaagatattaattatcataattggaagccctaaaattccaccaaatctttggaatagcaataaacgataaggcatagcataaaaatatctgtaggtagtggcataacgacaagactacacactaagctcactgtgttatacatatatatatcgaatatatatgtataataggcttaatattattaattaattaattataaatctctacaaaaataaaaccaaccaaccaattaaataaaacacaaccatcttaaacttttagtttaattagatggatctccactagttccaaaatacaagcaagtgtttggtttgatatgaacccttctttttttcttcttcttatatttattattattattatttgaaaaaagtgcattattaaaagcccacaaactataaaaaatcattaattcaatattgaaagaaataaaatataaaattcttgggctcttggttagctctagatgcagatctatctccgtcttaactttgaaagaatatataatattattggacaaacacaaactatatatatatatataagaatatgtctttttagaattgttttacttatatatatttgtatataaagttaatacta

SEQ ID NO: 396246 - DNA, 653 bp, Cannabis indica
ttttttttttttgtcttctagatatgaaaacaaaaaatgaaccaggtacatacattcagtgaacttggtagcatgactattcttgcacctgaagttaggcaaaattaaagtcctcaatttacgttgtggcaatattatcatctctcaattaatcaccgatacttataacaaggaaaaaacagtgtctctcaatttcctccgcaaaatcaaagctcgatctccaatatttcagcagaccatataattattaattgtaacaatagtatataaatttaaaatctgtaaatgcatgtattttgttatgaaaatgtatacccttaactctacaaatatgcatgcatgcattattattttatacaaaagttataaatctttatggcattatgtaaattttcttatttttaatactcggtcttttgttataaaaaaaaggaaagaatgcttgatctacttttattatctagttaaaaaagtatatttaaatgcagtgacggacccagaaatttttctttgtgggggctttttattattaaaaaatatttgtacatatattataatcatttttactagatttatttaattttgtggtggcttttttactattttagtctataattatcaaattaaaaaaaataatttaattttttaaaaaa

SEQ ID NO: 396247 - DNA, 606 bp, Cannabis indica
agatatgttccaaaacatcacaggcagaatctggaaacttcttaattcatggcaagagaagctattttccggttaggggaaagaaattctcctgaaagcagtagtgaaatcaatttctacctatgctatgagttgtttccaactatcaaaaaacttaattgatcaaattagaaaaaaaaaagatgaatagattttggtgggtttcgaatgccacgggaacaggtatccattggaaaaattggatactttatgtcatgcaaaatgtgaaggaggcttgggttttcatgactttgttcatttcaaccaatctttattagcgaaataagcatggaggattttttccaatccaaactcattacttagtactctgtttaagcaccaacatttctctaatacgagtttcttggaagctaaggttggaacttatctctctatgacatggagaggtatagtttgggaaaaagaattgcttaaaaatggtcttagatggaaggttagaactggggaaaatatttctgctgcattagatggctggctgcctaaaacaactgttggaaatattttaccaggatctagatttactaccaagtatgtttcattaacatc

SEQ ID NO: 396248 - DNA, 659 bp, Cannabis indica
ctctctctctctctctcgtgttttcttctgatgctgccactaagagtctttgtttccctatccggagagggctcaccgaccttcttttgggcttggtgtggccatcgttggggatgggatggaggaggggtagagtgattgccatatgagatgggatttgttgggggctttatttctacttttcgccaccattgctcttgggggtttgttgtgagatctaatgccatcattctctagtttatggtggtccttgtgttgcgattctttgttggggttctcgttgacgttctcatgtcgagtctgggttgtctcggctgttggagatgctatcttctctgacgggacaagtcaaatatgattttaaggtggctagtttacgggacttttgataatgttgggttgtcgagaggtggcttcatggcatgactattgtggattagggtaggatgttagtttcacacactacatcagtcagagggggtgggttcggatctggtcggtagggttgttcgcggtgcgggtggtgcggtttttgaccattttttcaaaccacccgtagatgcaatttttctaatttcccaaaccgcacctgtaccgcaaaactaaaaaaccaaaactgcaccgcaaaaatggtgcggtgcggtgcagtttttgcagtt

SEQ ID NO: 396249 - DNA, 1133 bp, Cannabis indica
attatatacatagaataaaaaacaagaaattttgggggatatttcgtatccattactttaccctcaaacaacctaaaaaacaccacaaaaatcaatatcttctccgtccaaaaatcttcgtaattcttgtgatagttggtgtctcaacaaaatagggcagtcttttagtgagttttggcgtctgaaaatgaagtgggtaacatgagttcggtagagaaaatagagagaaagagagtggagtttaattgtgactagggaatttgtaaaacaatagagagattagcataaaattgttatggggtcaaattgggagtctttttttttattattctaaatgggatgtgcactttggtagaaactcaaatttcttataaaaaagttactattccaactatactatatgaataaaaagaaaacaaagaaaagtactaataacttgcgttgggttggtcaagtacagtaagaaattaaccaaatgtatagaaggtataaatgcgaagatgacctaacatttcactttattgcctttttattattatattgttgaaatacaaaagcttttggtggtagttaagttaaagactgatcaaagcaaagacacaaatttatcacactcggtaccatttgtagctttaattaccgacacactttgtaaagtctttaataagagtagaaaccacagcttctgaaataaactacctttcctttatcaccttctcttcatatttattcattattggttccacaaaaacgaagtacgtagaagagtggaaaagtagcacagtgtgccacgtttggatatcattacagtcacattattacgacccacatacatatcattaagtagaaaagtataataatatatttttcaaattaaaaaagtataataatatatatgtgttgattaataataataaaaaaaaaaagttggggaattatttatatactattttttaaatttactgtttgagtttcttaaacagtttttatgtgggttgttatgtggattttagttgtaatttaggtagtacagttggttgctatgtgggtttttatgtaaatttcattaaaaaagaaaaaacttctttgaagtgtaaaaataaataaactacaaaaatgtatataatatatat

SEQ ID NO: 396250 - DNA, 1148 bp, Cannabis indica
ctactaaaaaataccattgtgatatgtctctttaatataaatatttcaagaagtgtgaagcattattattttttacgttaatttttaaaaagaaaaaacctatttagttactaatatagtgatttagttatttattttataattttttaaaatcttaattaacaataattttagaattttgtaaattaatttatattatattagagcatctttaatcatactctctaaacacattctttagtaaaaataggaagtgaaacttgataaaatgagctccaaccatacaaaaataactctttataatagagaatagatagagagctctctaaatgtagggagctccttacttttttgcttaaacttttttaatagtattttaatcaaaagaattgatagtcttccattattttataaaattaatttataattgaaaaatttaaattataaaatattattaaaattatcaaatactaactaaagtaagggccatgattggagcaacaaccataaaaataactctctattttaactttttttttaactattttagctaaaaaatagagagtaccattggaaaagctcttatacaataactaattagctttcaaataacaaaaaaataatattacaacaatgggctttagaggccttaatatttttttgctgaaaattaaaataagggacgacatagggttgttaatctgctgaagggttatgaaccccttatgacgtcagttttttggaaataaccgatgccatagagtgtgcccctatgtcatcggttatttccaaataatcgacgccataaggggtttataaccctccccaacccttcgtcttcctcatttgatcagccaacccagaaacccctaaactagaaaaaccccaaactttctccgcccaccatcacgttaatcactccccatttcaccatttttcaccatttcaactcatttttttttttaaaaaaaaaaatcatctattttacatacccaaaactatatgcttgaaaagatcacattttttctagtttttaaatgtaaactgaaggtagagatagtggttgtggtggttatacctctggccaccagttttagtggagaaaatattgaatctcaacgttcattaaggtataaatctaatttcta

SEQ ID NO: 396251 - DNA, 724 bp, Cannabis indica
aaaaaaacagagccaaagatcatatgttttggacttgggaatttaaataagattaacaataatattattaataataaaattagaagatagagaggaattggttacacagaaaacacagatccccaagtcttatcttagttataataagttctttgtccatgtgtgaactaaatatattatttaatttttaacaacaaaaaaaataaaaaaaattatttacgaggagtgatactattaattttctattataatattttagttaatctcggtgtctaaaaatacataatagaatatttttttcaaaaaaaaaaaattcatagtacactggcgaaaataagtttgaagtttattgaacacaggtagtggactgtaatatcaaaaactttgttttccgtactgtaagttattcataatttttttaaaatttgtagagatgatattgtaactataacgaatattactataaaaaaaattgatatgtgatttcgagcgtgaagattaactaaaaggttgtatttaacactgtaaaatttgtcaaattaacaatgtgaaatactattgtaaaataacctcacttaatttactctatgcgactatggtgaccagatagtgtaaatctatggtcattttatgaccatcatagttatggttgcacagtgtaattcatagtcatttccgtgactatacaagattattttgctaataaaaaaattcataaagacta

SEQ ID NO: 396252 - DNA, 1126 bp, Cannabis indica
cttctaaatgccacgtcaccttgagcgaaactggtcaccagcaaataacaaaaccaacacgacatctccaatgaccaagcagctattaattttttttttttaatcagacgcagatatattttaaaaatgaatgaattaactgggtctgggactactgctgcaaaacacactttggccggtcatatggtaccgtgttttagttattgtatgtgctcacaatgagtctttcaaaaaaagatctagttgataactttcactgtacatatttggtcaatttattaaggtagagttgtgatactatgaaatatggcagattttgtgcccttcaccacacaacctcctaaaataaagaattagtggtcaatgggttcaatgcatgcatatcgcttcaactaagacggcatgacctaatcgatccacagcaacaacaaaaatggctccaccaattacacttcacacgcttccagacaaaaaaaaaattaaaaaaaaaaaatttaaaataaaagaaaaattacacttcataagctctcataatttattattttattctttcaattctacaaaataatttaaattgtaaataattataaccacaaaaaattgttaattcggcaatttacactactacaaaattagaatttagaggtggtttttaagaactttcaatttttggcaaaattcgctacggatgctgttccaagtgacgttgcagctaggggtaaaaacatacgacgtcataggggtcttatgtggtcggttattttgtaataaccgacgccttagggctcctatgtcgtcagttataatacaataaccgacgccatagggcccctatgccgtcggttattatacaataaccgaccccataaagtcttcctataattttttttttagctttacaattttgtatttcagcataatttatatatattatttaattattaatataattaaattaagtataaaatttatataataaccataaataaaaattaaattaaaaatttaaataaatacagatttatatttattttttttggatgaaacagagaatttgtattgctcacaacaaagtttttacaaactaattaattgcccctttttaaaggccaggaataactataca

SEQ ID NO: 396253 - DNA, 620 bp, Cannabis indica
tacgtcgtcgtctctctctctctctctctctctctctctctctctctctctctctctctctctaaccactctagcatcttttcccttgaattccttaagttgtaagtaaggtttttgtatgatttttgggtgttagggttctatttttgttcttgttacttgggtttatgttctgatgtttcatttatgttaaatgagctgatttgaggctaggttattgcttgattgggttgttagacaaagtttgagttttagaactcaaactttggtctttaatggtgactcttaattttgtgcatgttgtagtgttttattaccttggatatgttgattatggcctaattagcaggtttggaaggtttggtagagtttggagttgaattgagtgagtaaagaaattttgaagttttcctgcactgaatcggtcgaccggttcagtgggacctataggaaccagaattccgggtggtcccaaggaaaccccacagaacccgaattccgattagagaattggtctgtcggttagggcagtttttgttgggttttgtgccctaaataaaacccagtttaatacaatgagatttacttataaataaagatcagaaataacattttatgtt

SEQ ID NO: 396254 - DNA, 867 bp, Cannabis indica
ttgggagaaactttggaagatagagttgcacccgattaaagcatttctgctggaggctgttcagtgatcttcctcccaccaaaagcaagcttggttttcaatggagtccgctcttcacttgttttgccactgtacttgtactcgggctttttggttcaaggctgagtgcaattgggacagtttgttggagtttggtatgtggtggtgtaatctgaatgatctgaatttgtaggtgatggttgcggtgttgtgcgagtcaatttggcagtggcgtaatgactgtgtttttaaagggcaagctgtcgatttggagggcattttcagaagttttactcaccgaacctagcagttcatttctaagactatctggtttgatcactttgaagatcagaatttggagattcagagagtagaaactggtgtgacaagctctaccctgctagatgtgtcgtggtgttgtaaggttgatgcctccattcgtgatgatgaagctggtttagcagtgattaaggttaacgaggatgatgtagggacttctctggtttccctgggctggacaaaagtcaagggagttttggagggtgagtttctgagtattgctttggcccttcggttggcaaaggagacaccagtagttaaaattgagactgattccttgattgtagccacagcctttgacaatgcacaattaccatttggctgggagacctttcctctgttttgtgattgcttgaatttatgtaagtcttttgataaggtctttgtgtgtcatgtgaaaagagagaacagtgtgttggttgatatgcttgctcaatgggcgagagtgcataaggtcgaggccattggcctcttaagggatgtagcccc

SEQ ID NO: 396255 - DNA, 716 bp, Cannabis indica
aaacgcacaatgtttttctaaacaagaaaacctctattttagtataaaaaaatagtctcattccaaacttgagtcacttataaataggaatattctctaaattgtattaagttataaatttttgtctcacattaataaaatgaataatgattgagacactcccaaataacacacattttttatacacaatgatatgtaattaatctcaaccatacaattaaaagtgatgtggtccctatttaattttttgaaaaaagagaaagaggtcgcttgtcttagaccgacctccccccgttatgttactaaaaccctcacttgtggcggaagaaaagttgtagtaagacaaactaaaaggcagcataaaaaaagcacccatatcaatataatacatacaaaaaagaaaagctctcttctagatctattacatcagtgtattccactctcgacacagatctaagaaagagagatcctcgaaatgttttattctataaacccaagtcgtggtccacaatctgattatttcccaaactatctcagctgagctgatcttttccacgaaatgtggtccttatttaatgatataaatagctaatatttatacatataaggaaaaggtttcaatggttacatttttattgtaaccatcatagttacatttttttaagacattggattaatattaaatggttgtgattaatttggaaattaaataaaaa

SEQ ID NO: 396256 - DNA, 540 bp, Cannabis indica
ttctttgcaatggatactaattctacaaatcgaggaaagaatataccgtcggcgccgacgtcggagtagacagaaagcttttccatattgactctgtcatcgcagtggtcggaccagattgccaaacagcgttcggcatagtcgtagaaatctgactggttaaaaaggtagggatttctcttcaaattcaaaaaccggagatgtaatccaagccgatcgccatagcttggaggtcagagaagctcgaattgcgtcttttggagaaagaagtttcaatatgctttgaatgactggctccggaaggtacgagttcggcgtgggatgatccatgatggaacgatcaccatacgttgcttgggtctgaagaaattctagggtttccaccttccattgatgaagagaactcagatggttaaggtccgattattaacatgcaaatatatgttaattccatttcaaaataatatatatatatatatatatatctttacagaatatgctttacaaataaaagaatattctgttaaatttaaccccaaa

SEQ ID NO: 396257 - DNA, 682 bp, Cannabis indica
acaagtggtatcagagtcgaatcccataattagcaatgtgaatcctcagattaccaaagaagatgaagattgtcgctagaatcgtcggaggttcaaatctaattcgaagagatttcgaatctagctggtgaagggttcatctagcttactctaaagggatcttgagtgttagaatcgatggattcaagcattcgaatagattttgaatctaattggtgaagggattcatctagcttactcaaggtgatcttgagtattggaatcgagggattcaagtttagattttaattttctaaagggaggcaaggtagtcctttgtttaaggagatgattgttcggtgtacaaccaaagtcccacattggctagaaataggaaggatcttgggtatataagaatggacactatctttattagaatgaggtcttttggaaaggtgcccaaaaataaattcgtgagggcttagacccaaaacggacaatatcataccaatgtagagatagatgatgtccgacggaccattgaaattagaaacataatttattatttttaaaatatatagaaagatggtgattttatgatatatatattaaagactgtaaaattaacaaagaaattacatgtgtttttataataaaataaattaacagtttttgagtttgataaattggtatgactgatgat

SEQ ID NO: 396258 - DNA, 778 bp, Cannabis indica
ttaattgattccatataaaacgagttaagctaatttagtaatttacctttggagaatgagacatttgagattatccatcacacggttcgatctattagtacatattcaacacaatacaacactatagatcaaccaatgaagtaaaacaaacttcatgagtgtatacaaacacatatgagaatctcacataggaaaaaaaaatttgttataaatttgaaagcagagagtttaccagagctttacttggatgaatgaagagcaaaggttaatgagcaacttctaagttctaatgaagtccaatggcgagtcaagaagtagcgattttgaaaagatattagggtaggagtatacacgatttcaatattttggatctaaaattgattataataataagagagaaatcaccgaagttatcgttaaatggtttgagcatatcactggagtgaatcgtcttagcacagagtgaatcgtcatcctcatctccattgccaccttcatttgcaaactagatcgttatgaaacgacctcctgctgcgaaactagatccagaagaatcatacaaaaaaatcaaattcgaaattgaagacaagataaaagatcgttgatcaaaatacgttacgaactaaaataatttctactcacatgtgttgctacaattctcgtggacttcttcgaagtcatattgggtgagaatagaagaactgttacccatgccccatggtgtcgaggagagagagagagagagagagagagagagagagagagagagagatgacta

SEQ ID NO: 396259 - DNA, 1767 bp, Cannabis indica
gtcaaatttttttatagaacttgcgcggaagtataaattaattaaaaaatatatgtgataattaatttaatttgtaagttttattgttaatttgtcaccaaatatctaaaaatttaaatatagataatattaaaatgtatatatgataattaatttaatttagaaatttttagtgttaatttatttatatatagatgaatttgagccattcttttattattaattaccagcactttcgaaaaatttaagcaaaggagttactagttgtatgtgtgctaaccaccctatttatgtatatatgtatgtataatttatatgtatatatatttatatattgtttattactaatatataagatataacgttagtttggaacgtcgtattagatcgtattgtattatattgtattgtattatattgaattgtattatacatcatatttttatatataatactatgttaaattttaatttaatataatattatacaatacaatacagtataatataacataccaaacgaacccataatgaattacgcacagcaaaagcatatgctttgccgcccctattccaagcacataacatttatacataataaaaaaaaattatattttaatggtagtgccatataaatatatataaattatgagtgttgcatgcatgggaagtaattgattaaagcataatacttcacattaaacaatgtaaatgcgaaattttataattagctcgaaagtgcacgagtggtgatgtattgtaattagacgtacatataagagctttaactttttttttatttttattatttttagttttcgtaacttccactatacccccagctataattaattattctattataccccagtccccctcaaaaaaaagtacaatataaaaggcctagcttcttctagctatgagttaattaacttattatgaataacttaattaacacattatatataataaatattaattgtttaactataaactttaattaataaactaaatattgatacgtataaatattattggcaaatggttcgatgaatcttatgtgtgactcattgcatgatattactcatctttataagttgtaacactaaatatatgtgtatgtacatgcatgcatgattctcatttttttttttgacaaaacatgattctacatttaatttactatataaaccaataattaattaataagataagataaattattatttatagatagaatcaaaagataagagcttaattatactgtatttgattccaaaaaatattcatgacaatgactacttcaaattattagaagatgttagctgagatgaagaaaaaactatatacacttgttaggttaggaggaaacataagtcgatcgatgatgagactgaattattatacatatatattgtatatgcatatatattgtatatgcatgtatctattttatataaagtgtgcctatataactgaattcttggtttatgagaaattcagggtaacttttttttaaaataattttctattccaaaataataattttttttattaagatgtattttaatattaatttttaaataaattaatattacttttaaattttaatcgagtttatgagaaatttatggataatttttttttaaataattttctattcaaaaataataaatttttttatgaagatgtattttaatattaatttttaaataaattaatattacttttaaattttaatcatttaaacctaatcggaaacacaatc

SEQ ID NO: 396260 - DNA, 845 bp, Cannabis indica
gaacaccgttttgctcgaaatcttatgttggaaagagacagtggtctgtggtcgatgacttaacccagtcagatagtatatatagtgacatatatgctagttagggttgtacatctggaatcgttttctacttaattaattttttcaaaatacgccgtataccaaaaataattactgaaattattaatcccaataatataatattgtaatattttttttaaaaaagataatttttttctttttgcacggttttttttcataggtgtacaaataatataatatatatatatatatatataaaaaaaaacttagattgtctaaaactttctattcgattttgtgtgtgtgtttacaccaaacacaaaacgatattccctaataaaaagaaaaaaaattaattggactgtatttagtgttttccaaaataaaacataatacataatttggatattttttttttatagatattaacggtttatggttaattatttttttgtaaaatacgattctattttcttttgcaaaaatatggttaattatttttgtaaaatacgattctatttgactctgctaaattttttgacaactattgtcttagttactggtttaaaaacaagaaggttggattagagttgtggtttgggttgcaatttgtagtattgcaattcatgttgccagttgggttttgatttgagtagaataccttaagttgatatagcagagaaaccatgggtctagcataatgaacaaatggtggtgagttagagcatgtttggtaatattttttattttttgttttaaaaaaattatttttagaaatgagaacaaaaaatagtttttgaagt

SEQ ID NO: 396261 - DNA, 1131 bp, Cannabis indica
gggggggccatggccactcttcccttggctgtggctccgcccgtgaccacagatgttgctaaaaaaaggtaatgtaaagatttttttaataacaaaacaacataattatataatctaaaaataagcataattttaaaagtgactaaacaaaaaatgcatatgaaattatttttatcttaaagtggatcttttcatgataagtatcatattaatctcataagtaactaaaatgttgtttttttacgacaaaaagtaaaaaagatatcttttcataaaagataactcattggtatcttatcagtatcataagcaactagttgttatattaatttgtttaaaattttgctagttaactatgcggtatattctttatgagctatcttttagtaatttattgaaagttatactctaataaatagacttatttaaaattacattgtaagttctagacctaaaacaataaaatattttctaataacttttggaactggtcggtataataaattttgtttaagttattttagttactctttgatattaagctagaaaactactattttgttaattaaatataaaagaaactaaaatgatatttttttaatgacaaaaaatatatgcttcccacatattaaataatcgtgttaaaaaataagtcgtgatggtatattttttgagccaaaataattagcggtgtaattagaattattttttaaaaaatctaaagagaaattaatatttgtttttgttttaacaaaaaaaaagaaaaaaaagaaagaaagaaagaaggagccattttatttttagtttagaagaagacaactcaaaaaataaaaacgaaaaaatgtgcacttatattgaatacacgtgcaagagtgattgtcttaaattaatagaagtgcacttatattgaatacacggtattcaatgtttatatggaacgttaatttttgttcattgtttgtgtaaagttattattgtaaataattttctaattatgtatattaatgtaaagatccctttaaataatttgatacatcttgattaaaaaaagttccctatagcatagattaattacacttagtcctacagtagtaatttcctatattatatatatttatattgaggcttctc

SEQ ID NO: 396262 - DNA, 741 bp, Cannabis indica
tgaacaaataaagagaaaaagcgtttgggcccaattgggcttttttagaggttggagaaaagttggtcgacgtcggagcaaacattaccggcgggagaatcgaggaaggctttccggcgaagtggtggagaccaaagaccactctgttgataatcgaaatcgtattgtgaggcatcgaagaattttcccagaagcctttccgatacagatttcgaaaccatttgaacattacttgtggttgttgttgtggtggttgaactttccgattccgatgatgatgatgatgatgatgacgtggccgatgaggatgatgatgaaggtgatgatcttgtataagacattgtatatgttatatatatatatagagagagagatgaagattatatatataatagagaaagagaggaaattggatggtttgggaaatggaatatacataatggtcccttttatatgtgtgtttattgtgatcgaatattatgttgttagtaggatccacgttttctccaaagggatgggacccctttgggtgaggattctctctgtgaggttacttctaacgagttgtttattggatcatatctaatgtttttattaaaataaaatttaataataatatgatatatgataaaactgtatacatttactgtattgtgttagtaattatcttcaagttgattatactaaaaaaaaattgtcgaaaattaagctcaagacgttatttttaccattttagaaaat

SEQ ID NO: 396263 - DNA, 1450 bp, Cannabis indica
tgaaccttggagattggagatcaaaattcccttgaaagagtagagacactcctatttatagttgttggtggggtcccctttaagttgctattaaagccaaatgttataactaacaacaactttcttcagattcatttaatgaataaatagatggatctattgactttgatagattaagtgagtttaatcacaatacttacatacaaagtaaattctaatatgagggtcgctaagttggtgattaatggtggtggtgatattgcgataaaaaatgacttaccaaggtattctttcaggaaatctagaaattgattcccacccgccgctctgaggctaaaattattatttctaatatgggttgacatacccttcttaggttgaagtggcctatggtatttggtggtttccttagataactattggaaaatatttatcataatacatatatgtaaagtaggttaaccattactacaaaaaattgctacttttcgtgacaatcttttagtcaaaacataaattttttgtgattaaatgtgaattttagtcacaataaaaagttacttgtgactaaaacatagtatttagttacaagttgccactaatttagctttagtcacaataaatattatgactgaaaacacgtttagtcacaacaaattgtaatttttgtgactaataattttagccacagacattttcgtcacaacacaataatgataatttataattagccacaatttttttttatctttagtcacaaattttgttgtgactaaaagtaagattttttgtagtgcatcaaagtaatgttaactttttgttaataattgacacatttaattaaaaaatatatattgtaataaattaatatgaaaaatgctccccctaattcttataggaattttttacatgaaaaatataaattgactattttatttcaaaaaatacttccataaggtgtaggcaataattttatctttaatgagtttttatttactaaaataccacttacacatatccattcatgtcagtccaaaccaccttccagccattaccattttgaaacccatgttcaaaacccacaaaaaccacctcccaaccataacctttgttatcttcttcttccaaccgcctcctttatcaattttttttatatatcatcttttgcttctccatctctattgccaaaaaaaccttcaaaaataggtcataaatcagtggttaacaaggctaaagagaaacatccagtcatcgacgatgatgactccgatttggctccccccgtggctaaaggtggtcatcgttcagtgaaaaagaagtcgaaggtgtctttgcctgaaattttttttaacttcgacaaccataagggaaagaacaagtcaacttcaaggcaactgtgatgaaactgtaatgcaatagttatatctgttgcgagccaactaacataaaa

SEQ ID NO: 396264 - DNA, 836 bp, Cannabis indica
tcaaaattatagttacaaaattaaggtaaactatttatgtgaagcactccttaaaattagtatatcgatacactctttgtatattttggtattcggatagtttttcattctaatttgttttagagtgtttttgttgagttttatgttccaaaccaatacttaaattttaattaaatattattttatcttaataaaatttagaaattatactttgacttttttcaatcccttgtccacatatttatttacataattatatatttaatatatatagattttattatatctagaattatttataattatagtgatatcatcatagtgagaaataattatgattatatgcttcaaaaaacctttagccttgagatttattagtgtactggatttacactaacgcgataatcgacgatttggcttacttacactatggcaagtgatatgccttttccaagacattgataaaatagacttctatcaaatgtatagatttatattggattggatattgacaagagaacaattattataatcctactgttatatatattctcagtcaatatcacttagttgatcatagatcaattcgatctgaatcctaacatgattaagctttaagctaatcgtactatttgagttctttgacttgttcgttatcagcttactctaaggtctagtccatacctacatcttgagaactttgtactttgtagtataattgagtgaaagtgttaatcataaatatgggcattatgttagaagtgaaacgataattttctttgaacttggttaaagacgttaaatgaagagatcttattttattaattatattaatt

SEQ ID NO: 396265 - DNA, 473 bp, Cannabis indica
agaaaaagaaaagaggctattctattctttttttcatcactaagtatgtacacaaatattaattacaaatttcaacttaaatattttatccttacttagaaaaaaaaaaaagcctgaaagtatttgataaacaacatggttactatctatgttgttttatttatttatataataagcatttttatatatacattgaggccgaattacacaaattttggatttgatatcacgctataataattttaattttggaataattacataaggcactattttttgtaaaatatttacatttttacgttcaaataatgtttttttacatttttacggttttccaaaaaataacacgaaaacaacataaaatcaacaagaaaacaacataaaagtaacatgaaaataacatcaaaataaaaacaaaaaaacaacaaaaaataacatacatataacaaaaaattaacaacaaatgaacaaaa

SEQ ID NO: 396266 - DNA, 692 bp, Cannabis indica
gaatttaattgagtttttttgataccacaaaaaaaaatatagatttagacatgatataatattatgacatggatatataaatagaaataaactaactacaaaagtaattaaaaatattataatttgaataataataaatatttatatatcaattataattatattaaaataataataaaattcaaatataacataaagtattataattttataattaaaattattaaaaaatataaaactaaaattatatattaatttattttaaaagttatgagttaataatgcgagtatttattattatatattcaatgtctaatgattataattagttgttatatgtgattgtgtgtaattattattaaaaaattataaaataattaaaattacttataatttaagttagttgattaattgcaaaagaggtaaaagaaaaagtggagcacgattggagcctttatatgacaacaactaacacatatttttgtaagctttataaaatatagatttaccacacatattcacaacttagtacataactatgagattttcaactcatactaaaaaaaatgaggaatttgcggcgaaatcccctattttttgatttttatacacttaacccccttatctttatttttggtggcaaaacccccttatgttttaatttttatacacttaacccccttatctttttt

SEQ ID NO: 396267 - DNA, 1144 bp, Cannabis indica
aatttcggctaatcaatagacgttcatatataatatatgtgtgcatactattacaatatctcataaacagttagtcaaatttgatttgattataaaacatataattattatttgataataaattataaatattctaattaaggaacaacatagcaaagacggagacctgagattgagcctaagaatctgtcaaccgaggccttggttctcaaacactcctttatttaagaatcaacggattatgatttaccaagtattttattatctatttttatttttaaattaattgtcacaatatttaaacaattaatatgtaatatacatactaatgaaagtcccaaactcattactcatgcattccgagtagatctatctaagagtttaaaagaaagtttggaagttcgaacacttagctcacttttgatttatttgtagatctgaagctcgtgtgagatcaaaactaaaaattaataactctaattatttgaatattattctatgatactatttatatgttggattattatttattctactttatatagtcattcttatactttatattatatatttttataaatttctaacacgtacatactactcatattcaaatatatattatgatttttgatactgtaattgatgactaatgttgtagcattaaaaaatacaaaaaaaaaaaaaactgcataatccaaaaaacggtaaagcaataatttgatggcaatatatataatttcccaagaaaaaaaaacaaagtgaaagagccgccgtatgcacttagacatgatgaagatctacagagactacatatttactaaaccatatataatattaatgcccctcaaaataacctgctcatttgacattttccaacttctggcctaacactatcacaataaatatatatgtataattaaattgacaatattgagaaaaataattaatatatatttaatatcaaatatatcatgggtgatgatgatgagtaatattcaagattagtagttttcgtcgtaatatgtttctgtagagacaattgactaaataagcacaaaaaacaaaggtccacttattattaataattcaaaggccacacataccacaccacatttatagatgtaaagaaaaagaaaaagaaaaa

SEQ ID NO: 396268 - DNA, 512 bp, Cannabis indica
ttttattttttatttataagaaaaataaattagattataagtaatttagtaattatttttatttaatttctaaattaatcataattatttaacaataataacacgactaaaagtaataaataaatataaccatggtgtttacatatttgattgaaattttttatatgtgttaatttgtcaaaatgtgatcagccaccatataatattatgtacagtatatatcgaatttgaattattgtaatatagacatagacttattttattattgtattattttcattagcaagcaagcaccagatcatttcgaccataacgtgtcatgatatatattgtccaaaacgcatatagttaaaaccctgcatgtggaaaatcatgccttattagtttgaactactcatatatataatacttattatttagtgctatatcgatcatttttcaaaagaatatataaaaatatatatcataaacggcgtatatatatgtatgtatatatatatgtaatgtataca

SEQ ID NO: 396269 - DNA, 824 bp, Cannabis indica
tataagaaatataacatcaggtttaacgagtttgagccttgtgcaatgctttacgtcttggtcggaataataacagtaatatctttattgatatcagtatcttcaaggtttacaagaatcctttaaactatttacagagatttacaagatgaactttctcactatttaaactttctctctctctctctctaactttacactttcaccatttttctctcacactttcaatgggctaattcacaatgaattacaaaggtgatagctatatatatattttcaccgttgttaaaattagctctgattttatcgtgactaattattaattactgtcttaaattctccaagtcatttccatcagcttcaaaaacgcactttttgtacggacaatctaaaaaacaatcacatgctctattcaaagttgacataagctatctggaaggacgtcttcaaatatatgacaagctatcctgaagattctacttacgaaagacaatctatctggaagaaccatccagactagcataattttacgaacaaagatttttggatgaacaccaagctttccataacttctttctggagtaagaactaacttcctagaagacgaaacttgtaaccatgttgatgaaggtattatttgattgtgatgaaaaataaaacatagtttaaatgaattatatttttgattgatttgtatctaaattatcttatctccttaaaaaataatgattttttattatagagattgtatgtttaatgaatttatttttttgataaaaatatttaattattaagtgtatcgtcttgattaattgtaatagttt

SEQ ID NO: 396270 - DNA, 1196 bp, Cannabis indica
gtctattttatatcattttgaaaaatatagaattcaaatatttaacaaaataaaaaacctaaatctaatttttaaccaaaaaaaaaaatacaaaaatagtatttatttgttttgttctctttgtaatatatatacaaacttttttttttttccttcttggtggattaatggtaaatatatatatacatgcagtgatctctgaagggagagaaagaaacatgattatttctaatttgattggagaaagtagaaaacgtagctatgtattaattcttaactagcaatggtgtagaatttatgtattttttaaaaatgtgtaaaatttattgcataaaattaagtttaatggtactttttttttgaaagtgaaagtgatgttatgttatttttttttatgaaatattaacctagaaactaacattttgagtacaaatgatgttggaatttagtagtaagaaaactcagaaatactatagctagggtaaaattaagaatgtctagcaacatgatgtgctactcaatttgttgatcgttttatccaagataacttaacattagaaagggtagataaaagtatttggcagtccttgataagaagtccaaaggtggatttcatggagtgagtgcttcgaatggcttgtacagaaacaagactgtctgtctcaatctcaacaaagcgccaattattatcttggacccaactgagggcttcctcaattcccatttgcctcaatgacttcaggtgcataaagaccgccaaaactaccagcatgggctgcaattagattaccaaaatgattctgggcaactccaaagccatacttgttctcactatcaaaaagcgatgcatccacattaattttgattgtgtttttaccatgtttagtccaagtctcagagtcatcaccgatgctatttagacacaacgatgacaacagagttttatcttgagttttaatccaataattaagagctgtttgggcagatgcaagaacatctgattattaaaaagaaaaaaaatatttgtttatttattatttttaaattattttataatattaaaattattaaaatgatttgggccaataaatttatgccacgtgtacatatgtgtacacatgtgtatacagtaacaattctagttggcatttaacagcacaatttaataggtgtataagattcgcaaacaaaataat

SEQ ID NO: 396271 - DNA, 442 bp, Cannabis indica
tatatatatatatatgatttgataagaatggtctatggcctatggcctatttgtcaattgcattggacttctctagtttaaatatatgtatatattattgatcctatactattaccttcactcttatccaaatccgtgttcttctcaagggttccaccatcacttccataataatcaatatccaaaaatccaagattttcctcaggtactcgaccattctttagggtcaacattcataaaccatatttagaataaaactaattttgtggaccctttcatttccattttgtaacccacataatttatcatttgtttttatataataataacaattagattacctcatcaaagatgtaacaggcctacgtgggccgcaaatctcatttttcttcccttccattctaaacaaacctaatatattaagggcattttacaaaaatac

SEQ ID NO: 396272 - DNA, 659 bp, Cannabis indica
tcatcaactaatggcagtcacaattgaggaaggcgagaaacaggtcgaggatccagatcctcgagttcacgattaatagaactaattgaaaccaattaaggaattgaaggaagtcattttagatccagaaaatcccacaaagtgtgtattcatgtggaaaaggcctggattaaaagctaaaatagcaactaacaagctttctgaacgcaaaccaggatcgatttgcctggagccattcagacatgatagggattgaccctaattcccagcgaagagacagaagagatggcctttggattttgaaagataaggggcactaaaagaggaagtggataagtagttgactaacaactttatacgcgaggccttctatccctcgtggatatccaatcctgtccttgtcccaaaaccaaatggaacttggagaacttgtatcgactttttagatttaaactaggtgtgtccaaaggattgctttccactacctaaaatcgaccagttagtggatgccactactcgacacgagcttatgatgttcatggatgcatattctgggtataaccagattaagaagcatgtccttgatcaagagcatacaagcttcgtaaccaacaggggactttattgttataagtaatgccttttggtttgaagaacgt

SEQ ID NO: 396273 - DNA, 639 bp, Cannabis indica
attttgcagtacaatagatctgatgtgagcacgtgtgcatgtcttgagctggcaatggtaatgacatatatattgcaccataccactttttagttttattaccatactatactttattatttttggctttccatcggaatgacatgatgagggccctatctatctatctatctatctatctatctatctaacttcattttgagtcttgagttgtgtcaaaaggataaacctagctactatctgtcaaaagggtttgagtagtgtattgcggacaatataatttatgaaagaatttgaactttgaactgtgtcaaatttaattacaagaaccattgctcttgtgctaattcttgattgaaagcagcccctttggatgtataacactgttcattaatattcctaaagaatggattggaccaagcccaaaaggtcagactaaagcaagccgcaagggaatgactaaacaacaacatcacaaatagaagccaataatctaagagaatcacaagggccacattccacaaagaaagcccaaaagtaacatcataatagtcaggatgataaaacgctattattacaataaagagataaaacgacaaacaaaaaagaaacacaacccaaacaacatttaaaaccaac

SEQ ID NO: 396274 - DNA, 788 bp, Cannabis indica
gtatacatagtaattataaattttttcattaaatataaaacagtaaaaacaaatataataaaacatgtataaattcaaattgatagtaaagtattgctataatttttatagtaaaagtatacataataattataattttttcattaaattataaaaatagtaaaaataaatttaaaattgattacataaatggtaatattattttgaaagtaacttgaaggagtagaataatagaaagagaagaatgtgagacatatatttataacaaagtatgtataaattgaaataaatagtaaaaatattgctataattcttacttttactataattcttataaaattgaaacataggagaataaagaaaaagatgaagaaagaaagggagagagagaaagatagatgtgtggatatatgttgtgagagtcataatatttttgggaatgtgaattgtgtagggaaatttgaaattccatgattaaaatatcctataatttttcccctaaattaatagtcattaaaattggtcatatatgaccactttaatgattttcctaaactacccctcacatttcaaaccatccctctctcttcctctctctcagccgaaccaagaaccccatcccaaacccactctcagccgcacccattctcaacccagctcaccgacggccgtccacggtgtacccagctctggcgtcgacgtcaaccccgaacaacccaaacgctgcaccccatctcagcccccttctctcttcatctctttctaaccgaagaaaaaaaaaaaaaaaa

SEQ ID NO: 396275 - DNA, 594 bp, Cannabis indica
gttagaattttaataatttagattaaaaagttttttcttcaatttcacgcaatttccatgggttcgacttcgttcttcacaatctctacactacaataaagactcgtgcgcttgcgagttgataaatgtaaaacgtgtcattttggtatcaataaagaataggcttggatcgttctttattctcaacggttggtaaccttctttcacttgggatttcagttccagttgagtgttttcttggttgcattctagtagttgtttcaacttgtgtacatgttcttcatatttttaatctcttgagatgaatttgccactagctttacaattcacataatttatttcttgatcaatttgtccattgaactatatcagtaatggaatttgttcgtttcctgaaattttaaaaattcaagtatggtcggccaaccattagaaaactgtaaagaaactaaaacacaacagggcgttgataatacaggcacaacaacatatatttatataatgcatgtgttgttaggcaactattgttatattatttataataatataatatatagattaaatatgtgtaataaactaataatatgtaacata

SEQ ID NO: 396276 - DNA, 1183 bp, Cannabis indica
aaaaaaagaaaaaaaaaagagggggatttaaataaagaaagaagaagctagaaggaacaacctttgatcattctcttttctctctttttctctctttctaccgaaccctagaagaagcatcaaagggggattttgttcagtgaattccttagcttttggctagattggtgaagtgtgggagttgtatatgcatcaaggtaagctcttggtacactttcttggaatttcttaagatttaagctaggtttggctagggtttttgtggattttggggctggagtataaattgaagttagaatctattcttagacttaatttctgagttgtttaagttctatttggttagaaatagagctgttgtatctatgaattttaaaagaattgagtttaatgaatttattctacttgattatgtgatttggagtaatttgaagaattcatatgaattgaaaccttgaatatattgtgtatgtgagattaaactgttctagaacttctaggttgttttggtgatgctagggtcgaatttttggaggaggaaagaacttttggttgctgccctgccaaaaccggtcgaccggttggtactggtgtaccagaaccggtcgaccggttgcctacaggggagagttttctaattttttcctccaggctggttttagggctcgaggtggttttgagtgcttagtgtgcaatgtttagaagttgtaaaacctaaccaagaactattggaagttaatgattgtccgattttgggaattaaagattattccaaagattttaatgaatgtattaattgagtgttgttgtcgtgacataggacccacgatcgtcaagctttgattccacttagacgggatgcacgctaaacttctagactgaggtaagaagagtattaagcaccatatatggctaacgttatgataattatagactcgattatcatcgaaatctcggtatgtgtttgttgtaacataatctcaatcgagattaacgatatgtattggttgtgactcgattatgatcgagggaaataataggaaacgattatcatcgtttgactcgattatgatcgagggaaaatattatgaaacgattatcatcgtttgactcgattatgatcgagggaaatatatgaaacgattattatcgtttgactcgactatgatcgagggaagtatta

SEQ ID NO: 396277 - DNA, 915 bp, Cannabis indica
gttctatcctaagtcgaatggtgctagagttttggggtataacagagtggttgatctccttatggattatggggattgggatattcggaaattgaattatcttttgacaagaatttgtttcggccatccgtgaaagggggtagaccctctggtcagggtatggataggtggatttggacaaaggagagtaatgggcgtttctcgtgtaaatcaacttatctcatccaagctttagaaagggctcctcattctgatgttgcttcgttcctctggaataaactgtggaatagtaacatttcggaatgccataagataatgtggtggtgtatcctctctaaggccctcctagtttgcgctattatttctaagtgattctatttagaggatgtggcctgccctttatgtgggggtgatgagaaaactttggagcacttatttctcacttgtaatgggtgattcatttgtggcggtctttcccgtggggtatatttctcatttctgattctggcattcgtttgtgggattgtgtcaaattcaggactaggaaaacaaggcattaatatagatgaagtctttttttatgctttgattgttgttgatacaatttggcagtgacggaatgacaaggtacataatagaagtatggccaatgttaatcagtgtattgactatattcattactcttatgcagattacattgcttctattttccccactccatccccatgtctggtagcaggatggcttcctctccctcttgagtgggttaagctaaattgtgatgttaaagtggggatggaaagcatgtgcattgccgttgtggctagaaaccaccttggagtggtgcgtggggtgcatacagctagattagagttctctgatgctctttgttgtgaagcggcagcctgctgcttg

SEQ ID NO: 396278 - DNA, 1554 bp, Cannabis indica
gggcagaggaccttagaaaggtttgagtcttccaccgactgatgtgccaggatcagcttggccttccggcagttctccgtcgtgaccaagcccccgacgcgaggtccgccttatcataagttgcgaagatctgggcccgctgaagagagatctgagtaggcgcggtccgttcgtacggagggatcctaacccactccgtaaggagctccgggtgctccacagctcggaacccggaggagaagaagaagcgatggcggtattccttgacgtatttttgatggttataagggaccacgccatcattcgaagggtgggcccgaaagccgtaaaaactatccttaagtttgacccccttcttggggacagaaacaagttcgtaaaaatacaagatctccgccggactgggagaaccccgtccctgggcggagtaaaaaataaataagcctgaaagcaggcggtaagcttgaggaattagttgtatggcgcaaggtcgacaaatacaaggaaattaataacataatcttgaaggagaagcatagccccagtcatcagatgcgtctggcgccaagccccgaagcctccgtaaatttttttaggggtctccgcatctcggggcggccggtggtacgtcgcgagcttgataccagccacctccacgatgttctccagttggtgaggacaagtcagagtagagtgaagctcagccgcttcccatcccatcgaaggtggccaaacgttttcctcccttcttggaagatttagaaccggatgcagacatttctgagtctgaaaaagagttaaaattccagcaattaggccccataccaaaccctaaatcaaaaaagggaatgggggtcccctaaccgctggaaagaggccccctccggacggttgtcaacaagaaagccctagaaggatttcctggacaaaagtcgggtgcaaaaatctcacaaatagtgacattgcgcataaaagaaaaaggaagaggaggggcagaaaatcgagaaagacacagtcttctctgtacccttgaaggccatcacgcaaagaataagtgagcctttacaaaaataataataatgtgtaaaaagagtgaccctaacaccagagaagggaaatctagacgtattacgtaaaaactcaaggtgaaacattcccagaaacttcaaacactaaacccaggaaaataaataaacagttagcatgccatgaacaccgaacagtaaagtgagggatgcgagaaacttacatgaagtgttggaattgggggttgttgttgatcaacaaagaaatgtagactgacagtattgaataaaggttagtaaataaatctgtaaagtgtttaaaggttttctggtctgaggatttctctctctctggaaaactcaaagaaagttggcgaaagaaggaaagtaaccaaatgaaggaaaggtggtggcttttataggccaaagtgcatgtggaacaggcacaatcacctaccaatcgaacggctggggaggcgcacgattcgaactcccaagaatcaacggtgagattgattcgtaattaagg

SEQ ID NO: 396279 - DNA, 1187 bp, Cannabis indica
ggcatattgctcttgtgacttgcaggagtctccttggatatggggtcctccaatgatagttaagatgttgcgaggtgttctcgaaccgctcgcattttggttttctcctttgtcatccgctcggggatgactttcctcgcccttcttatacttgtcgaactttcctctccgaatcagctcctcgatttcatcctgcaagacccaacattctaaggtagtatgaccaatgtctttgtggtacttacagaattttttggggtctcttctgtcgcgatttcccctgatggggggcggcttcttgaagactccatttctctcttcgattgcatagatatggtctcggggcactgcgagttcagtataattgacgaaacgaggtccacccttcctcttcggcgaggattccttcttgggaggagacttggccaacttcggacttcgctgtctccgtgggctgcgtcttcttgggcttcggcccctggagttcttccctcggggactgcgagatcgtgaacgcggtattggtgatttgcgcttgtccttgcccttctccaactctgccagagaattctcgattctcttatggggttcggccatggcgaagaattcgactaaggattctggtctccgagcttgtaactccttccagaagtcggtcctcggcaaaatacctgttatcaacatacaaacaagcgaagactcgggagccttctcgacttttgttacctctgcattaaaccgtttaaaatagtcttgtaaagactcaccgggttcttgcttgatgttggccaaagtcgtataaggtggcctataggtcatcgtggcctggaaatgtgtgaggaataagtcgacgaaggtttcccatgtcgatattgatgcctcaggcaattgggtaaaccaatcgtgggcgttttcctcgagtgttgccgcaagaatgcggcattttgcaagctgtggtacctgatccacctccattatagtattgaatttttcaagataatctatagggttagaggtacctttatactttagggattcggatagacgaaatcccttgggaagttgggcttgtcgcacttccgtagtgaagggtgaggtcccatgcaacttgtatatgggctttcgttgctgctcgagcattttcaaagcttgcagaagcatgctttggtcaatccctccagtcgcag

SEQ ID NO: 396280 - DNA, 2738 bp, Cannabis indica
atcaattgagattgattaaaattggatatacctaagcaatagagaataaaattctctaggatagtatatatatctaagttgggttacaaagttattcttgtaataataattaagataattaaggcgctcttagttcagtttggtagaacgtgggtctccaaaacccgatgtcgtaggttcaagtcctacagagcgtgcttcgattcttcttatttgttaggtcgaaaataacacaaaaataattgaacaacaatctgaatttgacctcctgtagattaaaacaagtaggaggtcaatcaaaaaaagagatgttaattaatcaaagatccaattgatcaccacgtctgtattgtaaatatgcagttacaaataatccagccaaagtaataggaattagacctaagacaattccaaataaaaaaacttcaatcatttcaatttctttgaaaggggaaaaggagaggtaatatctatccttaaattttaatcggtattactcatgaatctcaatgaccaaaaattgaaaattgacacgttaagtaactatagaataaatgaactaccacagaaggtttttatgaattgttcgttcaattaatttcaaataagtcctatcttgttcagaccgataaatagagctgaggttatagtcaaagctgctagtagaaaaccgaaataactagttatagtaggcataaagagactaaatgaaatatgttctttttatacatatgtttctaaagcacttccctaaatttccatttataaaagatacgaagataaacaaaaataccaattgaaagtttttgattcatcaattattataattatagaaggcggtcctaacaaaaatagagtaacataggtaagaaatcaattcatcatttgtgacatctatccatttcgaaatttcgaatcaaccgattcattgagcaactcttgagttgagtacactaaataaacaatacaatatctaatatatattagtatatatagaatattttaaataaattttaaataattagaaaaaaaaagtaaaaatagttgttttagaacttcattcaaaaaggaaactttctttgaatcactctgaaataaaattaccaaatcttttttattttgattattttttgattgtatcgacgaatccttttttttacttaattttcagtttagaacgacaagtgatcttagcttataatgaaaatgtcctttacttttttactttaaattgaacttatttttatattttgtctttcttaattacatacaaagctccatctttgtaattagttcaagaaagacccttttctttgggtctaatacaacaacactctgtgcatcacgaatattgattattatttattttatttattcgttgttttctttccttgaatactaatactatctagtatttttacctcatcctcagtttcgagtccgaagctaataatagagaaattgagaaaacctttagattattatattacaagcactactacagttactgcaggaattgtaatgatacaggaatttgagaaagactctattgaatagttgaatagtacaaattctacatgtacacgcaacaagaaaaaagaaattctctaacacttcgtttcgatcctgattgggaaatttcgttgctgtgtcagaagaaggatagctatactgattcggtatactctaaagaaacccttggtacactattgacgatctcacaaagatctgatttcagtgaatttctgtttactgatttcatcttttacggagtcgacccccctttgactgtacaagaatatgcggagcttaagatgtctggaagcacaggagaacgttcttttgctgatattattaccagtattcgatactgggtcattcatagcattactataccttccctattcattgcgggttggttattcgtcagcacgggtttagcttacgatgtatttggaagtccccgtccaaacgagtattttacagagagccgacaaggagttccattaataacaggccgctttgattctttggaacaactcgatgaatttagtagatctttttaggaggcacaaatgactatagatagaacctatccaatttttactgtgcgatggttagctgttcacggactagctgtacctaccgtttcttttttggggtcaatatcagcaatgcagttcatccaacgataaacctaatccgaatcatagagctacgacacaatcaaacccgaacgaacaaaatgttgaattgaatcgtaccagtctctactgggggttattactcatttttgtacttgctgttttattttccaattatttcttcaattaaaaaaagaagaataggaaataatagtaggaattctcttatcccattcggaaggatatcatctcataattatctatggctgtttatgtctctagcacgaccacctgatgaaatgtggaggaaagtaggacaaatggctgatactactggaaggattcctctttggataataggtactgtagctggtattcttgtgatcggtttactcggtattttcttttatggttcatattctggattaggttcatccctttagtaattgggtaaactgagttgtagacaggacatgaaagcgtaagaactcaacggaatccccctcgaagaagacaaagaaagagggggtaggtcccgttgagctcttaataatcataatattttattcgtctaaatctaaatgataacaaaaa

SEQ ID NO: 396281 - DNA, 654 bp, Cannabis indica
ttacaatataataataattacataatctaataaaattataaaactatgtaaccagaattacatattaaattattaaataaaataaaattaaaataattctaatattttttatataaatttaaaaaataaagtgaaaacaattttaccaatttatcatttattttaatatttatttcaaccacaaaccaaacatcataatcgattattattattattatgactaaagaagaaattcattaatcaagaacaaacgatacaactcaagccacaattaactggctccaacaaaagaccgcacctaatacatcaagcgtctatataaagcattaacttctaattcatgattaattttaggcatgctatacaatctatgctttacaatatctttaatctttttaactatgtaaccaaccatgtaacaagtgttgttatatacacaattgttatttttctacacaaaataaactgtggcaggaagaatcatatgtaaaagttgagttgttttgcgtgaactcttaactgaaagccaattcatccatcccaccttcagcttgcttagcccaagcttcaaacccaatccaattgaacaaatcatttagtactgctgaagagaactcacattttaaaaagggccaagatgcaaaatgaccctaa

SEQ ID NO: 396282 - DNA, 737 bp, Cannabis indica
ccctttctttgggttagtttcccagtggttcaaagaagggacgcaacactcaagtccgcccaagtacccagctttatccaagtccctcatacgtccctaaagcacacccatctggcccctaaagcactttgccttctgtgcgggactgcctcggtaaactccttggtgacatagtcttccccctcgaccaagacgtcaccctccgcggataccggctccccgacctcattataccctctaaaatttaaaggtttgaccactccttcctcctcaacttcgaaagggctatcaggacggacatcgtcctgctcctctatctcttggacctcgatgtcctcctcatgatcctcctcctccatggcgggcagatcctacttggtacttggcaattggcaagctgggccacgtgagggtcagatgcgctgacttttcgcatcgtctgctttgtgcgggccatcatccttctcttggacggatgctgatgtgggtgttgtgcaatagtaacggcagggtcagctgttgggataccgaagttaccaaaacttggacggcctatgggaagagtatcagcaacacctggtcagacaatatacgtctagttggacggaagataacatctcgaacccttcttcagctcccaaatgaagcgaccgtatccttctcctgcgatctgttcggagtaagagtggtgttgcacttcgggttttggagtaggagagcgatcactactcacttcc

SEQ ID NO: 396283 - DNA, 533 bp, Cannabis indica
tctcatttctgcagaacagcatcatctacgagaactggtgtccgcctttgcagaaataaaaaataggctaagtgatgtcaaaatatcacttaggcatcataaagtacatcccctagacatttttctacttatccagcatctagattgacgtcatatgttaacctgggcgttggatgtcaacctaggtgctggattatgaatagccttcaataaaacagccataactcactcaatattgaactaattgacatgattcaatttgtgcttcgaagcaatttcaatgctatatcaagtcatgtctcacacttcaattgcaattctaaagctatcaaccccaaatttcatccaaagtgagttatgtaaataagctccaacttacccggagcgggtcccagcgttgcgacccagactctgaaaatcgacgatcaactctagaagttaatttttatcgttagacatcatctacggtcaaaaatattcaaattttattttttactatttttgtgggcctccttcacctataaaagtagagc

SEQ ID NO: 396284 - DNA, 541 bp, Cannabis indica
ttacttaaaattattttaactaacaacaatttattatttattaattatacatatatttattataattaattacatatttataaaattttcacactataatataatcattaattaaactattttttttagataagttgagacataaaggagtaacatagtggtctaaaaattgctagaatgtacttttttttcctcattgttcttatttttttattattttttttataatctttgattttaataagggtaaatactattttggaccctgtgttttgcaaaagttaccgattggaccctctgttttgttaaataacaaaatggaccctatatttttcaaaatagtaaaaataggactttgagctcaattttcaaaaattttatttttttaatataactaactttaagataatttctcacacgaacagatacagaaaatgtaactagttttttcataacatctttagattagattattattaagttttattttgaacaaaaaataagttcagggtcctatttgtactattttagaaaatacagg

SEQ ID NO: 396285 - DNA, 768 bp, Cannabis indica
tggcctaccttctctctctctctctctctctctctctctctctctttttttttttttttttttttccctgttagaacaaaagttatcttgtattagatccctttctcaccctttggaaccactaaccacatactcaagtcatcacatagacatggtagatatgctagcaaatatattcaaaatgggatcattaagaaatgtacaaaaataacaaaataattacagaaatacggcggtacaaaattttaaatatttttatagaaaatatttaaaattttgttttatttaaatttggtctaatttcattcaattttatttattcgataattgttcatgtataaattatgctcccaaaactttgatatttactaaattatgttctttgaattttgacatgtactaaattatacctcttgaacttttatctatgttagacttttcttattaaaattagacaaaaatctttaaatctaacaatctcaatggtgtaaagaaatttttttgacaatcttcaaagttcaaaagtataatttaataaagggttatttgcggcataacctccttaagtggtcaggtatttgtaactaacccccaattctaaaattttggtggtaaaacctcctaaacccaatttctgttagcagttagcccttttcgtccatttttgggtgttaagtgacaggttggaatgtctacgtgtacacaatgtacacgtggcacaatttaattagtccacgtaataaatacttaaaattaaaatataaaaat

SEQ ID NO: 396286 - DNA, 1237 bp, Cannabis indica
agctatcaaggctaatttgaccaattttttatataaagtgtcatgagcggtggtaattttcaagtcttgacttattatggtattcagtcctctcacatatttttgtttctgggtgaaatttgttggtaccaaatcacctacaaatttagatagccgatcaaactccaaagtgtactcgaccatagtcattttcccctgagtaaacttcacaaaatcttccatatgtgaagttcttacaacgatgttataaaatttttcctcaaacagactcttaaactcatcccaagtcatagtactaacatctcgggtctggcccacaatgtccaccagacatgggcatgatcttgtagcataaatgtagcacaattttctctatttgttcccgtcacccccatattatcaaggattcgggtgatggtgctcatccactgtttagccttaattatgtcagtacctcccattgttgaaggttccagctccacaaagcattcaaatactgaatctctgtgcgacagcataaatccctggtaacccaccactggcacaggagctggtggtaacacttgttctacaggagttgtcgttgccagttgcctcaactgacgcaattcatcttcttgatgaagtatgatactttgcatttcttgaaacatatgctgcaaataagtaggcggattagcattattaacccccgcatcatcccccaaattctacggaggcacaggcagtgctagtggattggtttggtcaacacaggctctacttgctcaccctgtggtctagatgattgtggaggatccattttcataagtaaccctgtaatcaacaacctcagcgagtcaggcaccaataccacacttacgaacttattgccttaaaccctaagtcaactattttatttcttattaaataagaatctatcaattaatcacactaattgtggctttcatatcacaaatactagatgctcacatactgcctaaaatggaaagcggtaaataaatagtcacataagcagttaagtatttactctcaatacttactgcaacacgagcctagcttgtctttgacgatgattgtacatgttcagccggtctacacaaagtttaaaaactttggcgctctgataccaaagtgtaacgccctaataattaggcatgctacaccaaccaatgttaaaaccctaatcccgctaagccgggattactagaaagataagagcggaaaaatttaaact

SEQ ID NO: 396287 - DNA, 1012 bp, Cannabis indica
cgtgtacaataatataaaatctcgatataactttctaataagttcgttaacactttgcatacataggtttgtatagatagatatacttctcttttaaagcgccatgtcaacgtcttatacttctcttttatatagatagatatataaatatatatatcgataagaaagtgtgtattattagtaattcaaatcaacattaaagtcgcgagaaagaaagaaaattctttttaccacatctaattagcaaaattttaatatattaaattaaatatagaaactctctctctctcactctcttaaaatatgtatacttttttttagcaatgaataacttcattggaaaaagaaatcataatctcaaacaaactttaagtcttaagaaatctcaataaaagaaggaatctcatcaaaccatactagttctctatccacttgaagagcatgccgagctaatccatgtgcagttccaatggctgtccgacgaacatggatcaggaatactccaggaaattagacatcaaactagctaaatcctctaacaaggaaccaaattcattgaggaaagaagtgcgtttagaaagcacaattacaactgctaaactatcagattcaacaaattgtaaagaaagttccacagtaagagcccaatccaatgttacaagtaaagccaaatattctccctgaacaactgaaaacaatgcaaaaaaatactaacaaaaataacatcaattctcaaaaaactaagaaaagataaattaacaacattcattctatataaaaagaaaaacttatcttatcaaatgtagattatgtcggcattagaacttggacactacagactactttaaacaatttaataacttaataactcaataactttacaactctactaataactaagaaataaaattctttaataactaataccactaatagtcataataaaatttacctcatatataattaataattattataatttagtatgagaatttaaaaactaacataataa

SEQ ID NO: 396288 - DNA, 585 bp, Cannabis indica
tggacaattttctagtgaaattcatggccacaccccaagaaatacatttgatacccctataatttcttgtattctgttttaaaattatattaacatttcaattcattaacatatatatataatatcaaaattgatccggattctactaaatttttgataacataacagctgtaattgaacgaccctaaaaattttaaacatgcctaataaaaaaatagataaaataattgattatacacccatccgatcacagtacatgtatttgcagaacctacttcactatggtttaatatttaagatattcaaactccactaataaatattgataattaattaagaataaaagttacattgggtgcttaaattatgtatttaggataaggaaggaacatgattgctactttcttaacatatctgcacccctcaattgatatcgaaatttcagcatccttttacagcatttccgaaatgagaaccgagtatgtgaatcatcgtaaaacttagtgtgaactttcatttgaccttcatgttcgttacagataagctcgtagccactatgttgtcgatattgtctgagcagagaaa

SEQ ID NO: 396289 - DNA, 745 bp, Cannabis indica
taaagggcaaacaatatgctcaattatatcaaatgtgatcaacttttaatattcaaatcatgctctcatttttaagttagtctataaccgtttaatctatttagtttatatattttttttttgaaaaattgattatttaattttattttatttcgatcccttttgaagattatattgtaccaggaatcacatagaatttattaaataagtcttattttaaaagtttaaattgagttttttttcgtttatttatttatttattgagttcttatcaattaatagaatttacttattacattttagcaagagtgaatttgtcgattggaagttagtaggtcatagaaccatcaaaggcagcttcattatttaaatttttctgctttataagagagatccaaaagttagactaaatagtttaacttcgatgacatggtttaaaaaatgacacttgcattagaatatagagagtgtaaattaaggtgtgattagcactcctctaaacgttaaataagtgagatctgatattaaattacatcaataataatatgacagctcataaatgtactaagcaccgcgccctttagtatatcactaaggtgggatttggttaggaggaatgaaaacatagaaataggaatgtgaatgagaataagaataggaatagatgaataaattttaaaatgcataaaaaaattgataaaaaattattaaatttttttctcatcatgcattgaaatagtctttc

SEQ ID NO: 396290 - DNA, 1477 bp, Cannabis indica
ttgcaaaattctcctatcttatcataagttatttctttccatatgaatggttagatttactttctcagttgaattctaaagttcatatcatgatcataacatagtaagctatcactagtgtcatccaaataaagatgggctagaattttaaaattctctcactcaaataaggtactgtggtactatgtccaagaactttattggtatcaatttctatcactacagtaacatattaattggaaaaaaataggatcaagaataagttctaatagtttgctaatttgttcattatattacatcatgtctaatcaaaatatgtgtgccatagagatactatggtgtattgagtatagtctagagttcaaaatgaactacatatgtcaatagcttgttccacccctaagtgttgtagagatcctgtggagttatgaatataatctagagtttaatagatataaaaagatcgttgaactgcatacattacttcttaacttcttatacccctatcagattaaaagatcttcttattaaacaaaatcttaataattgcttaagaattaacaattattcataaacattgaatttaaattctaagtgttttgtggtattatctctttgcaaagaacaatatacaatagattttgtatcaataataaaattaacacacacacacacacaaaaccatgataaacatatagatataattggtattggcatacaagatgaagaaaaattaaactcaatttcataaaagtaattcataattaaaaagaaaactttattaaaaattctcaaaaatgtcataatgaattgtctgcttaaatatgaaatagggaataaaatcccaaaataataattgaaactaaattgttcataaactgaaacaattaaatcaaaaataaagaagattttgagcttcatcttcaatcttggacaatctccacccttctgtaccatctgactcaactcgctaggatagcaatccaagtttaagcaactggagctgaaataagaagaaaataaacttggttattagatccagaattaatagcccaaggggataataattctctaaaacacatgagtttatagcatagatagaaataccttgcttctttgctagaaacttaggacattagagtttctagtggcccttttcgttgcaatagaagcactttcctttttgctttgaattgggataagcagcctttttcttattagctgttttaacagctttaaaaagcttcttgctattcttccaattcttctttttgctgggtttcgaagtaggggcaatgtttgcctcagccttggccgtaccattagcagtgccagaactaggagctttagttcctcctttctgtggtcctccaatcaaattttcaaatgtctgaaggttgttgattaactcagggaagtcaaaatccaacttgttcataacataatttgatgtaaagggcagaaaagctagagtcaa

SEQ ID NO: 396291 - DNA, 596 bp, Cannabis indica
agcactcattcgctagacttatgaactcgcttcaaaataacatgttgaaatagaaggcctactacgagaagaagctgagtttggatgtttagcatgattacaaatacacagcttatggcttcgcacctgcagtacaatattgggcatatgaggctattttagaggttgggaagaggtatggcacgaatcatgggattcggtttcccaggatgcttagctggacgagcaagggtgatatagggaagaaagacctcagtgcattattttctagactggtatgagtttctcttatgtttagagtaattatttaacataaatgcttctaataaatgctaaatcgttttactcttatattttttgaacattaaacagcatcttgaagtgatgaatgggctacttccacagacagaagaggaggaatatgtgaggaccatcacttacgatggtgtggcaaacctgtttgatgatggtgtggatgacacacaggctgaggaggacacccaagacccaactgttatagaagacaagcagaaaaagcagtggaatatgtggacaatgctcctttgcccgaggcagatactcaggtaccatttttt

SEQ ID NO: 396292 - DNA, 1096 bp, Cannabis indica
ttgatcttcaataacttcttcaccgaggatgggtgttgcttgagtcaccaaattaaaatcatcacttgtttaaatgtacccaaatttttagttaaaaccacttcaaaggggtcttgctctttaattataggctcaatctcttctatgtgttcaactaatggtgcttccacattattcaaaataattcactttcattatttgagttattatccttaggacactccgaattatacacccttaaattatcacacagagatcttaccatgcgcgccaagtgagtaatttcttctgcaagtgatagtgtattctcctcttcttgagatggtttagtgaatttgcgaaataaggagggtattggtgactctaaccttgaagtgatagatcttagtaccagtcgtaattaaaatctgcgatgtcattcaatagattcattacatcatggctcctacttaacaaaatctctccagttacctctgctccataatccaccaagcttcttgtttcatcataaagtctgttataaaagaacagagtaaaacacccacttgagaaattaggacaacatctctctccaagctccttaaatctccccaagcagaatagaatgactcattgcgttgttgggcaaaattcacaaggtacttatcttgatatcacatttggataaccttgcacgtaaaacacattcagtataatattagtaaaattaaataaaaagaaacaaaaatagaatagaattcaattatattgatattaactaagatattccttgacaacggtgccaaaaacttgttgcgaaaattatgctacgcaagtgcacatatcgtttacaagtaataataatgaaagtaaagtattgttcccacgaggactgtagctaagtaataatcaattgaatttttatttttatttggcaatcaaatagataaattttgaaactaaatgaactaagaaaaattaaattaaacaaacaaataaaatatttaacaatggatatgaaattatggatataatttaaattgctttgattacccaattgttaatactaattaaccattcttctttctcctatttaatgatagattataaattaacc

SEQ ID NO: 396293 - DNA, 834 bp, Cannabis indica
cacgagcctagaccaccaactagcttaagcgatcaccccctacaagagataagactctagcaaacccaaaaagcgtaaaccttattacttgtagcatcaaaaaaatataacagtctctttggtacaacttttgtcatcataacctactccacacttaaagcacatataaagtaacaaatcatagtggaaaggtagacaaatatttttactttcactaggaataagaacatcgtacatagaggtgtaagaagagaatgtcagattttatactaaaaatacctgttagagagtcccacatttctaatgtgtagaaagataatagaatatataagaggaatgcgctactcctcccattgccaattggttttgagatggaacctcatgcaccttattatacactcacatattctactacctaaaccatacacttccgcatgctaacatggtatcagagcaaaaataaacaaaaacaaaaaaatctctagcgactatccaacccaaaaaaaaaaaaattgatcgaagtagagccagaaaaaaggagccaccaaaaatccagaaaaaaaaaatgatccaagagccaaagtaaaggaaaaaaagctacttgtgatcagcaagtatagtaagccaaaaagagccacttgtgatcgagtcgtgcaagattggtgagcaaaaaaaattagccaccatcttgagggggaatgttagagagtcctacattgataatgtgttgaaattaaataccatatataagatgcataggctactcgtctcattgccaattagttttaagatgaaactccattcatcttatcccacattctaagtagtaacatt

SEQ ID NO: 396294 - DNA, 856 bp, Cannabis indica
agtcatcttcctaaacaaagaatttaaggggagggtcgataaactcgagaaagaccttcttcatatagctcagagaaagaccgtctacacataacttggagaaagaccgactacacgtggcttgagaaagaccgtctacatgtagaaggtctcaacctctgcatagacctcattccccgcatcagaagatcccatttcctgcagccgagaccttattgccagccacaacaaattactcgaaaccagagagaagttggcacaaaggtcttttggtgcaggtttgggtcttgggttggttggattctctgatagaaaccacgccaacttccgtccttgattcatccgaaacctcgccaactttcctctgggattccttgtcagcctaaggaggacctctaagatcgctcataagatctatgtctattcatgcagagacataaaaaaaaagagaagggtcaatggagcaacaaaaaataatatgtatgatctgactcaaaccaccattcacaagggataatacttatcctcaagaatcacctgtgaggatcacctataacgatcgacgaggttcccttggtttggattggtcggaagctccttaaccttggaatccatcatttcttgttctaattgaattttgaagtcctcgggaacaaatggagaagaaaaatggttggtgcgtcctggtgttatgaattttggggtgcgggggtgaacctgtgaactcagatgggacattttagaaagaaagagacaatccattctccagatggatctcaccaaaagaggcagaagtttgtgaaatatggcaagcttaagccgctcttttatacacaaagtccagtgacaagaaggc

SEQ ID NO: 396295 - DNA, 568 bp, Cannabis indica
caacctgggcacctagggttttattcggcacccacgttgacattctcaactagggtttcagttttcggtcctgtcttagtgaaaagtggtaaaaacttgcatttgaacatcaattagacataccatagacatatttgaggcattagaattataattagagcgagttgatttttgagcacttggggccctaggaccccgaacatgtaataccctgatacttaggcgcgctagagtgatttttcaattgcagtgccatctttgctaattaaagaaattttgttgaaaatcgtgtcaaattaaaactttagatttgattactaaactttaaaagtttctacccatttatttacaaaagcctggatcctgtaattaaacttttacaaaatattcaaaatatatttagttaggttgcttagcgactacgaaataaaaccccagatgtcccgagaccgaacactgcatgtcgtgcctattggatatattttaccaggatatagatttactaacaagtatgtttcattaacatcttaatatgaattctaaaacaatgaaataaacacataagagt

SEQ ID NO: 396296 - DNA, 1338 bp, Cannabis indica
ggctgccccatctcaacccagtttcgacagggggtccggttccccaaggaacgccagggggtgctcccaaagcattgacaccagctgcaccctcaggaggaccaatccctcaacaggcccttggcctgccacctagacccaacggaagagtggttatgatctctagtgtgccccatattggagagaccactcgaaaggaattaaagcattatgccggggccattaaacacgatgaggtgtcagaagtcaatcagcttccagcacaaaggccccgactcatggatcaaccgattactttcacggaggaagacgcaaggatggtgcgttttcctcaccatgaccctctggtcatagagactcccatttccaacaagatcgtggctagaatactgatcgacaatgagagttccgtgaatttattgtttaaggaagccttcacagcgataggcctcacagactgagatctgttgccaagcggtttccagctcacgggattcaacggaaccacacttatcccaatgggaaaagtgaggttgccagtcaccctgtgcccggacacaccccagagtactttcaagtactgcacgtttgtggtggtggactgccaactccttataacgcaatcctcggccggccagccctggtagactgtggtgcacttacgtccatccgacagttgtgcctgaaattccccacccaggaggctagagtaggaaccgtgaggggcaatcaaggtgaggccagacaatgttataaagtcgctacccacttgccaatattgatggtccgtgaaggtatcgagccaaaattggcaaaagaagatgagttggatccctgtgtgggttcaaaaaaaattgtagagcccatggaggacgtcgaggaagtgccagtatgagacctctaccccaccaaagtccttcggctaggtaagagcctagaatcggaggaaaaagacaaaatagttaaagcactaagggcagccacaaatgtttttgcgtggtcccaaggagacatgaccgacataagtcctcatgtaataacccacatccttaacgttaatccggatatgccaccagttcagcagaagcgactgttgggttttgtgccctaaataaaacccatttcaatataatcagatttacttattaataaagatcagaaataacatttatgttgcatggttcacatgatttatttcatgattatatatataatgtatgaattctattaagtccagaacatatgaatttgttaaagattatagtgttgtctagcaaagtggaatataatcttattatatgtcgtaaagttattccctgatttgtctagttcactgga

SEQ ID NO: 396297 - DNA, 694 bp, Cannabis indica
tttttatttgttcgttctttttcttacattttcataattcatgtaggattttactgccttaaccctacaccaacaaagacttaatatcagtattaaggtcaaaactgacctttccaagtctaactaatgctttagacttaaacggcaccgtatgaccaacacgacattcaaacttgtgtcgtttggctctctgagtattaaatactctgagaagggtctagaaaccctaacactcaaaacactcagcctcaccaatcccacagatcgaaaccctagcagagcaagttctctatgagaacttgctcgattccaaaccctagaaacccagaaaacccagatccaaacacacacacagattttaggtttagatgaatgaaaaaaccaagtaataggaaagaaatcaccagatttgtttcagagttcaccccaaaattagggctacgtctctgtcaagctcgtctcagagattagcttgatatccactatgattcaaaggcaaaatacagacttttggagcttcctgtcacaagatctttgatcaggtaaactcagttttagtttgtacaagttttcatttgtttttcttgtgattttcttctcgatctaactctgtttgttgttgttgtgcatgtactcatcccttctgcctcctcaccatgagatctgcattctcgaggttggatcttggagctga

SEQ ID NO: 396298 - DNA, 756 bp, Cannabis indica
tattttattatatatattattaattaaatacattttttataatttatgtagtcttactgtgaaatcttttcttatatttgtttcgttgatagcatcaattttgaatttcacaaagtacatttaatttgtttccctcatatgttatattgactgtttttgaagtatttatgacagtattttattattatatgtttaaagtatttgtgagaccacataggtttttgcactatttttaatagttttgatgccttttacagtttatgtgccttttatggtattttgtgccatttattatggcttgtccctatttgtttaggatagtctttgtgttatggttaataggcaagagaagtgatacattttgtgctcatgatttctacttcaacgacttttcacttataatagataagtatttcaaatctttttaaatccttatattcaagagggatttatttaccatcgttctttcacattactttttttcttcatattgtgtggtaatagagtttatttttcttattttgtaggttattttgtgaagggcctacacttaaagagcatttactaataaatttatttttaaatataatctgtttgacattaactttcagcaattttaaattagggtgctagtttgttgtaactacctttggctagttttacttagaaattttgttggcgttttagttttttgtaatgttgaactagtgacatgagttgtgtgttaattttatttttgttttttaatttttattt

SEQ ID NO: 396299 - DNA, 754 bp, Cannabis indica
tcaagaacctatctttaaagttcgaaaacaccagacatcgtgggagtggtgcgtggcgaccaaatgctggcttgcgattgctatcacatagagttgcagcatagaaaggccggtcatcaactgatggtgatcttggcagacgaaaacgagaagaaagatgaagatctcgatccccgagttcaagatgaaagaaacttgctaaaaccaaatgaagaattggaggaggttatcctcgacccaggaaatcccaccaaatgtgtgtacattaggaataacctggacgagcagcttaaatagcaattaacaagctttttgaaggaaaaccaggatcaattcgcctagggtcatggggatataatagggatcgaccctaacattatcttccatcacttaaatgttgatccaaactacccagcgaagagacaaaaaagcaggcccttggattccgagaggcactaaaacaggaagttaacaacttattggtcaacgattttataccggaggtattttatccctcgtggatagctaatcctgttctcgtctcgaaacctaacagaacctagagaacttatattgatttctctgaactgaataaggcatgcccaaaagactattttccacttcccaggatcgaccagttagtggatggaactgctgggcatgagcttatatcttttatggacgcatattatggatataaccagataaaaatgtatgtcccaaatcaagaacatacaagcttcgtaaccaacat

SEQ ID NO: 396300 - DNA, 1380 bp, Cannabis indica
atctggacttcaaacggtgtagctttaaccctgttaatggtcccacattattggttgatagagaatcaaagtagatttaccaatgaatcacgaaatgctatagttcttaaatatgatttcttaatttattcagaagtaattcgtggaatcatgcaccctttctttcctacttaataccaaaaaataaagtgcagttggttggatccaacctattcttgaaataaacaactcgcacacactccctttccaaaaaaaatcaatacgccaagcactacacttagatttattggatttgttgctaaaatatcggtattaaacccgaaacttccggcggatggccaataacccaaggaaaggaaaggatcggttatatttttcatatggtctcctctttcttatagaaagaataattattagatagaataattatctctctttttttttatttattctattatttttatttttaaaaataccactaaataaagaaataataaatagatatagatttttctttgtaagattaaacaaaaggattcgcaaataaaagtgctaatgctacaaccagtccataaattgttaaagcttccataaaagccagactaagcaataaagtacctcgtatttttccctctgcctctggttgtctcgcaatcccttccacagcttgtcccgctgcagtaccttgaccaactcctggtccaatagaagcaagccctacggccaatccagcagcaataacggaagcggcagaaataattggattcatgataagtccctcgcaccaaaacaaaaaaataaagaaatagttaatgatacaatcaaccaatgaattatgacttacttatcccatcgctcaaatttattcagtttaaagtaactaagaaccctgaattgaaataaaataaaaatattcgtgaattatcagaactacttcaatatctcttttttttttagttcttatccacgtaattttgtgaatccgtaccactcttgttcttccatttctttcttttttcttcggaatcattctttgaattctttgttctttaattcgtgatttcacttcattcaatatttaaatcaaaattacagacgaaagagaaagactttcgtcggaattcctagataacactagtagtccaaagtagtccaaataagatatatttttagttcatatatacctagttaatatataatattacatatacatgtttttcccctataacgtaaaccaactattcgtttcttagattcattcggattctagaatcattctttgaaacatccacaaaaattgtcttatagcgagtagattacatacacctagttcgatccccccctccttcgctaataaatcccctttgtttcttttttttt

SEQ ID NO: 396301 - DNA, 633 bp, Cannabis indica
tggccgttggaaccagatgtttcgaaaatgaaaccagcccctaaacagtctagcacaacaagtctctaaaaaaggaacagtaaaaaataacctattcaactactaaacagcccctcgcggctagggcaaagttaagtgtctctgcggcttgaaaagtgtagttaaaaaccgggatatatataaacaaaaaaaaacaacaaaaaacttttggaacaggctggccgaaatattacggttggacaccacctgacgcagaggatggacctacaccagacatccgccccacagtctccatataaaggtcgtgaatggccttcatatttcggatgaggcgagactggcgggcactctcctcctccagttgctggttggcttgcagcagactcccagtttggaatttggcatccaaaagctcagcttagagggtctcattggtagcacctaggttgcagtttgttgcctgaacctggtccaactctgtcacaagtgcatcaacctccgcagtagtgctctctgccaatagggccgcctgtcaaacaataaggcaaagtcaaaaaagctgaagactcaagagcagggggcagagaaaacagagtaaaaagaaaaaaatctcgaagccttaccccgatggcc

SEQ ID NO: 396302 - DNA, 836 bp, Cannabis indica
tgataaaatatttccaacaattgcttacttgttgggcacactaaaaagacatgaaaaatttaaggacactgctaatcaactttgagttccatacaccaaaaaaatatcacttgattgtataacaaggtggaattctatttttttgatgcttagcacaactttatcatacaagatagtatttgaacgtgcaaggctacgtgagttgagattgagatgtgccccttcagaaattgattggcaaaatgctcaacagttatgtgataagttagaggtgtttcatgaagtgacaaagttattttcttaacaaagtaccctactaccaatattttttccccaaaaatatgtgaaattaagacaaacattgattcatagatgtcatcagatgtgccttttattaaggacatggtaattcaaattatgtctaagtttcaaaaatattggagaatgattcacgggcttatgtgtgtggcagttttagacccgaggtacaagcttatgttgctcgaatattatttccctgcaatctatggagatgagcaatatgtaactgaaattacgaatgttcgttagctttgttgcgagttactggaggagtacgggtctaagtttcctcatttgagagagagaagagtttaggtagaaaatatatcaccatcttcttcgacactgcgaatggatgccctttcacactttgacagatgttaggctatttttagcctatgttttggatccaatttatgtgcgtttttagctgtgttgggacggaattacgcttgttttctatgttttcaggttctttggaataaaagaggtctcgggtgcagaaattcgttaaa

SEQ ID NO: 396303 - DNA, 1889 bp, Cannabis indica
cctttcgataaaggcacgaaagagccatttttgcaaataatatctattaaataataaatagatttgaatttcgagacgaaagaattcccggttttattttctcaaaatatcaaaaaatgtcgaaaaaaaaacatcgccggtggccactgtataggaataattgagagaaatttctgaagaatactgtgatgataaaaaatgagtgtcaaaacaagacagaaaagttattattataaagagtacaaaaaagataaaaaacgttgattaacaaaaaaggatagatggacaaaaactatttcgttttaggattattccatgtacgtttacttttttttgttctaagcatagttcgtctggcgctatcgttttttcccttttgctacaaaagtcttcacttttttcaaaatacttcaattggtacacgcaagaaaaaggccaattcagcggctttctgttcaatttctcgtagagtcaaattctcatcggtacgagtcaagggaatggacccctgtcctttgatttccatataaagaacccgacgagcataaataccctctttaacttctattctgattgattgaatgtctttcataaggaatcggaggaagattcgacgattttttccaggaaatccccaacgaaaaatacacactattccttcttttagatcaaatcgatcataaccactacccacattccacgaaattgtgcaccacaaataggaactaaaaaaaagacccgcgagtccatagaaagacatcacgagtccttgtggaaaaaaaatgatttgctgagggggaaataagggtataaaattcttaccaagataactagaggttccaaccaataaaaatcctaatgaacctaaaaaaaggataacggcccagcagaaattactcagttttcgagaccccgctataagttctatccatatccggtctgatcgccaactcatactagatctagttgcattttattgtaattggagttatcccccaataaatttgactttcattttttttgtttccgaaataaccctcatcaactagtactatatatgatgtaaagctttaggagtaattcatcaattgcttagagctaaacaaaaataataacatctttttcatatgatttcttatagatatccacggacatgtagatatattgactttacgtttctttcagattcatcccaataacaaatactgatctattttcaaatagctataatgcatttaatcatatattatgtttatgcgtgaatacgagcttctgctcggagtaagctacatgttatcccatattctactaaatagatatttttgctataatccatctgccgaagtcttgaaaaaaaaatagaggagatttaacctcataatatctaaaaaatcttgtttttttgaacatgaagagataaagaaaccattgcaattgccggaaatactaagcccactaaaggaacaaaaatagcgggtaagttgctgatagttgtcatagaatgggtacctcgatttaatatttgtacctgttatttattggtatatttgttattatattaagattttaacctgttataaagatatcttatccttcatatataattatactattataattatacttaatacttaagtgagtatatagaaagagaatattaaataatatataaactagataatattaagtatataataaatgtaaataaaagtgtaaataaatgagcttattcatcttgttatatgtttatacatataatacttgttatatgtttatacatataatatatgtatgataatccactttgatttattatttccgtcgttgttgattttaataattcttattattagtctatttattaggctattcaaaatttcatttttttt

SEQ ID NO: 396304 - DNA, 679 bp, Cannabis indica
atcatgtgttaatatgtgatggattttcttctttagaggttgataaatgcatatatactaaagttgttgataacgagtgtgtaataattagcctttatgtggatgatatgcttatttttggtactaatattgacattatacttaataccaaagctttccttgcttctaaatttgatatgaaagatatgggtgaagcaagtgtgatattgggtgtcaaaatcataaggaagggtgatagtataatgctatcacaagaacattacgttgagaaacttcttaagaagtttggacattttgatgtcacacctgtgagtaccccttatgatgctaatactcaattaaagaaaaacttgggagagcctattgctcaatctgaatatgcacaaattattgggagtttgatgcatttaatgaatttctctcgacctgacatagcttatgcagtatgcagattgagtagatatacacacaatcccaatcgtgatcattgggctgcaatagtcagactgatgaaatatttgagaggaaccatgaattatggtatcctgtatagtggatttcccgctgtattagaaggctacagtgatgctaactggatctcagattcagatgagataaaatccactagtggttacatattcactctaggtggaggtgcagtttcttggaaatcaaccaa

SEQ ID NO: 396305 - DNA, 447 bp, Cannabis indica
atgcgaataccacaacgacattggccatagcaccaatgagtgcaagaacttgaaggacgagattaaaaacttaatctgattaggtcattttttgaatggattaagaactggctaccccatctcaacccagttctagtaggaggcccgttacctcaagggaagctaggtggtgtaccagtggcaccagcacccgttgtaccccccgggggagcaatccctcagcaggtccttggtcttccaccaagacccaatgggagagtagccatgatctctggtgggccccatattgggggaaccaccagaaaagaattaaagcactaagttggagccataaagcacgatgaagtgtgggaagtcacctataacatccccgcttcaagcctccattgggcccttacacccacagaatgatagctcttatacacgagtacgccactctggctgctt

SEQ ID NO: 396306 - DNA, 680 bp, Cannabis indica
tctctctctctctctctctatgctcgaccaccccaaacaagaaggaaccaacctctaatccttgtgttttctgtgttttgagctaagattcaaggagtatttagtgaaggttaaccctaactatagcttttgtgttatttgagcatttaatgagattttatcttgcaattttgtgctattgtggttgttagggttaacttgatttatgggttagtttcttgggagtttatccaacctagtatattgccctaggcagctcttgttctatttgtgaaaaataacgatggttcccttagaatatgtattgattatagggaattaaacaagctgatgatcaagaacaagtatccgttgcccagaattgatgatttgtttaatcagcttcagggaaagattatgtttttaaagattgacctacgatttggctatgatcagctcaaaatttaggccgagaatataccaaaaactgtatttcgaaccagatatgggcattatgactttttggtaatgtcattcggattgacaaatactccagcgacctttgtggatctcatgaacagagtattcaaggatttccttgataactgtgtagtgtttatccacgacatcctttgttgggttttatgccctaaataaaactctatttcaatgtaatctttatcttttaaatatcaataaag

SEQ ID NO: 396307 - DNA, 557 bp, Cannabis indica
caacttagcttcgcgcttgagttcaatgagtttattctttcggtctggccagcaccagatttcctcttctttctgatcacggacttaggtacaaagtccttgggatagacgtgtacctcataaaattatcctcggaggtcaactggataatatttcggtcttcccccagaagtcaagcaagtttttgagctctatccctaagagtaagagtgtggggagggcggtgatatgttggaatctactggaaccgagtgcaagtaatgcccgtgccatccaccatgaagtactcatcagcaaaacgcccaatcttgttgatggccgtatcgtccgtgcctatcaaccacttgaagcctggttgagagaagtagaagtaccttgacctgccttgcttgggggtggacttcaaatcaaagaaccaagcaacctcatagggagagggcataccccatttctgggaggcatagaggtcgaagagggcagatagatacttgatgcccttaggagtgaactgggcctggcagaggccgaagaagtctgccacattcttgaagtattga

SEQ ID NO: 396308 - DNA, 1293 bp, Cannabis indica
tacaaagacttacttgggacaaaaatggtgaacaggaagagagttcagaatagtgtaatctccaaaggagcaagggtatcagtagagcaatccaaaatactacttagggattcactacagaggaagtaaaggcagcagcttttagtattccgagtggcaaagctccaggtcctgatggattctctagtagtttcttccaagacaattgggaggctattggtgatgacataagtgaagcagtcctatcatttttggattcaggtaatattctcaaagaaatcaattcaactattattaccttggttccaaaaataaaatgtcctaacactgtcaaggattttagaccaattgcgtgttgtaatgttatttacaagattgcaacaaagctattgagttctagaattcgagacattcttcctgaaataatttctccttcccaaggaggatttattaaaggaagattcatagggcataatattatgatttgtcaggacctggtgagacattatagtaggaaagccaataaaccaagctgtatgatcaagctcgaccttcaaaaggcttatgatactattgagtggggattcttggaagagatgctagaaggtttaaactttcctaaggaattcattaagctgataatgaattgtattacaactccgaggttctctcttatgttcaatgggtccttacatgggttctttgaagctaaaaggggacttaggcaaggggaccccatgtctcctctgttatttgtcttgggaatggaatacttatctagacttatgaagaagataggtgagaaaaaggacttcctatttcatgatagatgtgcctcacttcaattgaatcatttggcttttgcagatgatgtacttctcttttgtcatggagatacacagagcatcacttatatgcttcaagctcttaagctgttttctttcacttctgggcttcaaccgaatgctagcaaaactgcaatttattgcagtaacatgaatgaaggaagtgtgaagacattgattaaagcatcgggtttctctagacaagttctgccatttacttatctggggatacctatttgctctgggaagatttcaggtaaggaatgtgaactgttggttgaaaaaatgacggctagaattaagagttggagttcaagaaatctctcatttgcaggtcggattactctaattaactcggtattaatagcaattcaggcatattggagtcagatgatggtgttgccaaaaaaagttgtaagagcaatagaaactgtgtgtagggcttttt

SEQ ID NO: 396309 - DNA, 659 bp, Cannabis indica
ccaactgaacaagatttttagcctccaatatgctttgccaaatgaaacttgggttgggtcctaactcagcagataagaaatggcctttaggaaaatatcttgctttataaacttttgctactaatgaattttcattagtaagcaaacgccacccctgtttccctagaaaggccaagttatagtcccttagattccgaaaaccaagtccaccaacatctttatgaaaacaaagcttacgtcagctcagccaactgactcccttagacgaacccttaccttgcgatttccaccaaaaattagccattaacccctcaaggctagagcatatttctttagtgagaagaaaaacactcatagcataacttgggagcgattgagcaacagacttcaacaaaacctctttcccagccttagaaagaaatctagtttcccaactttgaatcttcttgatcatcttatccttaagaaaacccaagatagcatttttacttcttcccatagtacaaggcaaacccaagtatgtgctgttgtcagaagcaggagccatgcctagtagatgacataggtgagtctgaacctcataagacacattattactgaagaagactgatgaatttagtaaagttgatcttttggtcccgaagctctctcatagatag

SEQ ID NO: 396310 - DNA, 522 bp, Cannabis indica
atattgtataccaattatcaagagaagactactatagctcttagtctaaataggatatatatacttgaattatgtattatgcgtaaagagaaattgcaggggctactaaaaaaattatgtttagtgatgattttttaatcacaatatactgttacattattttttctattggcataatatgttcttactaatttttttttctttatttggtaaggaggttcacaaattagtaagctgaaattatgtggctttagtgattgtattagattggtctcttaagagtgtttatccgatctaattcgtattattttgctcatagtatatctgattcacacccagtgcaaatttcatattttggatccaatcgaatccacatagtaactcaaatccaatccaatccaatatgcaaaaatgcagattatagattggttattttttaatattaaattatttattaattattaaaaaatatttttttacataactaacaacaaaataaaataaattattgttgttttatgt

SEQ ID NO: 396311 - DNA, 853 bp, Cannabis indica
tttttgtagtagtgattgaatatcaacatttacatcaatagaaatgtaaccataataaatgaagaacagtttctacccaattcactaattgcagcaatgtatgcgaccttgatagtgcgagttttctgttcatattctcacataagctcgcgggcttaagatgcatacaagactaaacgagtcttacgtctttaagatattttcatcctagttaagtcacgtctgtggatatcttgtaaaaattcgataacttaggacatgcgagtccttatcgggtcattgagtgcatcgggtcatccagaccagctcgatgagtaaagaatcaatctctactaactcataggaaaaccttgatgatcttcgcatatatcttggtatatgcgagtcttaaacccggtcttcggtcctacatcatgcgaggcacaataatgcgactagactctgtcagggtcacatcatctcgctgagtctggttcaggcaaggtttttactcaagtggtctccttctgacagctcagccctcctcaaggagagtgaatccatgtgtcatacttatgggagtctggtcttgagtttttaggtgaaaaattcacactataacagtaagattcactaaattcttatgtgtttaatttctttattttagagatattcatatttagtatgttaattcaacatacttattagtaaatctggatcctggtataatattcccaacatccatatctatgattagcgctctcactcaattatactaccatgttcctaagatgtaagtactgggccaatctacttggtcagctttaacgaacaattcaaagaacaaaaataatacatttaagctagaacctaa

SEQ ID NO: 396312 - DNA, 610 bp, Cannabis indica
agatggagagggctgcatttttaaaggacagtgttaatagtattaaggtagagaattgatagaagaaagtagtattacaaaacttagtgctatcccactattgtatatatagctactaataattagtgtaaataaatacaataaaatcaaaacctgtgattagtaagcattaatgacccatttattccagaatccttcaaaaaatagaaaaattaaactttctaaaacaatttaatatttcctttcctaaaatattaacaaattcctttgttgtactaattcctaattaagcactattattttacatattgattatattcaacctatattgaattgaaaattacttaacaatcaaattctgtattatgacaaattattccttatttattgtgtagaaaaaataggttgtaaactttccaaaaataccgtatcctttttattaccataaacaccattaggataatactttcctattcaatttagagaacaaaacaaattgcataataatttgactttccaaatataagtgatccaatattcctcttcagaccattagtattccacctaccttttattataagatcctcgtgattcttattcttcaatttac

SEQ ID NO: 396313 - DNA, 801 bp, Cannabis indica
atattacactataacaatcataatcattaatcatttgaccataagtggtgcgtatcactttttcttaccatagtcaaaaaataaggcgtgccggctcacctcagtggaaacaaagcagggcgatccccgtcctatgtcacgataacaaaaatttgtataaatatcttaaatcaaaactctgggaaaaaaaccctaattcccgtaactggacaaccctaccctgcattagctccaacataggtcatacaacacataatcaacctaaatcagatactaggtaccacccaagctaaaacaaaacttgaagaaaactttgaatttcccctacaggacaaccggtcaaccggttctggtgcaccagaaccaaccggtcgagcagttctgatgcactagaaccaaccggtcgaccggttctagcagaccagaattcattgggtttcttccccaaattcgagccaaaaactcaccaaacctatccgaaagctccaaaatagtatattaatcataaaacaaggtattcaacttatccattaacaacaattcatcaattatacaaatcaccactaagaatcaaagatttgagttcataaaacaatggaccatgaatatctctaaaacagtgaaattaaacacataagagtttagaaaaccttatattagatgtagcagaatataatgactccttctgttcaagatattcagcccttgattcctttctgtcgcaaagcattattaagatatgaacctggatctctttctctccttcgggttttgttaccaccgtcttactcactatgattg

SEQ ID NO: 396314 - DNA, 361 bp, Cannabis indica
atataatttataatatatatataaacttgaacttaaactacaagatttttaaaagttaatattataataatataataatattaataaacactttattattaataattatcttttcatttcttaactactaagaaacttctacttctagggcgctacatcaaatcccacatactcctaattaccgcaatacttatactatcaacttatcacaatattcctatcaattctattaattaaacttgttatgatattcttcaagacaaggtttgggttgcgttttaatatattcagggaaggttatcgcttattcctataggaaattgaaggaatatgagtagcgctatctgttgggttttatgcc

SEQ ID NO: 396315 - DNA, 667 bp, Cannabis indica
cggattggtttggtctggatttttaatttttttctaaaccaaaccaatattaaggttttttaaaattcaaaaccaaaccagatcaattatatgatcaaaccaaaccaaactaatccattcaaaaatagattagtttggttcgaaaccatagtttgtatttcgtagttgttctaatttttttttacaataattgttcatttattaaggtagcgtttggtaacatttttttaatcagttttttgtttttaaaattagaaaagtgaaatttttttttaaaaacatgttctataaaactttttttgctttcaattttttaattgaaaatcaaaatttcaaaagcaaaaaaatcactttcaatattttttttacagtttttttttcttaatcaatattttggactccgacacaacccggacctaaatcctctcccacaacccttgtgttgaacccgacatctgacccgaatccgaatttgaccccggacctagacccgacttaaataaaataaaaaagtaaaaataaaaataaactttacagaacacacttttgttttctatttttaaaattgaaaaacaaaagtggttacagaacgcatttttatttttcaaaaacaaaaattttaaaaacaaaaattttacttttattttgtaattaaaaaattagaaaa

SEQ ID NO: 396316 - DNA, 161 bp, Cannabis indica
taggctgtaacgccctaaataattaggcacgctacccaaaatgcttatgaaaccctaatcccctaatcgggattactaattaaaatagcgcagaatttaaacttttatattaaacagactgaaaataaacttgtaatatatttaaacttttcaaaatagtt

SEQ ID NO: 396317 - DNA, 552 bp, Cannabis indica
aactccgtctataaatcttttacatcaaaaggaagaaaatttgatggattggaattggtatgaatttctaacaaatgcaaccttttcagtcagtatagcttcgttgggaattcttatagcatcctttttatataagcctgtttattcatctttacaaaatttgaattttttgaattcatttggtaaacgtattcctaataaacttcaaatttttggaaataaaatactaaatgtgatatatgattgggcatataatcgtggttatatcgattttgtttatgcaacattcttaattcaaggtataagaagattggctgaactaattcatttttttgatagacgaataattgatggaattacgaatggggtgggtatttcgagtttttttgtaggggaaggtataaaatatgtagggggcgggcgaatttcttcttatcttttagtgtatgtatcttatgtattaatctttttagtaatttactccttttttttcgttcaatatttctaacttcgaattttcttgattccgatccacatccagataataagttt

SEQ ID NO: 396318 - DNA, 1191 bp, Cannabis indica
aagtctaagaaacagactattttagctcaatctataatggagtctgaaatgattgtactagctactgctaatgaagaagcaggctgactaatagaagcctgctagctgagattcatgtatgggaaagacctattccaatagtgttgatccattgcaataatactgcggctaatgcaaaagtttagaattgttattacaactgtaagacacgacaaatacatcataagcatatcagtgttagagagtttctctcaacaggagctgtaagagtggatcatgtacgcactgatgataacttggctgatcctttgacgaaaggtttagctagagagaaagtccttaaaacatagaaaggaatgggacttattgcccttaaattgatgaattactcatagtggcaacccgacctatagactggagatcccaagaaataggtttcatgggtaataacaagttatcaagtgataaaagtgagatcatgctataattatacgaaaagagaagcatgaattcctgaagcattttaaggttgagttaatagaagctcctaatgagatctatactccaactagagtagagtaccgagctacaggagtactctaaatagaatcacctatgggaatgtgggagtggggccgtttcctatgaaattttaagcaaaatttctagagcgttcactatactgggatagacgtgcatggccattagcgcacgtgcttttgattacacccttgtaaaggttgttgcgtggtacaatgttagagatagagttcaagactacgggtcactctagtaaaatttaaatcgtattcactacatagaggttcaaatcgaaagatacctttgtttatactcaatcttactgttgaatgataatagtagatggaaatattttttaaataaattcaagttggaaatgttggaactttgatgaatattttaacaaaatatagaagtgttctagtgtgtgtgaagtggaaagagtcccacatgggatatgaacccttgtttacaagggtatgtagagtgcaactttagcatttgggtttggaccccaaggggtatctagttttgtgtgaatgggtgaggactcacacacttgacccaccacacacacgcgcacaccgtttgtccgattcgagctgggttggttggttagtgtggtgtggtgtgacactttattatttttta

SEQ ID NO: 396319 - DNA, 602 bp, Cannabis indica
gaggaagatggtaatcttccacccagaagccgaataaccgtttatttttgtcgaatcggtttggggatcttggatcccggtaatttcattactaatagttaaggaattgttacgagatgggtgtctagggtttctggccgtggtattggataccactcggcctaactctattcggccagaagacatcaaggtggttcgagaatttttagatgtttttcatgattaacttccaggtgtaacgctgcagggagaaattcattttgtctttgacttggcacctagagcagaaccggtttctaaggcccctaacagaatagctccaacaaaacttaaagaactgaaaattcaactccaggggttacttgacataggatttttgggcctagtgtgtcacccagaggagctccagtattgtttgttaagaagaaagatgggtcattgcgaatgtgcattgactactgggaattgaataagctaacaatctagaataaatatcatttaccgaggatcgatgatctttttgatcaacttcaggggaagacagtcttttcaaagattgatctcagatcgggctatcatcaattgagaatccgagaggagga

SEQ ID NO: 396320 - DNA, 849 bp, Cannabis indica
gtgtcatgattgttgctagtgctatccaagtagctagttcaaaagacaaaaaccctattgaatgtgatatgaccttttatggtgtaatcaaagaaatttgggaattagattacattagctttcgaatccctgtttttctttgtgattgggtgaggagtgataatggagttaaagaagatgagtttggattcaagctagtggacttgaatcgagtaggacacaagtctgatcgatttataatggcatcccaggcaaaacaagtattttatatgagtgacccaatagatggtcgctggtcagttgttctaacaacacaaccaaaagattatgattaccaagagtctggtggagatttatatctcaatgataaaacttttgaaatcaatccaccaccaattgatgtcgccgttcgggacgaaatcatttcttctcgggaagacggtgaaggattatggattgagtaaactatcaatctataaatattggtgtgttttgttttatattattttatatttttttgcgcctaatctaaatttctgtgttaattttatgtattattattttgctttaatgtgtaggtacattgactatggatgaccccggtgactatgatgatgattttgccctttggggacaatccattggtggtgaatctgaatctgatccagctgcaccagaactggaacctgaccctgattcacaaccaaagaagaaaaatggtaggggggcatataagggtctgaagcatataaagaataggagtgaaggaatacttctcgaagtcgagtacaaccaatggggccagtgcattggggacactgcaaatgaactggttagccagattggctt

SEQ ID NO: 396321 - DNA, 726 bp, Cannabis indica
tcaaatttataaagtaaaataaatttaaaagaagttttgcgaccaaaaataaaataaaaagatttaacgtataaaaattaaaacataaaaaatttcaaaatcaattactctagttggtaatataaacgtagggtataggggttaattttgttacatagatttaatcgaattggcatgacacaatatgaaatatatagtcttaagtatgatacgacacgacacgatacgacaagtacaaaaatatgacatataaacacaaatagattagctcgaaagtacaacacattaaaaatgctaataatttgataatattaacaataaataatatttattttttaattaattgatactaatattcaaattataataatatttattatttttatataattgtgtgtaattattgttgaagaaagatataaaaataattaaattatgaaatatacatacaatatattttagcaattaacatattaactgtaataaaaatacaaaaatttggattacaaatttgaccctggataagaaaatgagctgtttattttaaaaaaaataaaataaaggattgatccgaataaagcatgaaaatccaagcacaacatgaaactcatgggcttgcaagtttatcgggtctatcctataagattattggcaagatacgagagactcatatttttttataacacaacactacagaattcatattttttttttatgacttagcac

SEQ ID NO: 396322 - DNA, 567 bp, Cannabis indica
agtgcatcagcttcaccaatgcattgattgttgattttttgcaatccgagtacaattcagtttccatatccttgaacaaatcgtcgtacttaccactaccatttagaaggggctcgctgaaggaagcaatggtagaacttgtatcgtcaaattagggtcttttcttaaactatcaaccatcacattcgccatttcttcttcatcgttgtctactatttctacagccgattgcatgaacgactccccatgaaaataccagatcatgtacgatcattgcttaccatgcataaacaaatgtactctaatattatcgggagtctcgaagttcacatttagacatctaatgtaagggcatcgtgtaactccggcagaatttatttgcactcaagcaactccaacaaactcatccacatccctacgaaaatctacaaaatgtctattaaagtcatccaacttctggcgctcaccatatttctacataatataaaaagaggaagttcaaaataaagttgaaaatgtgcaagtgtcctagtgcacattctcactccattactaaaagggtaaaga

SEQ ID NO: 396323 - DNA, 925 bp, Cannabis indica
aaacaaaaacttaaaaaaaaaatctaaacataattagccaaaggtattaccctttggctagtaacaacatactagcacccgactaattcaaaactgctgaatattaatattcaacagattatattaaacattaaacttatcaggaaagtctctataatggtaggccctccacaaaaccaacctataaaataacaataaaaaaaattatattacaacaaaatttaatgaaaattaaataatgtgaaagaacagtggcaaaacaatccataatataatataaaacaatccctatcaaatataaagacttaaaaagacttgaaatatttatttgtcaaaattgaaaagttgttgaagtagaagtcatgagcacaaaatggatcacttctcttgcctaatgaccgtaccataaaactaccctaaacaattaagtacaagcaataataaatagtataataatcgtaaaaggtacaaaagccataaaagatgcaaaatctgtaaaaggcatcaaaaccattaaatgatgatgcaaaaactagcttggtcttattaacttatatactttaaaaatatattaatactattagttagtaagaagaaacaaaacaccaacttctcttgctattttgatttgctaccataatatcaacagccaaatattgctattttgatttgctaccataatatcaacagccaaatagtgttacatgcttagttgataaaatatgggctgaaatgcaaaatgacactaaatttagaaactaagttagtaatgtccctttttaaaaaaaattaagaaaatagtcaaatataataaattagctaataaaaattataaaacatacatttatcacatgtatttttttaaaatatatataataatgaaattaagttatataatttttttagtattgtatattattatatt

SEQ ID NO: 396324 - DNA, 563 bp, Cannabis indica
gattccaaaagttcattaagagcttcggtatgaaacttgttgtcacaaaggtacaatgaagcatttataggcttgaaaggttcaaagtcaattgtcaccttcttttctttcccatcatcggtgacaatcgttccagtgtatagcacaagaccattaggaggaaccttgttataaagcttcagcctttgctgtgcagatgtaatggcacccaacacagactggcgattgaccctactcttgatgttggaagcagttccgaattcatcgccaagcatcttagtaacccgagaaatttgatcccgcggaggcattataagagaaatcatgctggtaccattgcctcttgcagattctaaagccttgatcaatttcttaatcttccatatctcaatgttcttatctgattcttgaccatctgccattgcaacttatgatagacccaaatgcagaaaaatccttattcgcctaacattcaatacaacaatggaacagaaacacgacaattaattcagtcaaatattgttcaaaggttataaatggaaaagataatcacaaactaatat

SEQ ID NO: 396325 - DNA, 907 bp, Cannabis indica
caaagtgtagcgactcaatcttgtggaagagcatcttagatactagagacatcattaaacacgaatcaataactttggctgctaagggagattctattgatgtttggaggcaatcgtggattccctcgttaaatcatcataagtttgatgatcttatggagagtcttcgaccctgtggctatacaatcaagattgtggttgatttatcatctggttctagttgggatcctgagaaaatattacagatttttggagaaattcttagtgaaagaaccatggctatcccaccagttccgcttccacactcaaataagttaatttggaaagcaagaaagaatggtattttatctgtaaaggatgcttactatatggaccaagctcattgttttgcccttagaaaagaaatttggaatcgtatatggagtccaaaaattcatccgagattggccattatgctatagcaagttttgaatgattcccttcctacatgttcgagattgccttttttaagagtcgaagagtgtgttttctatgctagctctgaagaagattgcttacatattttttgcgactgtaactttgtcaaagcaatatgctgaagggaaggtagagacctttaaagctaggtttgtggccaaaagctacgcacagtgaatcgacatcgactatgaagataccttctctcctatggcaatgcttaaattcattcacattcttctttctaaagctaccgcatatgattataagatatggtaaatagatgcgagactgtttttctaaatcgcgatcttggtgaaaccatatatatggaacaaccagaagagtatttattatcaggtaatgatcgaaaggtgtgcaagtttctaaatccatttatggattgagcaagccttcatatcatggaata

SEQ ID NO: 396326 - DNA, 620 bp, Cannabis indica
aggtaaaatatttacacatttacactcaaagtttttttatatatatttttataatattctatataaaaaaaaaatccacataaaactaactgttttaagattgctttattttcatagttgtgatatatgaattgaaaactaattattttttctttttatttcattaattttttatatgtattttatgctaacctatggccaatagaatattaaactaaatttagtagaatattatatatattattatattaatatttctgtaacataaatttatatttagatttaaattattatactaaaataattcacatttttttggccaaagttatttaaatttacttaaaatataaatttattcaaaattagttaaaattaccgatatcaatctctctataacttcaaaaaaaatcacctacctctttatacataaatatggatgatataaattttattttttaaaaaaataaaataaaattgctacacttaaatgtgttcaattcaaattaagatgcaaagatttttttcaattacttaatgtttagttttttttttttaggaaaagacactactacaaaaatgggttttcccgacgcttttaaacagtcgtttaaagtattgtc

SEQ ID NO: 396327 - DNA, 862 bp, Cannabis indica
aaccttttctgttggtaataacctaattaataccggacggtttggctctgccagtattaatttcgccgatattgaattattttcttgtagtgaattaaatattatatattacatattatttattgatttttacacttacaattaaatataatacattataaaaataataaaaaaaatatagttaagcactaaaactaatacaactcttagctatatatttagctaaatactattcataaggtaaatttttgagctatttcattagctcatctattaaatgtgttttttttttaaaaaaattagctcttagctattttttaacctttgtagctactttacattaaatatgatatatagtgcatgattacatattaatttgtaaaaatagcgtttatgaaaatttttattagcaaaataatctcttacggtagcaaaaacaatcatgaattatactgtgcgaccataaacgactattatggtcaccaaacgactatttatttacactgtgcggctctcatgattgcatagagtaaattaagtgagattattttgctaattttaatatttaaaatgattagtttagcaaatttctcattagtaaacacaaattaatttcactattgttggtgatacattgaaattaactacaaatttttgtttggactaaatattttaacctaaattgtaactaaaaaaatgattaaatgtgaatatttaacataaattattggtttaacgattcttttgtattaatttttcgttaaagtttaacagttaattaaataaattaatactaaatcagttattaattattattttttgaaaaaaaaattaaatatctaaatttaatttatttattaaa

SEQ ID NO: 396328 - DNA, 1271 bp, Cannabis indica
tcgtttgggttattaggctgacgaggctagttgtatcccggccctgtcttctcacatactgcttaaaatgccctcaagcgatgagactctctatctcctctttcaactggcgacatttgtccaatatctttgtgaaatttacagtatttattaggatctcttttgctcctcgaattcctcataggctagggtttaccaaaggctaccttctgctcatgtgtaaggtaaatattttcctgagtttcattaagcttggtataaatagtatacactagcacacatttttcatgcttcttttgtttctttctatccttcaacagttccctaattccgtcttttcttttcagaccagaaacccccgagttatcaattctcgtggaaacagctcctgttgaaacattgctgggtttgcctcccgagcttgttttcaacaagttcatttcctttcaggcttctttcttctaaataaacacttgaactctctcgtcgaactcagtaatgctccttatcgggcgtccttgtagatcatcccacaactcgcctccagcagttaacagatccgtggagatccctgcctgaagggctgtaagttgcgtgctgtcatccaagtttctaaacctagtggcaccgtgctaaaatgacttaagtacgccttaattgtttcgtcaggttgttgcttaatattggttagcgaggctactttggtcgcctatccctaacggcttgaaattgcttcttgaaatccctagacaactattcccatgaaattattgaatgacgagtgaacttgttaaaccaactacttgctgctccaacaagcgaggtagggaatataagacagcataaatttttcgtcacgttactcgctcgcattatcgtgttaaagttattcaaatgcgagactagatctgtggttccgttataggacgagacattgggtttttgaatccgaaggaaaaggggtattcataatatctgggtgacacggctccagctcctcgtcagagtcgtatccagatgatttccctatttcccctacttgatatctcctgaacttgtcctccagctcgtttatctgcaattggattggatcctcttgctttggaccaagttgttagcgaaggtcaggtttcttttgatttaagtgctcttacagatctgcttgggagtaatagctggcagatctcgtcttactcattgaccgtatcctacttatagactttatttttaagtggctcacggatttacttgttcccatactctcccgatca

SEQ ID NO: 396329 - DNA, 539 bp, Cannabis indica
ggcagaggctgattttgatttttcggaaatttggttggtgagagagaaaaagaaggtagagagactcatgggttaaaactatagagaagatatttctggaaaaaagttaataatattgttaggtggtaatttcattccgattaagataattttgttatgaaatatcatttagtatagaaactcaattccttttccatttgtgattcttttagtaattcctaacttaatgtaggcacagactttgatgagattagctaataagattcgagaccagtataacatagctaggaccacagcagtgcaagcttcatcttcattttcaataggcaccatttattcattattgtggaggagataaaagatattattgtgtttgtatttaaaattttacaaacatggataagagaaaaggaatgagagaccctgagaaagcaacaatggttagagacaaagaggggagtgaataaatatattctttcattgatatattaaattattatttatatttaaaatattattaaagactaaataaaaaataa

SEQ ID NO: 396330 - DNA, 864 bp, Cannabis indica
tcaagggaagagtgatcctcaaggatacctcgagtgggagaagaagatggaattggtttttattgtcacaactattctgaaacgaaaaggtaaaacttcctgccattgaatttactgactatgctattgtttggtgggatcagttgtgcatcaataggaggaggaatggagaatgagatattgactcttgggaggctatgaagaggctaatgagacgacgttttgtacaatctcactattatcgagacttgtacctcaagttgtaaggttttcgtcaacgctacaagagtgctgatgagtattacaaggagatggagatggctataattagagcacatgtggaagagaatcgggaggcaacaatggcaaggtttttgaagggattgaatcgagagattgctaatatcgttgaactacacaattatgtggaattggaagatccggtgcacatggcaatcaaagttgaaagacaactcaagaagggtagttcgagctcaaagccaaggccaagtctacacagaccaaatacaaaaccttggaggtcaatcttcccaaagaaagaggataaacctagttcatcctctttcatttcgctctagtgagataaagtgtttcaaatgttaagggcgaggacacatagctagccaatgtccaaataagagagttatggtgattcaggaaaatggtgaagtagattctgaagatgaaaaagagcttgctgatatgccaccattggaagatgcttcaattaaagatgaagagtatgggccagaatacagtgacatgcttgcactagtcaccagacgagcattaaactcgcaagcaaaagaagaggaagaagaggtacagcgtgagaacattttt

SEQ ID NO: 396331 - DNA, 1165 bp, Cannabis indica
cagtataatattgtttcttcagggcataatatagggccaattatcccaaccaggggcttgagacaaggagaccctatttctccttatctgtttcttgtgtgcgctgaaagcttctcagctatcatcagaaggtttgaggaaaaaagatggattcatggaattaaagttgctaacggtgctcctatggtgtctcatatgctgtttgctgacgatagccttctcttttgtaagtccacgaatggggaagtaactcgtgtgcttcaactgcttcaactatttgcaatggctactggtcagagagtcaattttgacaagtcctcagtttttttcagcacaaacacatcctcgtcaactagacaagtaatctgtcataggatgggaatccaggaagcggctgagcacagcaagtatttgggcttaccaagtacggtgggaagaaataaaaatgttgtctttggttacctaaaggacaaagttcagaagaggattcatacatgggataacaagtttctgtctagagcgggcaaggaggtgcttattaagtcagtggttcaagctctcccggcttacaccatgaatgtttttctaatacctgttggtatttgtaatgacatcgagcggtctataagtcaattttggtggagaacctcttcaaacaaaggtattcattggatgagatatgacaagctctcgactcataaagttaatggtggattgggttttcgtgattttcgagactttaatctagctttacttgccaaacaagggtggcgtcttctaacgggaggtaatagcctaatgaaacaaatttttaaagcaagatactttccttcgggttcttatctcacggctacacttgggtcaaacccaagctacatttggcgaagtgtcttagaagcacaaggtctagttcgggcgggtgttcgaaagctagttggtgatggctccacaactagtgtgctcttagatccttggttggttgacgatatgaatccctttgtggagtctagacatcctgcacttgctggtgctcttgtgaagtcccttatgaagattgatgaaaacgaatgggatgaagaggtaatcatggatgttctgaccgagagagaccaagaattaatttggaaaattcctccctctaatggcaacagcagtgactcatggt

SEQ ID NO: 396332 - DNA, 898 bp, Cannabis indica
aaaaaaaaaatacgtcaacacaatttttttctatttttgtgctttgaatttttttattaatagaaataccccttcagtaaaaaataataaaccattctcttggttgttttatagtttatttatagttgtcatgaggtaggttttagttgttttatagtttattcatagttaccgtaatgttaatttttcgttgatttcttactttttgttgaaaaaagtatatttttataattttaaaactttacaagtgtatatttataagtaaaaaacctaaaattgtaaattaaatataaaaaaaatatttttaaaaacattttcttatataatttataaatttatttatgtgaaattaataattgtatttcaatgttacatttacttaaaaataagattataatatactattaaagattatttattgttattattgctatatttgtacctctatttagttataaaaggggtggacaacatccaatccattccaatcaaattcgatcgaaccgattcaatccaatctaattaaaaaaaaaaaatggatatccaattacaatgggattgtattatatgctaaaagttagattctaattggattggatcagttgttggatgtaaatctcaaaattcaattaaagacccatccaatctaagtatatgggaaacttataaaaatactggaatttgtgttaactcttacaaaaatactgtcacacggaaatctttttaaaaatattgtgtttttattaaaacaccagtaaaacacaaagcagaacaactcaaaacaacattagaatatctaaaaaaacactagtagaataccagtgaaaacttaacacagtatactgcagtgtgaaacttataaaaaaatatagtaaaaaagtaaaaaataccgcctcgc

SEQ ID NO: 396333 - DNA, 753 bp, Cannabis indica
attatgttaattctatcatcactcgagagaggttaatagattatattagaattcttgaaactacaaattatataataaattagataattggtgaatttagattcataatttgaaatagggaaatcaatgttttatgcctttactttctaattaaaattattatttgtctgtttactttttagttattttattatttcattcttaattattatttattttaaattttctaattaaagtataaaatcaaaaaatataataattagtgaatttaataatcaatccttgtgggttcgacttagaattaaaatttcggtataacaacactttacgcttgcagtaaaaaattgtgtatcaatgtgtaataaaaaaggaaaatggtggtttctcgtaaaaaacataatgtgttgcacgagaaaagaaaaatcaagccaatacttacatttcacaataaggaaaaaaaatgcatattttaagatttcctgatgcaaagcacaaagtggacaatcaagacccaaaatatgaaagaattttttttactctccacatacattctcaaaatcagagggttttgcaagaaaacaattgtatacagtcgaaaattgatcacagacgagtgttgatacttacaaaattgaggtcgagatggtgcggatggtgctatcaaatggcaaaggtagtactgtgcatggcaacatcgaaggaatagtatgaggaaatctggttttgtaacgccctgaataaataggcacgcta

SEQ ID NO: 396334 - DNA, 1407 bp, Cannabis indica
gaaaaaaaaatgtatgtataaaggaagacatcaaataacaaataacaaataacaaataacaacgacttggatgaactaaacttggttccagtagaaatgctaaatgagccaagtatatgtgaaaaggaagacatcgagatgatagatagctcgtccacatggacgactcctataatcaactatctagtagacggataacttccaactgacaaaaacaaggcacgaaaactcttgtattcagtgcttcactacacgatagtagagggcaagttgtacagaaagggatatttaatgcctctccttcggtgtgttcttcccgcagaagcaaacgagatcatcagagaaattcatgaaggcttttgtgggggatcttgcaggttggaaaagtctatcaaaaaagatcattagatagggatataactggccaaccatcaacaaggacactcatgaatttgtaaaaaagtgtgataagtgtcagaaattctcgcatatacctcgcataccacaaacggaactgagaatgataacctcgccttacccattttctatatggaggattgacctgattggggcacttcccacagggcaagaaggagccaagtatgcagtggtgacagtcgatttcttcactaaatggactgaggctgaacctctagtttccatcacctgtaagaaaatcctcgactttgttgtcaaaaacattgtctacaggtttggaattctaatgaagatagtatatgataacggaacttagtttaatggagacctattcacgagttctgcgagaggaacaatataattaagagcttctcgtcagtatcatggcctcaggcgatggacaagtggaagttgttaactagactttgaaggatactatcaagaagaagttagacgctaccaagggtagatgggtcgacgaactacctcaagtactttgggttcatagaacaactgagaagacaacaacgggacatactccattctcgctagcatttggctcggaggcaatgttacttgtggaagtaaatatctcgactcatagacgagagttttataatcaagaagaaaaccaagaactcttaaagttatccttggatctacttgatgaaaaatgtactgagtcgtagattactaatgcagcgtaccaacaccgagtaacgagatacttcaacaaaagagtgaagaaaaggctattcaatattggagacttggtgctatagtatttgcaaatacgagagacgcatatgcaggagtattcaacccaaactaggagggtccttatgttatcgaagcgatagtaggaaccggggttttcaaattggctcgctgataaagaactactagaacatggaacatttgcaaccctactacaggtaaattgatgctgtaactgttgggttttatgcc

SEQ ID NO: 396335 - DNA, 727 bp, Cannabis indica
tgcagtcttgaacaataactccaaataaagaaggcatatcaagctgacaatgcaaagcttggacagccgtgagacaatcagtctcaatggtgatacactccgacaaattagacgcctttatccagcttaaggcctctttgatgcttatcatttcagaaaagggtgcacttaaaaggccattcgaataggaggaagaggcaaaaatgacagctccattcgagtctcgaacaatgaaacttgtcctgtaggaattgtcagctttgaatgttgcaccatcgacattaatcttgatcattccttctagtggttttgtccaataatcattgctgctactattatttgagcttaggtgcagcggctcaaagcgacaactttgagcaaatttccattgaccaagaacttgatgtgccatagaaacaacttcagcaaccgtacttgttttattgttccaaacaatgttgttgcaggctttccaaatagaccaacggatcattaaaacttcttcaatagcatcacctttgtgccgattccacactgcagaaaatcagtcaagaaaactggtagcagtcgaagggggaattgtcaccgctgatatgttccaacaagactttgagaatggacaatcggggaacaaatgaagggtagttgttaggttatttttagtattaattttagattaaatttagtatatttttaatttagttttaatcgtgtttggagcattttt

SEQ ID NO: 396336 - DNA, 713 bp, Cannabis indica
attttaacaacaagatgacatcataccactgtcagactaccatcgggcctgacaaaaaaatcagttttttgcccaaaactcaaatctagcaattttcaatcctaaatctaacatctactcatagattacaaacattaatcatacactttattcttttgacaacattgccgatggtgaagctgtagttgatggagaagtcgttgggtccgcggtcatggtggtcgtggagagaagggtccaaggtggtgggttgtgggtcgattatgtactcctccgtgtgcgtgtttacagagagcgagagagagaagggggaaagagagagggagagggctcttcaaatgagagaggcagaatgaagttttaaaaaaatgacatattctactaatattgaatagtttagatttagaaaaagaaaattggtccaataaatacataattagtcaatttttcctatatatatatgactctttggattatcatctttcaactaatgtttactgaattttactctcttaaccatcatactcgagcaagaaagcaaaaaaaatcagcagtatacatgagaagacatggattggataaatggtggccacagaaaaaaagagataagaattctactatttattattactgtgaattagggccggcaaaacaggtcagacacgattagggctgtacatcggtcggtttgggcagtttatcctatatatttt

SEQ ID NO: 396337 - DNA, 369 bp, Cannabis indica
tgttgcagagtattatcaagataggaatccgaatgcccttctcttggatttggatccttcacgatcttccaactatgattgaggtaccacttcctgtgtgtgagcactactcttttcactagggtatctcgaaattggaagaggaagagaagagatatagggttcggctatagggagaaaaggaaaggctcaattttctgaaagaggcagtttcatgaataactgaacaattggttaactgcttcttttggtgtgagccatcactttctatttatagacaactgctaggtttaggttagtaattaattggcattaaaataatgaaaataataattggaaaatgcttgcacaagtggccggccatggtgt

SEQ ID NO: 396338 - DNA, 555 bp, Cannabis indica
cacttaaatgcaacaacaaatcccagataaggaatccgccattggagaccaaactttgaaattccaaaactcaaaacttggttcaagccacaacagtttctactagcctctcaaatcgaccttaaaaaaaatcataaaatcaagtttaaaacagtttctaacaacatcaaactcgaacagaaacaatacctcaaaatcacacataacaaccaacttttcttcaaaattccaaagagaaaaggacttacggtgtgttagatatattttacaaggacctagatttactaacaagtattttcttaatatccaaaatatgaatttctaaaatgatgaaaattaaacacatataaagtatgagaaaccttacattggttgcagcggaattaaatgactccttccgctcggatctctaacccttgttcctttgtgtcgcagagtataatcaagatctgagcctgacactccttcagttgtttggattcttcacaatcttacacactatgattgaggactaacttgctatgggtgggcatgcactcaatcattaaggctcaa

SEQ ID NO: 396339 - DNA, 550 bp, Cannabis indica
ttcccgctaacattgagcgggtctgtggaagaattgttcaagaaactggagccaggatccgtggattgctggaataagctacaaaccagcttccggagacagtttgtcgccgcgaggaaagttaatctggaggtcagcgccttgactaacatcaagcagctgcctacggaaacattgaagaatttcataaagaggttcaaggaagaagcctcaaagaccaagaaagttgatgacggacaacagcttgcccttcttcaagcagggatccgtacagggactccgttctggaacgagttacagcaagaaggagcctccaaccttcaagatttccagaaaagagtccaaaagtacatcaacctagaagaggctcaaatagtggcctatgggggatactaccctaccgggatagcgggatatgtactcggagctgagctcccaggaactttaccagcagctgctcgaccgatgagcggcatacaattttctgctaccccaggatatagtcagggccaggccttagcccctgcatcttctcactttgggaatcctt

SEQ ID NO: 396340 - DNA, 876 bp, Cannabis indica
tcaaatttgttaaatcaacggttccatcaataaacaaaaataaaaataaaaaataaaaataataaatcgaacaaaattgtgatgactagtttaagttgagggagcatacttttcttacttattttttttttttttttaagaaatggaggagaggtagtttgttttctatagtgatttgaatccttcaccattatcttagagcagtgctattaagtactaatactagtactgtttagtaccatttaaaggtgctatattacaattagttaataatattctataaataaattgaaaaaattacataatattattgatgcggcgtcaagtggtctaagaagatcgtaaaaatatagaggactgcaatgaattaattttgactaataaaactgcaataaataaattggacactagagatttatagtagttcacctcccatatcgtgacggtaatggagctacgtctacttttatttttattgattagatccgacacaccagagttatattctcaagagtgtgtggataaaaatacaacaaagaatttctaagtaaaatcttaatcgagacttatgaatatagaactcatgggagactcaacattcataaatcttatcaaagttggtggttgtaaggttcttgggaacaataaaccaataaagtagaaaattaaaggggtgtgtatcaatattgtttgaggtcttggtgtcgactgagtatgattgactcaatgaaaaagatgaaggaatatgtatgatgttcttggctacagtcaagtaggtccgaaagagaaggttcagcccgaagaaccctacttcaacctcttactctcattatataggctgtagggtttgtagtgatcctccacatgtcggggtgt

SEQ ID NO: 396341 - DNA, 942 bp, Cannabis indica
tttactttatgtttagatgcatacaggttgttcattttattttttaattaagatgaactaggttgctaaataaaatgtcacaccatcatagattttatttagaaccatttagtttttgagcctattcaattaataacagttgttcgttttaaggttaaattcctctcttttgggccttgtgtgagaattagggggcccatagcagtgggtacgacatactggacccagccgcttactctaagcaggtccgcggaggagtggttcaagaaattggagccaggatccgtgggctgctggaacaagttacagacagacttccagagacagtttgtcgccgcaagaaaggccaatctagaggtcagcgccttgactaacatcaagcagctacctacggagaccctaaagaactacataaagaggttctgggaggaagcctcgaaaaccaagaaaattgatgacggacaacagcttgcccttctccaggcaggcatccgtacacggactccattctggaacgaactacaataggaaggagcgacaaaccttcaggatttccagaagagagtccaaaaatacgttaacattgaagaggcccaaatagtggcctacggaagatattatcccaccgggatagcgggatatgtgcccagagcccagccctcgggcactgtgccagcagcagctccaccgatgagcggcatacagttctctgctactcccggatatagccagggccaggccttggcccccgcatcgtcccatttttgaaatccctcggggatcaatggacaagccccctcgcacttcgttccaactgccagcccagccggtccctcccagggctgaaggagtaaaatgtcctccaaaggcagcacccggacggaggaaaagcgacaaaaaagggggtacaatccccaatatactcagtacacggagttaacg

SEQ ID NO: 396342 - DNA, 1104 bp, Cannabis indica
acataccacttgtgcatgtccacgcaggttatatggtttcaattttacttggaagtaaggattgtctgagaagaactttatggctgcttcagaagctatgccaagtccagaagatgaaggcctcttattattattagtgccttgatttccagtaatttcttcagatactggttttgtaaacttttctgcattaaatataaacaaaatttagataagccacttttcttaggaatgtttttgacaatattcttatattataatagacattatacctgaaggttcaattacttttttatttgcaattatgtcatgtggaatcataatggctttatcataattattgctagtagatgaaggttcaattttcacacaaggagttgaacttgtcttatttgcagctgaaaacaacaattgtataagttaactcagcagccatataagcattcaataatattggctaggagcatttatataattttcacctagattgttctaatgatcaagacagtatattattatcaaacagagttcttgttacctggtatttgttgtataggggaattcgctagtccattgtcataaaaaataaccacttcgaataatattactccactgctctttctcaaaacgaagacacaaacatcaccaactttcaagtcattgtcttgaacaaatgccttccaaccactctcgattgttgcttttgaagatactcctagcggtctgacatggtactttacacaccaagtccccccatcttgaaccttaaggatcacatcttgaggactactactgatcaggtacgtttttgcaaagaaagatggcacaccctacacataagatgaacacgagtaaaatcaatatgagaaacatgtttgaaaaaataaacttgtaagtaagaagcgtattaactaccatccgatacttggatttagatccaacaaatgatggttgcatggcaacaatgaaaaaggggtcttcagatttaaaatcttttgctctctggaaagcttcagccttttcctttctactcaacttctgatttcttataaattttcaggtacaggagattctccacatgctttatctgaaggttcaattact

SEQ ID NO: 396343 - DNA, 982 bp, Cannabis indica
tccaggagcaactgttcatggccattatggagaaaaactttccgaaggagatacattagttacatttatatatgaaaaatcgagatctggtgatataacgcagggtcttccaaaagtggaacaagtgttagaagttcgttcgattgattcaatatcaatgaacctagaaaagagagttgagggttggaacgaccttctaacaagaattcttggaattccttgggggttcttgattggtgctgagctaactatagtgcaaagtcgtatctctttggttaataagatccaaaaggtttatcgatcccagggtgtgcagatccataatagacatatagaaattattgtccgtcaaataacatcaaaagtggtggtttcagaagatggaatgtctaatgtttttttacccggagaacttattggattgttgcgagcggaacgaacggggcgtgctttggaagaagcaatttgttaccgagctatattattgggaataacgaaagcatctctaaatactcaaagtttcatatccgaagcgagttttcaagaaactgctcgcgttttagcaaaagccgcgttacgcggtcgtatcgattggttgaaaggtctgaaagaaaatgttgttctaggggggatgatacccgttggtaccggattcaaaggattagtgcactgttcaaggaagcataataacattcctttggaacccaaaaataagaatttatttgagtgggaaatgagagatattttattccaccacagagaattattttctttttgtatttcaaagaatgtacaggatacatcagaacaatcatttataggatttaatgattcctaacagcagactcatcctttttgtctatttgtggttgcagtcatttgatttggtaatagtaataaggagaataataaaataaagaaaataatgaatagaaagattgaaaaaaaaaaatgaacggcttggatcgcgtatcaacggcca

SEQ ID NO: 396344 - DNA, 1043 bp, Cannabis indica
tatagagaaaaattgagcacaaagtttgtattttttcgtgtagaatatagagaaaattacttgaaaatacgtattttttaaattatttatggaaatgtgctttactttattaatatgaaagaataccgagtattttataatcattcttatgttacgtttacctaaataaaaattttatcattttttttttgtatgaagtgacacaactgataacacgtcagtttttttttcctgattgagaaattttttgtcaggttgtttttcactagcttttatcatactatttgtttttgtttttattattcttttaatatttttaagagattttgttattgttatgttaatgtgatgtaggttttatttaattatttatgagattttcttattgttattgttattttttttcacttttataactctaaagtgaatatttttgtatttgagaagtaatataaaataggtaatcaattaatttctaatatattttgtaggttttggtaatccaaataaagaatcaagttgtctaaattcagttccaagtttgttggagaagttagttatttctgttatgttcacagtcctcattgttcgggtagttaggttagttagttggtttgtttgtcatcttgtaagcctatatataaaggcatgtgagctcattaagagagttaaagaaaatcagagagagtaagcgctgtttggagagtgaagaaacagagtgaaaattctagagtaaggcattgtccaagtcgagtttcttggagtgtctaagtgagagaatcgggattttctcctgtgtaactttgaggctgtgtatcatacatgttatgattgtaactttgatcttgatatgaatgagatgaatacaaaaaggggtagcaggaagtaggcattgattttggccgaacctaaataaaacttctatccttaattttctgcatttagtttcaagttcttatgttgtttattgattctaattagtgttgttcatgttgaattgaagtgttgttgatttacaagagtggtatcagagctttggtttt

SEQ ID NO: 396345 - DNA, 544 bp, Cannabis indica
tatatatttacccaatcgctatttgcgcgtcactataagttaattaatgaaatggttcggttatctaaaaaaatgctaagttcaaataaaaaaaaataaaataaaaaaataatgaacgtgagccaccataattacaacttttatttttgtttaattttttaattctagcccttttttccctctctctatatttctctgacttaaaataaaaaccctgaacttcttctaacataatcccttctcatccccttctcagccgccagggaagagacctctttctccctctttgtttcgcacgtcggagccaccatctctagtgaccatcacccctaacggattacggatccattactctccattccgagaaccccaaatcccccacaccccgaccctctttctcgctcgtctctctctctctcgtttttgcttggttcgacgtacgggctacctccacagtcttgaacccggacagagacatgttaggttttatgccctaaataaaacttcatttcaatgtaatctattttattcaacatcaataaag

SEQ ID NO: 396346 - DNA, 1265 bp, Cannabis indica
ataccacaaagagaaagggtacctaataaaaaagatgtttttgtaattggtacgtgttttcttaaaccccccataagaaccagattctggcttttatttggggaatatccaacaatagtttccattgaatgaataatggatccagatcctaaaaacaacagcgctttagaataagcgtgagtaatcaaatgaaacaaagcagttcgataagaccccatacctagagccagcatcatataacccaattgagacattgtagaatacgctaaacctctcttaatatctttttgagcaagagctaaagtagcgccgaaaaataatgttattatacctatcaaagctattatattcattatgtaaggtataactatgaaaagcggaagtagccgagctacaagaaaaattccggctgcgaccatagtagctgcatgtataagagctgagataggggtgggtccttccatagcatcaggtaaccatacatgaagaggaaattgggcagatttagcaattgcaccagaaaataatagaaaggcacacaaagtaacaaataaaaaatttacttgattattagaaaccaagtcattgaatatttgaaacaaatcccgaaattctaaacttcccgttatccaataaaaacctaaaattcctaataataaaccaaaatcccccacgcgattagttataaacgctttttgacaagcattcgccgcagtaggtcgtgtgaaccaaaaacctattaataaatacgaacacattccaaccaattcccaaaaaaaataaatttgtatcatattcgaactagtaactaatcccaccattgaagtattgaaaaaactcatataagcaaaaaatctcaaatatccctgatcatgagacatataattgtcactataaataagaaccataattccaacagtcgtaattaagattaacataatagaagtaagcgggtcaaccaaatatccaacttctaacgaaaagtcattatttatagtccaagaccatatagatagataaatagaagggttatttatttgttgaatagatagatagattgaaaaaaccataactatacttaacaataaaacactaggaaaaacccacatacggcgcaaattttttgttgccgttggaaatagtaggagtcctactccgattaatatcggaactggaagtggaataaaaggtataatccatgaatactgatatgtagattccataaaaataaataaattttttttatcttaattaaattaattttt

SEQ ID NO: 396347 - DNA, 1028 bp, Cannabis indica
tttttacagagctaagaataaagctatggctaaggtacaaggaactgtgagagatcagtatgcaatccttgatgattattgtacacaactagtgagacttaatcctggaagtacagctttgatcaaatccaatttagtggatgacaaaagggtttttgaaagggtttacatctgccttgcagcttgtaaagctggcttcaaattttgcagaccaattattgggctagatgggtgcttcttgaaaggctattgcagaggtatgctgcttgtagcaattggaattgatgcaaacaacaacatgtttcctattgcttttgctgtaactgaaaaagaaaacactgacagttggacatggtttgctgaactactgaaagaggacttacatatggaggacactgcagaactcacttttaagatagacaaaaggggttggaaaaggctgtggggacagtgtatgaaggatctgaggttcgattttgtgttaggcatctttatgccaacttcaagaaggagtttccaggatttttgttgaaacaacaactatgggcttttgctagggcaactactgtggaggaattcaagagaaagttggatgtgttaaaatggactaatgaaaaagcatttgattggctatccaaaaaatcaccaacagaatggaccaaatcccactttaggacttctgttcagtgtgatatgttgttgaagaatttgtgtgagagtttcaattcagcaatcttagatggtagagacaagtcaatcatcacattattagagtatgttcgatattggttgatggatagaatccaaaagcaaagagaaagtgtgactaagtggaacaatccagtgggttaaaggatctttgatatcctagagaagaacaagaaattggcactgaaatgccaatgctccaagtctgttggtggattattctaggtgacagccccttctggtgaggtggtaacaactaatttagagaagaacacatgctcttgctgtgacagttagtagtccctgttgggttttatgcc

SEQ ID NO: 396348 - DNA, 697 bp, Cannabis indica
tgaacttttgacattactgatcttgctctttaaatatacagcttgttaaaaaatcttcctcaacttttacatttattgaaatttagttcttttgttaagttttgtcatattattccgtttaaatgcttacatgtatttgtaaattggtagctttgttaagtaaaataagaaagattcaacatttctccttttttaagtaaaattttggcaactattaaattgtacccctttcaaataaaataagaaatattcaatatttctccttttttaagtaaatcttaaaaatttagtttagactttttttaaaaaaagaaaatcattagaatgattaagaaaattaaaaaaaaaaaaaagaaatcaaaatttaaaacaaattaagtgatttaaaaaattacggacgaagggcacaacaagtgcttgaataacggacgaagcttgaaggaactaaagcattgacgccatgaccaacaacttgctctcgatgtgcgctagcttgactcacaaaataatgggattggatccggtagataccattagctctgataccaaaataaaaaataaaagaaaaataaaaggctacaaacatagctgaatatactatatgtgtacaataccttaggggtgttcatcaaaccgcccaaaccgctcaaaccgcccgcaccgcaccacaccgcaaaaaaatgtggtttgaaattct

SEQ ID NO: 396349 - DNA, 866 bp, Cannabis indica
cataactgtagattcaatgtatttataatcattaaattttaaatagaccatgtatatattgagttttttttttttttttcataaaataaaataaatttcttctgtgaaataaaaatgggttttgaagaattattttagctcaaatgaattatgttggcctaatatattactaaacaatttattagcattttcaaatatgagcggtcatataaaaagtttcaatttatataatagaattatatattaaataaaaaaatattaaagattatgtatatgcagtgacggacccagaaattttactttgtgggggttatttattattaaaaaatatttatacatatattataattactcttactaaatttatttaattttgtgggggcatttttattattttagtctataattatcaaattaaaaataattaaatttaatttttaaaagataatatttttactagtggtggctatagcccccacaataacttaactgggttcgtccctgtgtatatgtttatgtctattctatataaagtgtgcctatataacagaatttttggtttatgagaaattcatgggtgactttttatttatattaaaaataaaatggtttattattaaaaataaaatagtttatgagaaattcatgggtcactttttatttatatataataaaataaatctcattaaatccaaaaaaatactattgagtttttgtgttgtacatctacgattgtgttttctttaattatttattgtattcattttcctattacaattttgacattcccatgggatcacttctaatccgcacttctatagaaagacagtagagaactagagataataatagaaatttttcatttt

SEQ ID NO: 396350 - DNA, 1400 bp, Cannabis indica
cacaaaaaggttaatcttctcactacatcgaatatttttacaattttaattaattgggtgacttattaagtgacctgttttcctatcataatttttacttttcccattgtatctcctccttcaaatcataattttaaatgcttttatttttatttttaataagcaaaatattattttattaaaataacgtacttcgagttgttttaattatatatgtcacatcatatttcttttagtaatgagatattactaattggatttatttccattatacacattgtttaaatataaaatggttaaattaaaaaaaataataattattacgtgtacatcaacccacccaaccactatataagtaaaggtttagattttacaacaagccatttattgaaaccccgtattagtattacctactaaacatggacccttacccaaaattcaaccctttcgaatcaagtcctgaaaagtccccacctcatcatttttcttcaacacgagctgtaggtacaccttcaagcagtcctagactccgtttagcttcaatttccggatgtgtgaactgtgctaggctggagggtgttgtgtaagagcacgaaaaactcatcaggaaggaacatgttagagccacagaggctaagcaggagtcattaaaactggcggagcacctctaccattccgcccatgcattgcaacatgccaacacttcaagagaaaaattgaaaaatatcatggacgacattctcgactacaccgaggtctccataccccattacccaatctatccaaaagaagaaccatcaaacaatccaaggggaagtccttcgcgacccaagtccctgtactgagacgttagccctccaactcaacggaagttccctcaagttatacaactttattgaacatccattgagtttcatttagtggtattatatatattgtacttattttaaaactcatctcatatggctgttggacaactttttgttatgccatttaataagattcaagaactttgctctatcgtgttactattacgtcaatgtaaatgttagtatagtagtataatataagaagtctattttcattttgaatttagtagtcatgtctaaattatttacttaagttttaatcccaaaattaatgaaaaaggaaagtcaccttagtacttcaaaataaaccaaattcaagattttaccacaaacacgtacaatacataaaagcttaaacaaatacataaaatggaaaccaacagagtacatcagttactatttttgggagaaggatgcattcctcttttgtctcccccttgaatatcatctccatttggctccttgcctttcttactcaaattgttgaccttgattgatttttttaacaccagagctctcaccctcatcaaa

SEQ ID NO: 396351 - DNA, 529 bp, Cannabis indica
actcagtggtactcaaggtacagttcagccgtaacaatgctagtacagtagcagtatgtagtgcttgtggtacaaaggttgtaccttcattaagaatgttctgaatcatttgttaagccttgtggacaggtgtatgggcacctacatacaagtcagtgatatattatatgtaatatgattttcttactaagttgtcgattcaaaaatattgtttgcatgtgtaggtaaaggaaaggctaaggctgagcagtagtgagtccaaagctcgaggatgattgtatatgtcaagatggtactgttgggttttgtgccctaaataaaacccatttcaatttaatcagatttactaattaataaagatcagaaatcgcattccatgttgcatggttcacatgatttattttatgattgtatttaatgtataaattctattaagtccagaacatatgtatttgttcatgattatagtgttgtcagcacattggaatataatcatgattatatgttcaaaagtttaattccctgattt

SEQ ID NO: 396352 - DNA, 858 bp, Cannabis indica
aaaaatcttcaaaaacaatacatctcaatattatttaaagagtaatttgtgtcataaatatttaatttaatttttaattacaaataactacctttatttttttttgccgtaataatacctaagttatatttttagaactccgtaagtactggccaataaatgtcaagtgattatcacatgtcattttttattggtatatataaactaatttttttaaaaaataaaaatttaatgacttagaccaatcagtaattgtcacgtgataatttacttagagcatcttcaatagtaacattctttaaaggtgttatatatctctacatcatccaaaaatataatatttcattttatatatttgagaaatttgatatattatgctaagaaatgataaaaggtgtttaattataccaaaaatttacacatagtaaaagggtgccaattttcaatttccttccaaaattacccccatcctttcactttccctccattctctctaacagccctctccctctcctccttcactctccattcgaacatcaccgtcgaaccaaagaaaaaccattcgaaccagcacccacctccccctccgttggaaccaaaaccctcccccgccgcatacatttgaaccacgacccacccacgaacccacccaccccctcgatttaaccagacgccctaagaaccacccaccccttcgtttcgaagcagacgacccacgaacccacccgacccctccgtcgaacccacccaccccactcgcaccgtcgaaccaggaccgtggaacccacccaccgcactcgcaccaatctcggagcaccgtccccgccactgccaccgtcccaatcgagtaaaagaggt

SEQ ID NO: 396353 - DNA, 513 bp, Cannabis indica
atatgttgtgtatggtgttaatagcaggttgttacgaaaaatattaaacaatacgtaagtacacgcaatcaagtagtaaactcacgcaagtgaggtcgaaccacaaggtattggattaattactactaaattatacttatgattctatttggcaaatcaatactttttacgatttaaaagaataaaagtaattcaagaacttaaataacactagtgaatattaatcaagatcagacaatagggaggagaatcctcttgtttgtttacccaattgttaatgcctaattgctatccttttcttgaagtgaatgacaaattataaaatcaacataactcttttcagatcttttaggttctaaatcacatgttctgtaattaatctcttaattaaactaacatgaaatcagcattaagtgataatctaattgtcacataagtcatgtgaataccctcgtttcacaaagaacctcgattatctaattttagcattctcaattctcactttttcagatt

SEQ ID NO: 396354 - DNA, 511 bp, Cannabis indica
ccacccgacacagaatcaccacagcaaatacgagaatacctgaaaacaaccattaattccggcaagatggaacaaaatagagaaatcgacatcaaataaataatcacagcaaaacacctgtaaaacaacattaaaacaaattaaaaaaaacaaaaagaaaaaaggattaaaaaaaattatcttctacgcatcctcaacaccagatgctatagtgactatatttgcaaggccaatcttggaaaattagaataaaaaaaccactaaaacaaaactaaagcaacacaaaaacaaatgtaaaacaatgaagtagatataaccacttaaaaaaacataaaagaactacacccctcaaaactcttttgccaatgagctcgtcaaatgtatttataggaaaatcagaataaaaaacataaaaacaaccgtagaaaaagaagaagaaaggtatttgttgacttcgcttttagccaacgacaatgagtcttttttattaagcgataaacgatatgtagta

SEQ ID NO: 396355 - DNA, 551 bp, Cannabis indica
aagtgatgatgaagatggagcagtacttggcaagaggcccattcaatttgatccacaatttaggcctgaagaaattgtgttcaaagtgggaatggaattccctactgttgagcacctaagagaggctttgaaggagtatttcatccagcaagacagagagtataagtacatccacaatgacaagttgagaattagagtgaattgtaaaggagaaggatgtaagtggttaatgtatgctcgacgtatgagagatgatacttctacatttagaattaacaagtatgaagatgaacacaactgtggaattatatgggagaacaggctgctagattctgattggattgcaaaggaattcttagagaagttcagattgaatccgagcatgtcatttggtgatttcaagaaggcaaattcagataataagtattccaaagtctccccttggactttttacagagctaagaataaagctatggctaaggtacaaggcactgtgagagatcagtatgcaatccttgatgattattgtacacaactagtgagacttaatc

SEQ ID NO: 396356 - DNA, 627 bp, Cannabis indica
taagttcacttccttctccttttcttttacaaaaatttgatacaaatcacaaaggtgtttcggcgtacgacatgtacgagaccaatgcccttttgtaccacatctataacatgaatcttcaggattttgaggatagttaccatgaacattctcattcgcatgttgtctcttcctttggttctttctgaggaattatgaccatttcgtccacgtccttggttacgaccacgagctcttccttggcttctgccacaaccacgacctcgtccataattattatagtttgtggcatttacttctggaagtgccattgaaccagtaggtcgtgattgatgattcttcattaatagttcattatttttctctgctacaaggagacatgtaataagttcagaatatttattaaaattacgcatcctatattgttgtcgcaatgttaaatttgatgaatggaatgtagaatacgttttatccaacatttcctcttctgtgattttctgcccagagaattttagttgagaaacgattctgaacattgctgaattataatcattgacctttctaaagtcttggaaacgtagaccgttccattcatcacgtgtgcctggaagaacaacatccttttga

SEQ ID NO: 396357 - DNA, 972 bp, Cannabis indica
tttaatggttgggtcaaagtcgcatgtgggtgtggggtttggagttgggtcggaggggttgaggtcagactggggttgcttcgatgggggtttcgggtggtggtgggatgtgggtgtggtgctttcgtggtcggcaaagaggaagagagaggcttgagtttagggatttcaaatgtggggtatttttgggaaattaacaatgtggtcatatatgaccaattttaataactatgcatttagggaaataattttaagatattgtaagtatgaaaattcaaatttcttttatatattagatgttagattttaccatccgatctgttccaattaattttagtgatccaatcgatctaacttccattagatgttagattggatcggctctatccgtttgatgtatttcatatatatatatttattgatttaattagggtttatttaatattttagacttagtatttcttggattagatcggatccatctaatattttaagtacagtatgtattgccaagaaaaaaagagtaaaatttaatgttaatttttatatatacatatatattttacgtataagaatataaaatctaatatttacttatccaaactaaatgaaaatattaattaattcgattggatgtttatatattgaatttttggtcaccccatccaatattcaatccgatccaattggatattcaaaaataacatccaatcaaatccgattataattaaatatctaatatttggcaatcggttataattagatgagttgtgttattggattgaataatttatacacaccctatatagaagagacatttacatatatatcttatggataaataatgttgcaaaagaagaaagggaaaattgatgggagaaggatatgtgctcttttaaaaatgatagggaaatttgattttctatacttaaaaaaccctaaaattatttttctaaacctaaatgttatacc

SEQ ID NO: 396358 - DNA, 890 bp, Cannabis indica
ggaggatattctcataaacacagaatcggttggcatcccataattatcgcaaggctggtttgtgttcacaccaggagaaaaagttgcagtcgcaaccttgcctgaccgtaggaatggtgaaggagcaaagttctggtgtcgacggggaagagctttcattcctattccataaggtttcacgatcaggtggggaggtgtatcaaacgtacgtgggcagagctctcggagtgtcccattaagccgcagataaaacagaaagttggtacactttcataacgaaaagtagcatagaacgagtcaccgtctcgcttgcgaaacttcattcttcgtttcagagggagatcaagggaaagtgttacccgaacccgaagatattctcgccatactccagtaaagttgttcgggtctgattcgataaaagtccccgcatagttcgcagcatcttttgccaccttcatggtcatgaatccgttttgcagatcatggatttgtaaccatagatcaagagtgtttagattgacagtacgggggttgtcaccatcattgagacgagttataatcaattgtttgcgatcatatgtccatggactgccttcgataacccgcttgatgtctaactcatggtaaaattggaacaaaaaccgattttgatcaagttgcttggcatacattcccttaccaggtttccatagatcagccatcagattctgaaaaatacggaagtctgaaaccttccctgtaagcatacgcccaacaagacaccatctagagtcaatggccagatcatcttcttcatccctttcctcattttcttcataaaaagtctcctctgcttcttcctcttcaagttggatatttttccaaccttcctctatgttatccacattact

SEQ ID NO: 396359 - DNA, 576 bp, Cannabis indica
atttaccaacctttgatatgttgcacctgagtttatcaaaccgaaaggcattaccttataacaatacaaaccttgatctgtaatgaatgaggtatgttcttgatctggttcatacatcgggattcgattatatcccgagtatgcatccatgaagctgagaagctcatgacgtgcagtggcatcgacaagttggtcaatgctaggaactgggaagctgtctttgggacaagctttattcaaatcagtgaaatcaatgaatgtgcgccatgagccgttaggcttgggcacgagtacgggatttgttaaccagtttggtgttggaatttattttactaggatcttagatctactcacaagtatgttgtttaacaccctaaatatgaactttataaaacgataattaaacacatataaagttaagaaaaccttacattggtggcagcggaataatgtctccttccactcagatctctaacccttgtatcctttctgtcgaagagtattatcaagatctgagcccgaatgtccttctctttgtgtgtgattcttcacagtcttccaatctatgattgaggt

SEQ ID NO: 396360 - DNA, 1230 bp, Cannabis indica
aagagaaaaacgaatttgtcgatagcacctgaagatcggaaagagtagttacctcatattttccgatttccagttcatccagtaattcggtacaaaatctcgacaccattctttgctatttgatacccttttgaaggatgttatgccattcatagccacaaatctagcaaaaggaacagtcaagtgaccgagctccccaccctgacaaccaattagaccgtcacaaaaccttaattgtgacaaattagaagcaattaattcataaaatttttaaaacacatatagaaagttaatgtcataaatcaatgctaacctggtcagcaaaatcaaatatcaacttcttccccatattttttttgtaaaaatctctcttagttcaaataccagagtatccaaggctgtagcaccatgcctctcaaaaacatcctctataattgaaaaggctttctttcttatagccatttgttcttttgagaaatcccgagtaccctgaaatgtaacaaatatccaagtcagaaatgtcaattttatttatctgttaactaaatgtcctacaaccaagaacaccattaataatagtaaatgataatttctgacttactcaatctccttgaaagcttgagaagccttctagtttcatggctttccacaatctccttcactttgatcaacaagctatcaaactcaaaaccctgaacttgcataagcatctaacttactcaatcaacagccgtaaatttgggggttattctaaaccaaccatccccttcaacttagacccattcagcaataccttcatattgccatccccaaaatccatcaaatgatatatcgcggccccaatgtttccagcgcagtagcctccttttgggtcaaatctagcaagtcagtctctagcctttgcgagttcttcgtgttcaatgcttcatcaattcgtacttgtgcaaggccattggcaaatcaatggcatagacagctgatgaggacagagactatcccttgcccccaccctatcgtggtaacaaagacttcgactttctctgccattgtattttagggtttttggttagagaatagaaaaaaaccattatcctctacaggtattccattttgtggactcagccataacagatgagaagccataccattcgacttttgatctaatatagttacagttattacagttattacaacataatagctacataatctcaatgcgttacatacata

SEQ ID NO: 396361 - DNA, 541 bp, Cannabis indica
cagcaactgctgccaacacaccagccattgaaacttcaacaacaccagcaacagcaacaaatacaccaactgctgttactgatacaccagcagttgtgcctcgcagaactagccgaaccacaaagccacctgcttatctcaaggattttgaatgctactctatttcacaagacaaacacaccactcctcatcctattactaaatatatgtcataccataaattgacagaatcttacaaagcttttatccttgcagtgacatcacttaaggagccccaaacttaccaacaagctattcagttccaacattggttggatgccatggattcggagttaacagctttacgaaataacaaaacatggattgttgtgcctcttcccccaaataaacgagctataggatgtcgatgggtttataaaataaaactcaatagtgatggttctattgagagattcaaggctcgtttggttgctcaaggctacacacaacaagaaggccttgatttttttgatactttctctcccgtggccaaaatggtcac

SEQ ID NO: 396362 - DNA, 1268 bp, Cannabis indica
catgataaacataaaatataattagtgttgacatacacaagataaagtaaatatgaagctcaattcataaatacaatttatattgaaaatttcttaaagagaaaaatttattaaaaatataataaacataccaagattttgcatcaataataaaacacaaacacatacaaacatgataaacataaaatataattggtgttggcatacacaagataaagtaaatatgaagctcaattcataaatgctattcataatgaaaatttctttaagagaaaactttatcaaaattctcaaaatatcataatgaattgtctgcataaatatgaaatagggaataaaattccaaactaataattgaaactaaattgttcataaaataaaaacaattaattaaaaaattaaagaagatttcgagcctcatcttcacttggacaatctccacccttctgtccaacaacccgactcaaatcgctaggataacaatctaagtttaagcagctggagctaaaataagaagaaaataatcatggtattagatccagaattaataacccaatggaatattaattctctaaaacacatgagtttataacaaaaatagaaataccttgtttctttgccaaaaacttaggacatgggtttctagtggcccttttcgttgcaatagaagcactttccttttgttttgcgttaggattagcagcctttttcttattagctgtattaacaactttaagtggcttcttgctattcttccacttcatcttttggggtttcgaagaagaggcaatctttgtttcagccttagccgtatcattagcagtgccagaactaggagctttagttcctcctttctgtggtcctccaatcaaattttcaaatgtctcaaggttgttatttaactcgaggaagtaaaaagtcaacttgttcatgacataatttgatgtaaagggcagaaaagttagagtcaaactattcaagatcaaactcacttgagttgtctgatctataatagctccatgattctcagcctcctggaagtaactagtcatctggagcaggtgatcacacacgttccgatgaggttacatccgtgcattgataaaattcttggtcgcctcaaaacgagcttgatctggcgccaatcccaaacagttcagttaactggttcattatatctgcagccgtgagagtattggcaaaccttgttttcaaggtgtcgaccatgctagacagcataaagtatcgagctttgctgttagcattct

SEQ ID NO: 396363 - DNA, 695 bp, Cannabis indica
caggtaaagaaaatatttttttccgcaaatattttttgaactgaaaaacgttgtttttgcgttgccaactggttgagtaacagttgctaaatattcctatttaaattaaatgcaggcacgataattgacatagagaaacaagaggatgatagtttccaatatgcatttgttgcattaaatgctgctattaaaggttggccaaacttcaagccaatcatggttgttgttgacgggacattcctaaaggccgcgtatggaggcactttgctcagtgcaaacacacaagatgcagaatcgaaaatatttccacttgcatattgtattgttgattttgagaatgataaagcatgggagtggttcttcaaaaaaataaaagaagcatttggggttcgagaagatcaatacctaatatcagacagacatgaaagcatcatcaaagcaacaagaagagtgttcctagaaataacacatggctactgcatcttccacctcttgtcaaatctgaaaacaaaattcaaaataaatgcaaaacatttcagaggtccattctttccaaccgcaaaagcttacacagaaatggagtttgaatttcatatgagggagctagacaacttggataagcgcataagaccgtatctggaacaaattggccatgagaaatggtcaagatatcattcaaaaaataacaggtaaaa

SEQ ID NO: 396364 - DNA, 618 bp, Cannabis indica
tttttagttttttttttttctatcccattctctcaatctctctcattctctctcaatctctatctcaattcctttcaatccctctcatcacctctcaatccctctcaattttctctctatttcttcaaaaaaacagccaccgttgggcaccacaccatcgaccaccaccactaccaccaccgtcggccaccaccaccaccgtggaggacgacgaaccacctatgccagccaccaccgcagacaacctagccccaccttctctaatttatttgaggttatttttaattttttaatttttaattttatttaaatatttatatatgtatggatttgtgtatgtatctgtatgtatatttatgtgtttattaatatatatatgtgtatatatatgtaattctgtatgtatgtgtatgtatatttatgtgggtataaatgtatatatgtgtataaatatatgtatatatgtatatgtatgtgtatgtggaattatgtatatatgtgtgtatgtatgtatgtgtatgtgtatgtgggtgtatgtatatatgtatgcatgtatttgtatgtgtatgtgggtgtatgtatatatatgtatatgtgtgagtgtatgtgggtgtatgt

SEQ ID NO: 396365 - DNA, 1170 bp, Cannabis indica
ttaggaaagtcatttctgcgattgcaaaaggaaaaaataaggattaatattaataaagataaaattctaacaccctaagtttgcatatgcgataaaatacctgatgatggtctaggagtttgctgctttttcagaaggttccttgtacactgcctctctccaaagactcgcgttctcaggaatcagtttgtgttcccgcagtttagcagttgtacataacaatcgccagtcgcgatcttgtatagggaggcttccaagaacttcagctgtttctctgcgagtcgcgtcgagtgtgggacgagacggtctatctgcgaaaaccaaaagaaaagagcgagtcagattaaaacctcaaagtaactcagaaaaatatctaagtcaagaaatatgcgacgtactaggtcaacggttaaagtcagttctaattcctgggactttgaatatgtagaaccactttgatttccaatctcccatattagataccatcccttctaccccgttaatttcagaagtcgcccatttgctgaagcaatagaaaccattgtgaaggcctacactttttatatcgtagaagtagctaaactcttctaccgaaggagccctatgtacatactccatatacatcgcataaaaagccagcgttgtgcgatagctgttgggggttagctggaagggagatacgtcgtaacgtttgaggatagccccgataaagggatgaaaggggactgataccccacatctgagaatgggtattgagattaccacatcctctgtggggataatcgctggattagtaaaaggaaggtgcgccctctgagtcggcttaggtcgcaaagaagcaagccgcaacaggttaaccctcgtaaaggtggtgaggtccgatttggtaactctcaaaaccacatcctcgcatgagaaaggctcgttcagctggatgtcatccaccgagtcagtaccgctcccttctgcctcttcctcctcctcgccggacttgcgagttggggccgtccagtcgtcgtccatttcctcgacctcaacgtcaggggcatgcctcgagtgaataagatagtcgcaggctgacaccgtagactcactgtctcgaatatcaatggccccaggttcagcgagctcttgcaccattttctccatgtccgaagaagacatcggacc

SEQ ID NO: 396366 - DNA, 661 bp, Cannabis indica
aagaaggttgacaacactctatacaagaaaatagttggaagtttgatgtacttgacagcaacaaggccagatataatgcatggtgtgagtcttattaggaggagatttggatgataaaagaagcacatctggctatgtttttatgatgggttcaggagcagtttcatggacttcaaagaagcaagaaattgtcactttattaacaactgaagcagagtttgtagcagcaacagctagtgcctgtcaagctgtttggctgaggaagattcttgaagagttatttcaagcaagagggagccaccataatttattgtgacaatagctcaacaattaaactttctaaaaatcctgttcttcatggtagaagcaaacacattgatgtgaagtaccattatttaagggaacgtgctgtggaaggcattattgatctcatttattgcagaagtgaagagcaagttgctgatatattcacatagcctctcaaattgcctacatttcaaaactaaggaagatgcttggtactgtgtgccttggatgatcaagcttaagagaggggaataaactaagtgtttgtaaacacgtagtttaagagagggaatgttagaaaatataaatatatgaattaatatgttatgcataggctagagtaatagttgtccta

SEQ ID NO: 396367 - DNA, 575 bp, Cannabis indica
cagaactcatagcacaaaaccaatggagattcgttcaaggaagattcattggccacaatataatgatatgccaagatcgacttggtttagcactatggaaggatatccaaaaaggccaattgcatgatcaaactcgatctccaaaaggcgtatgacacaatagaatgggacttcatagaggaggttctcaagggattgctcttccctgataaattcatctctttggtgatgaattgtgtcaaaaccccaaggttctctctttttttcaatggaaccttacacggtttctttgaatctaagagaggattacgacaaggagaccctatctcccctttattgtttgtcattggaatggaatacatgtctcgggtaatgaaggagataggatgcaagcaagatttctcattccatgaaagatgtgcttcactgaaacttaaccacctcagtttcgccgatgatgtccttttattttgtaatggagactataaaagcattatcttaatgcttcaagggcttcaactattcactaacacaaccggcttgaccccaaacaagtcaaaatctgccatatattg

SEQ ID NO: 396368 - DNA, 846 bp, Cannabis indica
gcactttgatggcactcttcgaatgctgcatgaagtgaggcatataccagaactgagaagaaacctgatatcacttggaacacttgaggatgaaggctacaattataagtctagcgatggtccgatgagaattgcaaaggggtctcttaccatcatgaaaggtgaaaagaagaatggcttatacattctgcaaggaaacacagtaatggcttgtgaagccagtgttgtgcaacaccaagaaactgagatggaaatgtggcataaaaggatgggtcacatgagtgaacaagggatcaaagaactagaccaagcaagggctcctaggcaatttcaaacctatctcactacccttctatgaagcatgtgtgttgggaaagcatcacagattgaagttcatggcaggcaattattgttttaaaaggcctttggaatatgtccatgctgatttatggggatctcacaaggttggaactcactcaggtaaacactttttttttgtctattatagatgatttcagtaggcatgcgtgggtttatctacttaaaactaaaaatgaatgcctggaaaaattcagagaatggaaaactaaagtagaaaaccagtatgaaaagaaattgaaagtgcttaggacagataatggtttagaattcattaatattgaatttggcttgctgtgttctaagtttggaattgtgaggcataggacagttatgcatactcctcaacaaaatggtgttgttgagagaatgaatatgactttgttgaataaagtgaggtgtttgttgattagttctggtctaagaagaatctattggggagaggctttgatcactgcatgttatttg

SEQ ID NO: 396369 - DNA, 616 bp, Cannabis indica
cgtaataattagaaatttactaaacaaattttatttagatgtttagaatcctgtctctaattaaaaaaatacatatataaataatattttgaaaaagatgtctaacaaaaaaatattagttacggcagcgaatctccaatagatctcaacccttcaagtctaggggcccagatatgtacaatctttgcaagagccctcgaatcaccactgacaaatttcgctatccataacctacacatagtgaaacaactatgagtcaacgaactcaataagaaaagcaatcataatacaatcatatatctgacttgtaactgagagcacatacacttagttatcataagtctactaaccacatctaatgcgcaaattgagatccgaacatttgtacctatagtatgattaaccataataccagcctaattccaatactctagtcacactaatgttggtagcaccaatccatactattcaatactgcctaccatactagatatcagtatctggatgctactatatgtatatacctgttgacttcgcttttagccaacgacaatgagtctttttgataagcgataaacaatatgtcataacgggtatataataaagcaataataag

SEQ ID NO: 396370 - DNA, 782 bp, Cannabis indica
attttagcacaaccaaaactcattctatcattgtcatgatatctttgacagatcaatcgagtttttacaatcgtcgagctcaaaaatattttatttaaaaaatggtatatataatacccatatgttctaataaaattttggtaattaataaattatgttgatttaattcttttttcaaaagttactaattatctcataattggatttagtaggattataatcttactctaatattcatataactacacatttaatgaaatatgtccaattaaacataattatattttttaagatatttcaatctcagttttagttaccgagtctaaccttgttatgccttactcgcataactcttcacatgcattcacataataaattatcgcatgtatatacatagtatacttagggtaataactctaatttccacttaataactatataataaataattgcgccactaataaatattatttatttggagctcctaatatagtgagaatttgaaataagccttatctaaaaattctagaagaatttaatacatgtcttaagtgatataaattcaaagtcgcgcgcactatatgacaaagatctttgtatgaaataaagacatgtaagtaaattattatttgaaaaatacctattgtctatgcaatataaatacgtaaattatacgttgtgatagactcttgaagagtttttgattatattataaatgattgaagaacaaacttttattttatttttttgtatattgagaaatattaaatgtataaagtttg

SEQ ID NO: 396371 - DNA, 1205 bp, Cannabis indica
tttgtaactctcttgagggttaaatttggagtccataacttcaaaattgtgattggtttgtgagacatgacttgatagagcattgaaatagcttcaaaacgcaagttgaatctcgttaatcgaatcaatattaagtgaattatggtcattttactaaaggttgttctactcccatcaccctagttaacatccaaagcccaggttgacatatgacatcaacttggatgctattttttatgcctaagtaatattttgatatcacttagctagtttttgtgttctggcgaagtcgatcaccagttctcgaagatgttgctattttgcgaaaacatgagactcaaaactactcgatttctaagtcacgttgctgaaaagtgaaaatatgaagttgtagatatgacttgtgtgacttcatagctctcagttactatgaaaaactagacgaatggtcgggatggaattagaaacgaataagtagaacccagtgcacgaggtcatacgtcaacataggcactgggtgctcttttcagagcttctaggatgtctttttgatacttctaaggttcttgaaattgaagatgaggtctcctaccctgtttttgaccatttgagagagaatgctaagagaaaattttgtatttagatgatcaaaaggttgattgtcaacctagacgatgggcccaacacttccatgtcaacctcggcgttgggctcagttttgatgcccctggaattgtcgcttaatccccgagtttacttgtatctttgttatttttgatggcgaaaaaaatacctgaaacactttttgaaaaaataattagaaacagtccaagttgacaatatgtgaacctgggtgctgggcccagtttcaggcctttagaaagttttgtttgctccccaaaaatactttaatcttaatctttgacggaaaggataatatgtccataagaattggcccaggttgataaaatttcaacatgggcgctggatcctcgttttggcctccaggttgatttgtttcttccctaaaaatacttatttctctattttttatgaagacgaataaaatgcccaagacaaatttttcatcttgatgcttggaagtggcacaggttgacaatatgtcaacctgggcggtcaatgcatggggcacctggtgctccgggtgctcaaaacaaaagttctccgaatctaattttgatgcc

SEQ ID NO: 396372 - DNA, 1057 bp, Cannabis indica
aggtaatgatctaattatctccatctatgaaacgattattttcaaacctcaaaaaaaaagtgaatttgtattttggaagttagtggtattaaaaaatgtgcaatgcacttttgtttatgatgtacgaaagaaggttgtcaaataattttttcttttttgtaaagaacaactcgagagggttcccttgacataaaccagctggttggctagcaagtgtagcactcttagctacacaatccttttactatttttttttttttttttttattgaatcaagtatgtgtattgttcaaaatcttttacattttattggctttaatatatatatatatatattgagatattaattagacaaaaaaattaattataaaaactcaatattttctaattttacccatttatgggtaatgcccattaagagtgcacccatatatatatgtgagtatactcttaacgggtattacccatgaatgagtaaattttagtttttaagcttaatttaatctcttattttttttttacatataggttgttccattagttggaaaaaaattaaaaaaaaaagttttttggtaaaaaaaataaaaataaaaaaaagttaagtttggcttaaatattttgtatttaaataaatttttgatatagtgtaaaaagagatatttttttttttgtattttttttaattatgtagctatactaagcatagatattgaaatttctcttttattatttgtcattggatcaaaatctaataatttaatatttttaaaattaatattatagtttaatttgtttaataattatcaatgggtaatacccattaaaaaatgtactatatatatatatattgatagagtgatttgagtacaaaacgtagacgcaaagagtttccagtcaataagtcaattgtttagctaagatatatttaaagtcaaaatatgaatcactccaaaaaaatgaaaaaaaagcaaacttgaataaaactaagttactacaaaaatttaagcaaaacaattaagactacccaaaaatggcatccggtctacagaatcaattt

SEQ ID NO: 396373 - DNA, 1080 bp, Cannabis indica
ggatgagctgaaagagtttcagctgaataccacttgtacttgtggtgctatgaaggtttttcttgattttacaatcaaaatcaagttcttcaatttcttactgggcttaacgaatcatatgcttcagtccgtgcccaaatacttctcaatgaacatttaccaaatctctctcgagtctttgctatgatcgttcaagaataaagtcaacgaactcttggttcatctgaaaatcccccctggcctcctctgtccgtccaccatccaataaccctccaagaaataaaaaacctagaccttcttgttctcattgtggtaagcccggtcatttagtcaacaaatgcttcttcatacacggcttctcaccaggttatggagacaagaaacgcaatgacaaaggcaaggctcaggtcaatcaagcctctacaagcaacccaactgatcacactactgctatacctgctactgatctcagtttgcaatgccagcaactcatttcattgctcagccatcagcttagtcaggccactcctcgggctgatcctgctatgaacaatgcatcatctaaccaagttggtaactctctttccaatcactctttccattgggttcttaatagtggagctactcaccatatgtgctctaatctctcttgttttacatctttcaaagactcttcttttcccaaacatgtcattttgcctaacggacacaaaattgttgtatccaacattgggactgtaagcataaacaaatatcttacttttgataatgttctttacataccagattttcatttaaatctcctatttgttactgccttggttgatcaaacacattactaccttttcattaacaccaagaattgtgttatacaggatccttctcagagtgtggtgattgggacacctaaatgccatggaaagctatatctcatacatcaagacactcccatagcagctactagtttagctttcaataaaacaagtgtagaccaaaggcataatcgccttggttatccatccttgtacatttcaaacatattcaataaaaaaaattggttcttccattgttcacaatact

SEQ ID NO: 396374 - DNA, 697 bp, Cannabis indica
tttttttttttttttggtgtattgggtctgatgggcccgatggtgggggcggtcggctgcgcggacggtggggacggttgggtgtgggcggcttgcgtggacgggtgtgggcggtctccgtctgtgtccggtgtgcgtgcagttgatggtatgcgagacagagagagaaagagagaggagagtcagatttgaatgagggggtaatgtgagaattaagtaaatgctattctattttactaatatagggtattttagatttaagggaaaatttttccctaaatataaggataaaaaatcaaattttccaaagattatggcatgaaaggtacaaagctaacaagtgaagagagaaagagagtggatgattattatgtatacgtagttgacttaggactgcacttttaaacagttgggccgactaacccaatttggaaatggaaaatttacacaaattatttaaagagaagtttataaaaatattggaatttgagttaacttttacaaaaatactatcacacggaaatatttttaaaaataatgtgcttttataaaacaccagttgtggaaattgatccacaaaaccaacttattatccaactcatttaaaccaactaacttaactaacattcggttatgttagttagttagttggtgctatccttgtttgagttaggactatatataagtctagtctttt

SEQ ID NO: 396375 - DNA, 1941 bp, Cannabis indica
catgcctagccactagaacatggtttttaggtcttgacacatttttttgcctgaactgagtaaggagtcgtatgaaactcattcataatctctcttttaataccatcatccataggcacacaaacacgattcataaatcgtaacatttccgtttcatccactgtaaagtcactagccttcccagccgaaatcctgtctcgagatttcactaactctggatcttgcaactctgcttctctgattctctctaaaagagtagattgtagggtaatattaaccaactgccctacaaccaattcgatattagctcgggtcatctcatttgctaactgttgggagatttgtttcacagtatttatttgactctgcccctttctactcaaggcatcggtaaccacattggccttaccagggtgataaaggatatcagaatcataatccttcaccagctctagccaacgtctttgtctcatgttcaggtctctctaggtgaagaagtatttcagacttttatggtcagtgtatatctcacatttctcaccatataggtaatgccgccaaatatttagcgcaaataccactgctacgagctctaagtcgtgagtagggtacctctactcgtactcctttaactgtcgagaagcataggctattacctttccagcttgcataagaacacagccgagaccttttctcgaggcatcacaataaacaataaacttttccttatcagaaggaagagttaaccatggagcggtaatcaagtgctgcttcaactccagaaaattttttcacaccgatcagtccaaaaaaacttcaagttctttcgggtcagctccgttaagggtacaacaatctttgaaaatccctcaatgaaccgacgataataccccactaaacccagaaagcttctaactttagtggccgattttggtgttggccaatcccgaacagcttcaatcttggccggattctccatgatcccatctttatctactatatgtgccccaagaaaaagacacgagataaccagaatttacattttttaaatttaggatacagcatgtggtctcgtaaccgttgcaatactgatctaagatgcaacttatgttcctcttctgattcagaatacaccaagatgtcatcgataaacacaatcacacatctatccacgtaatccttcaatacccgattcataagattcatgaatgtcgccggggcattggtgagtccgaaagacatcacaaggaattcataatgtccataccgagtactaaaagcagtcttcgggacatcttcctcttaaatttttagctgatgatagcctgagcgaagatcgattttggagaagatcgtcttctccttcaatagatcaaaaagataatcaattcaaggtaaaggatacttgttgttgatggtaagcttattcaactcccggtaatcaatacacattcgcaacgacccatctttcttcttcacaaacaatataggagcaccccaaggagagtagctcgacctaatgaatcccagattcagtaactcttgtagttgtatcttcaattcttttaattccgttggggccatctgatacggtgcttttaatactggttttgctccaagaactaactcaattacaaattcaatctctcgggtaggtggtaatctcgataaatcttctggaaagacatcaaggaactcacataccaatcttgtattctcaggtctagatgtcacaggttggctggtatccactgcagtgactatgaatcccagaaaacctctgctcatcaggtccttagctttcaaaagtgttgttcttggtatatgtgccccctgaactttacccacaaacaccgctaggttagcactatcgggctcaaacaccaccatcttctgcttgcagttgatcgttgccccatacttggatagaaaatccattcc

SEQ ID NO: 396376 - DNA, 193 bp, Cannabis indica
tttttttgcattacattcggtttaaaagacaattaataaacaaataagtattttactctttgaactttgacactaataagattgtgccccctaatcattagcgatgttaaatatttcctcttactttaaaaagatattaaaatatgtgtaataccctaactagactaggcatgttacgtgatttttaaacgta

SEQ ID NO: 396377 - DNA, 698 bp, Cannabis indica
acatagtccctcaaactacggtcgagtggattacaactgttttctttgtcttctacaacacctccattattaccgttattgccaccattgttaccgccattaacgttgtcagccatgactttttctacttcagctcttgttgcacttctttcttgctttttgtttcttctgtttcttctacaggtctttttaattttaggatcaataggcagtattacactttatcattgacatctcatgcaccccctatgcctgaaaataaaataagaaaatttaaaagaaatagatcagaaataagcagaaagaattaaccaaagtagaatttaatctaatttttgtattatcaaataattccccagtagcggtgccaaaaacttgtcacgcaaattatgaatagctacgcaagtgcacgtaatcaagtagtactcgcacaggcgagatcgatcccacaaggaattgaactgaatactattcaattagacttatatttctatttggtaaacaataattttgatgacagtcaaaataaggaatacagtaaaataaaattaaacaataaaaaaaagttcaatcaaggatgagaaattaggaaaacaaatcctattgttttaattagccgattgttaatgataattactatttctctttcataaagtcattgacagattataaaattaacctaactcttttcagatctt

SEQ ID NO: 396378 - DNA, 531 bp, Cannabis indica
tgctggaggaaagaacttagacatgaactttgttcccaaatcggtccatgttgtaatagagttcggtggcgaggagatcaaccaacttttggctcgctcccttaccaagaatgggaatagtctcaagcgaatggcatcatcactgactccattgactttgaaagtatgacataactccatgaaattggacaagtgcaaattggggtcttcagaggggagtccgccaaactggactgacgactgcaccatttggatatggctggctttatctcgaagttattagcctccacggctggtggtctgatgcatgactgaaccgttgttaatgttggaagaatgtagtctctcagactacgaccgtttgcctgatcttcaatggcacctccattattagcgttgttgccgccattattaccaccattagcattatcacccatgacttttctgtttcagcgcttgctgaaattcttgcttgccttttgtttcttctatttcttctataggtctttttcgattttcaggatcaactgg

SEQ ID NO: 396379 - DNA, 1031 bp, Cannabis indica
aaaaaaaaaatactttttatttatttaggtattgttccgtaacagttatataatcaactaggtaatatagccactcttcgcgcgactaatttaatttttttagtattataataaataattacttaaaaatacaattctaatatataataaaattataaatacactatcttatttcatattattattaataattttatttattaaaaactaaatacacaattttattaattattatttgaaaatatttattaagaaatttaaatttattatatgtagtattttaaattgctttgttaaaagaaattatttttataaaaataaataaatagggtggtgtagaaaaaaattacggtgttctccacaatgtattatttttatatctttatcattcaaaactattgttattatcgtatttcagttgtagtctcattgtatctcacttatttttatcaccgtatctcaccagttgtcatcactgtatctcatcccttgtcattaccgtagttcacttgtagtcgtcactattgtatcttttaaatctatatcttaatcttaaatttcatcttgaattttaaatatattttaaacagttttaagagattggagagaattcattagtttgtagatttatattttaataaaatattaaaattgagagaataaaggagagaagagaaaaatagttttggggtgattttagaatatcatatcgcatatatatatatatcatactttctcctttatatatatattgatgatttatgattaattgatgggtaaatagcggcataaatacccaaagttttaagttcgtaagcggcataaatctaatgtttattcttagcggcataagtacccaatgtttgtaaaattgtaatcttcctccaattttttcagtacaaacttcgttttgaatttattaaaagaacattaagaagtaactgatactacatgtttttatctagacccaatgatcaataatttgaaccttatatgtggcatgtttaagaaaataatagagcttgtactga

SEQ ID NO: 396380 - DNA, 979 bp, Cannabis indica
ggtgttgaagagtccttccaccatgaattcatttgctgtcatgaaaaattcttgagctgtcatcattagtactatggtacaattatggtgccattatttcacaattgtcaagtgtttcaatacatgtgtgcatttattctagattatccatagtgtatacatccataatcaccttgaaattgtccttcatatttgctcctgcagtttattactcttcagtttttttttcacatgactatgcaccacaaattaaaaaaaatacatcccaatatgaagttgatccacataatatcatgcatatgtgtaatacacgtgtaaatagatgcattaactagagaggccaagcacacacacatcggacaaatgtctcaatatcacaccaaaacacatttcaaatgttcaattgtggtctcctagaatgattgtttaatctcaagctgttctttaccttagggcccacctgcgtacaaagtaaggatgaacatgaaccatccttattttcataaacaccgtgaccctgcagcttgcaacttaaattgatttagtacataacatagaacaaaaatatctaaagggataaatgctaactacattaccaaagtagataaggccattagtattaaaaacaacttttctaacgtttcccagatataactgtaaaatatctatctactacttaaataattgtaatttcaattataatcttacagcttcaatctaatgctggaaagataacttttgtcccttataatctttgcataaaatccttcctgatctgtcaaaaaaaaatgcaaaatgtcatggaaaaacatagctctgaaacagagcaaaaagaagactaaaaagatgtatattaatttctaattgcaaaaattagtaacatgcatttgaagcaattaagcttacccatgagagagagtacacaattaaccaatcaataactttttttgttcatcattaagggtcaaaatatgtcctg

SEQ ID NO: 396381 - DNA, 1161 bp, Cannabis indica
tttcctagtatgattagatgaagagaaaaaaaggtattcttatcaaatttacatatttactcctaaagattaataacgatttaaaaatctttgaaaattttataatttcattttatttttactttatattttttttatatataaattgtttaaaaaaacttaaacgatcgttatggggtattttggaacgatcgtacggtccgatcaggtagcagaaactagctactcggtggatcgctaaaataactataattctctatgacgatatactttcaaacttactcgatcattatagatcaagacctatcggcatggtgtggagtaaatctcacactcctatcctaattaggggatatttcggaacaatcgtacggtctgattaggtaactaaaactagctactcagtgaattgctcaaataactgtaattctctatgacgatatgctctcaaacttactcaattgttatagatcaagacctactggcacaatatggagtaaatcttacacgcctatcctaattagggggtagtttcgggactatcatagggtccaatcaggtagcaaaaactagttagtcggtgaatcgctcaaataattgtaattctctatgacgctatgctttcaaacttactcgatcgtcatagatcaagacctacctgcataatgtggagtgaatcttacaagcctatccaaaataggggtattttagaacgattgtacggttcgatcaggtagtagaaaactaagatacgtcagtggatcgctcgaaataaatgtaactctatcacaatgtggagtaaatcttacacacctatcatggtatttcggaatgatcgtacagtccgataaggtagcaaaaactagatactcggtggatcactcaaataactgtaattctctatgacgatatgctttcaaacttactcaatcgttatatatcaagacctattggcacaatgtggagtaaatcttacacgattatctaattagggagtatttcagaatgattgtacagtccgatcaggtagcagaaactagctactcgatggattgctcaaataactataattctctataacgatatgctctaaaactttctcgttcattataaatcaagacctacctgcacaatgtggagtaaatcttacacgcctatcct

SEQ ID NO: 396382 - DNA, 673 bp, Cannabis indica
caacgcaccaagccatttgtcaagttgggccctgggtaccctgttttcaagctcttgggtttttcattttgatacatccaaggttcttgaacttgaggacaaggtatcctaccctatttttgaccattccatattcattggtcgaatcagattcaacatttgaataatcgaaaccagaacaccaggttgattgacaacctgtaggcccattaccaagtcaacttaggcgattaccctatttttagggacttgggtttgtggttttctccccgagtttgcttgaatctttattatttctattaatggaaaatatattcagaacacttttttgagaacttgatcggaaacagccaagtttgaaaatatgtcaacatatgcgctgggcccaatgctaggtgtaaacctgggcactgggtcccaattatagccttcgaaaacttccgtttagtccccaaaaatagttaaatcttaatattttttgaagacagagaagatactcagaagagttctcagaaaacatcatcgtaatcggccaatattgatagattatcaacttgggtattgggccagccccaagtgtcaacctaggcgctgggccttgcttctggcacccagaaagtgttgtttcttccatgaaagtacacatttccctatttttgatgaagacaaagaa

SEQ ID NO: 396383 - DNA, 686 bp, Cannabis indica
tgagttggtcttcctctactgaattttacttctcctttagaacctccatgcttctcattcttgatctccaagtcctttgacttcaaggctgaaatcacttcttctaaagtaatttatgtcctaccatatttaatggcattcttcacttctttgtaggattcgagtaatgagtttaagatgatgatggcttggttctcatcacttaatgcctcattttcaccagaattagtcaattcaatatgtaaccttagaaattcatctaggttttcatcaagagtcttgctagtgctcatcttgaaaccaaaaattctttctttaagaaagatcttgttcatcaaagatttcttttgaaactgatcttcaaacttttccatatttttgttggtgtatcttctttgtcaaataacctgataatagaatcaaacaaattgaaaatgattaatctagtagcagtttcaagtagttcttcttgtgtagatttattagaagtattttctggccattctataggttcactaagaaccctaagtaatttgttatgagcaagaagagctctaatcttcttcctccaaatcctataatcccccgatccataaaacttgtcaacatccactctaatattactcatgttaattatttgaacaagataataaaagcaagaatgtaataagataaagtttaggtta

SEQ ID NO: 396384 - DNA, 658 bp, Cannabis indica
gtttcgatgatccaagcttcccacgggcttccttgaaggttttctctagtgggtaagctttcaaatcccgttctctacttgttttcttggatttttgattgttgtgtttaagcttttccatgctttatacattcttgattctcacattagattgtagtatttttggtattttgatctgcatgatagttttaggatgcataatgcttgatttcttaatgaaaaagatttgattttgacctacattatgattcttgactcttggagtcacgaaaaacacgtttgagtgtaaaaaaaatgtgcactttgatctaaagcacaccttgaccagccctaggggtcttgttcaagacctagcaagctctaggattttgtcatggggcatatccatttttagggcttaccctaggaagctggccgattcatgcttgggtcttatgaccttagtcgattcttgtatgggtcatgggaccctggcatactctttcaatcctttaggacaccggctgacctagggctttagtcctaagcgggtggccagttttctatcctcatttgaccaagcaagaaccttgtcatggctttgtgaacctgtataacctttttctcatacgtggttcccttagaaactttgtatgatgctttatggtgagtctattat

SEQ ID NO: 396385 - DNA, 762 bp, Cannabis indica
tgccgcattaaatgtgaaatgatagttcgaatatgatcttcttcttcgggagatgtgttgttgtatttcgagctcccggagagtaaaggcatgctttatgctcctctccgagggctcactccctgagatgcactttgctgtccatacatgacttagccaatttttgtgggtgaggtgttcttgaaatccacgtaccacatgcagccgctaccacatattttggaaaaaatttgaggcaacatttaccccccaagtctcatttagtaaatggtaaatgaggcttgtacgtggcctccagtctctttataaatacagtggcacgtgccctaggcgcgtgggttgcatttatgatcgtcatcattgatatttatttctttttgcaggcaacgattcgcttcccgtctagtgatagacatgcatttaatgctggcgtcagagaggtcctccaacattttaaccgtcctttctcctcgttacacccattcaccccatcccttggatcatagaatgcgaattgatacaaattcccacagtacgatggtgcttgatcacagctgccttgcaccctctctggcctataaaagccagcactttcactttgctgggttactttcacaattctgacattttgactcaaatagcatatttgaaaaaaattccaaaaatcattgaatttttactgctatgcctccatcactgccagtccaagttttaccgttggacgacatcaacttctcgcccatcaccattgtgtaagtttct

SEQ ID NO: 396386 - DNA, 654 bp, Cannabis indica
tcaaatgggattgttaggagccttactgttgagctcagtaagagtttttctattatgtatcggacatgctagtaacttgtatggaatgcttataagtttttattttgaacatgcataatgataatgtagtcatttctacttattgttgtcatatgtatgcatgtatgtgttgtttactaaagttacaggtacaaaatgagatgaatgcccatagtcccaattttgttgtacctgatgcatgttttggtttgattgttaatgattgttaatggattaaatatttttaaggtcaattcatacataatatatgtatgctgtcgatatgatattatgtacgtcttaattggttaccttatgtgtgacagataatgttatggtggttgattatattgtctaattgggagaatattagaattattattgtggactaatataatcatatgtttaataccataaacacaatcattaactatgtgcccaatatttgtccactaccataatgggatggttaataattatatattatgttagtgacaaatgagagcaccctttaaaactataattggcccattaaattatagtataccattattgaaccacttaagcccaattagtatataacttcttagggttataagtgtaaagcccccttag

SEQ ID NO: 396387 - DNA, 578 bp, Cannabis indica
gagatggctgaggcggattagaaagagtatttgcaccagaagcatttagtctcaaaccagatgtgtgtagcaatggggtaagtgttgtcgacacagattggtgatgatgagaagtggggatgtttgatcttgagtgtaaggtcaaaggtgtagttgaagactctccaggaagtaaatatggtggttgaggctgaccacgggttcgagttgttggaagggaaggtgaaatggagtttctagccaaccgagtgagaagaggccaagcattggctttggaaaagtcagtacgatatctgtcgtaaccattggttggtaactttgaacctttcatccatggcccgtactgaaaatcatcatcagcattaccgctatccattcgttccatgaacgccacacatcgttcaaaaggatggccaaggcagccacattcaaagcaaaattcaggcaaacgctcataccgaaagtccacccagaattcatctcgaatcttcggaagtttgatcatttgacctctcataagtggtttagtgacaagaagtttaactcggatgcgcagaaagggaccccatccctcattt

SEQ ID NO: 396388 - DNA, 490 bp, Cannabis indica
tttaagatcgagagctgtaaaatctcacatcgcttgaggaagttcaagtgtaatgattctaaggctgtgtaggtacgtatgggactacacaattaaagatgacttaaatagaatgattgataggtactacctatatcatcaaggtgcaatttgttttctagtagcacatcacttgagaacttcacagttaagtgtgtttggcctggagtaatcttgggatgggtgaccctcctaagaagtgtttccagagagcccgagtaattaggagaaagcacgctgaaaataatcgtgttggtttgttaaatcagtaatcactccaagaaatagctaaaagtgatatacgtgtatatagagtcattagttctggagaaggctcaatatattgagtctttagggatatttctacattcaaaaagaaaaagaaaaaagaagaaaaaataaaaagaaaaaaaagaaaaaaaggaaaaaaagaaaaagtaaaaaagaaaaa

SEQ ID NO: 396389 - DNA, 565 bp, Cannabis indica
aaaaaacttcgtgttacgatccccggattgtagccagtctacccgagacctctgttgccaatattgctcctcattggcaaaaagctcatccaatattgcttcagctgattgcacattatttgaaaaattactatctggtgtgacactagaattcagttgttgcactctggtttgtgcctttttaatatcacgtttcatgtgcccaaatttaccaatgtgccattgttgcaaggaagcagcacaactttgtaaactaccagataattgtgtgaaaatgtcttcattaagttgctggttttgcttccaatttgcatcaataatagccgcactttctgcatcatttaaccagatccgttcgaaccgaaaccttgaccttctttctctgtagccaattgattagagaaattaatctcaaccaatattgctctacggtcagagccatagtaatcaaggtgtgtgacagaaggcttcgtaaaagtgtcaatccaaacagtattcacaaagcaccaatccaatctttccttaagagcagcaggattttacctacttctagaccaagtaaaat

SEQ ID NO: 396390 - DNA, 1654 bp, Cannabis indica
ttttaatagccaaacaccgaccttcgaatgtgccagacacaaacaatgctaaaattatggaattttatatatgacatataaaatgcattctgaattcaattaaatcatcgtaaattaataattcaaagttaatagacaattttcataattaaaccctaattatctgttaattttcaaattaaagctatggggtctttacacattgcatgcccctacgcgcgcggaatggagggtttggccgagacaggaggctgcatgtagcctccatgggtgaggagacacggtcagtggggggaaaacttcggacatgcccctgtctgatggggttttgtccgagcgagccgcacatcatgtcccccatgcgggcccgtgtgtatcccagtttcaaatattttcatccaaattcaaaaaatcataactaattcataaaaaatccaaattgtgttctgtaaaagcctaaatttattaatttttcatctactttccagtaaaaatatttcctgaaagaaacaaaaaatattttacaatatacattgtgatttccatacaatcatcaaatatgcacataaaccatcatgaaaccatccaaatcaacacaaacatcattttaaatccatatttcatgaaagtaagtcaataacatgactctgaggccagtttttggattattgttttaccaggatctagatttactaccatgtatgttgtttaacatcctaattatgaatttataaaagaatgtaatttaaacacatataaagtttaagaaaccttacattggttgcagcagaattaaatgactccttccgctcagatctcttaaggggaagaaaatgacatcgaactcgggagtccctactgttgccaaagtggttcctccgaagaagcaaaggaaaaccactgcccataagaagaaatcactggccgagcctattgttcttgaggtttcaaacaacgagatccaagagcaagttcctcctccaattattcccaacgccaatgctcctcatccctaggcgaccgacgctactgattctctgagtcaggccattgagacgctgtcggtcgcagctgggaaagctgggtctgaatttgcccaggcatatatagtcgcatgttggcgcaaacttcaaactctccttacccctgattgggattttctcaatcttagaatccaaaagagatgctttcaaggagcttagactgtcacttcatggtatgtcgactttattattataactatattatctttttatacctctttcatattcatctgtttgtaattctccaggcttcttttgcttctaatcgactactctctgagtggctcgagtatttgaagggcgagactcacaaattagtatcccaatacaaggttgtgagtgagcaacgagacaatgcccaataggagattacccacctcaaacaagaggtcaagaaagcgaaggaggaagcagagaaagcaaagaaggaagccaaaaaggcaaaagaggaagctgagaagacgaaggaggaggctgagaagaccatcaaagtccaagccgatgagtttgaggagaagcttgctgaaaaacttgctaaaaaagaaatcgagaccgtagaacggtgcgataaagttagtttttgcgctatatatcgggcttggctttggaac

SEQ ID NO: 396391 - DNA, 1243 bp, Cannabis indica
aaacaggatcaagtatgtgaaaagggtttcagatgaattcatacattatgtacatataatcatgaaataaatcatgtgaaccatgcaacattaaatgttatttctgacctatattaataagtaaatctgattatattgaaatgagttttatttagggcataaaacccaacaacaagtcccgcaaaatcttcacggcctcgtccatgcccccaaattcggacatgacgaacacgtgatcaatcagggtcttggagaggcggccggtctctgcggtgatctgaaaaaggaaataagaatgaaatcaggtgccttaagacaaaatataagcgaaaagaaaggaatgaatcgcaagaactcaccgcagccagggcagcactgatgtcttgaacctggtaaaccgagttcactgaggcacaagcagcgtatctcttggctgggaattgagtcaaatgggagacaaactagctggtcatctcagaggcgaagggggcaagagtaggaccgacgaagcggttgaaccagtccgtcagggggtccatgttcaggtcccaaagattcctgaaggcgtcctcgcgcaaggtgttctgttgctcctcccggaagatcttctttagggcctccacctcatcatatccccgactgaactcgtccagggcgtagttatgtttggcgatgcgaagcatttgcctttcctcgtctgcggggaccggggtgagaatgattccatgcggcacagtgtactcctccgcttcggatgaatcctggagtctttgctaactgttagagtgtccctgctccggggccgcttggaagacacggcctcaaccatcttaccttttcgcttgcgctcgagggtggccacaatctcgccctcatcctcctcgacttccccttcctcgtctaccaagactattgtgcctaaaggggcactggacgatgatctcctgggggtcacacgttgtgacgaggccgatggcagagaaggatccgggctgtaggcctcggcgagggtcgccaggagatctttcgttggcttggctgctgcaataaagaaataagcaaagtgttacaataaccataaggcatgcgcctaacaacaaagcaataaagctaatcctaccccgactctctaattcagccctagcaaagtcttgaactacggtgctggcttcgtcatccccaagaaagctgtccgaggggagagatcagttggaggacaagtgggctgaatgatctaggggaa

SEQ ID NO: 396392 - DNA, 632 bp, Cannabis indica
tcatccactatagacataaaataggcattacctccatgtgttagagtcttttcaggaccccataagtcaaaatgcacatattctagagggtgtttagttttgtgtatacctgttttgaattttagtctatggtgttttcccaaaatgcatgattcacaaaagtcaagtttccccaccttgtctctgcctagtaggttttgctcactcattacttgcaatcctttttcactgagatgccctagccttctgtgccataggactgccttcttgtcatctgttgagatggccactgagttgttgcattgagttactggttctccttgtaggtagtacaatccttcatgcttgtaaccctttatgatagtcatagatcccttgcttaattttattgtacctgcctgaattttactcacaatacccatgtcatctagaacacttatagaaattaaatttctagccaaattagggacatacctgacccctgtgagtgatcggattactccatcaaacattttgaaactaagtgttccagaaccttcaatgttgcatgattggttgtttccaagtatgacttttcccccagttgatgccctgaaatcagtaagaaaacttttactgttagtcatgtgaaa

SEQ ID NO: 396393 - DNA, 1213 bp, Cannabis indica
atccccccaccgagtagagggcaccctgaacctaaggaggcgttcgtcaaaccctataggtctaaggctagcgtattcacaaacaggagtgacgtaatgtatcgttaaaggggacttaccagaactagaagtgcttgcatcggcagcccccgtattcggcacttggacagtaggcctcagtttgagggccctcctctcaaccgggctcccaatacgaaggggcctcccagcagccgcctgggccttagtgtaagccttctcctgggccttttggaagaggtacttctggtacttatcttcctccgtggcaatgatctcctcccggaatgccttcttcgtggccagaacccttacgttcgggcagataaccttggaaaggttggagtcctccaccgactgatgccccaggatcagcttggccttccggcaattctccgtcgtgaccaaccccctgacgtcaaggtcgttcttatcatatgtggcaaaggtcttggtccgttggaggaagagctgagtaggtgcagtccactcataaggagggatcctaatccactctgtgagaagctccgggtgttccacagcaacgaacccagaggaaaagaagaagcggtggcgatactccttgacatgtttttactggttaaggggaccgggccctcattcaaagggtggacccggaagccataaaagtcatccttaagtttttcccccttcttggggacggaaacgagttcataaaaatacaatatctctgccggactgggagagccctaaccccgggtagagtaaaaaataaacaagcctgaaagcaggcggtaagcttgtggaataagttggtatggcgcaaggccgacaaatacaaggaaattaataaaataatcctgaaggggaagcatagccccggtcatcaaatgcgtttgactccaagctccgaagcctccgtaattgtgattgggcgtctccgcgtcccggggcggccggtggtaggtcccggaagtcgcgggcttgatgcctgccaccagcacaatgtgctccagctgatgaggacaagtaagggtagagtgaagctcagccgcttccaccccgtggcgcgaggcttatacccttcctgggcaacgggacctttcatcacctcctccagggtggccaggcactttcctcctttcttagacgatttggaatcagatgtcgacattttggttctaaaaaagat

SEQ ID NO: 396394 - DNA, 894 bp, Cannabis indica
aattataaaaagaaaaaaaatttgatatgaacatattttttcaattgtttttgtaattttataatatttaaaagttattgaaataattaaaaaatttggtaccaataagaatatgaaatgtgtacatagatgtacatggtggcaatcttagttggcgtcctaattggcacttaactgaaaagtttaactgttattttaagtttgcaaacagaactaaactataggggatttcaccaaaaaaaaaaagaaaagaaaagggggttatgtgtatacaaactaaaacataaaggggtttagctgcaaatttctcaaaataaaatggtttattaataaaaataaaatggtttataataaaataaatcccattaaatccaaaaaaaaaatgcaattggtttttgctgttgtacatctacgattggttttttctaattatttagttggattttattctaaataagaatttactactatttatataatatatatatattgctaaagaatttttctatttgttttttatcaggttataattgtttgcctccacatccgaatccattaaatgtggctcgattatatctatatatgtaaaattattgggtattttttttaaaaatattttttatatatataaaatgtggctatgtaacagaattcttggtttaatgttattatttatttttctgtgaaaatgttaacaaaatattctaatatttgacaaaatattctgattagaaaacgttaattgtaattgattaatttttgctaaataatcctaccaaaatttaatctaacaaatttctctctatacagcaaaaaccctagcctctaacacaacctttaccagtttataaccttagttataatttctgaggttatattttataattttaattt

SEQ ID NO: 396395 - DNA, 523 bp, Cannabis indica
tatatatatatatattattatgccgaaattaaccatatgaacaaaattccaacagtatatatatatatatatctataagaatccaagccattacgtatataatcgaaaaaaaataaatatatgacggtaatgatcgaacaatcatacaacaatatactcaatgtatacatacgcaattaatttttaaaaatccccaaatttcataaataaaatcattaaatcttcaattaattcaataaaggtggctctgataccacatgttaggatttataaaacactcaagaaatatttatatcacaaatctaaacatattcctaaaagtgctttagtatagaaaaccctaaattacaaatctataaaacatttgctaaattaaagaagaataagatgataaaagatgaacagaagcactaacctgaagccattgatggggaaggagagaatacagaaaacccctcgtgtttcttggagaccactacctatttatagactcatcttagaatgagttttgggtatttataat

SEQ ID NO: 396396 - DNA, 703 bp, Cannabis indica
agcaagtcttggtcgattcgatgctccctctcccgaaactcacctggattcatctacaaaagacaacacacaagatgagtgtttggtcgaaatatcgaacgatcaacaagctaatatgccgaccaggagtactcaacagattaaaaaatgagaatgttcaaagaaaagtcaaaactcaggaagtttgaaattttctcgagttagggcaaaaaatttcatgaagcttagaataagcaagatgaaagacaggcattatgcagttcagaaagcacgcattatggactgtaaaatctcatgaatccatgacaaagaagaatcatagagtttctaaacttaggatttcttatgtattttctacagcaaagtcgaaggtgcattcaaaaagtaaacatgcaaaaataagcataaaggaaatcgagaacttactcaagaatcagatgtttgggttcaagtatcgtcaaaccaacaaagcagttttgatgaaggcacttcagcaaacttgaagccaaaaacctctgttttcgctctgaactcacttagcaaagaaggatggtgaaatgagtttgcgtacgaaattcttgttggcatttatagggaagccacgaaaagaggtaatcatttcaaaagaacctccgacgccccggttccccctaaaagcgaatatgaaaaataaaaaataatcaagtgcagccatcaaccgtgg

SEQ ID NO: 396397 - DNA, 1505 bp, Cannabis indica
tctctctctctctctcgatttctgcaaggggggagtaagggattttgagtcttcaattgttattccagaattctagttgaattctaaggttccaacccaaggtatcatttcctagctatcttctctatgttcttctcaagtctaagttgtatgttgatggtggaatggaaagattttgttactgattgtttaaggattgttctaaattgtattttgatgtttgattatgaggtttactgctggtttggtttaggttaggtgattattttgttgtttatgtcaaagtggggtttatgagctctagcttggggctctaatggtaggttgagtttttgtgtcaattgtggtgttctttttgttggttttgggctgttgaattgcatgtatgtggtgtggaaggttttgagaaatttgggttcgatttgaatcaaggggagcattttggacagaaccggtcgaccggttctgggggagcattagaaccggtcgaccggttggtatccagaaactgggattccggttgggaaccgatctgccagttggggatttttcccgaaccctagtttttctcgtttttgcgtaatttagggtgttatcgctagggttattcttggtttttattttaaatttttgagaagcattttagagtatttctcattgagttttgaacgttatggtttagggccctgtaacacgtcgagttgcacttccactcaggctgactggcacacctgagcacggagcaaggtaagatagcataagaatttatatatgaatatatgcctgtttttaattatctacagtactaacactaattgtttatgtgattttaggagtgctagtatagtgtaggatatcggtgtagttacggtgttaccaacacgagtactagagggtacgtcgtgcatgtggtacaacacttagtaaattctcgggagtacattgatgactctaccaacacgagtacagagttggtactttggtgcatttggtgcagaggtcctacttcccttaagaacgttcttaaccatttgctgagctcaatattgagcttagggcggcttaagcatagagccgacatcgcattacttgtatatatgtcttgtttatcttactgagtctattgactcatcagtttgctatcttgtgtaggtaaaggaaaagcgaagctggaggaacagtgagatggagctcgacactgattgtacatatcgcggcaatgcaacctggagagtttcggtcttttactattttgagtctgtgttttgagttgcctattcacgtatttgtataaaatatatatatatatatatgtatatgctagtaagatacttttaaatcatattgtgataatcgggatcccgacccatatgcttatcaagttataatatattaaaattatcctttgaatttacttaattataaatacgggctttacattaactgtattgtattctggaaataaaaattataaaatttctatttggaatctaaaatttaaagtc

SEQ ID NO: 396398 - DNA, 821 bp, Cannabis indica
ttttttatataatgagttattaaatgagtatttaatttgtagtgtaatattttataattagatttgatcatattgtttatgttattgtaaaaaggaatcaaattatttttattgtttatgttgttttagaaaaagtttcagattattttttttatgtatatataaacatgagatatatttgtatgttatattatttatttcttttttcagattgagctcaaagaattaatgttgaaaatgccaactagtaaataaaaactctatagctattttgcttgactgggaataattaaaataaaggtattttgtccactccttgatttgattaacatataacttgtatttgttgatattttctaacttcaaactttatttgttcaattttttggtgctcattgatttatgttcagatttttttgttgttgctgttttccttttagtagttatagaatatatatagtagttttatatagattgcccataaatttgaataattttctatgttgaattgtaggtaatgaacttgaggacaaggataccaaaaggagaagacttgatattcttgattgatgatgttggaaatattatatgttatttttttcaagtttgtagtcactcactgtgattgtctagttactcataggcaatttatgagggacaattttttttacagttttaagacttggattttggatgactaataaactttgaatgatttttctattttctttaatttaggtatgaatttgtgaccatattcatatttaaattttgtaatttttgtaactgtgaaaagtatgggttgtaacccaacccaaccc

SEQ ID NO: 396399 - DNA, 519 bp, Cannabis indica
aagacatctatatattgtacaagaatgaatgatcagatgtccaacagatattagattattagatgcttttggtttcaagcaaagtaaactccctttcacttatctgagagttccaatctgcctaaaaagaatttcacgtgcagactgtgaggtgctacagagaaaatagtagcaagacttcacatatggagttatagaaacttgttatatgtaggatggattgttctggtgaactcagttctagtagcaatacacacttattaggcacaagttatgattatttcaagggaaaaaaaaaaggttctcaaggccatagacaaaatttgtcaaacctttctttggtctggtgtagctgatcatgataagtcaaggttaattgcttggaaaaatgtgtgtaaaccaaaaaacaaaataagtgggttggatttttgaaatataaaagagtgaaatattggggccattttggtttttagcttaaaagaaagacaacctttggatgaagtgggtacatgaagttta

SEQ ID NO: 396400 - DNA, 1071 bp, Cannabis indica
tgttgttgatgcttttcctcttctcgcaccaatgctgcactgatcgcattatccgagacagctaagtcgaggtataaagtctctccagttattggtttttccaaaactagaggtgttgataaatgtttctttatgcctctaaaggcctcctcacactcatctgtccattcaaactttttgttgccttgcaacacattaaggaatggtaggcatttgtcagctaatttcaagatgaatctgtttagtgctatcattctccttgttaaggctcagacttccttcggctttgtaggcgatgacatctctatcaaagccttaatttttttcatcattcactttaatgcacctcacattagcgatgaaccctagaaacttccccaaggagactccaaaggaacactttgttgggttgagtttcacattatactttttgagtatttcaaagcactcctcgaggtcttttgtatgatcttcacactttatcgactttaccaacatatcatcgacgtagacttccatgttcctccctatttgttttttgaatattccatttacaagtcgctgatatgttgccccaacattcttcaaaaaaaatggcatgactttataacaataaagtcccatgttggttacgaaacttgtacgctctagatcagggacatgcatcttgatctagttatatccaaaaaatgcgtccctgaattttattagctcgtgtccaacaatcgcatccaccaactagtcgatccttggtagtggaaaataatcctttggacatgctttatttagataaaagtcgatacaagttctcctagtaccatttggcttcgggacaaggacaaggtttgatatccacgagggatagaatgcctaacgtataaagtcattggttaataacttgtccacttcttccttaagtgccccttgtttttcagtatctaagggtcgccttttttgtctcatagctgggtaattagggtcaatattcaaatgatgacaaatcactttagggttgatccctatcatatctgaatggctccaggaaaattgatcctagtttgccttcagaaa

SEQ ID NO: 396401 - DNA, 1027 bp, Cannabis indica
aatataatttcatatttaaaattctgaaaattggctgatcttttaaacgatgttccagtgatgttctaataatatttttgcgatacttaacgatgatatcatgagaatttaatttaggcaaaaagaaaagctttagcatgtgccataaaactgaaagcataataatttggtgatggtgacattggtgagtgatgaaatttcataagttttgattctgacataacttttttaactcaaatatcaatttgaggtgagtttatatatatagctgttaattttctatcttgtggtaatacaaccgtagggtgtacttagagtaggtgcgtcaataatccctctttttcttcattctctcttttctagtcaatcgttttttttttccggaaccaggttgagaaattctcagtgttcattctttcattctttggatagaaagtggattttctttcttaaagaaatggaaatcttaatatatgaaaagtctctaaaatggctttaaattgttttctatcctctctaaaacaaacgacgacaccttggatcccgactctggcctcaacccctatatttgtaccctgacgtcggctcagttagatttttttttttgagaaaaaggtatgtgaagtaaaatgtaaaaaaaaaaaaaaaactagtcatactggccttacaaaactaaaaactagccatactagtcttacagaaccaaaactagccatactggctttacaaaaccaaaactagccacactcatatttgagcatgaattaaaattgtaattattattattattattattattattattattattattattattattattattattattaatctcttaatttcataaattggatattttttataattgccaaaagcttactcatttggttatttgaaattgtatatatttagtattttgaactcaaatcttgtaaattaaattttattaatatgatcaaactaattttaattacatgaatttcgaatttaaatataattacttaattaaatataattgagg

SEQ ID NO: 396402 - DNA, 629 bp, Cannabis indica
ccatctttttatgccaagagatgacaatggttggccaagcatgcatggtggagtgggttccttgtgaaatcttgactttatggtcaagttctaacctttttatttctaaataattcaagttcttgttagtttccttgtcgaataaggtctctaggatgaaaactcttgtccaagcccataaaccctaggttgggcacacttgggtgtgggtcacataatggttggttagtgttctcatgagttttctagaggtgtcatgtggccctcaaataggatatcttaacttatttgacatttgtaagtcttggtcaaagttgcaaggttgactttttttatttctcaaaaattgggtataacacaaatatttaaatattattatttaatatttaaataaatacatatcttgtttaattaaatttttattaatattatattggtttgaattttaataccgatattctaaatcattatatatgtagggatatgattttgtcccgttattgtacttttacggattgtaatccgtgatgtacagcaaccgttagatgcgggagttatttgatctgacggctgagattgatctaagggtaattagggttaaaaaaatagaaacgtaccctgacactcat

SEQ ID NO: 396403 - DNA, 763 bp, Cannabis indica
aggttgcctctccttagagttctgggaatatattttggttgtctcctaccccttggtttgccagttgcaaggtttgcctcgtgaatctctttctccaaggtcaggttgatttttggaactattctactgtgccgccttgactacgactatttcacgctctagttcggcgttacgccagtttgcttccaccaacggcgtctaagatggcagttttctaactcaacgataggtatgtacctggttgggtcgtaggcgccatcttcatcaacctgattaggacaagatcggccgttgtttatcctaggccctttgagtctgagcccctaaaactgggtattcctagagccagtggccggttctagtgatgaatcaaaagttccctgaagactcagaggctcgttccaagacgatgattgatttcttcatgaggactatcttattcgttgtcaatcattaattttatgttaggagcctttttttgagcttttttcacaaaggctctcaatgaaagcaccaaattgttaacgcagattatcgttaaccaaatttgagcctaatagtgatgagctcacacacaaaaaatataagctgtaaaataaaaagtatgaacactcaggtttttttacgtggtcttgcagtcaaagatctgcatagtccacgagttaatcttattcagatttctgatagtttctcaaggcctttcttttgtatcattttttccgtcccctttttcatcttacctgccactatttataatcacata

SEQ ID NO: 396404 - DNA, 505 bp, Cannabis indica
ctaacttgtatatatatggagcaatatatttatataatcagtaataatttatatctagagtaaatattatatactcacgtgctaatattttgtagttaaattggacgttatcttattatatactataatggtttgtttggtacgctgtataagggtcgtattgtattaaataataaataacactatgtttggataaagcaatgtattgtattaattattacgaccaaaatttttaatacaatgtatgttgtattatttaatgcataacaaatagtctgtattagcttatattataatttttataaaaattcatggtcaacaccaatcttcgatcggaacttgggcccgtggcccgggatgccgaacctggaccccagactcagacctgggacctggacccgaacttgggacccagataatgatgggaaaaattcacccctaatagtggtagtattagggtggaaccagaattcaccgctaattctacttatttatttattttttt

SEQ ID NO: 396405 - DNA, 451 bp, Cannabis indica
ttttattaaaatttttttagactttttaaatttgtaatttattttttcttttttatttttaaatcgtaaaattagtttttttaaaattttttaaaataaattaaaaaaaatattttggtatttatttgtaagtaaatacatgttggcatagaaatctagcaaacaccatctcgttagattgtcaagacaactaatgagttatgtaatgtaaatagagagactcaatgaatttatagcagttcactcctcatgacgcgacggtaatgaagctacgtcaatttcaagtttttattgttcacgagaattacaagagaatttactaaggaaagagctcagatttttagagagagattctctgaccttatggagacttagccgaatgtataaaatgagcttatggagctctcattttataggcaaggaggtccattaaaatattaataaaatatta

SEQ ID NO: 396406 - DNA, 530 bp, Cannabis indica
ggactcgatttacaattaattacgaatcactatggcatataatatttttgaccttcaacacttcagctatcttcaaaccagtaatcaaggcttcatactcagccttattatttgaagtttcaaattaaaatcttgtcacttttaaaggttgaatctttgcatgacacgtgtccgagtggtaaaaaatggtccccattatccagctgcaacacacacgggtgtaatgttacccacaggaccaatcagtcagctctgcattgtatataatttaccccaatagtgggatttaagcagagatcctaggtgggtcatcaggtgaccatcacacatcacttagcctataaataccgctttattttcctgcaaaggagtcaagctaaaaaaacacatagcaaaaactctgctaaaatcatcattgatcttcttcatccatttagaaaagaaattaaggaaaaagagttagggtttctgttggaaatattttaccaggatctagatttactaccatgtatgttttattaacatcctaa

SEQ ID NO: 396407 - DNA, 857 bp, Cannabis indica
taagaatttctaaaaactataaattcgaaaatcccaatttttgcacccaccgaaacactaccaaaatttatccaaatcactccaaacttcacagggcacatatataccataaatattaccatccttacgtaacagaaattaaaatcgagcccttaaatgaaaaacgtcattaacgttcggactaagctttaaaaagttccaaactcaatttctaacccaaaatcacctcagtttcaacaagaaaacatcggaactagtcccatgactacctgagaacaatcctataatgtcagaaccttcatagctattctaattcacaaaacccctatacgaaactaattatttttaaacttaaaatgaaattaaaccaaaccttaagcttttcctcttcaaggatttgctatcctgctactatcgaagcttatatcgctaagttttggagtgacaatcgaagaaaatggatataggaggagaagattttatcgaaggaaggagaacgaagatttcgttcgtcgttcgttctttactactgttatatcttaaaacttaatttatatatatatcaaacgaaactaattcgttttatctaggtgattctagcacgtgcatttgtgcacgtgcttcactctctttgtttcatgttatttatattttaatgagtaatttgtgacataaatatctaactttaactcctagttgtaaataaatacctaaatttaatttttgccggtaataatacctaagttatatttctggaactctataggtacctgaccattatatattaatttattatcaacgtgtcattttcttattggtgtatttaaactattttttttaaataaaaatttaataac

SEQ ID NO: 396408 - DNA, 597 bp, Cannabis indica
cacaacacctccaatttcaagaacaatccacaaaaatcaaaacttttagaaaataagtgaaaagaagaggaggggttcggttttagggctgaaggaaaactagaaaaatccttgaatttcaattaaaattatcttttgttgtaaataaacaaaatatgcaaaattaccaaattgcccttagggccatatttcacatacacaaactttcaagggcaaatgtgtcataaaacttcacatatctatccaaaataaattcagattattcactcataaataaaataccaataaatcatcccataattacatttcgggcccgaacccagttcgacccgaaatacccggttgtgactataccgtgccaacttgtaagaacacacctgaagagacaacacagacatactatataataatataattctattaagcacgtaatgaaattaatttcatcattttaccctttgagggtcataattactatagtgcccctggctcaccaacggggtcttaacacataattaatcaaatgaattctcatatattgaactatataataatataatttctcaattattcataattatctaattagggttttgc

SEQ ID NO: 396409 - DNA, 600 bp, Cannabis indica
agtttggtacccatagcccactgcaaactctactagaatttagaggtaaatttcggatctctatccgaaactatagactttggtacaccatgtaatcttactatctccttgacgtacaaatctgcatactgatccactataaaggttgtcctagcttgtagaaaatgtgtagacttcatgaatcaatctaccacgacgtaaattgaatcaaataaacccgtggttctaggtaatccaaccacaaagtctattgtgacatcttcccatttccactagggtactgacaaaggctgcaacaaacctgccggtctctgatgtttagccttgatctgctaataggttaggcatcgcgatacgaattctaccacattcttcttcattctgctttaccagaagtagggtttaagatcttgatacatcttggtggtgccgggatgcaaggaatatggagtggtatgagcctcttcaagaatttcaattctaagttccgcactacttggaacacaaaccgtgcccttgaataacaacatcccacgatctgacactgtaaaatctctggctttaccagctaaaacctcttctctaattttcactaactct

SEQ ID NO: 396410 - DNA, 928 bp, Cannabis indica
aggcaccaaaatgtgattgaatcttttattttttgtggggattatcctaaatttaacaattaaattaataaatgtcattttttttataaaaaattagcaaaaatgatcattcaattaaaaatttaatgatgaaattacaattataaccttggataataaaccctaactttctaccctattctcatcttcttgtgtccagaccactcgtctctttttttccctcagcaccaagtctagaccatctcgcctctaccagtccgactgccaccccttgagtattaccaccgcagatcgtcaccgcctcttgccagttaccattgcagatcttctacctttgtatttgctacattttcttcagtttatataacatttgtacttttacattcccattataggttattttttaaagattaggaaaaaagttcaatgctatactatattttctatttggtgtgactggattgtgaaggagttgttttcattatattttctatattttctctgttgctattattaagctttgtttcttttagggtttgattggtttgagatttgaaaattgtgttttctaaaagagtgttttggaaacaaaaatttgaattttgtaagtgaaaaattatttttaaaaatgtgattggttgtagtgtaattttgtgtttttgagttttaaaaaattagatttgtgattggttgggaatcccaaaataaaaaagtaagagagtatttgaagagtttttaaattcaatgatttgaaaacatagaaaacataaaattgatgttttcattttttgacttaaaactcaaaatcatattcaaatttagtttttgaaaacaccaaaccaatcaagtatttttatgtggacccccacattttaagtttttaaaaacataaaattgttttcaaattccaaaccaatcaagcccttag

SEQ ID NO: 396411 - DNA, 1003 bp, Cannabis indica
ggaattatggggcattccgaaagcttttgtctacggcgtttcgaggttggagaggatcagataatcaagtcgtacgggaaatgcatgcgagtgagacctatacataaaaaccacaagatcagagcaaaatggctcaagcagtttaatactgccatggacgatgattctgtagcaaaaaccccaactcgtggtgaggtgtctcggtcgacgatggcaatggttgaggggaatcatggtgtgctagggtcgggtccaatgatagtggaggtaattttgagtcaacgtgaggcacggataggatcatcaaatgctattaatggggatcctataattgtggaagatattttaccagctgttgagaataaggaaataaataatgatatcaatgaggaggcttgtcttttggttcttgatacgaataggagaagaatgactttggaagatattgatggggcccatgtgaggggtgatggggcaacgggtcaagaggtaaatggttcaaagaacttgagtttggtgggtactggtgttcaggcccaccaatcattatcttggaatcgccatgggcttgggatcccatggactttacaattccttaaggatcttgtgatccaaaagaagcccagtattgtgtttctctgtgagactatccaatcgttcagatggagagagtgcgtgtgacgttgggatttgatggcatgatagtcgtagatgtcaatggtaggagtggaggtattgcgttgttatggaaaattgaggacaaagtgtctttgcttgggttttctaatgcttatatagatgtgagagttgcttctgaaggtgtgcaggaatggcgtttcactggtgtgtatggggaatcaaataggagtaggcgtgctttcacttggaacttgttacgtactcttgctaatcgttctaatctaccatggtgtgtgatgggtgatcttaacaatgttttatctcatgatgacaaaaggggcggtaataggtaccctgatttttt

SEQ ID NO: 396412 - DNA, 771 bp, Cannabis indica
atctgctcatcatccaaatttaatcaattaatacaattataacacgtatcatacaacatcagttttcgatttattttctttcttaaaataatttgaaataccaaatcaaaattcaaataatttgttcaataatatatgttcttatatattaaagagaagggtaattagattttgacatataccaaatcatgtctcctgaactttttttgtcgttaaaaatttccgacttttgtctaatttcattcaattttattgtctcagtgattgtttatgtactaaaccatactccccaaactttgatatctaccaaatcatgtcccttaaattttgatatgtactaaatcatgttcccctgaacttttattcatgttagaatttttttactaaaattagacaaaagtccttaaatctaacaatctcaatagttcagggaaatttttaacggcaaaaaaaatttagagggcataatttgatacatgtcaaagttcaagaaaaaaaaaaatcttaattagcctaaaaaaaatgccaaaaggcacaatgttaaaatgcactagtagctctaaagtgtcatgtgtaataacttttatatattattactaacaaatggcaaactagtgcgtaagcctaagcaatgctcatatgtagggccgaccctgagggtaggcgggccgtccaaacgctcagggccccgaaattgtgaaaaaaaaaactaattataatataaataagtagttaaataaaaagaaaataataacaaaattagtttggtgt

SEQ ID NO: 396413 - DNA, 744 bp, Cannabis indica
tttttactatttattactcttttgccaccaaactcgttttctcttcatgtgaatgtgaatagagaaacaccttaatctttcacacgccgctttcaaataaaaatctctccatttatttatacaaccatatatttctacacaagggagcaattttgacccaaaatagctggatttttgttttttgtttctataatctgtttttgctaaatgtacaacttttctccatttttattttctattgattacaaataatatatttaaggaaaaaatatctttattatatcaaagcataaagatgaatgtggtatgaatatgaaagtaagtaaacgttaaattatgaacaattatgataaaatgtcacgctttatatacaacacaattagcaattatgaagaattttagcagcacactcatttgaattaattataagaaaacaattaatgctagaaactaataaattgccattcaattctattataaataggacatatcatcacatttttattttgcagcacatcacatatatgttgaaattatatattttaatattagtgtaatctgtatctcacacaataagacgaaatgtatatatattatagggacacgattttatcttgtgatgtatttttataggatgtatttcgtaatgtacaacagccgttagatgggagagttatttaatctgagggctagggttgatctaggggtaattagagttaaaaaatggtaacgtactctgagatc

SEQ ID NO: 396414 - DNA, 718 bp, Cannabis indica
atacactctcaccacacgagggcgtcctcctggaattgaaaagtggcgcaggtcacccgatcattaccaaccacccccataaaactcaaaatttgtttaattactgtgagccactgctcagccttcattacatcaagacctcccaaaaacaatggaggtgcttgcttacggaatctttcatataatggctccatgtggttgccagcaacaggctgttctgctagcaccgcaggagcaacaacggcctgagttttctgaggatgcacggaaggaagaccctgctaccttaatctcttaatttcttcatcttgttggcggattcaatcttgcactttcgcaaacctctgctcccaatccagaggatcttgtggtggatttacaagacgaccaccctgagctctgccacgaccagggccgcgaccacggggattctggggattttgatttgcctgaccgcctccggtctcaaccatattatcctgacttcttatatttcgctgggcattcgttttataggacttaacctgcgaacccataagccaggaaggttacacagcgatcagaaaacttaatactgctcttatggacttaaaggcaacacacttaaaataaataattataatctaatatgcttcctaaaatactttaataatcacatataatactaaataagtacgagcttactgaaccatgaaccaagctttctctgatgaagatt

SEQ ID NO: 396415 - DNA, 904 bp, Cannabis indica
tttttatttaaataatacacatggtttggtagaatggagtatgggatctcaatctgccaccaaaggtgaaagtatttgtttggcgtatgttccatttagctttatctgtagcaacataatttacctcccaaaaagttcgggtacctctttgctattctcggtgtggagaagaagctgaaactcctgcacatgctctatttttctgttttggtttgactcaagtgtggcattggttggggtgtgttcggtgctccgtcaatgtgcatatgggccaatgcaggaaattctcctattactctttgacaagctatctcgtgaggcttttgaagtgatgatgacaacccattggtggttgtggtatgataggaactcaatattatttggcaataagcagtcaagagtggatattattccagacctagccaataactatctggcagagtttaaggagtatgatcgatgaggccttcatttgggcttgggtgctgcaaatccaggggtaaaccgagatacgcgatggatgccacctcctcttggattcattgctctagtgacaaatgcttcggtaatttcgaggagaggctttgttggattgggggagtgatacgggatgcagagggtgtggtttggttggcatggtcatcatgtgtgttaggtgatttttctgctaatgtggcggagctgcttgccatttgcctggacttgattcttgcgcatcaatttggttttaatatctccattattaatagtgattccactttagaaattcgttggattaataagctttacattaattttagttgtcactctattttttataattagctgctgttggtggtggttcttgtagtgccatttcgcgatcagcgaatagtgtgcctatacactagcaacctctgttact

SEQ ID NO: 396416 - DNA, 577 bp, Cannabis indica
tctttcttggggtttcgtctctctgggagtgaaattccaccttttcaggattaggacgccattgatttggaaaaacagaggaatttggcactattcacggtccatctcaatatcctgtgaacaattatatttttatttattaaaaaaattcttcatcggtgtgaacaatttgggcactatgacgaaggaccgaaggccaagcactgagaagatttgacttcgtcgtcagttgccatccgcagttgcgtagatgaatagtggctgaagtggtagtccgcttttcatgcgtgatggtgatttggcgagaatctatcgcttaattagtaactgctttgattattattattattatttttattacttatctaatatatcttgataagattattttatataatcttactatataattgtttttctattttcctaaagctttttaaattaaatattttttaaaataaattattatttatatacattacttttgtcataactagtttttaaaattctgtagaagaaatattgaattgattttttactcattttgatttactcatattattaatttagaaatcat

SEQ ID NO: 396417 - DNA, 570 bp, Cannabis indica
atatgtaatattttaatttttaagtaatttaataattatatatttaaaattttaaaataaacttcgtttttatatttaggaatttccacccatctctaagtatgaaagttaagtaaaaggttattataataggaggttgaaattccatattaataaaattttgctttctttttttataaaaaaggaaaaagaaacgaaaaaactttactggtaaaaatttttcttttaaattttcttttatttcaaaaattcttcttcaattatagaaaatagttcagtttatttattttttaaataatttattgatctataatttttatataaatatggttatttaatagttagtttatacttttttttaaatttaaagttaacagcaagagttaactctcacattaactttcaaaatataaatcaaacaaaacaaaaccatgaataaataactcttatacacgagtacgctactctgaaaaaacttcccagaaggtcacccatcctgaaattgctccaggccaagcacgctaaactgtgaatttctttcgagatgggctaccgaaaaacaagatgcac

SEQ ID NO: 396418 - DNA, 981 bp, Cannabis indica
gggacgttacaacgttttagagtgtgtccatgggccccgagcgtgttagtacgttatgtccatcccattatggcacgatggtaataccatgcattaccgattatatatagttatcattatatgctaatacgacactgagtgagcaacacttaattatgtcagtccacataaaatatctaacattctcccacttggactacataattacacatacatgtgctctcactatacaatagtatcaacagacagaaatctcaagaaccactaatgtctataaaactaattatgcatcatattgtatcgacaggatacaaatataatacataatgagacatctgagatttataaaacatgatgataactattgatctggatccactcgaacatagcactaagactaagactaagtcactggcttgcaccacaagtgtgcagacacaacatatcataaaagttatccagaatatgcatgtattcaacaaccaataataatccttaacatgtctatcatacatgaaaacaatgactcccactgaccaaacacagctttggctccaataatccaaacaagaaatgacttcttagaagacacgttcaggtaagtcgtgtcagtatagtcgttgacatgttgtctgtaagtgcgtgttatgataccaatagaggaccccacaactttctcactgcatatggaacgtcatcatcatattaatggagcaattatacttctcaagttccgcgagaaagatatgattgcaatatttatcacataagttcagtaagttcacaatagagtcacctactcttaacagtgaaacgaaatatcgcaattgtaatgtacaatcaatatcctcgtaacacgccacacattctacctttacaaatgaggatgctgtaaatgtccatacaacacctagtcacatataactttccgtaccattatactttctttgtataaaagaggaagttgtaggtgttcatatg

SEQ ID NO: 396419 - DNA, 762 bp, Cannabis indica
tcgaaataaaataaattattactgtttatgtgtttaatttcgatactttattttataataatttgttttattttctatttccttatgttttttacagggctggccctaggtgagacgaaggaggtggccgccttaaaggcccaagcccccaattccgaaaaaaaaaattaaaatataattagtaataagataaataataataattttaatactaaatatgtgttgtaacctagtggtaatttgattaacttaactattaaaatgttcaaagttcaaatcccaataacctcattttttcattgaaccccaatttttatttttggctcccaaattaagggtcggccctgattttctacaagtaaaaaatatgtcacttttattaacattgtacacacatatacatgtataaaatataagactacaccaaaaaatattaaaagatataatcatgattagaaaaaaaataaattattatcgctcaaatgtgtttggttagcgttatttataattaaatcaacgtttatcattgattttgttgttgatataaatggttacttaaatttattattatcgtgaatacatgaaaaaattgatttggaccgactaaaatgtcttatttttttggtagtctttgtcaagagatttaaatatttttgctgaagttaattctttgcttgctgattttagcaaatattaatttttagaaagtacttgattgttttaagttggagtggacgggatccaatcaaatctaattgaatt

SEQ ID NO: 396420 - DNA, 635 bp, Cannabis indica
tacaatatctatatattttaccatctaaattttctagctcatcaagcattcttcaaaatgctatcattcaaaatgctctgcgttagtcatcgaagctaaattttctacaaggagcacaagtcaaaaaatgtttttgatgcatataattttttatatacattgtaaatgtttagagtacactctaaaatactttacaaattgaaaagtatatataatatcaaaaataaaattcaaatattggaattttattataaatgtaataaactttacagtgaaaaataaaatagggataaaatgcttatattgtacttagggctgagcatgagttgggttagctaggttgagggtattttaatgacccaacccaatgacatcggcctagaaatttttaacccattgacatcttaaattttttctaacccaacccattttttcattaattggttgggttagttcgggttgggttataaccgattaacccctatgtcatatacagtaaaacctctatccaagaatacacttgggaccaagtaaattatattctaattgagaggttataactaaatagagttacactagaaaaaaaaattaaaaaacaaaaaaataatcaacgtaacaataataacaataaataa

SEQ ID NO: 396421 - DNA, 686 bp, Cannabis indica
ctttttcatcaatatgtcatttccaatagaatgtgttccatttttctagcaagttaattatttcatttatttctatttttattattcctttttcatgtctttcttttaattttcatagatgattattccttaatattgaaaggtataaattatacgtgatcagtgtctattttattctagactaacaaaataagacaactaaagtaataaaaatcacaatttggtcctaccattaattagtagaacaaaacaccaaatataaatttctttttcaaaaaagacctttccaaattcaacatcttaacatttttttttaaaaaaaaaaaaaaaaaaaagttgcaaactttattgattcaaatggttttgtaaaagatatatattggatttagaatgattaaatctataaatatttgtataatcgtcttgtaaaataataaatatttttctcatcataaataataatacaatatatcactaaaacaaatagtcactacaaaaaactgctacttctagtgacaactttttagtcacaatataaattttttgtaactaaatatgacttttagtcacaacaaaaagttacttgtgactaaaatatactttttggttataatttgtcactaatttagttttagtcacaatcaatattgtgactaaaaatacatttagtcacaacaaattgtaat

SEQ ID NO: 396422 - DNA, 563 bp, Cannabis indica
cagaattagtgctttgaaggatgctaatggacattgggtaacatgggaaacgggtttggctcaagtggtggataattattttcatggtttatttacttcggctaacacttcttgtaatgagataattgattgtgtttcgaacattgttccggattggatgaatatggaatttggccaaccgatacaagaggaagaagtgaaaaaagctctatttcagatgcacccagacaagagtcccggtcctgatgggatgacccctgctttctatcaaagatgctggccgattgtcaaggaagatgtggttcagtatgttcgtcaattttttgaaaatggtgtgttgaaggatgaatgtagtgaagccaatgtagtccttattcccaagaagaagcatccggaattcattgctgacatgagacctatagctctttgtaatgttttgtataagatcattacaaaggttatggtgaatcgaatgaagccttttatgaattcattgatagcagaaaatcaaagtgcttttattccgggacgattaatctctgataatgttatggtttcttttg

SEQ ID NO: 396423 - DNA, 659 bp, Cannabis indica
ggtgtttcaacacaagagttattaagttgagttcttttacattatcacaatgaattgctttgatattggtagcatattgtgtgtgtataagagtataaaactaagggatatattggtgtgcctcagcttttgtttttaacatgtatacccatcaaaatctactgtggtcatccacaatggttaaaaatatcaaaatccttcaacactttcaatatggaaagagccccaaatatccatgtggatgagatcaaatttagaaatagcaaaaatgttattagaatttaatggcattttctttttgttatttgcattttcaccggaacgacacatggatataaattaatgaaggacatggggttattaagccacctaagtgtcttgccttgcgctccgggaagatagcagcataaaacttacagaataagtccctgcaagagaagccttcccaaaggagaccacaaaagagatgttcgcgaaccagtgacattcttcagtctagaagacataacccctttttattcctgctaagggtatgagtctttctccagggtgcgtcaattcgggttacgcttccaacccacagaagtttggtccgcgcgtgccaggctaggggcccactgaccacaccttttttccatgtacaatgttagagtttgtct

SEQ ID NO: 396424 - DNA, 1273 bp, Cannabis indica
cagtggtggaagattgcaagaaattcttgaagtttgattatgtttcgcttttgtttgttaagcgttctgcgaattgtgccgcacattttgttgcctggcactctatttcccttgctgaacgcatgttttctattaatagtgttcctatggatttgatgtctattcttgagagcgattgctcgacttaataaagaacacttctttctaaaaaaaaaaaaaaacttaccaagcgcccttaaacatctatctatcacatctctatttctttttatacccttggttttttttctcctaaacgcctatctttctcctcccttgttatatataaaaatattaaattggtttgaaatgtaagcttctctaattttagctccgctactctctccacttctagccatagaagagttaaaacttataacctctacatttgtgatttaattcactaaatgatgactctattttgtttctttcttttccgttttttttttttttgaatttatgtttaattttctcattttttaccttcttcatttttttgtactaccccataatatgggagttgatagagctcaaatatccaaaaaagtcagagattctttgaaggcaagaatggtaacaaaattcctatacatatatataaatataagttagggaatcctatatacaaatattgcttctttcaaacaatgtgactttagagtacatttgtcaatcgaatgaaaaagattagtaatatttatgtaatttaatggatgtgacatgaccgaagtttaataaagggtttatttttgtcaaaaaggttaaacatagtgggagttggtaatttgattgtattgagacattactcttgcttaagggctatcaccacagccccacatgggcaatcaatccaccaaaaagagcaatcaaataatgacaaaaagagaaatggacaaccaacacctctcgagcttggcattaattattggggtttggttgatgatggagattaactttgttgtgtttttgttttttaatttctcctcctatataaactttcattacttttacctatatgtgaatttataaaggcatcctttcgaaaagataaaataaaaaataaaaaacgcatacttcatgctacaaattggcaataaaatatgtgtggagttacaaaaaaaaaaaatttaaaaattgagttttgatgcttctagttatatttaaatttcaatatatattattttgttataaatattaataaatatgtggatgtccaaatcttttatttattacc

SEQ ID NO: 396425 - DNA, 633 bp, Cannabis indica
cgcaaatgggttctcgatattctcatcaaacgccttcaattatccgatgatgaccaaggtgttggtaaaataggtagagtggtccgtttgactagaaaagtaacatactctttgaaatattaaatgttggactcaaaattttgtaaagaaaagttaaacattagaaatattaaaagaaaattaaaaggaaaattacacctatttactatttaggctcaacttttgtcaatatagttttttgatttggaatttctagactttttcttgaaccaacctctcaaactcaaagtagtcatatttaaaatcccaaaatcttttttaggaaattacacattttatatattttcatagcaaaaatatacttttctttttaaatatatattttataagaaaaaatttaataaataggctaattagtaattttttccccgaactttgacgtgtactaaatcatgccccctaaatttttttttatggttaaaaattcctcctcaactattaaaattgttgaatttaagaacttttgtctaattttagtacatatcaaagtctagagagtatgttttagtacataaacaatcaccgaaatagtaaaattgaatgaaattagacaaaagtccttaaatttaacaa

SEQ ID NO: 396426 - DNA, 830 bp, Cannabis indica
agatagtgacattacgaaaaagtaaagaaaaaaggaaaaaagtataaaaccgagaagacgaagtctgctctaaacccttgagtgtcatacgtgagataaagatgggtcctcgacagaaaacacgatgaaaataagtaattaaaacgcaaaaaaggaggaatcaaacgcattgtacagaaactcaaaacagaaattcccagacattcaacatccaacccagaaaagcaaatgaacagtaaagcatgctatgtaaccaaacaataaactagtgtacaagatgcgaagaacttacataaagctgaggaactgggtgtcggtgttgatcgctggtaaaaggttgattggcaacgacgaaggaaaatgagtaagaaatctatggtgtttaaggtttcttttctctctggaaaacttgagaaaatttggtgaaatgctgaaagtaaccaaatgaagtaagaaggttggcttttataggccaaagcatgtgtgagacagctgtgatcagccaccatcgaacgactgggaaggcaatcgattcgaattccctggatccaacggttggattaaatcgtcatcaaggcggtggaaacgcttgagtacccgtctgacacccattaatgcgtcgtatcaataaatgtacaagaaatgaatcgacacctgcaaaaagtgaataactgcagtaatgattgtcattaaatacaaggcttgggggtaaatgttgcccctaattttgcccaatatacgtggaccaaccggatgatgacacgtggatggaaagggtttagcatttgaataaaatagctaagtcttcttaaagcgcaggattaccttag

SEQ ID NO: 396427 - DNA, 870 bp, Cannabis indica
tccaaaaagcctccccaacctccacaccgaaccaagtcgtcacctcccaacattcaagtggctccaattccacaagccaaaaacactgccatgtacccttacccgagaacatccctctccttgacacaagcaagaggcttgaagccatgaacctcacctaccaaccgggatttgctaccccttcgggatcaaaagcttcaaggaaaaggaataagcccgattcaaaggacaaattcaaaaggcaaactgaagtggtcaatggagagcttcgtcaccaaatcaaacgctcccgctctgacaacccacaggccactgaaatttcttctggaaacgcaggccttgccactgagcaggcctgcccgccaccatgaagcttgtcagttggaatgcacgagggttagggagtgaccgtgcattccgtaatctctcccgtttagtttctttttgtaatcctactatcttatttattatggaatctaggcttgctaagaatgttgtagacaatttaaagcacaagctccattttgactcgggtttagaaatacctaggattggtagaagtgggggcttgcttttattttggtcaaatgatgtaactatcactttactttctcaatctattagccattttgattgctatgtttcgtgtactgtttccaacgcgtttttccatcttacttgtttttatggttctccgattgactctcttaaggcccacacttggaatatcctgaacagaattggtagggataactctcgggacccgtggcttatcattggggactttaatgcattccttttttcccaggataagcaagggggaaatcctgataggggcccttcctctgacttcagacagctccttgactc

SEQ ID NO: 396428 - DNA, 1846 bp, Cannabis indica
gtcataaggagcaagacgatgtttcactttcccaaacccaggaagatgccttaagggattcaagaaagagagaaagaaagctctctacctcatctatcaagcggtggatgaaaatgcgttcgagaagatctcaaatgcaacgacagccaaagaagtttgagagaagcttcaagttggcaacaaaggaccggagcaagtgaaaaagatccgtcttcaagctcttagaggtgattttgaatctttatttatggaagatactgaattaatttctgattatttcactaaatcattatcaattgtcaatcaattaagaaaaaaatgagaagaaattagtgaagtaaaagttataaaaaaaaattcttcgtactgtgagtccaacctttgagtacattcctacaatcattgaagaaaaaagagatttagaatccatgaatattgagcaactcacgagttctttacaagcctatgaggaaaaacaaaaaaggaaaaagaagcgaaaggagaaaatggagcaattactaaagctcaccttagaagaagaaaattttgacagcagtaaagataaaaaaggaagaggacgtgaccaaggaagtgaacgtggacgtggtcgaggacaatgaagagaaggaagggctggctataataacaataatttcaacaatggagaacgaagtcaaaattcacaagcaccaagagggcgcggaagaggcaactcattgtcaaggagtgacaaatctcacatcaagtgctataattgcaacaagtacagtcattatgcctccgaatatagatcaaggagggtcgaaaaaagagccaattttacagaagacgaaggtggagaagaaggaactttgttgcttgcctgcaaagacaaagatgaaggtcaagaaaataaatggtatcttgacaccggtgccagtaatcacatgtgcggagaaagaagaatgtttgtggagatcaataaaatggtccaaggaaatgtctcttttggagatgaatcaaaaatacccgtggaagagaaaggtaagatttttatgcgcttgaaaaatagaggtcatcaattcttctcaaatgtttactttgtgcccaacatgaaaaataatattttgagtttgggtcagttactaaagaaatgttatgatattcacttagaagaaaataaccttttcttaagagataataaaattaatttaatcgctaaagttcccatgacaaagaatagaatatttctcttgaattttcaacatgatgttccgaagtgtttaaaggcatgctacaatgagtcatcatggctttggcatctacgctttaggcatctcaattttggcgggcttaaactcttagaaaagaaggagatggtgagaggccttccatgcatcaaccaagcaaattaactttgtgaaggatgtttacttggaaactaatcccgaacaagttttctaaaggagtcactattaagagctacaatgccacttgagctcatacacactgatgtttgtggcccaattaaaccaaactcatttggtaagagtaaatacttcctcctcatacacactgatgtacgtacaacataattatcggcaaaactatcatcaatctcaatgtaaagtttgatgaagaagattcttggaattggaacacaaagaagatgagtatgattttcttccttactttgaagaggaagacgtagcggagcaaccaaggatggaagaagaacttcaagagcctactactccaccaatctcgccaactcgaaatatataagaagattcaagtgagagctcaaatgaaaagatgccatgctttagaagcttgcaagaactaggtaactgagaatcaaaatgat

SEQ ID NO: 396429 - DNA, 758 bp, Cannabis indica
atatcggaagctttgttaaaaccaatgagaataatttcaatggggtttggagggaatatctcagggttcgggttcggttcgatatcgagaagccattaaaacggcggatgaagttgcaactaaccggtggtgagtggttttggattaattttcgatatgaatttgtgccgactttttgttttatttgtggtgttataggccacaccgatcaatattgttctaggctctttattcaacccattgcttctatcgtcaaaccgtatggttcattcatgaaggcggtccctcgaagaactcaatacgccatgggagctaagtggctccgatcggcttcaggtggggctgggcagtttgatgcgtcggcttctggtggggggagttatggtgcgtcgacttttggtgttgggggctctggagcgtcgggggttggcctggaaggtgggggtggaggtggaggtgcgacgggggctgtccaacaagactggggcactgatttccagtcgagaggagagaggaatattaatgtccctgattttcgggatgggcagcaagttgttattcctaaaatggtgggtcaaggattgatgcatgggaattgaatagggatttgattggtggcctgttaggttatttttagcctaagttttgggtcacattttatagttatttttcttctttattattgtttttggaatagaattacgcttgttttctttggtttcaggtttcaactcttggaatgtataaattggacaaat

SEQ ID NO: 396430 - DNA, 838 bp, Cannabis indica
caaaaccaggtcgggaaatagaattgcacccagtctcgatcctaaacccaaactcagaaatgggacctgggaccagaaccataaccagaccgagacccatgacagtgatccagatcttgactcgggattcggttaacggggcctggaacagacccgtagtcaatttctagattttggactaagactaggaccagaacctagacgaagaaccaaacccgaacccacacctagacttgggacccaaaattagaacctgaacaagaatcgtcgaaccaggaccctaaaacaagactaggaccgtgaccaggacccggacccaaacctagaaccgagcaaagacctagcctcagacccaaactcagactggaactctggcccggacacggtcatgtacccagaccatacctaacacctggacgtggacctatatctgggaccggatcccaaacacagacttggacctagatagggatctgcatatgaacctggacacggaccaagacccagactaggatcgaaatgctggacctagatctgggccgagatcctgacccagacccaaacttggacccgcactcgggacccgaacttagacctggacccgaacctagacccagaacagggtccacacctggacacaaacccaaacatagactcggacccgaactcaatcccacacctagaatcagacccaaagctagacccagacccggacccaaactcgaacccagaccaggatcagaacaaaggacttagacatcaaattgaattcaaactaaaatcaatattggaacttgggactcggaccgaacctagaccaagacccaggaggcgaacc

SEQ ID NO: 396431 - DNA, 614 bp, Cannabis indica
tcatctttacgaatggatcaagacccggtcgcctcatctcaatccggttcaggcggttggacctttgccccaaggagcaccagggggtgcaaccggagcattggcaccagtcgctccccgaggtgaaactcaacaaattctcggcctgccaccaagacccaagggaagagtggctatgatctccggaggaccccatataaaagggactacccgaaaggaattgaaacgttacgcaggggccgtaaagcacagtgaggtttgggaggttactcaactcccggctaatgatcagcccattacgttcacagaagaggacgctaagacagtacgtttccctcatcatgaccccctggtcatagagactcccatcaccaacaagattgtggccagaatcctgatcgacaatgggagttctgtgaatttattattcaaagaagccttcacggcaataggcctcacgaaccgggatctttcacccagcggttcccaactcacagagttcaatggaacaacacttatcccaatgggaaaagtgaggctcccagtcaccttgtgcccagacacaccccaaagcacctttaagtactgtacatttgtggtggtggactgcccaa

SEQ ID NO: 396432 - DNA, 569 bp, Cannabis indica
gttttcagttggtcgatttttttagcgtcggggcgggtcgggtcttcgggttttccgggtttgcgggtctaaatgtgcagccctactcaatattccctacatcccggaaccactaagatgtatcaggatctcaaaccttacttctggtggagcagaatgaagaagaattaggtagaattcgtatcgaggtgcctaacctgtcagcagatcaaggctgaacatcagagatcggcagggttgttacagcctttaactttacctgagtggaagtgggaagacatcacaatggattttgtggttgggttacctagaaccacaggtttgcttgattctatttgggttgtggtagatcgattcaagaagtctgctcattttctaccagttaaaacaacctattcagtggatcagtaagcagagttgtatgttaaagaaatagtaaggcttcatggggtaccaaaatccatagttttggatagggatcagaagtttacctccaagttttggcaaagtttgcagcgggttatgggaacaaaactgaaatttagtacaacattccatcctcagacaga

SEQ ID NO: 396433 - DNA, 658 bp, Cannabis indica
ccttcaaaccatgaatttgattttccccaccaaacacattcctttgaattttttttgattgagcatatacatatatatgtgctatgatacataaaatgagactataaatagaaaatatacttctttttccaagttcaataatattgtcaccatgaatttgatttcccccaccaggttaaattccaaagggggttgttatgtggcaataaccgtacgtatgggttggaccatttgatgacttggcattatttgattggattatgatatgagagttgcatatccttttgaaatgaagaaaggacacgttctttttggattatcataatatggatacttcagtattggactatgggatatggtgcagagcaccacatgaatcaacatgtgttggattaatttaacatagagctttatatattttaagttaaaggtaaaatatattaattacaccaattacgatatatctatacaaaaaatgagtggccttatctatccacttttttacatataattatagattaataatgctcaagtttataatggaaactgaagatgtgacctcttttgattgaattgattattaaaatacttacgttattttgctcttgcgtttctagcaaataacaataattatatctgatccaattcaattatgtct

SEQ ID NO: 396434 - DNA, 530 bp, Cannabis indica
aacaacaaatagtgaggcatctgtctcgctatagcaaggcatactcatggtacaatttactaatcagcttcaaacatctttcaatgatacccgctgcttcgtcgagccagctatctcaaatagaagctgacattcaaatgatgttgactgttgaagttcactttgtcaccaagaactgcgattgtcaaacagagcgttatgtcttcactcgcagatactacgagatttatattattaacctcggaaagacatgcgaaaagctctagctcgctgccagggttattgttgctatgttcccgacgatataccccaacatgatacactgcatcgtatttaatccacgtcagcattgacccggtaaaagtggataaatcacaactgtgtgattttcaactaataatcgcattaattttacgtgggacgtaatcaaatcccaaaatttcaggggattatcattgtaggatatcaatttgattgtaattaattgcccttctatgtaactataaataggggtaggatacactgaaaaa

SEQ ID NO: 396435 - DNA, 854 bp, Cannabis indica
tcgtaaaagctaaaatcaaactctaaatgttacaatatttcctatagtagcacatatatgaaatattataaaaataactcaaattttatattacataatttctgtactttgaaaaaattcaactgattcaaaaatgctttctaggtatcaattgttcgtattgtatggcttttcagattaactttccatgtcctcaatttgtcaatccaattccttgaagtactcatttttctaaggtgatatctcaaccaagtaatattggagtgttttgtttcaagtttttctattgaaatttgttttcttgtgattcttgcgttactttctagtttatgttcttagacggtgtttgtttcactaattatgtttgttttattgattagtgtctgtaattcccttttatgtgaagtggaagatgatattagagagcataattgtgtctctatattgtctcatgtgattttctttgcctatagctctaagatgtaaattagagataattttagtggttgtggttgttttgagtttacatgtgtacaattagtctgttggctaattcctatttcaatttcagtgggagtaattagtgaatacagtgtattttaattctctctttatttgtatttttatcttcttccttaattcaatttatttttttctaggtaactctttttataactagccattataatatgtgcaattattatacatatataaaatctttttattttttattttttttattttctatgtaaaggctattcttacatctatatatacataccatgtttcaacttttttcaaataacacaaatttattatctttatatattaaaagtgtctatctaacggcattt

SEQ ID NO: 396436 - DNA, 798 bp, Cannabis indica
acataatcagcaaaccaaggtacagtagaattcaagagaaagagttgttcatcgggaaattgttcatttatttgtacctctttcgtattctgactttcttccagctctagtcttgacaagtgatctgctaccagattctcagtacccttcttatcttttatttctagatcaaattcttgcaaaagaagaacccatcgaattagtcttggtttggcatccttcttagtcatcaagtacttgattgctgaatgatctgtatacactatcactttattgccaatcaagtagggtcgaaatttgtcacatgcaaacactatagccagcatctctttttctgtagtagcgtaattcagttgggcatcattcaaggttttgcttgcatagtaaatagttctgaataccttgtcaacccgttgtcccaacactgctccaatcgcataatcacttgcatcacacatgatttcaaaaggtaattcccagtttggtgtagtcacgatcggtgctgagattaacttatccttgagaatctggaatgcttcaagacaatctttcccaaattcaaaaggtactccactagcgagaagattagatagaggtttggcaactttggagaagtctttgataaatcttctgtagaacccggcatgacccaaaaagcttcgaactcccttaactgaaactggaggaggcaagttctcaattgtagatactttggctctgtcaacctcataccttctttcgagattttatgtcccagcactattccttccgtaaccatgaaatggcatttttcccagt

SEQ ID NO: 396437 - DNA, 1268 bp, Cannabis indica
ccttgttcaacgagtacttatggctgcttacccgcctcttacaacgcatgactatcaagttcaaaatcctgtactcagtaagagctttctctctgtggtcaataggcagccctcatcaaccactccttctgcatccaaggtcagtaaagccaagtctcctatgttcaaagagctttcggattccagctggcaggtacaaatgttctctgagtttcaaacctttctcaaacgatataagaaggatcaaaagcgccagcttgcatttgaggcctccatgtataaaatggttcgcactatcaagtctactcttttgcaccattattctggggattatgtgcctccatctattgacatttctctgcctgagtttcatagagattcgtttggagcatcctctgatgcatctgcaagtaacgcacatgtgcagggggaaccatctgtatttgcccctgtcaccagtctagcccaaccgaatatgcatcctacaactgtctcgtctccagtaaccacaacaacacccttggtgtcgactgggccaccttccgtagggggagtctggcaaagaacaggatcaagcaactcatattcaatgaaggggagatgtttgtacttatgttttttttgatatatggttttatgggttgctttgtttataattctaaagacattttttttggtgcattaattctgtgattactgtgtgtcttttgaggtctttagtctttattttttttgagtcattgaacataatctgtcaagggggagaatgtaagtgtcgttattttgtgacagattattttaatagaatgtctagtcatgtctggatttttagtctgttatatctgcacacttgcgtactgttaaggtggtatgagtctgttatgacttatcgttaggtgttagttagtgccaggtggactgttctgttgggtataaatagtcggtttcattctataaatagattatccataaaaatcgatattgtgggttagttcagtttcatcgtgtgtgttagtattgtttcttgctgttcttgttgttgtttctacaagtctgattgtatagcttgaagatggtcatctatggcagaacgatcagagcctgaagttgctgagttcagcttgaagggagttcagtgtcaacttcgtcatcagatctgaaaggatttcaggttgaagaagtgtcgaagacgaactcagttgctgcacaagggattgtgtacttgcaatcaagattcttaattgttgttggtaattcattactaattg

SEQ ID NO: 396438 - DNA, 834 bp, Cannabis indica
aaatattatgtacaatgcgtaatttcctatttaaaatattatgcattagggaaatatatttacacccaaatttttaaagcacttcattttaataatttaatttaatataaaatttatattttagttatactaaattttttcaactttttcttccaattcataaacttaaaaaatatatctatcaaataaaattaaattatattttaaatattatgacaaaaaattaaaataaaatttttatgaaatttcttagtaaaaattaaaaaaatatatatatatatatatatatacatgagttagaaaaaaatatgaaaatgaaataaaaataagtattgaaattaatataaaataatgtgagaaaaaaaatttaaaaaaacatatcaagcgtaatttttaaaaactatttaagtttatagtttttttttaataatagggtgtatttataatttagtagggtgcaaataaaagtctccattgatacagaagattataagaattaatgtccaaaatatttattatcaaatgagcggagcagcatatttttgcaatatattaatttgtttttcatttgaaaattataatcgacacaaataattttctcactctctaaaaaacgaatcaaaacaaaacaacttacccttctctttttatcattaggaaattttccatagaaattgtgcatgcagggaaaggaagacaaaaaaaaaaggggggggaataattttataagataattacataagacactatttttattgtaaaaaaaaaaatacatttttatgttaattttttttctttgatattttacggttttctataaaaacaacataaaaa

SEQ ID NO: 396439 - DNA, 716 bp, Cannabis indica
ttatcaggatttgtggcgcggttattgtgggtgggaatatagcagtccagctcgcccaggtacccgtcctggtcgagagtttggaggcgtgcctccgaaatcttggacggaggacttaccaacctggcgcccaaggcaccctgcctcttatgaggaaccgcctcagttagctcctcactgcgtagtccacgccctcaaccagggcatctacgtcagcatcgattggctgcccagcctcattgtactccccaaagtcatggggtccaacctcttcctctccctccgcagcgagaggactgcccggacgcacctcgtctagctcctcaacctcctggacttcagcgtccccctcacggtcctcctccatcgggaccgccaaatcctgttcggcgtcgggcagagtggcgagctgagcaacttgaggatcagaagcgtcagccagacgtgtggttttcttcgtacgagccatcatcctatggctgagtacgggatcagaggaatttcattcgctagaaggaggacgagcaagaagaaaaggatgagcctcgtgcagaagttgaagcaaatcctagtggatctgatgctcgagctcccaagactcacctgggttcatctacaaaagacaacacacaagatgagtgttggacgaagtatcaaacgaaaaacaagcaaatatgccgaccaggagtactcaacagattaaagaacgactatgt

SEQ ID NO: 396440 - DNA, 528 bp, Cannabis indica
caaaaaaaaaaaatagagaatcattaaaaaaaatgggactaaaaagctctccaaaatatcaaaacaaataataggtttaccaaaatactcctttcgtggtgtactacatattttctctaagtttttttattttatattattttatttaaataagtacaggttaagaacttagtagtagtatatatcgtaaaaagtatctacggtgtaacccttaaaaaaggtgcaccaatagaccctttactgctttaaaatttagaaatattctttaactgtgtttttcataattgttcatattatagttattaaagatatattacaaaagtttaaaaaataaaaaaaattaagaaaaaagaaaacaaagtttaaaaatctataatacccattttaaagatttatccttaccctcttatttccaatataataataaaatatgttgtaatttgtactataattaagaagtaaaatttacattatataaaattttgttacaattttttataaaataaaaattaagcaaacaaaaatata

SEQ ID NO: 396441 - DNA, 517 bp, Cannabis indica
caagattgttactatgatcccacgcattattctgtaatatattatttataataattataaatattattatactaatttttaaaaaagctcatataatactatagataaataatacactgtttttttaaaagcatgcacatccatgtacagctacattgatcgtccgatgaacatgaattaaggatactcttaaaaatttagattacaaacttgtcaaatcttccaatagtaattcaagatcattgaaaataaatgtctattataaaaagcagacataattgttaggcaatacgtttcatttacatgagcagtaaagcataaaaaagaatttaattctaagttggacccaactctcatggtctagcttggccagaacatgtacaagtcatccttgaagctatcaaactcatggttgacccgacactgctttaaacttgcctgcaccatagagaacctgtgagccaaggcctaacaagacataaaataatacaatatgaacaattgtaataatataatt

SEQ ID NO: 396442 - DNA, 722 bp, Cannabis indica
cccgttgagtttcaaaactcaacgccaattctaacattaccattaaatccaatccaagaaggtgggacatcagactaggcctataataagagccaaatatttatatgggcttcactctatttactacatgtataaaaactactatcttacacatgtataaaaaatagataatatagacattattttttttaaaaaattacatttttacatttacagaattttttttatatttttacagttttttataaaaacaacacgaaaacaacaaaaaaactacataaaagtaacatgaaaataacatctaaataacattaaaacaacaacaaaaaataatatgcagataacaacaaattaacaagagtacaacataaaacgaccgtattttccgttaataaaataaaaaaaatcttaaaaatgtttaaaattctgtgaaatcgtatttttgtaatttttttgttgtttttgtgtatttgtgaaataatccctaaaaaatgagaaaattatactacatacctcttttaaattagtacctttaattttgagtctttgaccccttctttcaaaatctattatgtttaccacttttttcaatcattctaccaattttattcctatcattttacaatagtcttcatttttctttaactaaaattttgcctcaatttttttacaaacttactcattcgtctctaaagaacgcaatttattatgtttgaaattgt

SEQ ID NO: 396443 - DNA, 970 bp, Cannabis indica
agtttgttggaaccccgttaatagccaattggggtaaggacgtccacctctcttgtcttcttgacgaacaatattattgatatctccaataacacaccaagggagtgaagaccggtctttgaggctttcaagcaaagcccaagattcacttcttctattacgatttggttctccataaaaaccagtaagacgccaatccggagttgtagaagatattgatatttgaatatcaatgtgattattagagtaacccaacaaagtgccatcatccttatttttccaaagcaaagccatcccacccgaagccccaatagttcaaccacaaagaccccttcaaaatgtaaagaatgggccaagcccaccacttttgacttatgacacttagtttcacacaaaaagataaaatcgggtctcttctgaaacacaagttccttaaggaattgaatagtccgttggttcccaagcccccggcaattccagctcaacacattcataattcttggcgggcctggataccagcacccgcctcgagcatgttttttgaaaccatatcatgagttgtagtatcattgtcaaccaaattagaaatatccatatttttgactccttgactatgactaaaccccacacggcccaactcattgtcatgagtttcagcaagcccaacctccttttccaagcccattctccttcttttattatcaataaaagtcaatcctggattcaaatctatcccagttggcgccacaacctcattctcatcattcttccttaaatcatgggatttttccaacacaacattaatattgacagaacgtgaatcatgggacattaatggagatacctgattcgtggctctcccttgattctctcggcgtgatgggatttgattgctccggtcaccacctcgcgaactgcttgctccgggggagttcttgactgccagacccgacttcaaccaccgtgaacc

SEQ ID NO: 396444 - DNA, 574 bp, Cannabis indica
aagtttggaacattttaacgtaattaaggtttttgttttacaacaagtaattaaggtttttgtttggtatctctagcaactttctggaacatgaaaaagttggagtaatatttttattgatggtaatttaaagaaattgattggtatttatgagggtgataattacaagtgatatttttattgacttaattaacactaattacccaagtgatgtgacattaatcatctttgcccattgactatatgtatggagaggcttttgtaatacgttggtttacgtagtcagaaatttttggatgctaaaccctatattttatttcaaaactcaaactggaaaatttggacaaccattaattataataagatttcaacatatatagcaaaattcaaaattttctctttcccccttaaaaagataaaaaaagtttctaattttcttctcttccaatattgcaattatatatatatatatataaaaaaaaaaaactacaacaacactgaaacaacacaaaaacaaatgaagcaaatataactacttaaaaaaatataaaagaaacacacacctcaaaactct

SEQ ID NO: 396445 - DNA, 663 bp, Cannabis indica
gttatcttactagtttttttttttttgaaaaattctctaaactactctttcattttgttattcactattctatcataaaattctgtttaggtcgctctccgcactgcaactatcatcgaattttatctgctttcaagaaactcagagagacatttcttagtgtttggacaaccattgttgactccggttctaatgactatcttttgtttattgaaaaaaaaagagaaaaataaaataaatcttttataattttaatgtttattttaaatgaaaaaagaaaaaaagattttttagtttgttttgtaattttatattaatttttagattttgatttttaaattattttatggtaattaaataattaaatgacgtggaccagtaaaaatcgaccatgtgtatattgtgtttacatcatcaatacaatttggtatttaacaacaacatactaaaagaatagtgaataacaaagcagaatgtgaatttggagagttttaccactgaaaaatgagtttgtggaattaaatgtaacataatgaataattcaagtatttttgttttgccaccaaatatcccatataattatttagttaatactaatttcatgttatcttatatattttttaatgggaaatttacatggtatactaacttttgacatttttt

SEQ ID NO: 396446 - DNA, 545 bp, Cannabis indica
ggaacgattctcattcgacaaaatctctggttcggacgtgcgtatattcgtatacaacaacaacagtaacgatattaataataataaagaaatgataataataataataataacaacgttaataataataataataataataataataatatttataataatataataatatacccatataataatatccagatatatatgtttattaggcattatgcacatgcattatgcacatgccaataatatcaaatattatatcatcataaaaatttcatacatatttaaacccataaatatgtaaaataataaaaatactctccgctaaaaattacaaaaatatcctttctgaactagcggttattacaggaatcatcacctttttgtctccgggagacccgagcaatgtctttacgcagtatggagagctcatccattattccttcgttcagcgttctcgtggagatgggtagctcatgttttttctggtctaggtgatcccaaaggtcaccgtgttttccgttaatctgatgtctcagatcgacggg

SEQ ID NO: 396447 - DNA, 1423 bp, Cannabis indica
taaataattactattttgccaattgaaaatagattttttcgaacaaaattatactattctttatcccttcccttaacagtatatcaaggtggcgatttagtgaccacatacctataattttaagcttcaataagctagattatttattgagcctcatcaactaaataatcatgtgtattaattctatgattactccactataaatatgaaattgaactcttagtaattataaaattatatttactgagttttactacagtgtccattgatatattcaattcaagtgattagccctccatgtattggttcgtaattagttttgatcaaattaccgttttacctttctaattacttctttatcattagtggaagtataatttagatcacatctaaagtttgtgcaaacctttctagttctagaattaacacttaaagggaatcaacatttgatccattaagaaagtcaggattctagaattgtagatcatgtttccagtcatccacattattagattcccaaaacagaagttgtaagaatcatcttctctgagaaactttaacgagtgaattaaagaaactgataacacgaacatgagttcatgattactcaagatttaggccgatctacaattaatcatcagtatgatatatattactttatagtaaacgacatgttaggtaaagaaagttttgttcatatcggtcctggtccttgtcatatataatctctattatatacaacacattcactttgttgtcatactacatcggtaatccaaaccgagattacttgcaccaaagaacgggcattaatgaatcatactagcaaccattgattaaaaatttaataactttaataagttactcagtgttttatctaaatgattttagttctctgtacatctacaagtcacgacctcacatatgaataaggaattttttttgatatttatttacaaattactcaataataaatatcaataatttaacattcatgcatatatcataatgttcaactttttattaataatcaaaaatatctttatagacttttcaaggcataaaccctaatagtatcttccaaacttatttagctaacatagcttggttaaaattgataaggaatctaaaacccaggacccctaaaaatttagacttacacaaagaagaccaagtttttcaatacaccttagactttcctttctataaaattccacaaaaaattagcaataagaacttcaattttttgacatgtattggcaggtagccaaaagcaagacatggcataagattcataatatttatagttcaccaaattatacatgggaaatttgaatttatatgcatacatatggtgtacattaaatttttgaacacacgtttactaaaattaaaaaaatagacacactttatatttataccc

SEQ ID NO: 396448 - DNA, 506 bp, Cannabis indica
cgggagctatctttgtacagggggcggtctccagtaatgcgtattttgcctagtagcaaaatacacacgttcttgggagtccgttaactcagtgtactgggctggggagtatacccccttttttgtcgcttatcctccgttcgggtgctgactttggaggatcttttactcctcgagccctgggagggaccagctaaactagctatcagagcaaagtgcgaggggacctgtccattatccttgagggatttccaaaaagggacgatttgggggccagggcctggcgttggctatatccgggagtagcagaaaactgtacgccgctcatcggtggagctgctgctagcacagtgcctcagagctggactccgggcacatatccatctaccccggtggcatagtatcctccataggccactatttgggcctcttcaagattaatgtatttctggactctcttcttgaagtcttgaaggtttgaagctccttcttattgtagctcgttc

SEQ ID NO: 396449 - DNA, 810 bp, Cannabis indica
cctcctcacgttgatcgagtacgagctcttgtgtgtcccgagctgacacttacctcgtcacgtaccagccttctttcttgagtatgggttattgcatgccccctactggggtttgtatgtgccccttctttgttggttcgagaaggacgttgacgatgtctcggtggcaacccacctgtcctaggttgagtcccaggatttcccttgttctcatgagggatttcctgttccctagtctcgggtcgcgttctattctcatttctttgagaagtctctggttgattatttggttgttcattttcagaaggatcctcagtttccccaggttgttcttcctgagcgttttgagggtccacctgagccgtctcctacctcctggtttgtgagctgtgaggtctgccttatggtctcctcactgtaggattaggttagttttgtgtgttattttcctgtgccgccctggctgcaactgcctcccgttccaactcagcatttcatcgatttgcctcctccaaacgacgcctgagatgacgattttccaactcgacaatcgatatgtatctcgtgggatcataggcatcatcatccatgagttgagcaccaccaacacctgtgttgggtaccttattccctatttttgggttttggccactttcacgttgggtccttcttgaacgtgtgggccgtgtagattctgggtttggccaccttcatgctgagtctttcttgaacgcgtggaccatgttgtccgtgaattgggaggcctccgtaagcccattggctcttttccaggacggtgagtagtctctt

SEQ ID NO: 396450 - DNA, 506 bp, Cannabis indica
cgagaacgggctttgacaggattcgaggcttggccatgtgctcttatagttttttgaatgcctcctcgcactcgtcagaccattcaaatttctaacacttcttcaagatgttgaagaaggttatctgtggactgggagataaaacggctcacgacagcaacctttccggttaggctctacacatctttgtgtttctttggggatggcatgctcaggagagcttgaattttttctggatttgcctcaatccctctctgactgacaatgaagcctagaaacttccctgacttaacactgaaagtgcacttcttcgagtggagcttcattccgtatctccggacaacttcaaaacattcttctaagtcgtccgcgtggctagtgcacgcctttgacttgactagcatgtcatccacgtatacctccatattccgccccaagaggcctttgaacatctggttcaccattctttgataagttgcaccagcatttttctgtccgaaaggcat

SEQ ID NO: 396451 - DNA, 757 bp, Cannabis indica
gtgtaaaagagaatgcaatatagtgtgtcattagcattcctctatttacaatatcttttattaaaatattattttacttttttaatggattgtaattgtaacgaggattacattagttttggcatgtaatcatcattacaaatacaatactcaatgtaataattcttacattgtaatggattataaaagttaaaataaaaaaacaaacaatatacgtaataggcatttattaccattaagatgaccgttacagtcaaccaaatatcacctacctacaaactctccaccattatcatagcccttattaaatattggttgaacatgttgaagatgaatgatttggtagctcaaattcttagtgtgactttggttggtgtcatttatgacatttggttaaatcataacttgtgtaattttaaacatagatgtttaactcccgttttcagaatatcaaattgagaataagttgtaaatgaaaagaactacataaagaaagatatatatgtgatgaattttgtaaagggcttgtagtgagggatcttctttcctattgggataaattgttttggttgtaattagcttgattaatgaaatttcatttcttgataaaaaaaaaataatagttaacaaaaatataggatttttttttctttctttctatagctttattatttgaaagttgttgaaaaactgagtttttgcaaatatcaatatatattacaaaaatataaaactgtatatgtctgcagcagcagaa

SEQ ID NO: 396452 - DNA, 880 bp, Cannabis indica
tgcaaacagccatgataatagaagaacatcatttatgatccattggtctttttctaaaattttcctcttattttattgatcccaaataaagaattgggtttcagggcggtgtcgatctcttgaaatgataaacatgaattatttttgtaactattgttttctattattaaataatagtaataagattaattattgagagtattaaagtggtagtttttgtaaataaaaggtgcgaattgatcattatctaaaacagagggtactaagtgtgtattttaataaagagtaatttgaggcaataatacttatgtttatcttctaattttttttagcggtaaaaatactttctgttaaattttgttgcgtctataggtacttgattgttaagtgtcatgtcaccatccacatgtcattctttgattggtcaacatcatttaatttatattttgtttttaaaaattaatttaaatattttaaaattattttaaaattaaaaaagttatttaaaaaatcttttaaatttataaaaaattcaacataatttattaaaaaagagcataattacaataaagttaaacatgacttatcaaacatactttaatattcatttaacttcatccattatctcaataaaacaaaataaaaaatcatcggcaatttgaattcttttttgaacctagaaaatttctaagcaaaactctatgaaatccatcttcaatcctcttccctaactctttccaacatgaaagtaagaaaaaaaaaaaataaaaaaaatgaaagaacacaaacccatctcttcctcctttatcaaactccaacacagaaacctaagaacaaacacctagagaaattttttgggttcaaaatagcattcagatct

SEQ ID NO: 396453 - DNA, 715 bp, Cannabis indica
gcctcaggcaaatggacaagtggtagctattaataataccttaaatgatactatcaagaagaagttagacgctgccaaaggcaggtgggtcgacgagctacctcaagtactctgggctcacagaattaccgagaagatggcaatgggacacactcccttctcgctagcatttggcttgaaagcaatgctgcctgtggaagtgaacatatcgactcacagacgagagttttatattcaaaaagaaaaccaagaacttctaaaattatccttgtatctacttgatgaaaaacaaactgagtcgcaagtcactaatgcagcgtaccaataccgagttacaagatatttcaacaagaaagttaagaaaagactattcaatgttggagacttggtgctaaggcaggtatttgcaaacaagagggatgcatccacaggagtgttcaacccgaactgggagggtccatatgtaatcgaagcagtagttggaattggagtttacaaattggctcgtctcaatggctcgctaataaagaactactagaacgtggaatatttatgaccgtactagcaataaataaatgatgtaactcacattactgatgtaatatttaaacttcagttatgaataaagagaatcatttctattatttaagtaattataaagttttactctttaaaattacttaaggggcatttgtgtatgattaaccagaattca

SEQ ID NO: 396454 - DNA, 1391 bp, Cannabis indica
tatttttttttatttagaaaaaaggtcaccaaatattttctcataaaccaagaattctgttatatagctacattttatatagaatatatatatatataaatatatatatatatatatactaggagaaaactacatgcaaggcacgcagtgatggccctgggcataggcgggctaggcccgcacctagagcccactcattttaggggcccaaatcaaaaaattgtcttttaaaaaatatacatatttttttaataatttttaaaaatactatttatctttatagtaaggaaaaaaatgacctataacccatttcaactcagggccagccctgaaggcacgtatacttattgtttttgctttctattatttactttatttaattgctttatcttgacttatggtcgttggctagaagcggggacaacaattatatttatagggattcattaggtttagcgttaaaaagatacaatggcttaaaatggactctcatggccaaaccctataagaaagcccatgatttagacttttgccattattttgcttctttaatgaaacaaacttgtctttcttcagtaatgttatttttctgctttagttatttaaatactaattctatctatttaacaattataaataattatcaaataaaattactatttaaatatatttattaacctttcaatgtctcttaattaataaataaaccttgaattctcttttcttctcaattctaccattccttggtaaaatttacaaataacagatagtctttatttagaatcctaattgattaaatatatcaattaactgagactacaaaataatattatcccagttagtgcaggtaccatggcctatgtaaccaagcttccaataaataaattcaaaatttactaagtaaatttcttaacttattaattcatcctgactccactatagattaagaattacactcatgattacatagaatgctctttataccaaatatagatacgctatgaattatccattacttcaatccaaataatcaaagatcctttatagatgatctacatcgagtatggacaaattaccgttctactcttcaatgtattttaaccttaaaatacttagctacttgtaaatattatttcagtaaactaatataattactgaaatgagcagtctattatttatcgcattaagccaagctcgaaggaaatcattgtttcacttctaatggttataaaagctatagattccatatctatgattagcgctcccactcaattacactatcatattcccaagatgtaagtatattgctgatccaattggtcagctttaacgaacaagtcaaagaatataaataatatatttaagccggaacctaaccatctcaggataaa

SEQ ID NO: 396455 - DNA, 807 bp, Cannabis indica
attaaatatgatgaatgttaattacactctcgtattacaatctcttagttaactttcacgtccaaattatatgttcgaattattttcttcaattttttttcgtatttcgttatagttacagtatcaattcctagtaaaattttgaaaaatttcgaataatttacagtaccgaaaacagagttcctgatattccagtttatcacgcgtgtactaaaaattttaacgtattttcggcattgtaaactattcgaaatttttcaaaaatttacagggatgatgttgtaagcgtaacaaacactcccgtgaaaaaaaattaaaaataataaaattcagcaataaaaagatttaatcaaagatagcaaattagagaaaagaatcatgttgatttaattacccaattgttaatgctaattactactctctttcttaatgtgaatgacagattataataattagggatgttcatccgatccaatccgcacttttttggtcaaacaacatccaaccgcactaagcgcggattttattttttggatccaatccaatccgtacaatagctcaaatccaatccaatccaatccgcaaaagtatcggattggatcggttactttggattggttactttttaatattaaattatttaatatttatgaaaaaaaaatattttttttcacataactagcagcaaaataaaacaaattatagttattttatgtctacaacaacacattaaataaataaaataacaaataacaaattcaaaggaagaaaagaaaattgtatatataaaaaaatatttaattttat

SEQ ID NO: 396456 - DNA, 590 bp, Cannabis indica
cattaattggtctttattgctatgcaacatacataaattgaatcaataagcctatactacactaatttagcttctagatgtcaagtggctacccctgcttgcctactgaagcagaggccactattgaagaacagtgggagaccacgcccaagaagtgtcgtgggtgctagagctttttgtactctaatgttgaatagatagaaccactactttggagtagagttttgtaagctggttattggtagtatttgcaaaggtgttctccattccagtatcttagtaggagaacgagctccatgttctcattgtaccttcccagcttgtaggctcccatactagttatttctgtaacttgataagggccttctcagttaggtccaaaaactcttgttgatgaatctttagtgtataggaatgaacactctttagagcaccatgtctcatatgaagaattttctgctcttgacgtgtttgttgaagtgccttgctaccttttgctggtagggctgcaactttaggttggtttgttctcttctttcttctacttcgtcaagggactctgccagtagggtgttgtttgtttgttggtc

SEQ ID NO: 396457 - DNA, 516 bp, Cannabis indica
ctatctatatcctcaatcttcccaatatctatactatgtattgtgttatgggcacttcatggtaacaatgctgggtagttggataccttaaggtgtctaatgctctttaccacgtaaacactttatttattagtgcttagggcggagcataacattcagaaaattgaaaaaattgttcaaaccgatctatcgaacactattaaaatcgaaaccaaaaatcgaaaacactgctcacggttaaaaccgtcaatgaacgatcaattttttttgagtaataaaccgaccgttatacatatatattaatttattaagtttttttttgcttaatgtattgtagttactaataatataataatatattattattttattaatattaaaattaaaagaataagataattagtttttaaataattaatgtatatgtttgtagttgtaaaatgtagaataatatgtttatagaataaattggatcatattttaaagaaaaaaaagttcggtttgggcggtttaaac

SEQ ID NO: 396458 - DNA, 998 bp, Cannabis indica
tgtgtttcttcggacagacactgtaccaatgcacgtgttgatcgagtgacactttgttttgtgcgcgcacgtgggtgtcaccacccctaagatatttttgattttttcaaaaattcataactaattcaaataaaatcgaaatttagttcttgtaaaaaagtgaattgcttaattttttccatactatccaataaaaataattccagaataaaattccaattattttacgtaaaaatttctcaaacaacaatcaattatgaataaacgtggatcaacatgaatcacatccaaataacacatatatcgttttaaatccatatttcttgaaaataaatcaattaccatggctctgagaccagttgttggaatatcttttactaagatctagatttactaacaagtatgtttttaacatcctaaatataaatttctaaaatgatgaaaataaaaacaaaaaggtatgagaaaccttacattggttagatcataattaaatgactccttccgctcagatctctaacctttgtatcctttttgtcccagggtttcaccaatatctgagcaagaaactccttcagttgtttggattcttcacagtctcacacactacgattgaggactaactttttatgggtgggcatgcactcaatcaccaaaggctatattttttttgtgaagaaggttaaagatttcgaattagaataagagaaaagaagaagaagaagtctcaaactcactagttgtcaaacaagaagaaaactaggccaagagtctttataagcattagttggataatgagactttcttttctttttatactaattcacttagggttaggattgatttatttggaataaaaaatgataaaataatggcaaaaataacaccttatggccggccatggagagggcccaacactagttagatttttgccatttttctcaaccatttatctatttttcacaaataccactttttgcaatttcaatcctataaat

SEQ ID NO: 396459 - DNA, 579 bp, Cannabis indica
attgtgctaatttattggtaatagctaatgtaatttaacttttttagaaccagtgctatgattattgcgacaacaaggggtacaatttcaaaattaaactcgctatattgagacaactagtcgtcgcaatatgttcaaaaattggttttttttaaaaaaaaattcactatctttttagagacgagtagtcgtcgttacatataacactattgcgacaaaggccaaagtcgctgcaatatagcagctacaggcacgaggttattgcgacgattttattgcgacaatatatcgttgcaatgactctattgcaacgaatttaaatcctgttgcgacgaatattgttgtcgcaatagacccattttcttgtagtgtgttacccgaacatacgaccttataataaacacaaattagaattcatatctgctccttgtacctttcttggttaagactctcactacagacacccctacactatgcatgatcttgttcagccccctcccatccacaatgctgaaaataacaatgctgaaattgaccaaaatgctttacatgacatctctcctactacagatccttgca

SEQ ID NO: 396460 - DNA, 862 bp, Cannabis indica
tcttgccttatttgacatttatgggccttgatcaaagtcacaaggttgactttagtatcttcaaggtactcttggcatgtgggccctagtgcaagagtagcctattttttttttttttgcgaaaattgagtataacattattaattaaataaattatgtaataatatatacaattcaataattaaaagataattaattaatttaatttaaactattttaaccaataaaataatcaaataaaattaacatgagcctttatatctcaccctacacgtgtgggccatagattaaggtaaaaaattgacttctcaattttgccataaataaaacttattatttattttgtcaataaataataattaattaattgtcacgaatctcttatttcacaaggattaaaataaatattattttctctaaaataatatatttatctctttaatactattaataataatgttatatttaactaaggaatataattttatctaataaaactaaatagttaaacactattaattataaaattcataattaacgtaattaatcaaaataataatttcacaaataactattttgcccttaagaatttgtttcctatagaaaataattctcacttgaaattcactcatcaaataaacttttctatgtgcagtgttgtatagaggtgacttggggactatggacctatattttgaagctctaataaatacttaattattatcgatctcatcaataaaataattcaatttattaattctattattactccactataaatatgaaattacaatctttgataatatagaattatatttacaaaattcttacttataatccattgatataatcaatataaata

SEQ ID NO: 396461 - DNA, 475 bp, Cannabis indica
aggatacgaactttattaacatgaatttcagaaaaccagattgaaaatattacattcgagatcaggggcagaaagaaaaaaatgaataaattaaaaatccaacgtgacggagaaatgggctctgaacagagacattaccaaggggatttttatgtcagacggacgaagaaacctttagcggagatgggtgttcgagatggagagagcttccccaccacgaatgggtgctgtggacagagagagcttcggtccggtgtcgtaaatgatgcattggacagagaaagcttccgcgtcagggatggtagctttggagtggagctcggggagttaaaagagcatctccaacacgagctcaccaaatttggtgtcatactatcactaaatttggtgtaaaaaactattttcactacaaagagaagcacattcgggctcagatattgataatactttgcgagagaaaggatacaagggttag

SEQ ID NO: 396462 - DNA, 1104 bp, Cannabis indica
tttatgcggattcactggggacaatgttgctagccaaggaataattgaactcccattgactataggcgagtcgcctttatccacgactataatgtaaaattttctagttgttgacttaccattggcctataatatactgtttgatcgtcctgcgctaattagactaggaggcagtgagttaaattaggcatctatctttgaaatttcaaacaccaacatgtgtaggcgtagtgtgaggtgaccagctactggctcatgaatgctatcgcatagagctacaaaataaaaaggctggccatcaattaatgacaatcgtaacaaaggaaagcgagaaacagtatgaggatctagattctcgagttcaagatgaaaagaacctgttaaaactaatcgaggagtcagaggaagttattttagatacataaaatcccacaagatgtgtattcattgggaaaaatctggatgaaaaactaaaataacaactaataagttttttgaaggcaaaccaagatcagttcacctggagccattcaaatatgataggattgaccctaaagtcatttgtcaccacttgaatatcgacccaaattacccagctaagggacagaaaagacgacccttggattccgatagacaaggggcactcaaagaagaggtggacaagttactgaataacgactttatacacgaggcattctatccctcgtggatatctaatcctgtccttgtcccaaaaccaaacggaacttggagaacttgtatcgacttctccgatttaaacaaagcatgtccaaaggattgctttccactactaaggattgaccagttggtggatgcaattgctggacacgagctaatgacgttcatggacgcatattctggatataaccaaatgaaaatgcatgttcctgatcaagagcatacaagttttgtaaccaacatgggactttattgttataaagtcatgccttttggtttcaagaatgttagggcaacatatcagtgactttcagtatgtcgtactcactactaatgaccttacacaaggcccaaaggagagtaacttaacctttcattaaataattgttattcatcgaataagcc

SEQ ID NO: 396463 - DNA, 580 bp, Cannabis indica
gaacctgaattaggacccgaactcgaaccaagactcgggacccaaacctgaacctggaccaagaccaagacctaggaaccagacatagataggggacctagaccagggacctaggccccagaacccagacccaaatcggaatttgggacatgaacccgaactaggacttgacctggactctagaatctaaagtcagacccaaacccagacccgaaacctaccccaaacccaaactaggataggaacctggacacgaaccaagattaaaccaaaacccagatccaaacccaaaatcagacccttactcgggatctgaactcagacacagacctagaatcagacccaaagctaaacctaaacccggacctgaactcgaacccagactaggatcggaacccagtacttagatccagaaatgaacgcaaactcagatcgagaatggaacttgggacttaggcccagacccggacctggacccaaacccacacccggagcttgattcggacgtacaccgaaatccgaacccgaacccaaactcagaccaagactcgaaccccgacatgaacttgaatctaaactc

SEQ ID NO: 396464 - DNA, 802 bp, Cannabis indica
gactgagactggggtcccattcttggtcccagtcccggttttgggtctcgagtttgggtctggtgctgggttatggttcgggtctgggtttgattccagcctcggtttagggcaacgtcttggtccagattttgatctcagttttggtccgagccaggtctaattttgggtcttggtctgggtcctaatcttagtcccgatcccgttctaaggtcctagtcttgttttagttttggttccactttcaaatcctgggattgggttttggtccgggtcctagtttgggttcgagttggtgttcgggtcctggttcgagtcccaaattcagacgccgactatgggtcgagtccaagcctcaagtcctaggtcccgggcctagatcctaatcccaatttgggtctcgggtcccgagctaggtcctaggtctgggtccttgtctggggccaggttatgggtctaggtccaggtccagtttcgggtcagggttcaagtactggtccgagtccgagtctaggtttgggtccatgttcggatcccagtcttggtctaggtccctgtttgggttcgagcttgggtccccggtctaggtctagggcctgggtttcaatcctggtctaggtctgggtcaaaattcgcgttcgggtccaagtttgtgcctggatcaccatctgggtctgagtttgggtttgggtccgagttttgttcttgttccgggtccatgtcctggtctcgctcatagtcctgttcctaggttctagtttaggatctgaatttgggtcttgggtctgggtcttgattcgag

SEQ ID NO: 396465 - DNA, 1207 bp, Cannabis indica
ccgtaaaccaaatatacagttgacaacctataatgaaaatgagaggcgtttagcctttaggtgcagtcgtttttagagcctgcacacctgagcatcttccaatattaatagtgctctatgtatcatgctatattatcctatccttcgtttctcccttcgtttcacactactacccacatccgtgtatttttaattttatatataaataatgaacataacacatgggaatatatatttatattttatgtatgttgcctttttattttaatacacaccacatcatgaacttgttacataattattgggtataaaagtaatatatttttacaaaaaaaacattgagggaaataatagatcttgtttcctagcaattcttttataaatggtctacaaaacagtatacatccttgtggaacacccaactttcctaacaaaatttaattagtactgtctttatcagcttgggtcattgaatattgtttgttacagtctctgccaactattacagaagcatatcctggtcagagaacaattagttttcctcagttttgaatgagagaaaaaagaaggaaaagaaaaagtacaagatgctaccaatgaatagtttttagcattagattttcattccctagttaaataaagtactattttatttgcccaattactttattccttgtaaatcttttggatgcaattgaaagtaaagttaatacaacttaataagactaatccaaaaagaagacaaaaaggatgtatcggtgacttgggaccaactgatttaccattaccataaattcgaagacaaacacaattttctatggataattccttaccatatggtgaagtgtttagttagaggcaaataagaaataagaccgtccaaaacagtactttatctgctgggataataagattttaagtatgcgatgattaataactttattaaagacaataatggataagtggtaaatccaaggagataattatgatattagaaaaatgaaagaaacacatgctaattttagactacatgttgctaacaaccagaacagaatatgagtgttagcaattaataaataaaatacgaaaaataatacaacttctgcatgtgtctttacagctcacaagggtcagccatggtgctactcacgctaatataatggagaattgctagcttttatttattttttatataaattatatgcac

SEQ ID NO: 396466 - DNA, 1138 bp, Cannabis indica
aagggagtagccgactcaagattgtcaagagactgagcaatatgattggttgcacccgaatccacataccatccaacatcatccccaaagtcaggaacagattgagcaacaaaggcctgagggtcatattcgaagctttgttcagtaagattgacctgtggctgagcagcagaggccttaggtgtaacccagttgcgatcaaaacgatagtggcatgtaacagcagtatgcccaaatttcatacagacttggcacaagggtctgttattatggacaggtctgtttccattagcccgattgaagaatcttgaaggattttcagacattggaccccgcacagaaccatctcttgatgaaccattaaagggcctgtatgaaccatttcttgaacccactgtgagattggctgccatttttgcagaaagatccagtgcagaagaatgcctttcaagtcgagactcatgtgacatcaagagagcttgcacttcttcgagggagagagtatcacttcgagaggtgatgctggacacaacggagtcatactcgggaccaagtccattgagaagatgtaacacaagatcaaagtcataaacgggataaccagcaatagccaaagaatcacatatagctttgatcttatctacataatctgaaatggacatattacctttctgtaaattggttaattgactcttgagttgaagaagccttgccttagattgactggcaaatttttgttccaaagctttccagactgaattcgaagtagtgtaagaagccacagtagccaagatcccttcagtcatcgacgatctaagccaggacagcagtaattgatctttacgcctccattgcacatacagaggattctcacgaccattgatgagtttttccggaggagcttcattgctgaaaagtaattgatcaagatcatgaccaatcactgtaggaaccacctgggatttccaggagagaaagtttgtgcgatctagtttcaaagtaagagaagctgttaaagaattcgaaaatggattccatggtgatgccgtcgaggagttctgagctggcaccacaccaggatcggagccgaccgcctgagacgagttgtcatcgggggaagccattgacgcaagtcaag

SEQ ID NO: 396467 - DNA, 1142 bp, Cannabis indica
cctagcgtccatactaatttgaaacaacctgcgtaaccaagatctagttttctcataccgtgatcaaagaaaaacttactaatttcgcttatttggaaattagaaacatgcacctattctactatcgggctactaacatgcttcctaacagacttttcttaaatcatactattaaaatatattaccaaagcaataaaagcttactgaaccgtgaaacgagctgactgctgatgatgattgtacatgtcgtaacgatattcggaagacaacctggcagctctgataccaaattgtaaaactgtaactagcataggcgtgttagcgtgattttaaacgtactgtgctcgttgctaatcaacgaggttattgaaaattgtgaataatcaaaattttctaatttaactagaaatttaaggtattacatatataaaattccaggatcccgtttacaaaatactttgttaaaattttgctttacacaaatacaaaagttttgtcacctagcgactgtcagcaaaagccttgatgtcccctaagatcgtacgctccaggcctaaccgccccggcatgtacaatcttcaccggctcgctctcacagctcctcagctttagccttgcccttacctacacatggaaatagcactgtgtgtcaacagactcagtaagaaaagaataacatataacataaaaataacccgagttataacctggcgcccatacacccgaccataaccctaatccccgtgtcggacacggtactgagcctagaacgttcatatgataatactatcgaccataatgttagcctttactaaataagctagtcatactctagccatgttgatgtgatagcatcgatcagtatttcagccaacatacatttatcagtaatcagtataactgtatgtatactattagtgctatcaatgtaatctaacaagcataaacaacatgtacgctaaacatgtaataacatatgcccgacattatactaatcttacctcaattctgaattcaggtttgccggtcaacctgagtggaacaacttctcggcgaattataggctcctaaatcgcatcgataactcttgcatatattttacgaggatctagatttactaacaagtatgtttcattaacatc

SEQ ID NO: 396468 - DNA, 553 bp, Cannabis indica
atgtctatctaagttgcctcattactacaaaaatactaaatgtgattctattggtcaaacgccacgttcaattgttgttgggcaagaaacatgaaaaacgtaaaatttcatatatatatatatagcataattaatacaccctgaattcaaataaatctccataaattcataaatcataaatattagtctaaactcataattaagccctaattatctgctaatttcatattaaaattaagcagtctttacaaaggcagtgattccaatgctgcaatggatgataattagagttctggcggaaattgttttgttgtgatcaaggcttgagatgaatcttcaggctttggagatgcctgcactagttcagagcacaaagatcatgctgaatgggttcttggcagttgttgttgttgggaatattttaccaggatctagatttactaacaagtatgttgaattaaaatcgtcaatatgaattctcaaaaataaagaaataagcacataagggtttaaaaaaatattacattgattgcactggaatacaatgactcct

SEQ ID NO: 396469 - DNA, 1060 bp, Cannabis indica
agcagatcagttgggacatccccgaactgaaactacgatcaggatgtaaaatggaagctcttggaagactatgagctactatattagctgaccgcttaacaaaacaaattgagatatttttcaactcttgaagaatacatttacaatctgaaataacaataccaaataatgaaatcatcttcacctgactccgaagtgcttgcaccaccctaaggcaattggtttcaacaaaagcttgctgccttggtcttctcttaaaccaacttagtgcttctcgaactccaattgcttccacaagagctggatctaaggcttcatggaacatttttgtgaaaccttcaatgaagaatccctttgcatccctgactactactcccactcccgctcgattcccatcgtcgaacaacgctgcatcaacattaatcttgacactattctcaggtggacatgaccattgctcagctccatcacccgcctgaaaactaagccatgatatctcaatttgagatttctgagcatttctccattggtcaagatagtttctcgccaacacaacaatatccgaggcacacactctttttgtaaagaccgcttagcttaaatttggaaattagcagttaattaagatttaattatgaaaattatttatagatatttgaataattatttatgtcgttatatttgaattcagaatgcatttttgtgtcatatagtgaaatttcataattttgcattttcggtgcccgacaacatggaacgcggtgtatggctcagtagaatcacaacttagtattttagtatattggggcaatttatttagacattgggaatgtcgagattagttgggaatttagagttttctgaaaataccctttagtgtcttttaatccttttagtgtgggaggggcaaaatagtcattttaccccataagcttttgtcctttagtggacttagagttatgaaataattgaattacttgatgttatgttagctgaaataaagaaaggttatgcattttgtcatttattcaaaattggaaaaaaatcaaagaaaaagcaa

SEQ ID NO: 396470 - DNA, 599 bp, Cannabis indica
gtatatttatatagctcagaggtgtatcttttcaatgagttatcgtatatacaagcaatttcattttattacgtataaaaaattactatgatttctttgttttaagaacaaaaaatacaggagaatgatgaaatgcaagtataaaaataaacatttaaatgatttgtgtatattataattcaggttttttggtatatttattttatactatagtatatatttattctgtcataggatatattaaggaataaagaataaactcttgctacattaataatattatattaagtttggagtatattcattaatgtatctcgtttctatggtttgttgtatataccaacaatataattttattaaatattaaaagttacaagaattgctttgattgttaggaccaaacaataattgtggaggaacaaaaagcacaggaaaatgttaagatgctggtataaaaatgaatatttagatcaaaaagtttatgatgatttaagtttggtatatttatgttgcacaatggtatatatttattttgtgataaggtatactaattaagaaataagtaaaaaaataatcaatggtggtatatcattttaaat

SEQ ID NO: 396471 - DNA, 996 bp, Cannabis indica
tgtagtatggtctgagagaggcaaagggtgattttctgggattggttgtaagctttgaggcctttgtggtacatgttgtggctctacagcagctgtggggaccattggctcagtgtttcgaggaaaaggaccaacagggaccacattagtacaagttttagtagaaaaagtagcagtaggatgcataaaagtggtttcagtaggtacctgttcagtatgggagtgatgagtcatgccaggatagtgtgtctcattgaatatgacatgtctagcaatgaaaactcgaccatttttattctcacaaatatagcctctatgtgcaggtgagtatcccaaaaacaagcattcatcagatcgatattccaacttgtgagaattataaggccttaagtgtggccagcaggcacatccaaaggacttcaagatagaatagtcaggctttgtgtgaaataaacactcataggggctgatattatcaattacaggtgttggcagcctgttgatagtgtaagtagcacactgaaaagcatgccaccagtagcttaaacccaaattggcttgagctaaaagtgttaagcccgtttcagtgatgtgacgatgcttcctttctgctctaccattctgttggtgagtatgaggacatggatgagagaacaagatgccctgatcagctagaaacctagcaaacggtttatactcaccaccaccatctgccatgacacttttaatgggtaacccaaactgtttttcaaccatactcttgaattgaataaacaattcgaaggcttgagatttgactttcattggatagatccatgtaaagcgactatagtcatccaagaaatgaatatagtaacgaaagccatctttggagggttcaaaggaaggcccccaaagatcagtatgtatgagggcaagtggttgagtggctcttttagtggaattagtgaagggaagtctatgacttttcccttgctgacaagcattgcagaattg

SEQ ID NO: 396472 - DNA, 605 bp, Cannabis indica
tttaatcacataataaactactgaacaattaatacaatcatcaaatcagaatagttcaaacttataaaaaaaatttagataaatgtttcccatttcctatgcccgtcgaacactaaaccccatcccacttaaatcacgaactcagcatcccgtcagccaccaagacttcgaacacagacgggcaagatctgctcgagcttcaagccttcgaacacagccacctgcataagagagagagagacagagaaacacaaataaagaaaagggaaaaataaaaagccatatactagcacccacgactaggggaggtgaagagaagacgaggtggagagaactcgaggcagaggttgaaccgctgtcgtggtaggcggagaagctgaggtagagataaaatggggtttaggttgcacgttcgtcggaggttggctgatgtcgccggagaagaagagaagtagctccgattgagagaaagaaagaggcactacctcgattgacagaaagaaagagagagggaggcgtgaaggagggaggcgttaatgagaatgagggaggcatgaatgagctgatattagggtttttttatattaaagagggagagagagaga

SEQ ID NO: 396473 - DNA, 715 bp, Cannabis indica
gatcgagactcgggacctgggacaaagttcgagacctggtaccgagaccgagaccgggaccgggacatgggaccgggacagcgacccgggacccgatactcgaacctaggaccttagaactgaaccatgacccaaacctagaccaagccaagacccaagacaaggaccagtactgaacacggaccgggacctaggatcctgccctaaatctgggacctggacccatgactcaggacccaagacccaaacctagatgcaaacatccacctgacacccgaaccatgacccaagacatgagctagaactagacaaggatctggatttggatctgggacccaggacccaagactagaggcttagacccaacccataatcggtgtctaaatcaaggaatcggacttggaccaagacccagaccctgaccagaacccgaatccatacaagaagtcgaactagactaaacatgaggttggagtttggatttgtgaccaagaatcggacctgaacccaaacacagacctagacccagacaaggactcggaccagaccaacacccaaaccttaaatcatatcatgtgacccgaaattgaagccgagacttgaaccggtcccttaaaccctaaaccctaaaccttaaaccctaaatcctaaaatttttacacatacccctaaatccctaaacactaaacccaaaaccctaaatcctaaaccctaa

SEQ ID NO: 396474 - DNA, 569 bp, Cannabis indica
atacccacttaatcacatattttttagttaattatcataataattttttaagatattacaactatcccctccttatagaaatttggtcctcaaaatttatctaaacaacgcgagataccgctcccacaattgcgactttaattcccaagtcacctttaatcttgttgttcatcctcagtgctttagctaacgatatagtctttatttcatagtacttttacttttctcgttcataacctgaattaactattcctcatatgacaagtctattcaaagttccatattttcgtaacttggtatacgaatcgtatctgcttcatacctctaaacattgaaatacaagttgtgaacttcaggtaaagcagggagtatggctagctgataagttacctaacctccactttctagaaactcaaacggatcgatactcctggaacttaactttcctttctttctcaatttctaaattctcttcattggaagcacctgagaaagataaaattcccaacttggaatttaatatctctacactttggatcagcatagctcttccatccactctataaagc

SEQ ID NO: 396475 - DNA, 544 bp, Cannabis indica
agagagagagagaaaaaaggagggtaggaattctaattctttcttgatttttcttaattgattaactccaaaattaacaatcctaggctgatgtaataagtggccagctaccaacctaggggcatgccacgtaatcctcaatgcaaaataccaaaaatgcccctctttcttccaacttacgcaattctaagcctaggagtaaaatggtccaaaataataaccctccttaaacccagcattccaagtatctcaaatgtttgtccaataagaattaggttctaaacttatccatgtgactctaacggccatccatcgcattttccatcgtcgccgagcaaaaatcataaaaaacacacatttcatattaagcttaaataatactcttaggaggtgtttggttaggatgaatgaaaatataggaacaagaatgggaatggtaataggaataggaatggaatggaataaaatttaaaatgcataaaaaaattaataaaaaaatcattaattttttttcttgttacactggaatggtcattcctttctt

SEQ ID NO: 396476 - DNA, 804 bp, Cannabis indica
aagactcatgcatgaattaagaattaatgtaaggagcataataagaacgaaggttattagaggttgttgggttcccatatgctctccaaatatagtttttcgggtgttgtccttatgttgttttcaagcttactttgtattcaaacattgggattttttaaattctcaattggagtaaaatatcaaagctgaaggttaaacagttgaaattgcatcatatgaataatatgatatttattcgtccattgaagcatgtatgtgtctagtattttatagttgttttactgttgttgttgctctgtttgtttgttttcttattattttttttattattattgttatagttgcaacaaaagaatatcactcgaatttctgagaagaaagacatgttgagtttctctgattattttttggatgaaaccatttattctttcagcaaagggaaaggcaagggggaagggaaagacaattctgagcctattccaaatgtttctacagatcttgaagttggtgttgtgattttatgccttaaataaaattcatctcaatataatcttattagctgatcaataaaaatgatatataagtcaattttatattaccttgtagttcacatgatattttcgtgattatagttttaatatataaattctattaaatcctaaacttatggatttaatagtcacatgatttatctgtgcactagatttacactaacatgataatcagcgatggagttttcttatacttagaataagtggaatattttttttaaggcattagtaaagtaaactagaaaaagaa

SEQ ID NO: 396477 - DNA, 1285 bp, Cannabis indica
attttaaataaaatatttattgttcaattattaagggtgataagccatccctaaaaacattaaatattgttcctactaaatttttaagggataatttcaaaaaataaaaataaagacaacaaaaaaaaattataaaaatagtacgaaattttttacttttttaaagattttagcttttatttacataaaatgcggtctttttatgtattttttagttgtactcttgttattttgttgttgattttttattatttatatattattttgatgttaaattcttattaatttcatgttattttcttgtacttttatagaatgttgttttcttgtacttttatagattaccgtaaaatataaaaaaaaaaatgaacataaaaatataaaatttggtgttttatgtaattatcttaatttttaaattaaaataaaaaataaaaacaagaatttaggggcgactaataaatatcgcctctaataacatattattagggataattatttgtcgtccataaaattatcgcctctaatactatctttttggttgcctatacttgtagtctgattattaaaaaattaatcaataacaaaaaaaaaaaagttaattaggatttttttcgcccgaactttgacatgtactaaatcatacttcttaaactttttttgctgttcaaaattctcctgaactattgagattgttagatttaaggacttttgtctaattttagtaaaaaaattctaacacggatgaaagttcagggcatgatttagtacatatcaaagtttgaggggtatgatttggtagatataaaagtctggtgagcatggtttagtacagaaacaatcactgaaacattaaaattgaatgaaattaaacaaaagtccttaaatctaacaatctcaatagttcaggtagaatttttaacggtcaaaaaagttcaagaaaaaaaaaaaaaaatcttaaaagagatataactcgaaaacgtgatgatgattatcaattttaaagtagtaaccatttacgaaatattgagaagaagaaaatacttttttggtgtaatttccaccataaaatcaaaatgtcgaagaagaatttaatgcaatacgtgcaaaatatcttccttaagccaaaaaaaaataataataaatgcaatacgtggaaaagtacaggtaagatattttattaaaatggtatagagctgcaacggaaaagcttcagggctccagataagtttaaagaaagggaaatttacatgatatactaacttttgtcattttcttacaaaaa

SEQ ID NO: 396478 - DNA, 515 bp, Cannabis indica
ttagcttgagtgatagcaaacacacgtaggcacaagaacttggccagaagattaaattttttcgtgtattcagttactaacatatcctcactctgcaccaattcgataaattctttctgcttagcactgcgaactacctcattataatacttggcgttgaataaatctcaaaactcttccgaagtcataacagtgacgtctcgggtgagggacatcaattcccaccacatgagggcgtcttcttggaactgaaaagtagcacaggtcacctaatcatttacaacgacccccatgaaattcaaaattctttctatcactgtgagccactgctcagccttcattacatcagacctccgaagaacactggaggtgcttgcttgcaagacttcttgtataacggctccatatgcttgccagcaacaggttgttatgctactggcaccgcaggactaaaacaacctgagcttgtagtgggggcactacaggaggaccctgctaccttaatctcagaattt

SEQ ID NO: 396479 - DNA, 928 bp, Cannabis indica
ctctctctctctctctctctcctctctctctctctctctccgcagcctcactctcctcttcctcacgctcccctctcaagctcacatagacccaacacttagttaaattaaattttctaagtgttatactcacatcatgagtgtaaactataaaagagagagataccaagggaatgtacaacaaagaatagagttgttaagcatgcacaactttaaggaagaaatagttgtacaacaagtacaagtagagaagacactatttgtctcactaggagtactaactatattatggatagtatagtaaatatatcaatccatctcctcccattttttcatacctcatatataggcttaaccttcggcataggcaggctaggcttgtgcctagagcccacgtaagagctcctaaaaaaatttctttttaaaaatacacatggtttttattgattttaaaaatactacatttctttttaaataagtatctaatttttttatttttattatggtcgactaaagtttagagccgaccctactcatatacaatccatccttaactcattttttccatcctaccaaacgaagggggtttggtggtttcgatgattttggtagtgcctggatggacataaaaagtttggctaattaggatttttaccccctaagctttaacatgtaccaaatcatactccctgaacttttctggccgttaaaaattccccttgaactattgagattgttagatttaaggacttttgtttaattttatttaattttactgttttaatgattgtttatgtactaaaccattctccacagactttgatatctaccaaatcacgcccctcgaattttgacatatactaaatcatgccccctgaagacctgaactttcatccatgttagactctttttactaaaattagacaaa

SEQ ID NO: 396480 - DNA, 549 bp, Cannabis indica
tcccccatccaagtccgattctacgtccttgtctaggtccaagttcaggttcaggtcccgaatcttggttttattctaggtgtcggtctgagttcgggtccaagtctcgatcccagtcttggtctgggttcaggtttgggtccttgttggggtcttgatcctggtccgggtcgcgtgtgtcaggtcccgacgagggtttacgacctggtcaggtctaggccccgattcgggtctcggtcgaggttcaggtcccaagtctcaggtcccagtcctagtcaaggtctcggtccagattctggtctgagtttgggttatggtttggattcgattctagtctcaagtttgggtcctagtcatagttccaattatgattccggttctgggtttggttccgggtctgggcatgggtctaggttggggtcgggtaatgagtcttcctctgagtttgggtacgggtttttcggatcttagtctgggtccaggttcaattcttgggtctgggtcccaagttcgtgtctgggtctacgtctgggtccgggtccaggtcca

SEQ ID NO: 396481 - DNA, 279 bp, Cannabis indica
cctcaaaattttatataatctaatccaattacgaatttgatatctaattgcacacctaaattttaatgttaacttaaaaatacttaaaaactatgacattttatttaagtttatacttcataggcaaaaattttaaataattaaaagaacaatatttaagtaaaaaaataaaataaaacatcatgaaaataattatataaaacaacccagtattacaaattcaacacacacaaatctaataaaattataattaacatatatattatattttttttatat

SEQ ID NO: 396482 - DNA, 555 bp, Cannabis indica
gggttcactcaaagggaaaagagagagagacaattctaatttacagaaactttgccaaattgtaaatccaaccaaaactcaaaaataatatgaactcgtggagtaagtaaattttaactacaaaaccacgtaaaaatatctgatgctcatatattaattttgtcttttcctttcttgaaaaaaataatcttcttagattaagttgatgaaaaatcacgtcaacaacaacaataattgatagaacaatgtaaatttgaatttagccctaattaattcatgagaatcaaacaataaaattaaagattagcggaagcgtaccggaatccataaaattaattttgaaatggtatgatcttctaattttgcatcaaaactatctttgaaaccttagtgcatgtttgacatcataactaaaaaactgttttttgtttttaaaaacagaaaattattttttgaaaacaatttggcttgtttggtcttgttttttgaaaacagtttttagaaaacaaagttacgaaaaacaagaattttgaaatcaacaaaatgttgttttct

SEQ ID NO: 396483 - DNA, 586 bp, Cannabis indica
aaggagaaaaatatacgaataatagagatgttgcgtactttgttgtaatgaagcttagatctcatttataaattttttttatttatacattttaaagtaactttttagtgcatttatacggaaatacatagagcaaccatcggagcaatataaatcgtaaatcaaattcacattgcaacccatacaacaactactagagcaaaccaaaccgtaaaaaaaaattagaaaatggtatataaaaaaactaccctttatataatcaactattaaaataataaaagtaattaatttgtgaaatatagttacgtttattatgccgtgctatttttatatttttatatattttttaagttatattttgatagaatatttataaataataaaaaattagaaatcacgagagagttaaagaaaaatacataaatctatttaaattaattttaaacggttattcctctctttgatatcttcatatattaaaagtgcctatctaacggcatttcttagtttaacagaatatacttaaaaataaaaagaatattctgttaaatttaacgattaggtttgatctcccgttaacaaataa

SEQ ID NO: 396484 - DNA, 1172 bp, Cannabis indica
attggcaccaagttttccttgtcggcaatggtgttgcttgccagacaggtaagtgcatctgttgtggcattctgttctctggggatctgccttattgtatagcctttgagctaacttagcaagtcttggatcttgctcaaataggccatcattatttcacctcgagctgtgtattcacataggacatgatttatgactagttaagagttgctatatatgtctaggtggtcagcccgtacttcgtgcgctagttgaggttagcaatcagggcttcatatttagccttgttgttagaggctttgaagccaaatttaattactttatgcagctgtttttccaggttttatgagggcaatgcctgcaccggacaatgttggaaatatcttaccaggatctagatttactaatgttgacctcgcttttagccaacgacaatgagtctaatttagtaagcgacaagtagtttataacaattgaaatataataaagcaatataaggacacagtaattttatagaggttcagcctcgagcaattcggtaatagcctaatcctcgttatttgtattaactcaagaacgaggagaaaggttccttttcttatagctcttacaacaatatctttgaatatgaattcttagataatatctctcaatgtgaaatctttcgaccctttgcccagtgaacatgcatcactatttatagggctatgagcttgaaggagaagtatttcccttctcgtcacaatggatataagcagaaagattgcatagtaaatgagaatacactgatcgtgagatttggacagcttgccatatctctacaatttgatccccaagttataaggatttctttgatgactcacgatgcgaaagctaaatttgctaagtgttgatcactctgtgcggattgttgatcgcttggctttgagcatccatatgaggtatcctattcgaactatatcttgcgagcaaatacttggagtcgattccacgtgtcaccatcatgtgattccacgtgagagtgtaaaaattgggataatatttgccccccaagtctatacgggacttccgaaggaacgtgtagacttcatccgagctatctttgcgtttgaatgggagacacatgtcaagcgcatctgttctcgactcaatgtgaggctgactgggcgtcc

SEQ ID NO: 396485 - DNA, 823 bp, Cannabis indica
accccaaccccgacccagacctaaatccggaatcgggacccgaacccagacctggacccgaaccccgatccaggacccagacccggatccagaactaggacctggattaattaatactaatacaatacaatacaatatattaatacaagtcaataccaaatatagtattgtattaaataatactaatacaatacaatacaacacaatctaacacaatacgacgtaccaaacgagccctaataggtcataactgggtcataaacatgttgaatacttcataaatgtgttattggttgacatgtttaaacaaaatatgcttataaacgagttacacgagtcgtgtcgtgttagcctgtttataaacggatcgtgtttgggttttattttctgacacaattattaaacgggtcttgtttgggtttcattttctaatacgattattaaacgggtcgtgtttgagtcgagtacatccttgttatacatggatctcgatacaatacaaatacgacctgcaaacacgaattatcacccctaagttaaagttctggatacatatatttgattattaataggagattttcagctttgtgtatttggtcgtatcaatttttgaaaggctaaaatatttagggaaattttcatgggccaccttattttggtaattattttcaaaaataacgttatttttgttatgttaagtttccgtatatgtagttgacgtttttatggtaattttctatttttaacgatttgtatattgggcttgtaatcccggttttttcggcccaattttttaaaacacacactctttgtacgtgtcacg

SEQ ID NO: 396486 - DNA, 728 bp, Cannabis indica
cttattgattttgacatgtgtgtgagtaagttccatgaaacgaatggtcttcataaacaagatggtatcttcatgtttgtttcagcagcattcagtagtaacgagaatatgtgtttaactcaatcttttttctttaaaattgtccaaaagtttctaggctaaacactattccccacccattatggtgttgggaataaatgacagtattccaattccccttcaggatcaatatttgcgggaaaatacaatggggactctaaaattcctttctgatgtgaaagatcagtcaaagctgcaatcacagagcatatttagaatttttggatatcttccaatgtaaatagtactttacgaataataatcaaaaaactaaatgcacgccaagaagttatctcgtggctaataaaaactacggtaaatcttccactataacaatactaatgggtacacaatattacactctcaagttttgacaaatacttgaggaatacactcaaatctctcacactcactagtgcgcaatctcaccatctctctacaaaatatttctcataattttgtaggaactctctttttctcactctcttagatttctcttactaagaggtattctcactatttttctctcaagagcctcactcttcagtcttgaaatagcttgtgatggctgtaatgggatgaacaaatgaaagggtatggagctctatttataggcctccttggagtgt

SEQ ID NO: 396487 - DNA, 768 bp, Cannabis indica
ccttggttagggcaaggctgtaacattcccgagcaacctgttagtttcatctcaagcaccccaccccattctttgttggaaacttaaggcatgaatggaatatcgacgtaacaacctttaagtcatataaagctggtcggcctaacatgacattaaatgttgatggaacgtccaatactaaaaattgtgccattatagttatgctcttcggagcttgcccaatagtgaggggtaggcaaattttccctagaggtgcaacactttggccggagaaaccatacacgggctggagacaggggttaagtatttgagttagagccccatcttttcatatggtgacttgaataagatgtttgcagaggctccattgtctatcatggtttgggccaccatcttgttggctatctggacttccacgaccaacgggtcgttgtgcgggaaactaatcttgacagcatcttcatcactaaatgttatggtgggctcccctgcccatggtgttttcggtttccttcttcgacggccagaactacttcttcttgctcatgctgtactgttcaggcatatctttcccgggctttggctgagtctccaactatgtgcggtcctccaataataacttgcagatgtccatctactggtggtggtaataaatcttggttgttatcgcccctttgattttgatcaaacttgacatatttttgcacatgcggattatttttcttatcagaaattcaatttcttcctttagattgttgcattcgttgg

SEQ ID NO: 396488 - DNA, 1351 bp, Cannabis indica
gggattgaccgtaagattatctgccactacttgaatgtcgacccaaattacccagccaagagacaaaagaaatgacccttggattccgagagacaatgggcactcaagcaggaagtagataaggtgttggttaacgaatttatacgcgaggcattttatccctcgtggatatccaaccctattctcatcccaataccaaatggaagttggagaacttgtatagacttttcagacttgaataaggcgtgtccaaaggattactttccactacgaaggattgaccagctagtggatgtaactgctggacacgagcttatgtcattcatggacacatactctggatataactagataaaaatgcatgtccctgaccaagagcatacaagctttgtaactaacatgggactttattaatataaagtcatgttgtttggtttgaaaaatgctggggcaacaaatcaatgacttgtgaatgaaatgtttgcaagaaaaataggaagaaacatggaagtctaggtcgatgatatgttagtgaagtcggtaaagagtggagatcatacaacaaacctcgtggagtactttgaaatattaaaaaagtacaatatgaaacttaacctgaaaaagtgttcctttggagtttctcaagaaatgttctgggattcatagtcaatgcgaggggcgttgaagaaaatcctaagaacatcaaggctttgatagatatgccatcaccaactaaacaaaaggaagttcaagcattaacaggaagaatggcagcattaacagattcattttgaagtcaactgataagtgtctaccatttttcaatgtattgcaaggaaacaaaaaatttgagtggaaagaagagtgcaaggaggcctttaagagcataaagaggcatttgttgacacctccagttttggcaaaaccaatgactggagagacattactcctctacttggctgtctcggaaaatgcgattagtgctacaatagtgcgagaagacggaaagcactagcaacctatttactatgttagtaagaggttactgggggacgaatcgaggtatcccccctcttgaaaaactttccttatgcctaatccatgcatctcgcaagttacgaccttacttccacgagcatccgattaaggtgttaactgatcaacgcctgagacaagttttatcaaaaccagatgcttctagaagattgattaaatcgttaattgaattagggcagtttgacataacttatcaccgatgaacgtccatcaagggcgaagccttgacagatgatgcgtgtcgtaagccaaaacaaatttactattttttaaattccaatacttccaattattt

SEQ ID NO: 396489 - DNA, 510 bp, Cannabis indica
agtttaggctctatcgtaatacaagttcttgtcatttagtttgtgaagaattttttcaaaaaaaaaaaaggaactttggggtaaatttttacagtcatagtttggtgaaaaaaaaatcatttttattctatttcctgtatatgcagctataaatttagttacattaattaataaaattttaattgatgacattcatttatttatttagtttttttttttttttttttgggataattgacatttatttagtttaataccatgttgtatgataaaacaaggaatactatcacgggcgtgatctggcacgatcaattgggcctcatctaattttgcttggcattattacttgggcctattttaaattctcatttctttcacctaaacagaatttctaaatccataatttaatgttattttggcaaatgttaaattgatatttgaaaaaggaaaaaaaaaactaacatcttaaattgatatctcaaatgacaatattttaatttttttttgttt

SEQ ID NO: 396490 - DNA, 1141 bp, Cannabis indica
tttgtacctattgtcatcatctttctcaattcttgtgatggttcctgggttggacaatttcagcatatgtaagtacgcaggtaactcagcataactctcttcatttgatcctctgacattattctttgctagttcctttgccctccatgctttgttatattttacctgcactccatactcatctcgcatgtcatttattatttgtcttgttttgtagtttgttttcgggtcacgaatcttttctttgatgcaatcactgattacttttgcactagcctgtctattatcagtacttttgtgatttaaggagcatgagtgaaaatttttgtacttgataactctgaagtagcttgatgttttagagcttctagcgcggaggtaccactcacaattttcatctatgcattttgcccaaaatgtcagcgaacatgatctcttaaccttgtattggaagtgcttcttgatagcaatcctcgaaagagcagatttcaactcttctttgttcttgaacatatgattcactcttaggtcttcaatgcccatacttggcaagacagttagaggtgattgaacttcttgtcctccttcagtagccatacaagaagctcgtgatgatgtgctgtttgtgccgctgtaagcgctactgcttgctgctgtcttttttctgcttgttgcgttacttgctgaagtagttgcagcaatgctagttgttcttgacaaggccattgtttggttcttctcaattacttcaacaataagaggacaatttctcagatcttcctttgtgttgttctcgatcaagtaagcctctaaatccatatcgctttctatcttcattcctttgcttgtacccatattcacatcaaatagaatgttgatcgaaaccaaatttcgattcaaattgagcaagttgtgtatcttatctaccaaatccaaaaattttatatctttatgcaccattaggagtttgatttcatgatcaacatatttgttgtgtgcattccatcttccgttaaatactatgtacaacatccttgattctatttctgcaatattagaattataaattcaattagtcttttcctttacatcaaaaataattcgagaaggctccatcaattccaaccaaaaataatgaaca

SEQ ID NO: 396491 - DNA, 1252 bp, Cannabis indica
aaaaagaatgaaaaaaaagagagacagagtttatgtgagtgttatttagggttttagtttagtatttttattttggaaattgacaaatattcaaaggaagaagaagatgaatttggcaaagaaagcttggactattgtgataactccaatatgtgtttttcttttcatctttttcttattttaaattttgtaatttttgcacaatttattatgagttaatttattttttgctagaattattttgttgacttaaattgtaatttggtattttgttgctatgtttagtgaattgattttgttcattcaagagtgtttattgtgtaattgcttacttttgcttgatcaccattagtaagtagtagctaatcttgattttagaaaaactgggattagtggaattgcttaaatgatgcatgaatatcaacttaaaaaagtgtgatttgtaaatagcatagaaatatgttatttaccctgtaaacttagaagaattgagcttaaattggtattcttaaaattaattgggcataatgttaattaattagagaatcaaatcataaatttacaacaatactcatttgcactattatatcaattttgtatttttaggccaatttaatagttctagcttgtttttttctcatagattgtatttattaatttttacatattctcatcactttattttatttttgtttaaatcaatttgtgagtaattagttttataaattaatttataattttcagtacatgtgaagacgatactcgatttatcactttattacttgttacgattgcatacacttgcgtatacaattttcacaacagaaaccaaccttacctccaccaccttaatgtcaggtggtaacacaggcttaaccagaaaagagaatctcgatggtctaggcagccagcaatcttccacaatacgaacttgttctcctaacccaatacgccacctatacccatatagtataatcaggcccggccttgggcataggcgggctaggcttgtgcctagggcccacctagcccagggtccaaaaaataatttctgcccttttaaaattatgtatttttttactgactttgaaaaatatcatattttttctaacataaatgcccaaaaataaatttttttatggaataattacataaggcaccatttttgtaaaatatttacatttttacattcaaagaatgtttttttatatatttttacggtttttcaaaaaaacacgaaaacaacataaaa

SEQ ID NO: 396492 - DNA, 501 bp, Cannabis indica
tctctctctctctctctctctctctctctctctctctctccagggcctccattctttgcccaaaaaacctacattcggtcttgtctagctccgtctcttcagtcttgtcccttgtctggtcccccactttgctcgcgcgaagaccccagccgtctgtccctttccagccacgcagagactcatccttttccagccacgcaaaggacccatcccagccgttcaagcccgttcctccgttcgccgtcgagtctgatcctctgcccgccgctagtccaggtcattcctccgcccacgcgaaggtattattctgaaaaaaagtttgttagttaaattttttaatctttcgtggttggtatagaatgactgttcaatgtttgtgttagtttacatttaattttgatagattttttttgaatttttggtcagttttgaatggtgattactaatacttttttgatccggtgatgttggttgggaaaaatgaaaacgatatatgttctc

SEQ ID NO: 396493 - DNA, 777 bp, Cannabis indica
gctaggcttgacggagcctcaagagcagatcttctcaacaaatccaatggtgaggattctacaacacttagtatgtaggattcttatatatgtattttaagttttatgataactctagtcccgcattgattatctagagagaattttttgtatgtgtgactaatttaagtgaagtatgttactgttcaaagcatatgtttttcaactttttggctaagatcaaaagtagtaactatttatttcagcttattgtgccatcgtgtgagaaaaagcaacaaaaaaaattattgaaacttctttcaaaccaaaaacactaagagatatttctttaggagttttatctcaaacaaaatatatgatggtgtactttaaataactaaaaaaataatttaatatgtaaattgggtatatgaaaattattatttatttagaaaaataaaacaaaattaaaaattataataaaagaaagaaaaataaaatatagaaaattaaaaattaaaattaaattaaaattaaaaaaatgattgacttatttaagtgaagtgtgttactattcaaagcatatatttcttagtctttttgactaccatcaaaagtagttaacttttgtttttcagcttattgtgtcattttgtttgaatgggaaaaagtggggaaaactttttaattaaaactaaaatttaaaaaaaaaaaatgtattggacctccaaattttttttccagaagggacgtagctttgtttagaccaaacattttctattttaatttttttttttt

SEQ ID NO: 396494 - DNA, 838 bp, Cannabis indica
aagccattgaacacatcataaagaaagtgtcctatggttccaacaaagttagcatgggtaacaatatcagccttttgccagcagctaattgcaaaggggcaactaagtaatatatgcgaggcaaattcagcatcatgattgcaaacagggcacatagaaaaaacacttacccccttagagatgagctggagacaggtaggaagcacatttgagactgcccgccacataaagttcttcactttaggaggtattttgaggtgccacagtttacgccaaaagcctgaattgtcttccccagaacaactgttcttctggctttgcagcagattgtaggccgatttgatagaataaccatttttaaatttattggtggtgtttttaacatgaaattatttgtgtgtacatgcattatgataatactactacaaaaatattttttttaaagaaagataaactttattaagacaaatctgttgttataaaagaacttaaaaattgagtacaagcatatgtttaaacacaatctcttaaactagtaatagaggttgttattgtgtgagcaacactatttactgatcgcataatggcgatgcaagaaccactaccaacaacaactaataaagaatagatatgtaataaaatagactaaaactaaaattaatgtggagcttattaatctaaccaattgtcacagtagaatcaatattaataattgagatactaaaaccaaattgatgcacgagagtcaaacccagacgaatggcaagcagctctgccatattagcagagaaatcccctaacacacttgaaaccacactaaccaaaccacactctctgc

SEQ ID NO: 396495 - DNA, 685 bp, Cannabis indica
atttattttttttttgtctctttattttgatttatatataaaaaaaaactatataaattttttttatccctattaatagtttatctgtttttttttttttttgttttactatattgtgtttagtatatatagtgtgtctttttttttttccttttgtttctttactaaaaaaaaatgtattaattttcttttttccttttttttaatgtatatatatttttagtaattttaaacatataagatagatttttttttttttaaaaaaaaaaactgatttaaaaaaatttatactttttgtttatctatttttttttccttttttttgttagattaattttattcctttaacttaacaaaaaaaaaattagtgttgaaaaaattgtgtaatgataaaagtggtaaaattgagaatattctgtctaagaaagattggctttaaaggtttgtggtagagtaccctctacactttctagcaaccccggggagttctagtaaagtgtgggacgaagcggtaccttggcaaccttcccaatcggcctgggaatatctcatgtatatacccttaaattattacatagttgaactttatactaataaaaaaaatatgaatgaagaagatcatcgccgatttgaatatttgtatccattatatcttgcttcattaaatgaaaattctagtgctact

SEQ ID NO: 396496 - DNA, 776 bp, Cannabis indica
gcctccctctgttgaccaatgttaattagttatggccatctctttgagtaattcaaaggcctcattaacactttttttcataaaagccccaccagctgctgcatctacaagtgtttgggtgttgttcaatagtccagtatagaagttatgcacttgtaaccacttttcaatcccatggtttggacacttccttaataaatccttgaatctctcctaggcttcataaagagattcattgtcatgctgagtgaagttgttgatttcagctctcagcttggcaatttttgctgggggaaagaatttggaaaggaatttcagggtcaagtcctcccaagtgttgatagagtgggttggcaaagatacaaactaacttttggctcgctcccttagtgagaacgggaaaagccttaacctgatggcgtcatcgctaactccattcaccttgaatgcttggcaaaactcttcgaaattggcgaggtgcatgtttgggtcttctgatggcagtccgactgaagattggacgatctgcagtatggctggattgatttcaaaattgttggcatagatgcaggtggtcttatacaagatcgggcccctgtcaagttaggaagcaaatagtccctcaagctatggtcattgttgttgtgaccattagcttggttttctacagctccgccattattgccattaatggcattgtcagccatgactctttcttgttcaatctctattgcagtttttttttttttttcaatttcttccttcttctattcttt

SEQ ID NO: 396497 - DNA, 819 bp, Cannabis indica
gttccgaaactcacttgtagcttcatttggattagatggagaaatttctcataaacatctccgaaaaaataaagtaggaggtgccctagtcgactttcatgtcaacctgggtgctagggacacactggtcgacctgggcatcgagtgcctaagtgctctaaacattgttatgtttttgatgttgattctaatacctataacatgcttgtggcaggtctgattcatgtctaagtaaaaattttgagtagtttgcactaatacaggaccagaaataaaatcttgggccaggtgtcaacttgggcgctggatgaaacattaggcacccgagttggctttccacatgttaaatcatcttctttcagcttccatgcttatgactcagagtcttcttgacttgttagcttggaacatcaaaggatggtgatttagaaatgattttgcaggatccaaatacccatttggagcccccaacgtcaacctcagtgcaagggtaaggacccttcctaagtttgactattatgactagggataccttactccaagaatatttttcttctggccacatgtaggatgtccaagtcttcagggccaatctcttggtaaacacttaccccccaagtgagctttccacttatgtgaggatgacttcatgacgcgaactaagcccattccatatgaaattacaagttgtgcatcaatttttgacttcaagaaattgttctggccttcttgagtgatttccattactccatgagattctgaaaaatttcaaagaatcaagaaaatgattgatttttgatcattttttgaatttaaatg

SEQ ID NO: 396498 - DNA, 612 bp, Cannabis indica
gacaataaatttctatctcatgccggaaaggagattcttattaaatctgttatgcaagctctcccagcttacacaatgaatgtgttccttatcccggttggaatttgtcaagacattgagggagccattagcaaattttggtggagatcggccaaagataaaggaattcattggttaagttggaacaaactcacgaatcacaagaaccatggggaaatggggtttcgtgatttgagagacttcaatttagcttttctggctaagcaagggtggcgacatttaacggttgaggatagcttgatgggaagagtgtttaaagccagatatttctcaacagggtctttcctgatcgcatctttggatagtaatccaagttacatttggagaagtatttttgaggctaaggagttagtgttgggttttgtgccctaaataaaacccatttcaaaataatcagatttactaattaataaagatcagaaactgcattttatgttgcatggtcacatgatttatttcatgattatttaatgtataaattctattaagtccagaacatatgtatttgttcatgattacaatgtcgtcagcacagtggaatataatcatgat

SEQ ID NO: 396499 - DNA, 1338 bp, Cannabis indica
gagtccctgcgcgaacacgaaataatcaagaaccagtgaccttcaaccacaacatctcgatccgcctgaatgaccataattttcttttatggaagcagcaagtgttagctgcaataaaaggaaacagattgctgaagtacattaaagaaccaccaccagctgagttcttgagcactgcagatcaagaaaacaatcgtgtcaatcctgtgttctccgaatgggaagttcaagatcaacttcttgtttcttggcttctttcttccatgactgaaagcctcctaacaagaatggttggatgtaattcctctcttcagatctggaactctctggaaaagcacttcacgttacaggtttcgtcaaaaattctggagttcaggactaagttacagaatctaaagaaaggatccatgagcctcaatgaataccttctcaaggttaagcaaactgtggatctgttggcctcagttggtgaagttctaagtgatagagatcatgtggctgccatattcaagggactaccgagtgagtatgatacgtttgtaatatcatccaacacaaggattgaaaattacacagtcggagagatcgaagccttgcttcttgcctctgaatctaggattgaaaaatccaataaggaagtggatctgagtgctaatctggttacgaatgatttggagtccattgctgaagctaacctagcctttcgaagattcaggcccttcaatcgtggaaactcacagttcagcaatcaactccagttcaacaaaaatcctaatatcagattcaactccagtcctaatacaagtatccctgggagaggtaacttcaatgtcaacagaggcaacaggtttggtgttggtactaatttttctaatagatctcaatgtcaattatgtttgagacttggtcatattgtgcaagattgtccctttcgttttgacaaatcgttcacaggccactctttagcaagcagtgccaatccacctcaaacaccaacacagtcccaatctcaccctcaagctcaagcaaatatggcaacaaacaacaactccactgatacaagctggtaccccgattcaggagcaacaaaccactgcacttaccaggcccaaaatcttggagtcagcacagattatggaggctcagaccagctgtacatgggagatggaacaggtttgtgcataaaacatgttggtcaatctcttcttttaccaaataattcttctgaaccccttcttctaaacaacttgctgcatgttcctgaaataactaaaaatctcattagtgtgtctaagtttgctcgggataataacgttttctttgaatttcatgctgata

SEQ ID NO: 396500 - DNA, 742 bp, Cannabis indica
acaacagaaaataaaattagattcatagtgataagatgagcttttcatatctcatgacgtttatgttgcatttattaatccactattaaaattactgactatgttgttcgtattttttcagaactgattgtggcgtttacctcatcaaatttgttgaattattgatgatgggggagtctcacttccgtattagccaaaacaatgttgaagacatgagaagaaaaatggccatagaattttgggaccatgcatgcatcaaattgattgatgattgtaaaactccatcagttcaaatatgcaaatatgatcagtgagagtgtttccagatggttcattttcgtgttggtttagtgaaaattatctaacagaacagatttcaatttctagtttcaaaccgattagttgtttgagttgttggacagatgtaaattttctatttctagttttaaacaagcatggttagttttgtctgttagttttgtttaccttttttaaggaataatgtttgtctagaaagatttctaatattagataagtaacatgccttaaaataatttacactccaatgatatgttgacatcaaagataaaacagaacaattcgtatcacatgattatgacagaactcacaacacagccaaacataacttcattacattataaattaatgctaaaactctcatttgaattctaaatcaaaggtcaacaacatgctttattagatacacaacgtgcctaaagta

SEQ ID NO: 396501 - DNA, 952 bp, Cannabis indica
ggggtatggagagtgataagcttctaggttttgctcttatcctcatattaacataaaaaataaattacttttcttttaaataaaactaataaaaaccagactatactaccataaaaaaaacaaaagaaggaatccccaacataatgacccttatacccctcaacatatctcaaatattcaaaaacacccaagggtagtttagtcattttacaaatccagaccaattcacaacacctctaatacttaacgataataccccgataataaattctaaattataaaatgcaactctctaggcccaacgtcgctttccacagcttccgaacacaatcacagaaattaggtaattaaatataaaatagcataaaaacatatatgatatataaaatatatttctaaaatatgcattccataattattaatacataaaccttaaataattaataatacaaagtattattcataggcggtctttacaattatccccccgttaaaaggatttcgcccccgaaatctacctgaataactcaggatgctgggccctcatatcagattccaattcccaagtggcttcttccactttactgtttctccaaagtaccttgactaatgatatggttttggttcggagaaccttttcctttttatccagaatttgcactggttgttcgtcatatgataagtcaggttgcaattccaatgcttcgtaactcaaaacatgcattggatcagacacgtacttcctcagcatggaaatatgaaatacattatgcactgctgataatgctggaggtaaggctaacctataagcaacttgcccaactttttccagaatttcaaaaggtccaataaacctagggctcaatttacctttctttccaaaacgtctgactcccttcatcggggatactcgtaaaaagacatgatcaccaggttggaatgtaacatcccg

SEQ ID NO: 396502 - DNA, 1223 bp, Cannabis indica
ggatggcattgtatgaagaaggatagtcaacaacgatcaacttggtttggaggtttactccttctatccaaacatgcaagttgacctcccaattgagtgcttttggtcaccagtgaacccgattaagactgtggatttgcagatgattgttgactcgtcaactttcatatccctgagcgcattgagaaataaaatgttagcagaactcccattatcgatcaatacacaattaataaaacagtttgcaatgtataatgaaatgactaaggcatcatggtgagggtggagcaaatctgtggcttcgtcattgacaaagctgatggtctatccaacaactgtctctagctttcttggctttgcttgactgttgattggttctcgtgcatggcgtttagctactgaatacgtaattccaccaacttttgatcctcttgagatcacattcacggtcctcgcattttgagggggttcaggtggactctcttgtcttttatccccttctgctacagttgctttgcctttatctgaaaggaaatctcgtagttgtcctcgacaaagtagccctacaacttcaaacttgagtgctatacattcagctgtggtgtgtccgtgatcaccatgaaattcagaccatttggtcatatctttttgagcttccggcttttcaaccttcccaggccacttgactttatttcccatgcctttcattatagcaaccacttcaacagggtctattgttagagtataatctgggattggtgctttatcttgatagcctctaaacttttgggatgattgtcccctttcttggtaatcacgtgatcgttggggcggagctcttccactgccttgaaatgatctagatctgttggtgggtatggttcaacatgataggatagcttacgctctactcgtcttggcccccgattctcacgagaacttaagtagttggagatcggttgcctgttcgattcatcttcctcccattttatttgagcccatgctttggcaagaacatcctccatagtcctacaagggtatttagttaattctttatataggtcagattctaccagaaggcctttttggaaggctatgacggctgtgtccacattgtaggctatgattgacaccttctcgacattgaaccttgctacatagtctcttagcgattcgtcccttctctgtctaattctatagaggtcatctgatagcttctccag

SEQ ID NO: 396503 - DNA, 960 bp, Cannabis indica
tcaccgtgatgtttgtcggaatgatcgctgagttggtaaagggaaggtgtgggcgttgtattgacactggttttgtacaactggtgttgatcagtttcaattatgaaatgttggcaagtcagatttccttaatcgcgataccaaatccttgcaggaaaatggttcgtccaatggtgcatcctcaacagacaacacgacatcctcattgtcttcaacttcatccccgtgagtaggggtcactaggggtgttcattggaccatatctaaatatttttagacctatccagatccgatccaggtatatattggatgttagattttaccatccgattcgatctaattaatttcagtcatccaatcgatccaacatccattgaatgttggattggatcggttctatccattggatgtatttcatttatatttattggtttaatttgagtttatctaatattttagacttagtatttttttagatcggatcggatccatccaatattttaggtccagtatgtattggattggactagatccatccaatccaagataaaaagagtaaaattttaatgttaatttttatagatacatatagattttacgtataacaatataaaatctaattacactcatcaaaactaaatgaaaatactaattagtttgattagatgttggatgtattggatttttggacaccccatccaccatccgatctgatccaattagatatataaaaataacatccaattcgatccaatcacaattggatatccaatgtgtttggcagtcggttgtaattggatcggtcggttctcattggattagatcgatttatgcacaccaataggggtcactacaaaaaattactacttttagtgataattttttagtcacaacataaattttttgtgactaaaggtgacttttagtcacaacaaaaaaattatttgtgactaaaaaata

SEQ ID NO: 396504 - DNA, 706 bp, Cannabis indica
aagagccaagatgagcaatgttctctatgaaaattgtgttgggagtctcatgtactttatggtgtgttctagacctgacttagctcatgccatgaatgtagtcagcagaccctggccctgaacattgagaaacactgaaatggacaatgaggtacctgaaaggtactctggacactggtattatgttcagtaaggagaaccaactcaaggaagaaatcattgattttgtggactcagattttgcagcaaacctagacactagaaagagcctaacaaggtttttgttcactgctcttgagggcttcatcagctggatatctaacctatagaaggtagtagccttgtcttcaacaaaagctgaatacatggttggtacaaaaagccatcaaagaagttatatggcttaaggggttgacagagtagttaggtttcaaatttgagtatatcacaatttatgtgacaatcaaagtgttttgcatctcatgaaaaatccaatgttttatgagaggtcaaagcacattgatatcaagttacacttgataagggatattgtgtcatccaagaaggtgcaagtgaagaaaataagcacacatgataatcttacagatattttcactgaaagtgtaactagagacaagtttaggcactatctaaacttgttgagcattcaggacatataatgtcctcactcatttcttttggatca

SEQ ID NO: 396505 - DNA, 623 bp, Cannabis indica
acatataaattaaaagtcctacagtgtttaaaaatggtttaggtagagtcatttgataaagtctcacatggtttaaaaaccattgtgtctcataaaaaaagggagtgatagatattatttatttaaatatatttttacatttttcaatctttgcaaaatatttaaaattaatatatagatataaaggaaatcacaaaaagagtttacaagtcattttataattttttcctcttatttttccaattttctaacacaatttcctattttgttcatagggaggggtcccctatagtgattctcacttaccttctttaatagactggtttgttctctcgaaaaaaaattcttattttttttgaaaaccaaaccacacatataaattaaaagtcctacattgtttaaaaattgtttaggttttatctatgtatgttataaataatattcttactatattacttttctttgtctaaaaaatattaatcatttatgggtgattgattaatatcttacccgatgagttcttacttttcatctaataaagaaaaatataaagagaatgagatgacatcttatatgagtttcctatcattttctttgttttcccatcatgaaagaactccaca

SEQ ID NO: 396506 - DNA, 685 bp, Cannabis indica
tattttattgttcacaataattataaaatttaagaaaaaatatttcatatatgaattgtcccataataacaagatcaattaatatactatcatagagatttaaaattgtgtaattaattaaaattaatctcaaattaaaaataaattataaagaccgagtcttgtgggatcctaaactaatttagtgggcctggattgagcatgtcattgtcggggttgtgggaaccaaagaaataactgcatgttgaaccatttaccttgttaaaatatatatactggtaaagcatatacaaaaccttcaatataagtatccaacaagtttctctaagttgttgtcacctactgaccagacgacaactcgcccttaggttgagattaaatttggatgagatcaatggtaatcgagatcattcaaatcttttttagtacaaaacttttcatctatttattatgcatatttttctttgacaaagtgcaataattttttatttggatattatttattaatgcatgtgttattttattgttcactattatacttcatgtaatacaaccatcaatacatattaacaatgaaaactataagacttcccaccaagataatttaaaactttaaatttttatagtgtaagagttgttccatatattattgtttttttaaaaaaaaatcaaattattaaattaa

SEQ ID NO: 396507 - DNA, 670 bp, Cannabis indica
gaacaatttttagagttgtcaaccacactaaatatgttctctaaatacactccttaattaaaatagggagtgcgataaaaaaaatgagctccactattaaaaaaattgttctctataatagagaataaataaagagctctaaatgttctctaaatgtagagttttgtttaattgttttgctaaattttttagtattaattttaatcaagaacactattttttttattatttcattaaattaattaattcatattaataaattcaaattataaaatattattaaaataatcaaatggtaattaaagtagagagtatatatggttacaacaaaaataataaaaatagctctctactttaactttttagctattttagttaaaatgtgggccaaaaatagggaataccatattgtagatgctcttagtattttttagggttatttgcggcaaaacctcctaaagtgggcaggtttttgcaactaacctcctaatctaaaattttggtggtaaaactacctaaaccaccagtccgttaacaggtagccctttccatccatttttgggtgttaactgccatggtggaatgtccacgtgtacacagtatacacgtggtacaattttattagtccacgtaataaatatttaaaattaaaataaaaaattatttattt

SEQ ID NO: 396508 - DNA, 522 bp, Cannabis indica
agcttccggtactggaaaaaccaacttcattgctgccatggctaggtttctctgctacgacgggtacgagatatctccaaagtctccgaaagaaaatataaatctaatgaatggaatcgtaatttgaggggaattagtttcatcacgatcgtcaaagcatataatgcttcacatgaaaagtagcactatttaatccaagttaatgtttacaataatcaagattaacttgtgcttgcagatgctctattattttccaagtgcatttacttgaactgggtgagattttgtaacaaaaataatttacaaaatcatcaattgcgattcagtaaattgtgtctagtaaacgtagttccattaaacgaaaaatatatgttcagcttgctataaatatatggttacataccttatttgtacttttgccgcaatctgcatgtaacgaccgccttaataaattggattagaaaaggcaattagcactaatttctattattttattattatttatgaatttaattattttgg

SEQ ID NO: 396509 - DNA, 501 bp, Cannabis indica
ttattatttattagaatattagagatttgacattaggtattgatatgttagtactctttgttctgttttttctttttttcttctcaaatattttcaataaatacaataagtcatgctcgctaattagtgttggaggttgttgaaaatcccaaattgtatttgtgctaaggtgctacaagcttcctatgtacatgcacttctaagggatttagtgtttggagaagtcttgtttaggaaaaagaaattcttcttaaatgaataagatccatgtttggtaaattaaatcttagtgactaaagagtttgtattttcaagtgggtttttgtaacgcccgtattttataataataaactcgaaaattaattttaataatttatatattaataaccacatgaatcgggatcccgagtatcaaaatacaagttaaaagtactttactactatatacatatatatattttttttaaagtttagcggacatgcatcctcaaaatacagact

SEQ ID NO: 396510 - DNA, 879 bp, Cannabis indica
aagttttggtcccagtttggggtttcaatttcggggtttcggtcccccatctatgtccaggtcctaggtgttgatccgggtccaagtttgtatttcgattcgtgttcggatcttgagtcctggtctgagtccaagtcttggtttgcgtttgggtcccacttattccagattcggatctcgatcttattccagtttatgcccaaggtcttgggctgcgtcctattaatgtgtttgggtccaggtttggggttgtgtccctgtagtcaagtcttgggcttcgggtacaaggttgtgtcccgtgtctcgagtctggggtcgagttttgggtctcggtcccggttctggggccaagtttcaggtctaagtcccccatctagctccacatccttagtccaagtttggttccaggttcgagtttggggcctaggtcccccatgtaggtccggatcctaggtcacggtctatgtccaagtttaagttcgtgtttagatcccgagtttgggtgcgagtcgaggtcctagtatgggttcaggttttagtcttggttcgggtcccggtctgagtcctagagtcccttttcaatatcgagtctagatcctgatctgggtcctaattaaagtctaggtcccagaccaggttctggtctaggtttaggtcctgagtctaggtctaggttcgggtctatatctgggtctgggtttggggcctcggatccaatctcggtatgggtatgggtctatacccgtgtcaaggttagggtgtatttagggttttgggtttagtgtttagggatttagggtttagggtttaggggtacatgtaaaaattttaggatttagggtttaaggtttagggtttagggtttaagggaccgcttca

SEQ ID NO: 396511 - DNA, 683 bp, Cannabis indica
  modified_base (676)..(677): a, c, t, g, unknown or other
gtgttgtgtacatatatataaatacctaggggtaaaagtggtgttgaagtttggagccaaaacatacgagcacattagggagtttatcatagttgttgactcactcattgcgtcttcgtatggaaagccaaagatcattaaacatttaggagacgacttagcaaaaacctaacaacatattattattttcaatatatcaattatcaatatgtacaagtcatgatgttaacgatataattaagaaataatgtgcattgctatttggtacttaaatgtcgaatatcataccaatttagtattttttataattggtaataatttttcatattatttattaaatcataatatgtgagaactaatattaaaattagagatgtttattggactacatccaatatttttaaacatatttagatccaatccaattatatattggatgttaaattttatcattcaatctcatccgatcaattcaatcatacgatcgatcaatttgatcggttttattgcattggatgtaatttcatatatatatttattggattttccttgatttatccaatattttagacctagtatttttttttaccggattcaaatccaaaaaaaaaatatataaatgactcttataaacaagatgcaccaagtcaagcacgcttaactgtggagttttttnntggtgg

SEQ ID NO: 396512 - DNA, 592 bp, Cannabis indica
ttctatctgagagagctgactcatcagagctgtggatctcactgaaagatgtttggagctgattagtgaatgtaccataagtatgtcttcctatagcgagatgaatgtctcgctattcgttgtccagattcatacaactgttatacttagttggtataatgcatattatacgataagtgttctaacagtcaacatgtctcgtcgacacctctttatatgcagcgaggttgatgcctcgctatgtatcattgacgtcattctcatgattgtatcttcagatacgaaatggtttctcgtcaatatgtgaattaatagtttgcacatctgtgtctcgcttaagactttacagtcaacgagttatagatatactctataaattctgcatttaatgagttattccattttaatatcctttaaaataattaacattatattcgttgattcgtattctccaagattaacacgtgtcctcctctgaagtgcaagtcgaattttgggtgtaacaaggactacttagcaagttgtcacgccagtgccatatcaatgccacgtgtacaattaatttaaaaaaaataactaaatttccaactta

SEQ ID NO: 396513 - DNA, 545 bp, Cannabis indica
tttgtgcaggttattagttgctacgcacacttactgacgctgaaagaacgtgaaacaaccccagatggagtaccgaaatattggtttatgccttgtcgggtctctgtaagtctcattagtattaatatcagcacgtgtatttatattttctattcaaactgtgtgatttgttttataaacttatttaatttatttgtctcatattgattgtttatttatatatgaaattatacaatcaaagtattgccgaatgtttatttaattttttatttgtgttgttggaacaatattattcatgaaggacattattcacatgtacttcatgaataatgtatgaacttgtgattaaatatgatacagaatacagttgaggaggaggttagatcgatcttttagttgtttttctttcttttttttgtgtgttagaaatttttgtctatatggataatcaatgagattattgatcattagatcttgagtgctagcattaatataaacaattttttttttttcatattttaggtatgttaacataataatggttg

SEQ ID NO: 396514 - DNA, 729 bp, Cannabis indica
agaaaattattttttatgttgtcctatatactactatatagtataaataagtctattaatttttatttgtacactaaaattaatttttttggtcacatataatgattgcataaaatacttttaagattcaatttatttatgttttatcaaaattttagtattaagacaaaaatctatgtatttatataaatgaaagcaaaaaataaattaagtggtattttatatgattttctttttatttttactaatttttgaggctttatcattttgtgaagaaaatttatgataaatgttttagaaacaatccaacattgttaagaaactattttttatgttgtcttatattgtataaactaggttaatattacgtgcgcataatcagtttttttttaattaggtttaattaagtaatattaagtgcaatatatcgatgttcaatttttttaattaggtaatgtatttttatgttttaatttttgaaatagggtttgaaattttgatctttgaaatttttttagctattacggttacattaatgtactctttaaatgtgattatatatgagaaatttagcttagtatgcttaaatgtaaaatatgttattttaatatacaacccaattagaaatagtatatatatatactagggcatcctagtgaaaaagttgtaaaacattggcaatttcagaaaataatgaatgtgaagttctgaaaacagagattgaagcca

SEQ ID NO: 396515 - DNA, 622 bp, Cannabis indica
tgtattactcctctaggaatactaaattctaaactgtttgatgagtgcatctgaatgtacagaagacacatttcttattctatcccaaatgaaataaagataaaatagtgaagagctttctttagtttgaataactttctagtaccttttaaaaataaatcagttatttagctttcctggtggaactaaattattatagatatgttcgtacacccttcctaaattattcctataccccagagtaatcaccatctcaaatataaagttctgagttgatgtagatataaagattctaaatacacccctatcatccaacatataggtcactcttagagattctttcttgattgtctccctatgttttctgtttgattatatctttgatggcttccactcaacaataggagtctagtttaatgcatacacaagtgtgcatttaacctcttactattggtacttagggatatcttgttttgacattttatctttatctagaataaattccttctagactaagtcatcaacatatcattctagtattaacattaatgtaaaatacttgcttgagattaagtaatcactagagataccataaaatatttcataaggaccaggaattgtg

SEQ ID NO: 396516 - DNA, 916 bp, Cannabis indica
  modified_base (67)..(67): a, c, t, g, unknown or other
ctatcagagaatccagccaacccaaggccttcaccagaggacttttgcgcgagcctctttctggtanagaggtttagttcctaaggctggtaaagagatatctgcttcaggaaatgggatcttttgatgatgaggagaatgaggtctgcgcagagatcaaggctctctacgtgcaaacggtctttcttgagctacatgtagccgatctttctccaagctatgtgtagtcggtctttctcgagctatatgaagacggtctttctcgagtttatcgacttctcctctcatcctttgtttaggaagatgacttaatggtttgcccctaaggaatatttttgtaaagacaagtttgtagccaaactttgggttttttccttatcttaaatgctttgtactattttcattcgagcttaatacaattgtgtttgcttgcgttaatattcacaatgtaaacaactattttttttttatcaaatatcaagtacttttggatttttccattgctcgtaatcttcctgatagtagttagtgatctaccaaactttttgattttcgagcagttgtcaattctgcctcgctatagcagttataatctgccttaagcaaacttaaatatactttaatgattctatcacttcgtatatttttaattttctcgtatgaatagttatattatctatctatcttctaggtttaagtacttttatcaaggcgttgctgtaacaccctaacttgcataggcgtattacgtgatttttaaacatactgtgcagctcgttgctaatcaacgaggtttatggaaatcgtgattagttaaaatttttgctttttaattaaacttataaaatatttatacaaaaatactcgggatcccgattacaaaacatttaaaaaagttcactgactatacaaaata

SEQ ID NO: 396517 - DNA, 562 bp, Cannabis indica
gtgcacgcatttagggtggatgatgagctaatttgaacgcagaatctttgatctcttctttatgatgtactcaaccttaatttttttctcaataaaattttgttcattgtttaaaaaaaataaaatttaaatattattactattaaaaattaaacttaaattttttattttataaattactagaaaatgctcaaatccatctctacttcttttggaattggtcaatgatttttgtggtcaaatgtgaagaagacaattgtacctaatacataaacaaaaggataaacgtttaatttaaaataataagataaaaaaaattgatgggatgagctacctaaatagactaaattactattaattattataatatgaccagaatgtgtcatttttatgggtatgtattacatcaaaattctattcctatcattatcttatgaacacattattaaggtatggtgtgaaaatgacaaagtgaggaaaacaaaactacctattcacaaaaaaaaataagagtaacttgcggcatacatatttcaattttatgccgagtaacagataaata

SEQ ID NO: 396518 - DNA, 526 bp, Cannabis indica
aggtaaaaagggtaagtttggttgctcaatttttttctatttatccagctgtgatattctgatcttgtgtgagtttcctattttatttgatcagatttcttgagcagaaaaccaaagctaaatttttcttttctataaaaggaaagtcgtagttactgctcacgattttgtaggtacagaaatggaaatttttgggctgtttgaaggtctattttggggatttttctagtagattgtggtcttgttcagaccgtgtatgagttgtcaataaggtgtatagtgattatgaatacaccttatagcagctaggtcatgtacctcttttgtatctttgattttcactcatatctttagaaaagagagtctttgttttgaagtgaagagcttgttcaactcgttcatttgtattttgtattgtcttgagtctgtaatcaagcctgcaaagaagaagaacaacagtgctacctttaggagaagcttttacaaagctttcgggagatttcttttcaagtcttacctcgggagg

SEQ ID NO: 396519 - DNA, 590 bp, Cannabis indica
aatattttcattcaattatattttgatcattttttaaaaaataattgtttatgtggtcatagttcacgggtatagaggtatagtatgatggaatttatttgacaattttaattagctactcaaaacctaatttattagcattaaacatacgaacataattttaataatgcttataattaataattaaatggtatttatagtattttcttgtttttttttttttttttatgtgtgtgtgaattgcggtaaattaatgttgagttagtgttacattaataaatttttaacaaaaaaaaaacggaaaaaaaaaaaactcaagtcaaaattctaaatgaaaatcctagttcaggagaacaaatcctattaattaattatttaatgtattaatgaatggagagatattatcaaacttaacacgtctacctaaaaattattgtagttgtataagtttaacattttgaagtttttttagatatactaggtgaatgtacgtgtcgagccacgtattgctagtttcatttaagattttggtctttttaagattgtgaatgtattttatttttaaagattacaaattttttgtttgaaaa

SEQ ID NO: 396520 - DNA, 820 bp, Cannabis indica
aatgttaaaaaaaactagttttgaagtgtaaaaatagaaaaaaaaacttttttttaagttccagcccttctgcaagaagtgtgtggcgaagttctggactaaggcgattatggtttacttttttggtcattaatttattaattactttttttttcttgtaagtcctttaattacaatttatttaattgcttgagtggtggacttttttgttttgacttttaatatgatttgtattatttatgatatttatttttttaattattttttccttcctttcatttatattacagtaagtttttattttagttgctcttcttttaaatccctaattacaatttttaatagagtaatttacggcataaatacttaagtttaactcctagttacaaataaatacctaagtttaattagatcattaccgaaggagaagattattgtattgatcttcttgattgatgccaaagtttttcttattcccacatcaatgtcttcttctgtgatgggtttaagagcagtcgtttgagagtggttcggttcggctcaatgacgtcctccgttccagatttttgttttcatttattaatttactattactagtttaattccaattaatatttttatggggttagaattataaggagttcattccttaattaattttaatgatgtgatcgtatttatgtgttgaaactaatttagtttttccattagtcttgtcttttgacatggttctttagtcttgtcttttgacatggttttttagtcttttccttttagtttttttctggttcgagtcttgtcttttggcatgggttgtgta

SEQ ID NO: 396521 - DNA, 905 bp, Cannabis indica
agagagagagagagatagacttagagttatttgaaggctaagtgacttataggaaactttagtttctaggctatggttaaggcctttatataggaagccttaaaccctaggtttacaattcaaatcccttgcaaatcgtgtagtaagttagatatttataaaagactaaaatgtccttgattctagatattattcaagcattctatttggcttttagggccctattcccagcccatgccttatgtccacgtgtagagttttacatggagtcctgccaagtcaaaattggccgcccatagacctacagggaagtttggccagccatggtcctaccaggtcaatcctggccggccatggtcctgccaggacctggtaggacaaggcatctagggtctggcaagacaaggcctacaggacctggcaggtcactatagctccaccaagaggaggccaacctttgagtgtggaggccagccttttgcaagttgagcacagctttgtacatcgtttccttgaagaggtcaggttcccttagttgaatggagtctccttgggtttggaagtcacttcttggctggctagcttgtgcacagatcctggtcaacctatagactcaccctcgctgacctattggctcctcttggctggctaaggatgttggtacaactccttgtgggcttgattcactccctttagttgttgctttatggctttgctatatcttgcatggaggctctgttctgctattggcacggttgtactccacctgtaccctatctttggtctacgtggacatgccacgccaggtggaaaaaatttgggataaaagtttccttctttggagttttacctctgatcaacaatccatccccaacaccttcttcttgcagttctaactttctctt

SEQ ID NO: 396522 - DNA, 663 bp, Cannabis indica
acgccaatacccgtcctcaaaagcttatataaggcaagccaactctctccgtctttgatccagtgtcatatcattgtgcgtagacaaagcaacgcaagaggtattagggccagatgaaggagctcatacccgatacggttacgatgactaactcagacaaggtcgctaaatgcaacaactctatccagctagagactctggcactggtgccgacaagagggatggatctgtgttttgagaactactttccctgcctttccaacagttggtaaagttgctcaaaaacagatcctgtgatggcaactgctgagaggagaccatcagtactattggcagctgctaggttacaaatgaggcctgcttatggtacttttcgtagaggcgtgaaacttttggcaaagtttgccccatgtccttctcgccgcttggtgtaactacaaccccgaagttatattagagggaatcaacttgggaaattataaaccaactagggagccctttgtggtgatattttgcacacataagtgcatgtatcgtgacaagtagtaaactcaccaagagtgaggttgatcccacaaggattgtagttaagtacgttaaaattaaacttttacttctatttggttaaataaaaatttaaaaaggattaaaactagaaaataa

SEQ ID NO: 396523 - DNA, 714 bp, Cannabis indica
tttcacgcacgaaaaaataacattgatgcaagagtcatgctgaattttcatgtagcagactttggcttctgcgaggaaattctaaagttacataaaaattcaagcgatgactttgctttaaaagacaaaagggtgaaacatcactaggtgcgtgatagactccaagaagtcctcttgctggaaggagggttgaagacgtataatattcccagtgatctttcttgcacaaaaaaatacgtgcatgcaagagttgtcttaaatttttatgttgtagactttggcttcctcgaggaaaggtgaaagttacatacttttctttaaatgaccaaagggtgaaacattacttggggaatgacagactttaagaagtctttctgttccgggatggagggttgaagacgtatcatatccctagtgatctttcacgcacaacaaaactatgggcatacgagagtcatgttaaatttttatgtggcaaacttcgacttccgtgaggaaaggctaaggttgcataaaaattcaagcaatatattcgctttaaaagaccaagtgaaacatcactaggcgtgtgatagacttcaagttttcttggatttcaagctcattttagcaagattttgtgatctctagttgttggtatgtttcctctagctttcttttaagtttttttgaagttttgagaaattttgataggttgcatgcttagttttgagt

SEQ ID NO: 396524 - DNA, 661 bp, Cannabis indica
tgattctccatcttggaaaaatattgatgacatgtatcccaaaatagcttcagaccctagaaatcttcgactaggcctttctgcggatggtatcaatcctcatagttccatgagtagcaactacagttgttggccagtcaatcttgttatttataatcttcctccttggttatgcatgaaacgtaaatttgtcatgttgtcattattaatttctgggcctaagcaacctggaaatgatattgacgtgtatttggcaccactggtggatgatttaaaacaattatgggaaggaattgaatgctatgatgtaagaaaagatgaaacttttactttgcgaggagtttttgtggacaatcaatgattttccagcatatggtaatctgtctgggcattgtgtcaagggatataaagcatgtcctatttgctcagaacagacatatggtgttagattaacacactgtaaaaaagttgtgtacatgggccatagacgatttctacaacctactcatccatttcgtaggtactcaaaggaatttgatggtacaattgaagatagaattgctcccactcccatgactggtatagaagtttttgacaaagttagtcagttggtgaatcgatttgggaagattcccccaaatacaaaagataaagaaaaagt

SEQ ID NO: 396525 - DNA, 685 bp, Cannabis indica
tttgggtcagggtccgggtccgggtcccgcgttagggtccaggtacgagtgtcgggtcagggtcagggtcaaggtcagggtccaggtctgggtcctgggtcgtgggtccaggtcccagtccgggtctgggtcccgagtttcaggtccgactctaggtccgaccgttcagatccaaagggatccgagtcttgaattaagtttttttaaaataaattgaaatatggtcggatcagatccgatccaaaaaaaaaaaattaggcagggcgaagcggatctgatccaagatccaataagtatctgaatgtttcggatcagaggtgatccgtcaggtcggagctccaacccgctccaactaaatggatttttttgatatgcctaacaaggcctcaaggaactgcacaaataaggtataatttaaaatataaattcttatgccttaccattttgtgaagtttgtgttttaggaaaacaaaataagttgaaatttacattggcaaggcatacaacaaagaaaatactcgaatgtatgcatgttgatctttgggagccatacaaagtgcctactcactctggtaagcaatattttctttctatagttgatgattatagtaggtgtgtttaaacctatatgctagaaactaagaatgaatgcctagaacatcttaaagtttagaaaactcagatg

SEQ ID NO: 396526 - DNA, 863 bp, Cannabis indica
caagttctagaaccttggaagtatcaaaacgatatctcgaaagatctaaaataagcacccagggcccaggttgacaaatggcctaatgtgctgggttctgcttatctgattctaattcagtctcaatcgtccatctagtttttcatcataactgagagccataaagttagaagagtcaaattcaaagctttatattttcacttttctaacaaggtgatttactcaaaaaccaagtagtttcgagtctcccgtttccatagaatagcaacatctctaagaactagtgaccaacttagtcagaacacaaaaatggactaagtgatgtcaaaatatcacttaggcatcaaaaatacacccagcacgttttcccactcacccagcgtccaggctgacatcacatgttgacctgggtgttgggcccagaataacctttagtaaaacgacaataactcactcgatattgatctgatttacgcaattcaacttgcatttgaaagatatttcaattctatatcaagtcatatctcacacctcaatcgcaattctgaatttattcactcaaaatttcaccctcaagggagttacaaattcaagctacaacttaccccaagcgggtcccgcagatgtgactcaagctctacaaattaatgaccagcctccaaagtcaatttcaccattagatcatcatatacggtcaaaaatagtctaaatgtattttttcatatttcttggattatttaattctcatttcataggttctccttcacctataaatagagagccccactagcttttttttaagttcaaaaagtagtcataagatcagagcatttctctctagaaattagagtatccggacttag

SEQ ID NO: 396527 - DNA, 933 bp, Cannabis indica
tgtggatatcgataataatccacccgatgaggatgacatggatgaagtggaagaggaagacatagatgaagtagatgatgaagagatggaagaagtagtggaggaagacaaaaaagaagtagaggaggaagatgaagatgacaatgaaaacaatgctaaaattgataatttagaagaaatttatactgatgatgattattatagtgatgaataagtggtaatttattacatatattatatatattgttaattagtactttattacattatgacattaaaattattataatgtttctaatatttatatttctcagatatgacggatgttgctcgttctcacgggggtgatggaggaagtgatcctcctcttggtccgacaaatattggagctgactgtgtgcgaggttatataatttaaaacatttaagttatgttattaatatttatgggaatatactaacttatgaatatttaaacatgacagcagctcctccaaagaaacgtggacaccataagggattaagcacacgagaaaagcgagaaaacctcaaacgtccactgcctatcgagtgggacatcaaaggaaagacatacaaggaggtaggtctgtacagtttagatttttcaagggagttaggattgctcatatgacagcacacggatccaaactacacaagttgggcacaagtacctgactctgtgaagaagaggatattgtctagagtagaggtgaattatttttagagttaaattgcttcttattaattatataaaatattaactaataaagttttttttacaggataatcttttcgatatcggtcgagaaagatatggatcagatcactctttggtatcttaataggcattgataaatcttgtgccaaaaaatatagcaaattcaaacatcaactcaaagaacacttagaaaat

SEQ ID NO: 396528 - DNA, 633 bp, Cannabis indica
ctcggggagaaaaccataatcccaagaccctagaaataaggctcagcgctcaagttgacatcagtcaacccggtacgctggttttgatcactcaaatgccaaatttaattccactattaagtctgaaatggtcaaaaatagggtaggagacctcatcctcaagttctagaaccttgcaagtatcaaaatggcatcctgaaagctctgaaatgagtacccaacacccaagttgacaaatggcctggtgcgttggattctgcttatctaattctgattctgtgttgaccgtccatttagtttttcacaataattaagatccatgaagtcagagaagtcaaattcacaactttgcatttctcatttccaacatgggaaactcactcagaaatgaagagtttcgagtctcagaacaacaacatctccgagaatcggtgaccaactttgccagtacacaaaaatagactaagtgatgtcaaaatatcacttaggcatcataaagtacatcccttggactttatttcacttacccaacatctaggttgacgacatatgtcaacctgggcgctgggatgtcaacctgggtgcttggttgtggactgccttcagtaaaatagccataactcactcaatatt

SEQ ID NO: 396529 - DNA, 595 bp, Cannabis indica
ggtataaagtgtaatttcctcataataattataaaagacattattttttgtaaaaaaattacatttttacgtttaaacaatttttttttaaaatttttacggtttttcataaaaacaacaagaaaactataaaagtaacataaaaataatatctaaatacaatatcaaagtaacaacaaataataacatacaaatagtaaaaaatcaacaataaattaacaagagttcaacataaaaagactatattttctataaataaaataaaaaaaaatcgtaataatgattaaagtttcgtgaaacgtattttcgtattttttttgtgtatttatgaaattatctaagtctttttgtaatgttgaagctagatgataccagtacaagttttgtagcctgccactactattaatttcaaaaaaaaaaaaagtggagaagaaattaaatcacaacacaaaaagaagtttagtttagacatcaaccatttgattgaagataatgggatatttacatggtatactaatttttgccatttttttacaaaaatactgccaggcggtattttttacttttttactgtatttttttataagtttcatac

SEQ ID NO: 396530 - DNA, 904 bp, Cannabis indica
attggcatacacaagataaagaagacatgtagctcaattcataaatgaaattcataaaaaaatatcacaaagagaaaattttattaataatttcaaaattgtcataatgaatcgtctgcaataatatgaaacagggaataaaatcccaaaccaataattgaaactaaattgttcataacttgaaacaattaaatcaaaaattaaaagaagattcgagcttcatcttcacttggacaatctccacccttctgtccaaccatccgactcaactcgctaggatagtaatccaagtttaagcagctggggctgaaataagaagaaaagaaacatggttagtagatccagaattaataacccaaggggataataattctctaaaacacatgagtttatagcataaatagaaataccttatttctttgcgaacatcttaggacactgtggtttccaatagcccttttcgttgcaatagaagcactttcctttttgctttgcattggaattagcagcctttttcttgctattcttccaattcttcttgttgctgggttttgaagcagaggcaatgtttgcctcagccttggccgtaccattagcagtgccagaattaggagctttagttcctcctttctgtggtcctccaatcaaattttcaaatctgaaggttgttgatcaacttgtggaagtcaaactcgaacttgttcgtgacataatttgatgtaaaaggcagaaaagctggagccaaactaatcaagatcaaactcacttgagttgtctgatctataacagctccatgattctcaggctcttggaagtaactagtcatctggagcaggtgatcatgcacattctgatgaggtttcatccatgcattgataaaattcttggtcacctcaaagcgagc

SEQ ID NO: 396531 - DNA, 502 bp, Cannabis indica
actgacgcccgtacttatgccccagtacatcacgaggaaaatcacatcacctaatcaggtgagctcgtacctacactcagtactcatcatatatcactgatgcccgtacttacgcccagtacgtcgccaggaaaatcgcatcacctaatcaggtgagcccatatatcacatgcataatatcatcacattatcgatactcaaccagtcaatcttttcattatataacaatattaactatatctcaatattaatcaattcattgcaatactaattgtattacatataatgtactatgagtacaatatacttttcttacctttaatctaggttcattcatgtcggccaacccaagtggagaactattccagataatctcggccctatgtcacaacaatggtaaacgaagaactgtttattccaaaacactgcatatattcaaataagacaatctagtgtttcctaccaaactctcatggtatatatactactaaaataaaactta

SEQ ID NO: 396532 - DNA, 541 bp, Cannabis indica
ttatggctaatacttaatgttaatatgctaactttgaccaaaactcttagttcttagccataaatattgtagctgatttgtcgtaaaattttcttaatagcctgaaaatataattctaaactctaggcctactatgaagctctataatacaccatatgagatgtatcctcaaaacaataaatgaatatgacttttataataaaaataacaattaaggctccccatggtacaacttactggtaatcttaatgacgtaattaaatattaatttacgtgaatcaatataaccagcgaagtcacaacttaagtgattaaatttctaaagaatcggttcaccttaataaagtatgtatgaatgtaatctttagtatcttaaagatatctcatcactttgtatgaaaaataaagtggtcttaattttaattattatgatgctatttaacgatcctgtaacaaatgcaatgcaaaatattattcagattcttattaggcatacattaggcatctaaaaatagaagcaaatgaatgttcttaatttatt

SEQ ID NO: 396533 - DNA, 806 bp, Cannabis indica
tgaaggcctgcaagatccctgaaatggtcctttaagttcacaaggctcctccagtaccaactactctgagtaggaaccttgtaactccaccattcatgatccttgagatagacactgttaatccatttcaaccaaagactgtcctgcttttgagctattgcctagatgtacttccccatggcagcttggttccattcttgaattttcctaaagccaagaccaccagcagctttagattgggatagagattcccaaactattagacctggtcctgttgcaaaagcttggcctttccatagaaaagctttgcatattgattccagttgcctaatcactttgttaggaaaaatgagcacttggcaccaatatgcatgaatagccatgagcactgaattgattgagacaactcgagctgcaaaagaaagattcttggagctccaggttcttattcgtgcagtcatcttttcagccaagcaatgcattcattcccagaaattcttttagcacaaatgggtacacttaagtaagtaaaaggcacgtcttttagagtaaaaccagaggctaaaaggactctattaacctcctcctgtggcatgttgttgcaatatattactgatttttgggggttaggttgcaaaccagacgaaattgagaacaacttcaatccctgaagcatagaaatctccattgcagaatagcattacatcatctgcaaatgccagatgattaatcttcaagtctgaacatctctctgttggaatttattttaccaggatcttagatcttctcacaagtatgttgtttaa

SEQ ID NO: 396534 - DNA, 764 bp, Cannabis indica
tttatttttattttttctattttcaagtgaaaaaccaaagcccagctttgtataatattgctctctcattctctatcttgattgtatcaatggtatatatgtatataaatatgtaaatatattgttttaattttcgtcattatttacaagagtttatgaaggtctttccttgtatcactctgattcatcccttctcttagtggtgtttgacattgacaggtttgtatttattttcctgccttaattttcttaccgttgtatcgcaacttcaactttatctccgactccagtggtctctagtggttggcctaggctgaggagattttttttcttccaattatatatatatttatttaatatttgtgtttatgtatttattaaaacttttatgtgtttaattttatgttacaacattagattgttattagaaaaataagtttttcattgtttggaaattatatcaataggtcagtaaatttaaaattctatttcacagtgttttgctttgattttcatataagggtattctaaatttgagtccaattgtatgcatattcaaaacaaacaataagtccaaagtacaattaatttaccgtttaaactactgaaacgatgaaagatcaagataaaatttcactatactttattttatttttcatatggtatttgataaaacaaattgtttaaataatcatatcactttaattaccaaaatttatataaaaaaaaaacaaaacctcaaataaaactaacaagtggctcgg

SEQ ID NO: 396535 - DNA, 929 bp, Cannabis indica
gcttttttttatgtaattttgttaaattagtaatttattaataatttaattaattaatttttttagttgtatacattgtaatacataaaaggagcagggtcggtcctgaaattttatgggcctagacaaatttgattttggggcccttcaaaatatatataattttttttttttggaaaaaatagtgttatgagattcgagacattgtataatatgtcatacaccttaaccaactaagctatgaatacttgttgtttacaatacacttaattttacttaaataaaagcctaataattttattattattttttattttgggcccccgaaaggtgtgggccctaggcacgggcctagcccgcctatgcctagggccgaccctgtatatatatcaagtagatatgggaaaaacttatttatttgatcatgtacgtagaaggcaaagtatgaggttttcatcacgacatgattctaattttaattttaatgatgtacaaaaaccaatagaagaaaagaaaaaatgaacactaaaagaactaaggggagcagtgaataaaatgctaagaagtctctttaagggtaaaaaaaagtaagaggaaacaacattctgaaaagcctggtccaaatccagagacagtggatgagtccacaagtgacggttatcactcagatcatttttctagtgatcctattgatgcaacaatatatgaagaaaattattatcataattttgaatttactcctaaggaattttcattcctagttggtgatctagacaaccaagatcatgatctagataaccaagatcgaagaaaatcattttggtactgaacgtgtaattaaaattttgttataatataaagtatttttcagctattctttaaattttcttaatagtcttagtttttttttatgtaattttgttcaaatt

SEQ ID NO: 396536 - DNA, 1098 bp, Cannabis indica
gagattcgggcagtctaacaattattctaattgcaaacaactaggccatacaaagaccacttgcaaacaaccagtacacgacaaggtatattatttccttaatgtcaattaactttgtattgatatttgtatggtatacacactatgttaacctaacatttatcatggtatcaagaacctccccagaagaaaaagatgggtcgtcctcccaaaaagaatccagatcctcaaactgttaagaggaacatgaggagaaccaagcagcaagaaagggaatcaagaaacactcaaccaccatcatctgcaaattagttgctgcactactcaacttttgtattgtattttggattatgtcatagtaattaaggccatattttgtgaacaccttagatggcatattattagtagtgaatgttatgttttatgatcttttttatcacattgcctagtgctttgtgctttgatcacagacttaaaacattgccttgtgcttttttaatggtattagtagtgaatgtaatattgtatgatctttttgatcacattgccttgtgctttgtgctttgatcacaaaattaaaacattgccttgtgctttttaaatggtattagtagttgaatgttttgttgtatgatgtttttgattacaggtttatatacttgtgaaacactatatgttatctttttgcattgttttgtgatctagtattaccaaaaatagaattacaggttttgtttcaaatgacacagttttaattgtaccaaaaatacaatttcagtatatcctgcagttgacaatacaattatctcaaaaattgtaagtaattataccaaagttggcagtaccatattgcattaagaatttcagttttgacacacaaattgcattaacaacttatgttatacaaacaccaaaaccagtaccacatacattacaaactcaataacaatgacaatacaagtgccatgtccattacataataccattacataatattgaaagttggcattacatagagattacactacttcaccagataaaatacaaaaacaaatacacaagtaatcatcagaatttttttccaatttctcagtaccc

SEQ ID NO: 396537 - DNA, 1380 bp, Cannabis indica
aaaactgagaactgctttatatataatatgtaataataatatgttagtaatactatgctttttaatgagctagatgagtgttagtaataagtatatattttttaataataagtgtatacacccactgaaaattgaagacaaaaggaaaataggaaatatgagaaccagtcggagaagagaacatatctcgccgaagaagagaacatatctcgccggagaagagaacagtcgccgtcgccgattggtgggtggacacaggacgccgaactgagccgagaagagaaccactcaccgtcgtgggtgggtgcctaccatgcgtgggtgggtgtcaagtcaactggtcactagtgtgggtgagtcgactggtactggtttaagagtgtatatagattcacatttcacacagaattgaaaattgagtattgagaagagaatacgaataggcttagcttttgtttgaaattgaatgtaataaattagaaattatttattactaatttaggggtgcataatacatttatgatttatacaataatagattagtaataggcttagattctgtcagataattaagaatacaaatagtcgacgaataggtttctttttgaaatgatattaattattaaattagtaattaagtattaattttttaattaaaaaaaattataatttcgggttacgggttataaaccgactagaaaaaaaccaaaaatcaatcccgaacccgaaacccgtttggagtccttttcgggttgaacccacccgaccacacgggtttttgggtgatcggtttttttggcggcaggtcggggcgggtagtcagattttttgggtttgcaggtctaattgtgcacccctaatgtctcattccactcagatctctaacccttgtatcctttctgtagaagaatatcaccaagatctgagcccgaatgtccttctcttgaatctggattcttcacaatctttcacactatgattgagataccacttgatgtgtgtgggcactcactcactcactatagggttcggttttcagaagagaggaagagagagaaggtggcggctaggtataggaagaaggctttgagtttttctctaaaggaatgagatgcatcatctttttcctgaagccatcactatcattttatagtaaaccacttagggttaggttatatttatttggcattaaaataatgaaaaaataaatgataaatagactacatagtggccgaccatgtataggataatgggccccactttacaattttttccattttatcattttcacatctcattttctcaaaaacaataatttctaaactaaaattaattattaaataggattgtcatttaatatatttgttaattagactaatc

SEQ ID NO: 396538 - DNA, 921 bp, Cannabis indica
tttgcatcttgaatactcaggatgaggtctccatttcttattctaaccttgaccactatcctggtcacacttgaacattttttgttatgtcccataatttgtggttcatttagttttttctttctaagttgttcgtaagttggctccctatatttcaccacatccagtggtacaacaagaattgtcgatagtacaagaatagacataagatgagcctgttgttctctcagatcttgaatctgcttccccttgttgtctaatcatatcatgcatagaggaattcacatgttcccagcattacgacaataaaggattctcttccttatcgttttcctcgagcccagacagctcgctaattagatactgtataacttttctcacatttaatccacatcttttaaacacttaaaactcagacagatatcaacatcaatatgtgtataccatacacatattcttagtatagataatgactacactacttcccatcatacactatcgttatctaagcaggtagggcaataggaaataacatatatacttactataccaagagtcgacctgtgttcgcaacaaatatacatattcgagcagtcttcaggacctttaaaaccaaggctgctttgatgccaagttgtaacacccgaatctataggacacaacatgtgtgattttataaactagtttaatactaatagattaattaattattaaaaaccatgataatattaaaaacatgagaaatataaaacactaaaaatgggcatcataacagcagtaaaaaaggtgttctagggatccctgttataaaagattcacccaaaggaactatatacaataacaattcaaaatacaacagatacagccagtccaaaacaactcctggcaactcagcacgtaggttttgttgggttttatgcc

SEQ ID NO: 396539 - DNA, 616 bp, Cannabis indica
cactttttatatttttaatttgctggtatgaataattatattctctatccattttctaggttcaagtaatttattaaggcgttgtgatgcctcgtttagtactttcatagcttgtgaggaccgttagtattcagttttatacgtgagttataactttttattttcctttcccgtcggataggttttaaatcaaaaattatagttttttgatcccttcttcgtcaaaaaggtttgatctgttggaaatattttaccaggatctagatttactacaaagtatgtttgattaacaccctaatatgaagtctaaaacaatgaattaaacacatataatgtttagaaaaccttacatttggtgcagcggaatataatgactccttccattcagatctctagccctttattcctttctatagcagagcataatcaagatctgaatctggatctctttccctcctttttttgatgttgattctcccttcttgtatggtttaattttcccacagttcttaccatactatgattgaggggtaccacttgatgtgtgtcggcacttctcattcactcaaggtattttcgaaatttagagaaagaaaagagagagaaggggcggctt

SEQ ID NO: 396540 - DNA, 761 bp, Cannabis indica
gatcctcatttattctaactttgattccatcagtcacacgccaccgtgtccccttcaaaagaagttctcggccccaaagaatgcccctccaaacattagagcaccaagtacctttgcccgcctcaagaaactctacatttggaaaatagagagccttcaacacttgagcaaacaatacgttcggatttgtaaccagtttccaaccttgtttcgccaatagagcttgattgaagtcttccaagtctttaaaccccatgccctcagaccatttgtctttgcataacttctcccagtcccccaatgaatttgatgcttagctgttgtagatcccaccagaactgagcaataagggcctgaatctcgcgaatcagaccttttgttattctaaaacagcttatgacataaaccgagatcgcttggataactgatgtatcaacacctctcgaccggcctgagagaagagtcccatcttcgacccttggagtttgtcccagactttgttgtgaatcaaaccaaaagcttccttcttgttcctaccaacaaaggcagggagacctatatactttgtgtgattttctataaatgtaaccccaagagaagctgctagtctctgactgtaatgaccgctctagtaatatggattagaaaaggcaattagcaataatttttattattttattattatttgtgaattaaatttaaatgtggaccccaatatttagaaataaatattagagttataatttctcaatttcggagat

SEQ ID NO: 396541 - DNA, 1366 bp, Cannabis indica
aaggtgtcttaaggtctataactatatttgggctcctattatcaaggtagcttgcgattgctaaggcttccccccaaaatggttttcctaacccagaactgaatagtaagcatctaactttgttcaaaaaggttcggttcatccttttagcaacaacattttgctccggggtcttcactacgattctatgcctactgatgccaaattcttgacacatcttgtcgaattcggagttaacaaactccaacccgtaattagtcctaaggttcttaattttaaggtctttagttttccacctgagttttccaaactctaaaatgttctagaaactcatccttagtggttaacatgtaggtcaaaacacaccgactataatcatcaactattgaaagatagtattgcttaccaaagtgagtaggcactctgtatggaccccaaagatcaacgtgcacatattcaagtatctttttagttgtgccttgccggagtaaactttaacttatgttgtttccctaaaacacaagcttcacaaaatggtaaggcacaagaatttaaattttcaattataccttgtttatgcagttctttgaggccttgttcactgatatgtccaagtctgtgatgccacaatttcatatccaattctagtcctttcaccatacttgattctctaactggaacagtttctccttgaagaacatatagactattgatcttttcacctttcattactaccaaagaacctttaatgatcctcaggcttccgtgcatggacttgtatctgtattctttgttctcgagcacacccagggatatgaggtttcgtctaaggttcgagatgtgccttacattcgttagcaccttaattctacaatcatattatttgatggccaccttccagttccaatgaccctgcaagaacgattatttcccattagaagtttacctccatcaaccgacttataataaaaaaaaatctctcgatttggactcatgtgattagtgcatcaggaattgagaatccactccctgttcattgaagactctgagatagagaacaactctccgtctgtggagcagtcgtcattatctttagcgattgcagcagagtctttcccgtgattatggtgccgaaagtccttcttaaatccactgtgagatttgttgaagccttgttgttctttgtacttcttgcagaatctttgcaagtgtccagtcctgccacagaagtaacacttccttgtgtccttctctctggattttgatcttgattgagagaactcactttcttgagtgctcttcctcttgccaaatacacttcttctttcttggattctttctccaactgtaattcgaaatcttttga

SEQ ID NO: 396542 - DNA, 566 bp, Cannabis indica
tcttgcaaaaaacatctatccaatgtagttcgaaaggcaaccatttggttatcatgccttaaaggacctccattcttatgtgtgtgagagagaaaatttcatttaaatcaccaattaataaccacgggtccatgggagatacatcaacaagtctattgataagttcccaagtgaattttttgttgacagattcaggaaatccatatacagcagaaaaatgccatcttgggccatcctcataagacccaaagcaatcaaaatggtttgtattcattgaaagcagtgatacatttacagtttccttccataataacataatccccccctttaagccaacacgagctacttccaaaccattacaaaaatttaaagattgtttaaatcgaacaagagaaccagtagtagctttggtttccataagaaacaaaagctgagggttgtacttacgcactaacagccataagcgacggaatgcactcgggttacccaaaccccgagcattccaacttatgagattcatggctgctggcggggttgtttgccaacaacacccgctggaaaagaag

SEQ ID NO: 396543 - DNA, 621 bp, Cannabis indica
ataaatagggggttcaccctattggaataaacaactgaggaattctcattcactttctctttatctcttcatcatcatcatcttcttcttcttctttttttcttcttatttactttatattattttttattattttataacagaaaagactattaagcaccttaaatatttaaaggataagtatacattacaccccaaactagggttgtttttatatacattctttttctcaatatctaggaatgtttttttatttcattttttattttttatctaattgtgtatattgttttggatctaatctattatttttttttaaagaaaaaatgaatagtttataatatttgaaatgaaatttaaataattatttatcaagcgtataaaaaatagtcacatgcaataaaatatttaaaccatatttttatactataaattatttagatgttttaaaaattaaaaggtgattcttataaataactacaacatacataatattcaaaataattgattaaagaattctcccatatgctaaacaaatagtacagttaggcaataaaatattcaaaattaaataggaaaatttaattttttatgcatgttttaaggcataattggttagga

SEQ ID NO: 396544 - DNA, 518 bp, Cannabis indica
tataatttgtgaggtatacaattatttttttacttgttctaactatggtggagataatgtgcgttattcattttgccacaaggaaagtggggacctgtttatatataggctgttggatatgagttagtggggggaaaatgaatttttttaaaagactttttcactttcaaatttaagttgataaatcttggtgccaaaaaaaaccctatttcaaaggctactacgtacaacataatggggcatgactgattgtttcgttgggaagtgtatcctgtcatgtcacaagcagtcctttatttaaaaataatattttagtgttgtatgaattgaaaaagtacaacaaatgaacagtgtacgcccaactatacactgggatacactgggtccatatcaacatttaggtaggagtgctaccctcaacatcctgttacaatctcttactcaatcttcacgccgaaaaatacatttaggaatattttttttcaattttttttttcacggggtgttcgttatgctta

SEQ ID NO: 396545 - DNA, 904 bp, Cannabis indica
gatttagactaacatcataattagcgatagagtatacttacaccttggataagtgttatgtccttctagggcattggcaaagtatagctaggatcggatgtatggagtatacattggactggaccgatactgaacttggataagctatcataaacttatcgttatatgcatctaagtcaatatcagttagttgattgtaggtcaatagatcttaatcctgatatggttaggttcgatctcaattgtatttatttttgtttttagtagttgttcgttaaagctcagtcggcccaatacttacatcttgggaacatgatagtacaattgagtgggagcactaatcatagatatagaatctataacttctataagtatttagaagaaaaacgataatttccttcgatcttggcttaaatagagataaatgattcgaggcctcatttcaataggataaaatacattgagggataaaacgataaatttctccctactcgatgtaaatcactatagaggatcttcgagtattggattagaacgatagataatttatatagtatctatatcttggaacatatagagcattctatgtaattaagagtgcaattctgaatctatagtggcgcaagtaagaattaattagttagagaatttacttggtaaattctagatctgcttattggatgcatgattatataggctcatggtccccacataagttgagataatattgcttgtagactcagttaattggtttaaattaatcaattataattctaaaattagactgtcttatttatgaattttcactaagcaaggtataattgtgaagaaaagagattttgggatttatttattaattaaaatactttgtaaggtctaattaataaatatgttaaatggaaat

SEQ ID NO: 396546 - DNA, 587 bp, Cannabis indica
tgcggatggagtaaatccatataaatatctaagtagtcatcatagttcatggtctgtcttccttgttatgaaagtaaccaataattattattaactcatcgttagtgctataagatgttgaaatgttaacttgacgataattattttttcgataactaattacttaactgataaatttaacaattgataggaaatttacgataatatctatatttttttttgtttgcttggagataatgccaaaatttataaatttcttttgtgaaagtacggaaacaactaaaaatagttactaccctagatttcttatttattcaaaaatatatataaaacctaccacaattttttaagaaattttgtataattttcgaaacaaaaaataaaaaaaacggtgtttcgaagctaaaatggtctaaatggttggaacatctcgaggcccatgacccagcccattgaaaagtgggctccggcccatttccttgtatgtttgaacaactatacttaggaggaagggaataaagaggaaattacactctatacctttttaatattgctctcttttatttttaccctcttttttaaagtct

SEQ ID NO: 396547 - DNA, 526 bp, Cannabis indica
cactatcattgcccgacaaagcatcaaataagtaaaaaatctatctacagtttcaagcaagtaattacacattcataataacggtaatgactgtatctttactcattctcaataacggtaatgatcgtatctttaccttgatcataattgagccacatacgataataatcgtttctcatatgacatgctaagtgtaatgtgcgtgctaagatggcacgttacaagctaagtgatgcccacaagttggccaagtagtggtcaagtggtggcgcatgttgtggtgcatgctggtggcatgctgatgcttagtttgtgtgcagtggcattttcgtaaatatctttaatattgtccagaacgggacgggacttggtattcgccatttatttgggtttacaaatacaatggtgcaattggattggcgaaactgtgtgatttggtttacggtttggatgtatgtctatagagccaaaatcatgtatgttcttggtagaaggctaaaagctcagaatgctctttaagggggta

SEQ ID NO: 396548 - DNA, 613 bp, Cannabis indica
ggcatttcatagatgaatcaagagacaatgggagaaataatgaacatcaaaataaacagagaaaagaataggaatgagagcattccatgaatacttacccttgaaccttgttgattgctgccaaaaaagtattctagtttttttttttctcagtgtttcttttctctctctctctctctctcatatttttttctttcaaagtgtcgatccttttttatgttctccacccatcctatttgtagagcctatattgaatttaattttatttttcttttattaacttcacaactcatgtaacgtaatgggtgagagaaaataaggaagtggtcagttaaagagtgaagagaatctcctgatttggctcttaatttaactggctatattttttttaatatcattattttaaaatcaattattccctttattttttttgttgtaattccagcggaaataactttgaggattcaatcatacacctgcaataatctcaacacttgaacagtaataatgaatataaactaattaatcaactacaatgaagcaaacccgaaatcaaacaaagaacaacacaagattttatcctaggttaccggtcctagagatcaacatgatc

SEQ ID NO: 396549 - DNA, 575 bp, Cannabis indica
ggtctgaagttggcctacactttactcccgggataagtttgctgcttccaagaatgcgactctgttcgacacattgaaggcggaggtggacttggccaagaaggaagctaaagaagccagggcgaaagccggagctgttcggttggagttgggcgaagccaacaagaagctgtttgctgctgagaagaaaatcaccgtgctgactaatgatctcgacgttgctgaccgttttgaggagataatacatttaattaaattgaaaattaaatatttaagtttatttcattcttgatactcaaatattattatttttagaatatttaattaaaaagaaaattattttaagtttgaaaatttaatttttgaacaacttaaatttgaataattttcaaaatatattttatttttattttattaatcatttttttgtatagaattcgcaattggattttttatttaaatgcaaaaaattttgaattttttgaaaaatagattaaagttgaaaattaatttttttttaataaattttggaccaactttaatcaataatttttcatttaatgattaattaaaat

SEQ ID NO: 396550 - DNA, 687 bp, Cannabis indica
tctcgatttacatcgacatttcatgctttaaaaccaagtctgaagtgcaaaaatactatccttatgttcataacatggcttgcacgcaataatcaaaaacctattaaagctattatatctgacaatgccaaagaacttaatatgcaatcttttatgcttccaaagacattttccattaccattcgtgtgttgaaagaccacagcaaaactcggttgcgaaaagaaaacaccaactatattttaaatattgctggagctttatgcttccaatcccatttaccccttccctattggtcatatctcattcatactgctacctacttaatgaataggacaccttctaatctacttcaaggaagcacctcctatgagatacttcacaataaacaccccccccccctctatgaccatcttagattgtttgggtgcatagcatatccctctacccttccctctagtaggcacaagttctcccctacgagtcgtgcctcaattttcattggatacccccaaggtatgaaagcctatatattgcttgatattgaaaccaagcaaatattgttgggttttatgccctaaataaaactcatttcatataatcagatttactcattaataaagatcagaataacattttatgttgcatggttcacatgatttatttcatgattatatgtatataatgta

SEQ ID NO: 396551 - DNA, 741 bp, Cannabis indica
ctgacacaaaagtgatggatgaccccaccggtaatagtcctcaagagggaatcaatcatcatcccggaaaagaaccattaagtcctcagggatctgcagaatcatcacatgaacagaatgcaagccccaggaagacccagtattggggcccttggctcggtggactatggaagagcaacaatcgatcactccctaatcaggttgatgaggatggtgcttacgacccaaccagatacataccgatcatggaatcagaaaatcgccatcttaggcgtcgattagaggaagcaaaccggcgtaatgccgagttagagcatgaaatagctaccgtaaaagcaacgttgggagattgtacccaaaaacaacgtgaccttgaagaaagatatttacgaggcaaacctcgtggctcacaagtcaagaagtaggaaatgacccaaggatatgcttagagctctcatgggatgcaacctgaggaaacagagggaagactaggggtatagcttgggatatgtggaacatcagacaaaaatcgccaacccactattcagtctcataagaatgaaactcgtgcaaaccattgtaggaagaaaaaagtgagtcaaaccttgagaggaagggcagggtccagccacaatcatgatgagagtgatctacgagagcatctaaaccttaaaaagcctgacctccatcaatgactcaattgaagacaaaaggattcattccatttgcgaatgagcgggt

SEQ ID NO: 396552 - DNA, 556 bp, Cannabis indica
gggaacaaaagctgaaattgggggagaatgttgaagcaatgttgaagcaatgctgaaacgaattcagcattctggcagtgacgtggaaacacgagattcaactatccacatcaacaggagtgcatttgtcattaaaaatgagaccagctggaagctttgtaaaggggggactaaacctagtgggccaaagtgcataaaggattgggcttctaattttagggtatgattttgtatcttagggacccaacaacaaaaagggaagaaaaccaagtacacctccatcttccaataacgtgagcaactgccattttttgaaggggaagtaattgcagaagaaaagtacagcagaggaaggaaagagaggggggaccaagccttgtgtttgattttctttactcttccttattatttttctttcttctcttcttttcttgtttcttgtacttagatattaaaaattttgtgaattgttaacaaagggcagcagccatggaggaatattttttactttggattttaattttttacttgaatatgagctagacttttgaggctt

SEQ ID NO: 396553 - DNA, 873 bp, Cannabis indica
gagtgccgagccatgcaattgtgatttcagaccagcctccttcaacattataggtcttcttttgcacaggggtaattgaaaatgcctctttattcatcaattaatcaaatttacctctaatttatatttatttgaaacatacctctttttatatgtattgtacccaaaatacccttacataagagaatcacatggagagtatcttgaagtgacaggggcaaaattggtacaatgtttaaaaaaagagataaaatgatagatttaaaaaaaaggtaaaataaaagaggacaatataaaaagggtatagagtgtaataaattattttacaaatacacaaaaataataaaaaaaattacaacaatacagttttacaaaattttaaatatttttacgaatttttttttattttagttacagaaaatacggtcattgtactattcttaatttgttattgattttttgttatctgtatgttattttttattgttattttaatgttatttaaatgttattttcatgttacttttataagttttcttgttgttttcatattatatttatataaactgtaaaaatgtaaaaaaaattctttaaatgtaaaaatataattttcttataaaaattagtattttatgtaattatccttaaacaataaatatgtgcacttataacatctctaatggatgataacatctgtaattgccaaaaaacatacacattatttatttttttttttctatccacataaaatttgacacttttttctttaaaaaagaaaataaatactccaatcagggcaagagggaggactcaatgtagggaggtcaattattaaaaatttatattttaaacaaaacatttttacatatattt

SEQ ID NO: 396554 - DNA, 607 bp, Cannabis indica
gctaacgctaataaaaaaaagaaaaatgagctaaaacaaaactcatcaagattagaatttaaggtaagaaaaaaaaaatctttaacagcaatataagcaaatactcatcaagaacaccaacctcccttgctattgggattcggctgacagtttcttcgggtttccggcaatcaggcgttgtccaacttggttcgccggcgtggctctccaacttgcctcgctcagacggcgccgacgccggcttcaatttgtggtcggctaagatttatattgaataatgaagaagaacagcaacttcgcattagggtatttttctttttaacgggtaaagcggcaactttaaaaatatatatatatactacttgaacttaaaaggcacgtgggtatttttatatttttttaaagtagttttgtggttggtatttgaactctaaagctgttaattgttaaactaattacatttattactgagttgtaactacatttttttttttttgtactaaaaagagattcatctaattcatgattggacaaatcatttactaaaatagcttgaaaagtagtagagacaagccctccaccatagccacaacttggggaggaacaa

SEQ ID NO: 396555 - DNA, 555 bp, Cannabis indica
tcatcctgttccaactttttcacatcaacttgattctctgcagtgctgttcgtttttttcttttacattcgccattgccttaaccttttcaaaataacatttcgtagaattgtgcattttctgtattgcatcagaaattttggtgagttcgtctagacgaactccaatggcatcgtttattttctctgtttgtggatcagtaccgatcttcgtcttcattttttattgaatttgacagcatcaacctcttcaggtggtggaagattcaaacatgaaattggagtacggttagtagtgtcccgacaacgaaaccagactaatcctatatattttttagtaaaaataacgataaagagatagagatagagatggtggtgatagtgaaggaaatgaacattataattactttttttaatttttaagcacataagaagagcatgactaaacttatatgtttaataaaaagtaaataaaaatgaacataaaagatataacaagataaatactactattactacaatcactaaataaaaaatatatagaaagagcatgact

SEQ ID NO: 396556 - DNA, 589 bp, Cannabis indica
tgaaccgtggaaccccattctcaacattttctgtcaagaattccattgttgatcccttattagtgtatttgatttcttccgcatagtcccaaagagcagcatattgttcctcatagctcccttcaatgacttttgttgcaagaagtcgagctctatataccttattcctagatatttcaagcacatgatccttgttaaccttcttttaaaatgacgagacacccaaattttcattgaccttgaactcttccctgtatttttcactcaaccattgagcagttgcaaatctgttactattagatctacaacacttgtgtactttttcataacttttgatgacaaaagtggggctatcatcaattttggaagcataacacatccatcggcagttaactcctttacattgtgctctaactctatgaggttaactcttcttaaagaatattgttggattatattttaccaagatctagattcactaccatgtatgttatttaatattctaaatattaatttctaaaactatgtaatttaaacacataaaaggtataagaaaccttacagtggttgcagtagaattaaatgactc

SEQ ID NO: 396557 - DNA, 1124 bp, Cannabis indica
gccgatgttcttggcgcggctaccaagatttgtaattacagattggtagcggtgtggagattttggtcgattgtttcggtggccggagcgattacggcggtgttgctctctctgctctacgccaagatgaggcgtccgcgatggagaccgactgttcttcgccgccggcgcggcgaaaataacgagcctctgctccttctgcttaaagagaaagatgaggttagttatgattgtcgtttttctctttccaagctatgattgtcgtttactgttctaattcaattgtcgtttggtgttggaattgaggtgcagaaaatcagccagttgcttgttcagattgctcatatgaatgaagctttatcggctcggcgaagggttcctgtaattcgagttggttgagctgagaggccatggaaggaactcaaaggggcttttttttcttagtgcaaaacccataatcgtacgtatatattttgtatgtattttatgtcgtagtgttatttattcaaaagtcgatatagcttttttgtttttgtttttttttttgaaaaaaaaaaaattattctgattgtgtatgaaagttgaaacgacattacaagcttacttggcattaaaacaaaatttaaaaatggctactattatttttgtagttactagtttaaaattcatgtgcaatgtaatgttcttgttgaatttgtgttccgaattctatttgatctagttcgaagagctcgcatttggtgaaccaagtcaaattatattttatactttgtatttttgtaaaagttattaatttgactctctgtttttgttaaatgacaaaataaattttatatttttaaaattgtacaaataggaccctgaactaatttttttattaataatctgatatagagatgttatgataaaactaattacattttctgtatctgttcgtattaaaataaattataggatttattttatcttttaacaaaagagagggtccaattggtaatttttacaaaatacaagatctaaaatagtatttatctttatatatatcaaattgttaaaaacaatagaacgttttttagaggaacaatcctctaactgaagcatacgacctggagagaaacaagagt

SEQ ID NO: 396558 - DNA, 745 bp, Cannabis indica
aagttcggaggcagcattagccaaagctcgatattctgcttttgcaaaggatcgagaaacagtttgttgtttctttgatttccatgacacaagtgagctacctaggaagagacagtctccagatattgagcgccttgtgtcttgacaggagccccaatcagcatctgaaaaaaaggaaatttggacattagaagcagacaagctggtctcggcatgagctgagattgtaggggttgtgttggatgcaaagaataaaccttgtccaggagttgtctttaagtattgtaggatgcgatgtgctgcatgaagatggggaacccgaggagtagttaaaaattggctcaaatgattgaccctgtaagagatgccgggtcttgttatagttaagtatattagtttgccaatgaggcttctaaaaacagtaggatcgggtaggacagtccctttgtctttacttaacttgaggtgagtttccataggtgtggagaccggtttggatcctatgtaacctgtgtccttgagtaattggatggtaaatggtctttgagagaccgaaatgccttgttttgttctaccaatctcaaggccaaggaagaatcgaatggttccaaggtccttgagtttgaatttgtcatgaagatatgtctagaagtgagatatagcaacatcattattgctggcaacaataatgccatccacatatatgaggatggctagaaagaaggttttgatcctctttatgaat

SEQ ID NO: 396559 - DNA, 501 bp, Cannabis indica
tcagcgtctgtgataggcccttcgagacctatttgggtatcacttgggcaacctttaagcttgagccactctaaggtccaaaggtttaataggtcttccgtgttcggaagctaaagtaaggcaaggtggacctctgcatacctcttggtcttggcctattcccagatcaccgaagccccatcgtgaattgaagggttttaaattgtgagatcataatattatctattcctttttatgccacgtgccacccattcaaaaacacagataacaatgttcttgatcaaattcttaaacacttttaagctgttaaaattgttactaaattttacattcttaaatacaggctgagatatgaaagtaggttgaaggcgagatggtgttaatagaatgatcaaaagacatacccacactagccttgagaatagaatgttggaaatattttaccaggatctagatttactaccatgtatgttgttttacatcctaatatgaattctctaa

SEQ ID NO: 396560 - DNA, 1020 bp, Cannabis indica
agatgatgatcaaataaattcagcagcccaaatttattcaagtatctttacttaaaattttgggaagagtaaaattttggatatgatttgactatacaatctaatggttgaaatgatgatcaaataaatctagtggcccaaatatattcgtcaagtatctttacttaaaattttgggaaaagtaaaattttggatatgatttgactataccatccaaaggtatagatgatgattaaataaattcagcggcccaaatttattcgtcaagtatctttacttaaaattttgggaagatttaaattttggatatgatttgactatgccatacaatggttgagatgatgatcaaataaatccagtggcccaaatttattcgtcaagtatctttacttcaaatttcgggtagagtaaaattttggatatgatttgactataccatctaatggttaagatgatgattaaataaatccagtggcccatataaaattgagagaatttactttgtaaattctagatctacttattgaaagctcaattatataggcctatggtcccctcactagttgagataatactgcttccagactcagttaattggtttttattaattaattataggaattattacatagaaaatataaattgatattttatttataaaaatacctccataaggtaaagacaacatttataccttttatgtgattttaattactaaaataccacttacactatcatcacttacacaatcaaacgatggttgcagggtggttgctgcgtggttgcatcagacgaatcagacgatagttgcagggtggttggtcgaaggttgcatcagacgaaggtttcaatcagacgaaagtttctgggtagttgctgggtggttggctgaagctgcatcagacgaatgtttcaattagacgaaataactgtcagcaaaatgtttaggcaactataatgcaactgttgtgaaacatttaaaatcataatagtgtttccacatacgtaactctatctaca

SEQ ID NO: 396561 - DNA, 596 bp, Cannabis indica
cctcctgctcagaatattcttgaacatgttgttcagccccagctcctcccttcaacttagcctcgtgcttgagttgaatgagctccttctcctgctcagaatatttagaatattcctgagcatactgcttggctcttgcacctcccttcaatttagcctcacgcttcagttgaatgagttcattctcctgatcagctccctcagcctggccagcactggacttcttcttcttctccttcacaggctgaggaacaaaatctgttggataaagcccgtactccacaaagttggcctccgaggtcaacaaagtgatattctgagcatcatccgacagttgaacaatcctttgagctctgtccttaagagctagcgtgaggggtggacggtaatatatatgaaaccgagtataagtggtgcccatgtctaccaccatataatactcgtcagcgaaattcccaattttgctcacggccttatctgcggtgcctgtcaaccatttgaagtcagactgagagaagtagaagtgccccgacctgccttgcttgggggtagacttcaggtcaaaaaaccaactgacctcgtgtggagaaggcaca

SEQ ID NO: 396562 - DNA, 819 bp, Cannabis indica
aaaaaaaaaaaaaaatccaaaaaggaaagcacttcccagaaaagaaatcaattacgaaattcgaaataataataatttggataggatacatacttatctaaagcgtctttcaattcaacggtggcctccttagcttcctggaagctagggaccgcatcaaacacaactctcggcaagggttcacccaccgccataaccatatcatcctcgcccccggcgaactcccaatcgttcatctcccacgccggcctctggatccccaccatgtcagcggccgtagccttggctgtctgagacgacgacgtaaggatcgcggagactggaattgaagaattgcgtacagattgctcgacaggcggaacgaccgtggtgccgcgaagaccgccttgattgatgacactgacgccaacgccggcgaccttggaagcggctctcatagctgctcctcctcccatggtcgaaaaaaagaagttgaatgaagaagaactcaagcttttgaaaatatacgggattttatttcacaactcgagtttttgggtagagaagtaatgattatataggcagaaataatccgtactacggaaggcggtagtacgcaaaattaactattttttttttaattaatcacgacatttattaattaataaactccctcaaaataatagaacccacttcaaaagaacaatcttccaactaaagcacacaacttttagagaaacaatagtctcttgccaagtaatgagccaacttgtttaacaaaacataactcaacaaaagataaagtcaaaagtaaattcctaacatcttgaacaataagac

SEQ ID NO: 396563 - DNA, 456 bp, Cannabis indica
tattttcaatgatcttttatattaaaatttaatgttaattcatcttagattagactaatttgaaacttttatttatttagatttaaatttacctaatctttttttccctattattgtagcttacttttaataatttaccaggttacttttattaatttatacaggttcctcaatatatgatttcccaaacaaagcgatttggaacaaaagtacaacctttcaatgatctttctgtaatttctgacttgaacactactttcactaataaacagaaggagttatttaaagcaacaccttttggacaattttttataatttctaaaggatcttaaagttcaagctcagttagtacatcaccatcatgttgagagaggtctattcgatggtcatggtaacgatgacgaatctatctttgttgagaaggatgagagtttgaagaaagtactttttaaggaa

SEQ ID NO: 396564 - DNA, 911 bp, Cannabis indica
aatagtggtgtcagagctcgtgaagatggatgctggtggtctagggttaatggaggagaatgggggcggctggttggaaatgaacggtagatgatggtggatgtgcttggaaatggttcttcgggctggctgtgcgaaatggaggtggagctttggcaattcctgggcgaacctgggtagtggttcggctatagacggaaacggaggtgctaggctggctgtgtagagttcaacaactgggtggtgatggaggttcgggtggcagtggaggtggatggttggttatgcggctaaagtttgttcagaagcacaaattggggacgatgatgatcactctttttttttctttttcttttgataaaataagattaataataaaaacaataaaattgaaaattaaaagaaaaaaaaaataaaaaatctattcattcattaatatgtatttatctatatatataaaaatacttatattatttgtatactaattatatatatatttttttatatatttatattaatatatatatgtgtatattcgaaaacagctgaattcatgaaatttatattcaactcttagtttttcttttttttttagaacccattactcccagttgttatagcattgcttttgcaattcattctcttatgcatcactgtttcaaaatgctgaggcgatgctataattcctgggacctcctgcttcagacaataaatcttgctttttagcatattgcacaactccattttctaccttgcacctccaataacattcaccataccattacaaatccattacaagaagttgaaaattatatatatatatttatataagtatgcatatatttatatatatatatattctttttctcttttttattttttttaacaaggagtggcacaccccaaactta

SEQ ID NO: 396565 - DNA, 527 bp, Cannabis indica
acggggtagaaggcttcacgaattaaattgttggctaaaaatttgcttacttcctccttcaaggccacagctctaacctcatcatgtaatctcctcttttgtcgtttggcgggcacgtccttgtttagattcagcacgtgggtcatgccatttggacttatacctaccatatcagagtgtgcccaagaaaatacttcttggttgtcacagaggaactgaataacagctttcttaatctccttacccaacatctgggcccctggtcgggtttgtcccctcatagccacattgtagcattcacgtgcaactagttgatctcctttgactattccattcccggtagcagttggaaactttaaggccagatgcttgatcgatgtgactgcccccagcgtgtataacgctggtctacctaaaatggcattgtaggcagatggtaggtctaccaccacaaactctgtcattcgggtgactgtttttggggcctccccgagtgtcaatgggagagtgattcttcctgtgctggc

SEQ ID NO: 396566 - DNA, 604 bp, Cannabis indica
ccgccactagtttttgactgagaagtttttgaagaaagagtctacttgattagtactactcactactcgacatattatttatagaaagttcaatgaaaatgattgatacggtcccttttcttcgacagaaataactatagcactatggaattagatttatcctataaagggatgataaaaaagataaggtttttaatagaagggtttctgaattgcccaaacttcctaatacttggattggtcaaacttcctataatacttggattggttgctacaaaaagcaattacatttatttagtgatagctttttagtcatagcataaatatttgtagtaattaaatatatattttagtcataataaaaaattatttgagactaaaaaattctatttagatataaattgtcactaaattagttttagtctcaacaagcattgtgactaaaaacatatttaataatcaaaataaattgtaatttttgtgactaatacttttaaacacaaattatttaatcactacataagaataataatttataattaatcataacttttttacttttattcacaaactttattgtgactaaaagtaaaaaaattatagt

SEQ ID NO: 396567 - DNA, 1165 bp, Cannabis indica
gctaacagctgcaaacccctctatcccaaaagctcgtaagtccaaggagtcccgaggaggaagcttggacaggtctgaacaatcgaaaggtgggtctaagccggtcagaaatgaagccaaataggtacgggcatctactccacctttgccggtgcttccagaggccaagaagggcaaagagatgcttgcgcccactacatgaaccggctggttcctgaggtcagtgagcaactggctggtgctgacaatgactcttcttttgagctggtggtgggcggggtcttgaaggaattcaccagggtaagtctttcttgacacttccctttaatcttctgtacttagctcaaatgttaaagttttttctctgtgcaggccgatctgaagttggcctacacttactctcgggctaagtctgctgcttccaggaacacggctctgtccaacaccatgagggcgaaggtggacttggccaagaaggacgctgacgacgccagggtagaacttggagctgttcggatagagctgggtgaagccaacaagaagctctttaccgcccagaagaagatagctgagctgactaaggatctcgaggtttctgaacgtcttgaagagaccatcaagaccttatctactgaagtgaacagtcttcaggatgagaggaattctcttcgagcagttcttcatcgggtggaggaggagaagaagtctaaggaggaggagctttcggccgaggtggcaaggctgaaggagaaggttaatgctctagagacagtcggtcttgggctcttctttgacttttggaaggctaatccttaggccaactttgactacttgggtgatgctaaggacatgtaacttgagttctgcgcttcccaagtggcctatggtgaaactgaggcggctgcttctacctccggcaagactgctgatgtacatcctgttcaaacaacagatcgtccagctcctagtggcccagaagaaccgaaccaagagcctgggactccagctgtttaaacatttctccttttaactttttattattatttttatatatatcttattcggcaacaaggccttttctaagacatcatgaccggccaagcagtctttaacttggaattctttttcatttttcggacaacaggctgaccgggcaacttttaat

SEQ ID NO: 396568 - DNA, 747 bp, Cannabis indica
tttttaatataccatattaaatattttattaagataaagacccaatcattttcaaaatactatatttttgaatttttactactatatataaaaaaaaaatataaaaaatgtccaattaaatttttttgtccaaaaccccaattaacttgagacatataatcatatatttgtatacgagaggttaggtggataaccagggtattaaggtaatgagatatttgggcaaaacttagatgcgtataataatgagtaattaatgagatgaaaatttgatattattgataaagcatataacatcattcgttaacttattttataagaaacctcttaatgcaatgcaagaggttgattcgtctcttgtctgtcttttcaaaactttcaatagaattaagggcacgtacatataataatcgtaacaagagatcatgaaatgaaagatacatataataggaataagtaataatactatgataggatatgcacatatggatctcttcttgttgttggcacatgtgcttaaaacttctattaaatgtttaaaatattgaaacattctaggtattgaggtggcgtttggttaggatgaataaaatatgaaaataggaatggaaataagaatgtaataaaatttaaaatgcataaaaaatagaatagtcatcctactaaataatggaaatgtcatttcattagaatgacatttcaatactttaatatgcaactaaacaaaaaaataaaattaaaattatt

SEQ ID NO: 396569 - DNA, 606 bp, Cannabis indica
aatgttatccgtgtttttagacgagtgacacacggcataaaaaagaagagataatctcataatctcactatgtaaaactgctcaattagactaagtcacggagaagcttcactaatcttagaataggttaagaccgaaaggtatgcgaagatatgccttaccttagcttctcagacacagaagactcattatcactacgaaatctagagtggtccaagctcaaaggctgcccaagtgatacccggatgggtactcgaaaggcctatcacggacagtgatcgcccaaaaggatcacggacgtctaccttggaaataaacctggatcgcccagtgatggttatgcttcttcttacacaggattagatcgtgtcccctgtgccaggacatggtagtgcacaaaccttttcgctagacaattattttaagcatttacttttcaaggttaaacctttcggcgacacgtgtccattacatacaatggtccccaattgtctagatggttcaatgcacgagcacaaatccttccaatgggcccaacaaacaactccttttcactactacaatgttatcctttagaggcagttttttcaaccccatttataaaaa

SEQ ID NO: 396570 - DNA, 560 bp, Cannabis indica
attttctctccattgaccccccattatttgatgacacatatgatttgttccatacctgcatttttagaaaaaaaaaaagtaatatcagaatattattataattttttattggaaccgttttttttttaatttataggtgttattgttttggttttaggtttttaatttgtttactggttttttggtttttgtttgtcatttatttttttaattacttttttgtatttttaaagaaaaattattattaaaatataagcgtaattttgtttttaacttgtttctttctaattttatgattgtatgttttgtttatgtttttaactatttttcaagtttttgactatttttttaatcgattttttttttctgttatgttttgtcatttgttactttctttattttttttactgttttatagaaaaagtaatattttaatcttattatattttttattttgaactggttatgcttaaattatatttataaatgttttaggtaagtttttaaactagtttttaagtttttaactagttttttttttctgatatatatattttttt

SEQ ID NO: 396571 - DNA, 549 bp, Cannabis indica
atgaggtatatcagacctacatcagaccttacattggtcctatcaggtctcacaaaaacacaaaaagtagacaggacactacaatcgaccctacatcggacctttattggacctacatcttcaacctaaattccttcccaacaacatgatacatcaggcctatattaggcctgcatcgaaccaatctaaaaaaccagattcttccccaaagcacagatccaactagtcccttctctcttgctctctgaacggactaaggagctcaacccaccacccaccactcgcgtccccctcagtcccttctctctctagctctttaaatagacccaacaaggtcgacccaccacgaccacgacaatgtcgtcaaaggtaagatttattctccttatgtatattcattcaaatgtattgtatttttgcatattttagacttaaaatgtaagaaactattgataggtttattgagatttagggttaaatctcaacataaagagaataatgatgtttgtatatttttaatataatattaatgatgatcagtataattat

SEQ ID NO: 396572 - DNA, 1121 bp, Cannabis indica
accacttgatatgatccttcccagttcaatacgagtacacctgtcgtactgtctttagttcaaaatactcttcttaggaccataactcctataaaaacttttcgtgctctcacttatttgttaaaataccgagctactttttgctgatgggctatcagtttcaagtttgctacggttcgcttttcttcaactttatcaagtgactctaggaggagtacatgattggccttttagctatatgttaatcttctgtgggatggcagttcgagttctgcgggcagcatagcttcatatctatatgtcatgaaaaatggagtctgtccggtcgctgttttctcagttgtgcggtatgaccatagaacttcaggaagttcctccggccaatttcctttagcatcttcaagtttcttctttagggtatccttgagtgtcttgttgactgcttcaacttgaccatttgcttggggctgtgccactgctgagaaactttttatgatcccatggtttgcatagaaatcagtgaaggactgattgtcaaattattttccattgtccgagactatcttgtatggtaatctgaaccgacaaattatgtttttcacaatgaattcttgcacttttttggacttaatggttgccaatggctcagcttccgtccacttggtaaaataatcaactgcaaccactgcgtactgcactccgcctttgcctttgggtaattgttcgatcaggtcaattccccaaatggcgaaaggccaaggactttgcatctgagttagtttgttgggcggtgcccgaggtatcttcaaaaatctctggcatttatcacatttcttaacataggccttggagtcttcaatcatggttggctagaaataaccttgcgttagaatttgcttggacaaactctacccagctgcatggttgccgtagaatccatcatgcacttctgataaaagtcgtgcaacttcttcttgtgtgacacaccagagtaacggcatggagaatcctcttctatacataactccctctacaatgatgtaccgtgcaacctttctcctcattttttgagcttcgtttctgttatttgggagttccccattgttgaggtaggctgctat

SEQ ID NO: 396573 - DNA, 556 bp, Cannabis indica
agccttgttctttcgcatatacgaactgcaccaccatcatatgtcagagttaacataaacaccttgtgtttagttcaaaaactccaatatttatggagtttctgatccacagatggaccaagaaagtttttccaaccaaaaccaatggggtaatggccttgtttttgatccacgatttttcattaaggtgtctcccaaataccactaggatcatcactcttttgctgagtaacaactccctccatagttggcttcatcgggtctattgttttctcaattacaatagtattaactaactcaagaatagtttgatcaatattaatcataacattatcaacaacagcactctactttctcacacaaagcacacttggtatgaagtcattcaaactcaatagggacctcagtgatttgatcccattcattctcaaaagatatcacattaggaattttatccttgatctctattctaaaacacgagcaaactttattaaggtccatgttatgaatactgtaaatctgtatatagccctaattaattcatgagaatcaaaca

SEQ ID NO: 396574 - DNA, 841 bp, Cannabis indica
acgttcattagcaatttaacatcccagaatctcgaaaggtacgtattatttgtaagtattttatttttagtatggatcaccctaatggtggcgactattagtaagacttacaaaagtatgaaataatggtgggggctcatgaaataagaatgacctgtactctcgcctaaacgggacaacgtgggattctcttttcgattgaataaaaggttgctagaatatttatcattttagatcagttgactactttattcaatggatgacgctttgactctggcctaaacgggacactgtatcagtttgttgaaaaccatagaaaataaaaatatgtttggtttttggtatttttatattcatatttgttatacttgttattttctgaatttgtgtatgaatttattaaactaaatgatttacttctgtttattgatattgttatactaatctttatgttttgtaattgtttccttttacaatgaaaaaaccagttaaacatgtgaatgtaactattcttgtgatgttttcatataattagagataccaagcagtgacaagtgcatactatagaggcgcagtcggagcgatgctggtctatgacataaccaagcagcaaacatttgatcatgtggcacgatggctagaggaattgcggggacacgtagacaaaaatattaccattatgctagtaggaaacaagtccgaccttgggacactccgggcagtacccactgaggatacaaaagagttcgcccaaagggagagcctattctttatggagacatcagcacttgagtctataaatgttgaacctgcatttcttagtcttgacagaaatttatag

SEQ ID NO: 396575 - DNA, 756 bp, Cannabis indica
catatatattccacacatctgaccgcagtacatttattcacaaaacatacttcactacggatgaatatctaagatatttaaactcatctaaatgtattttaataatgatttaaacaaaaagttagtaaatgtatacctctaattagctaaaaccaatcaccacttacctatccctccaattaatattcttaaagcttaactttaaaacctacaaacaaatgaaattaatttttttttttgaatagtcgaaaatctttattaaccatgaacttctactaccaaataaggtagcaaatcagttggtttatcctccaaattgaaacgacgatcaggaaataaaatagcagcgttagcaaagttatgggccactaaattagcaattcgtttaacaaaagaaatagaaacatttgttagagacgcaagcaagattttacagtcttttacaatcaaaccaaaagtagaaaacatgtccaaggaacttcggatggcctgaaccgcacaaagacaatctgattcaagagtaacattttgccactgcgcttctttgatccaactaagagtctccttaattcccagcacctccgttaggactggttcaactacaccataaactagagtcgtgcgtccctctataagcaaaccattggagtccctagcgacaagaccaaagccataagattgattcctttcgaacaaagccgcgtctacattaatcttgatgctatcagtttgcggaggacaccaatgctcatttcc

SEQ ID NO: 396576 - DNA, 689 bp, Cannabis indica
agagagagagagtgaaaaattaatcatattttgtctcaaacctaacacttattaactgtcttatttgttcttctgatatataaaaaatatataatgttataaacaaacttttttaattaatcctttaaaataaaagataatatttaattttgtagcatcctactaatttaggcatgctacaatatttttctcaattattgtacaacttttgttaatcaaagggattaatgaaaacatgatttagtttaaactttaataaataaacataaagtgcattacatttataaaatttgggatcctgtatctacatttttaattgtacataatcatcaaaagatgtcgcacaacgactacaaaattgtgagtcctagttgtcccgaagatctaacactccaagtcaaactgtctcaatatgtacaatcttcatccagctccaaaatcactaccgttcaacaacaactttgcctttacctgcacataacatatcatttgtgagtcgatagactcaataagaaaagtataaaataacataacatataaccgacttgtagctaagcgccccatgcacctatcaacaagtcataaaccatgtcaaagaggcataactgagtctcgaatgttattgaccgtagtacgattgaccataatactgttaactcaaacttttcgatctccttgttttgatgatt

SEQ ID NO: 396577 - DNA, 1463 bp, Cannabis indica
cgtaacacccgcggtttaccaccctcacatgccatgcattcttttcaaaattttgttggtaaatactcacttttcccgctagttttctctggtagccgttttacttggaagcacggtaccaccctggaacgattggattgggccattattaatcagaaatgggctgatctttaccctatggcctctctccaacatcttggttttttcggctctgatcacagagcgttaaaagtaatgctcgatggcgaccctgttctgtttgcccgcaattccacttttcgtttcgataaccactggttacttgaaccggattttcctaagctcttaagagaaagttggcgtacggacttatgtccttctgctaccaataaccccatcgtcacttttctgtccaaacagagtaactgttctgtttctttgtcctcttggggtaaaaataaaaatcaattctcaaatcgtatcagaacaatacaatcggacattgagcgtctaatggtgggtcctactgttaccccttatgacgctaaaaaggccaatgatcttcagaaaagtcttgatactcttttagtcaaagaagaaattttttggaaacaacgatccagagttaattggttaaaagcgggggacaaaaatactaaatatttccacaatcgggcctctgcgcgaaaacgcaccaatttcattaaatctttaactctggacgacaattctcatgtaacctccctaaacgacattaccaccacttttgtccacttctacaccgagcttttcacgtcccaaggtactaatttggaggctatgactcttgctacgcaaggactctccaaacgtcttacccccacccaatcaacattcctctcatctccttacaccttggaggaagtcaaaactgcccttttccagctggcgggtgacaaagccccgggtcctgatggttttaatcctagttttttccaaaaaaactgggactcctctggcaaggacctctgccatgctgctttacacgctcttgctaccaatgctgacctgagacaggtcaatgaaactattttggtcctcattcccaaaattaaaaatgcttctcgagttaaggatttccgtcccatcagcctctgctccactctctacaaggtagtttctaaaaccattgcaaatcgcctcaaaactactctctccgacttaatttcccataaccagggtgcttttctctctgatcgcattatttttgataacatcattattgccaatgaagtcattcacgcgatcaataatcgtaagcatggaaaagtgggatgggctgctctgaagcttgatatggaaaaagcttttgacaaagtggaatgggcctatattgaccacatccttcaccattttggcttccccgaccctttcatctctctcattctcaattgtctctcctctgtttctttccgtctccgtattaacaactgtctctctcacca

SEQ ID NO: 396578 - DNA, 581 bp, Cannabis indica
gtttattaaaaaattaaaagagtcaaagtttggaccaattctttaataagcaagctggaatgatttatttgaaatttatttttaataaaataacttaaataaagaatattgagaacgatttatggagtccatggatttcaaaatttatttatttttattttttggctataagattttataaaactgctcaaagaacaagatcttttagtgaaaacaagaggttattcactagaaaaaataaataaacaaataaaccaaatcaaaaagcatatcaaccaaagagtaaaatttgtcttaccagcaatgaacatgattagaggaagtaccatccaccatcacaaatcactctctgccaaccttgtaaaaacattttacaatcccagaatctatagattattaataattattaaatttaagtatttatatacaacaaaattattctatatgctatattattttaataatatgtgttaattcagtaagtttataattaatattatatatgttgatcgagattttcggtaactaataaaatatgattatactattgagctgtaagaaagtgagagaaggatttttac

SEQ ID NO: 396579 - DNA, 769 bp, Cannabis indica
aacattgtcaaaagtgatagttataattgagtttaatgcaaattccttcttaaaaatatctctaatatttttatttctcccccaaactcaactttctcaaaattattgacttttctcgtctcaaaattgaatcttagtgtatgattacaaatttataactctttaattacttaaagtaattagtaaagtagctccttactattttagagtctgaattccttttaagaggcttataagacctcatcttagttagacatctacaaacataaatatattattgttaatgttaatttttgttaactaataaattagcctatatttaataaatttactttagaatatgaatgattataatgaaaataataataataataataataataataataataataataataataataataaacaataaggtttttatatagttttgaagttaattcttcatagtccacctgtaacgtcctcaattcaaacttttattgggcccttacacccacgaaataatggctcttatacacaagcatgtcactctagttgcttcatagactaacgactggccctacagaccaacacgagtgttttcagcgtactttttcttcactcgcacgcttcctgggaaaactttcagaaggtcacccatcctgaaattacctcaggtcaagcacgcttaatcgtgaaattttttatgatgggctactgaaaaataagatgcaccttgttaatgtaggtagtaccaatcaatctatttaagttatcctcaact

SEQ ID NO: 396580 - DNA, 521 bp, Cannabis indica
gtaaagaagagaatggagtaaacttttaactgaacaagttttaagtgaataagaagagaatggagaaaactctaacgagtttaagtgaagaagagaatggagaaaactaaagtagagaatggagaatttttttaaaaaaatttaactagagaaaacgtatatataatatgaatattttaaaaaaaaaaacaaaaacaaaaattcaaatttagatatttataaaataacactatttatttaaattaaaaagatttataaactagttatattattattatttgaaattaaatatatattaaaaacactttaaatatatatatataatattaaaaattatttttcctatgcgatattaaaaaatatctcttagatattattctaattttattaatgggatattggcggctaaaccaactgaactttacggtctgtaacacttaaccacaaaaatcgaaattttggcagctaaactacctaaaccctggttccgttttgctctgcacacctccgtccaaaaatca

SEQ ID NO: 396581 - DNA, 767 bp, Cannabis indica
atgcttgaaatcaatatggattttgtaatttttcatttaaatcattttggaaattgaattttatgtattttgaatgtttggaaaacagttttactgttgggtttgggtcgggtccgaaggacccgcgtgcaaaaaaaaaaaaaaacaggtcttcttgacctgactggaggtagagaatagatgtatacttcgtaagatgtttcatttttcataggattattttcaaaaaagaggaggaaaaattatgaattttaatgcattttcatttaatttggaatcttaatttattttcctatttttgttaatttggtcaataaattacatttattaatttttttatttttatttaaaaaaatatttggaatttatatattatttagtataaattaaaatggaaaaaaatatgatttggtaattaattacataatttcatttaagtatgtatttttttttttttgaatggaaaatgtaaaacttcattaaccaacaaactccgtcaccaaacaaggtaacaaatcagtaggaacagactccatactgaaggtacgatcaggatacaacttagagactctagcaaagctatgagccactaaattagcagatcgtttaacaaaaataacctcaacggtactcaaatccgcaagcaaatttttacaactttgaatgacttgaccaaacaaagaaatcatacaaatagaactccgtaatgcttgcacaaccccgagacaatcactctccacagtcacatgatgccactgcttcaattt

SEQ ID NO: 396582 - DNA, 718 bp, Cannabis indica
ttcccttatagtatggattatttacaattgaagttagtttatacatgttattggcctaaaacttatggcaacttcaaatctagagaaaaaaaataagtaaaaaaaaaatgacaacttcataaaaataccataaataaacatagctaattattaaactatttttcttcccttatgtttttttttcctcacaaaccaaacaacaaacaagattccaatgaaaattttctctggaaaagttttcagaacaaccatcgtcatcgcaatgtcatcgaaaaagtcgagagagttattatcgtcatcagaaaaagtgacgaagttgtcatagttactggaaaattcatagaaaattcgtcgaagctgttatcttcgctaaaaaaattgtcaaagttattgttattattggagttaaacgttagggttgaacataggaatctgatatagagaaaccaactatatttatctgctagttaaaatgtgatgcagagaaaccaacgttatagcatagtgttttgaacaggtttttcaaacgttatacaaggggcggttttatgtttgaatagtattaggtctggttctatatgtttcagatgatgcatggtcttttatatcttaattgctaaaagggctaggtctgatgtaacaattttaaaatatgcttctagctaagtgattgagcagtacctggtggtgcttatataatgtggataggtatttttag

SEQ ID NO: 396583 - DNA, 570 bp, Cannabis indica
aacattaatatttactactaaatatcaacaattacatttcaggttaatctaataattaataattaataattattgattctttattgaaaatttatatataaatagcctctatatatcataatatatatttttttaaaattatatttattttattgtgattattttaataattgttgtttttttaatgaaaattttttataaataaattgaaattcattcatgaagaaaaaaaaaaaacaaaacgtgatgattattaataaaacatatgaagattaatataaaattactataaaaaataaaaatcttaatgatataatttaattaattaattaataggttttttttttttaaaaaaaaaataactcaataaattttatatatataattaataattttactaaaaaagcttaatttaattttcttctaaaactgtatttaagctttgcctaaggctttattaaaaattgagacgactctgaatagtatacattatattataaagaaaataaaacaaataaattagttgagacatgattttgtctcgtgattgtacttttacggagtgtattt

SEQ ID NO: 396584 - DNA, 840 bp, Cannabis indica
atttggagaagggaagaagcatttaacattccccatgtagccatccttctccaaattcttcctcttggactgggttactatagatagaggagaaacccatcgagctcctaaggcaccttgccttctttgaggaacaacctcagtgtattcctcggtaacatagtcttcaccctctaccaacacttcaccagcctcgaacacgagttccccttcctcattgtaacccctaaagggaaatcttagagcaactccctccttctcaactttagatggagaatcaggacgaacctcaccctgatcctccacctcctagacttcgacgtccccctcgtaatcttcctcctcagcagcaggccgggcctgctcagcactcggcattgtggtaagacaagccacgtgaggattagttaaagtggatctctgcactgtttgtttggtgtaggccatcattctattcctggacggagattgattagtgtgactagcaaccgtcacagttaaagtggctataggcgtacctacagcagcagacttgggtggcctacgggtatagtgtcaactatattctgtcggatgatgtatgtccaactggacgacaaatatgtctcccaccccttcttgagttcccagatgaaacgtccgtagcctttaccggcgatctagttgggataaaaatggtgttgcacctcaggttctgaagaaggtgtatgtttgctgcttatcttccagtcctcaaagcttgagttggaaagaccgtcactgtaatatcccgataagttaaatggtaaataattagggtttatattgatattatgaattaatcaggtaataagtgggatt

SEQ ID NO: 396585 - DNA, 1263 bp, Cannabis indica
gaccttgtcatatgctttgttcaaatattttatatatgatcataagtttaatatataagttctattaaatcccaaacatataattattcacaattacaatgatgtaatcacagtagaaatagaaagtaattgtgattatatatttcaaattatttagtcccacaatttattagtgacgtggatttacactaatgtgataatcaacgataaggtttacttacacttagctgagtggaatgtctcttttagagcattagtaaagtaaactaagatcaaatgtatcgactatacatcgaatgggaccaatattgacagtggaaaagatatcataaacttaccattatatcttttctaagtcaatatcacttagttgatcatacatcatttgatctcaatcttgagatggttaaactttagcttagttatattgcacaagttccttgacttgttcattaccaccttaccgtaggactagcccataattacatcttaggaactcagtagtgtaattgaaggggagtgttaatcatagatatataaatttatatcttatatgtttattagaagtgaaacaatggttctttagagcttggcttaacatgataaatgatagagcgctcatttcaataattatattagattcctgatatatcatttacaagtagctaagtgttttaaggataaaatatattgaagggtaaaatggtaatttggtccctactcaatgtaaaccgtctatagaggatcaataattattatgattgacatagtagataattgatggcgtatctatacttggtgtatagagcattctatgtaattatgagtgtaattttaaatctataatggaataagaaggaattaataagttagaaaatttactcgacaaatttcaagatctgcttattaagagcttaattacataggcccatggtctctacattgtctgagataatatcatcttgtagacttaactaattgatttaatatgtcaattagaatttgaaaataaactatctcttatttgagaattttcaccaagtttggacaattttgagaaaaaaagagaaataatagttcatttgttaattcgtacactttgcaggtctaactaataaatatttttaaattgtattttatttgataattatttatttgaataattaggtgaaaaaagtactaaaattagaaaagacattttagtttcattagttgaaataaagtggcaaaaaatctaactctaaagtgttggaaattatttta

SEQ ID NO: 396586 - DNA, 654 bp, Cannabis indica
ccgaaagagagagtgagcttgagagagaaaaattgtttccttccttactttgatttttcttgaaaatgaattaatattctttgcttaattcaactaatatcaacataaaacatcaattaaactaagtccactaaaggaaaaactactaatggcaaaaagactattttgccctcacttaagccaaaaagtcataaagtcacataagggtattttgggaaattctaaattcctgactaatctcgacattcccaatgtctaacaaaactgccccgctatactaaaatactaaaatgtgattctactgagccatacaccgcgttccaatgttgtcgggcactgaacatgcaaaaatctgaaatttctatatatgacatacaaaatgcattttgaattcaaataaagcatcataaataattaatttaaaattaatgagtaattttcataattaaacctcaattatctgctaatttctaaatttaagctaagcggtctttacataaccattccatcattctgaaattttccttttactggggtatatccctagaaggacttaggcaacgactagtaactaatcatcaatatgcaaatcgaatttctggtgaggtaagtttggatataattcaaaaaaatcaacttaatgatctttgaact

SEQ ID NO: 396587 - DNA, 558 bp, Cannabis indica
aaaccttgcccatgaccttgtatgggatgttaggtggcacctccgaggatccagaatcactgccgaattggctttgaaatctacttctcgccatctcttcctccatttctttggtgagttcctcctaaccataaataaaaattgttaaatatttaattgtgtgataattttaagaaaaaaatgaaatattagtgtaactcacccttttctctttagcagcatcattaacccaagatttatccttttttctaagatggttgtctttccaagttggtaaatatatttttctagctccttctgtattgttatcagtgttagattctgtaaaaattataatttcattaaatgaattaaatatatacttacaaattcatgacgctgagctcccatagattttgtgccttgagttgaggggtacttcatttgttttctatttttcttgttttgattggaacgctctataaattttgggctcaaaaacaaatcaataatctctttccaatgctctcttgttacatagtgctcaggcgtagcattgagtgccacctctagattatc

SEQ ID NO: 396588 - DNA, 731 bp, Cannabis indica
attttgatgaatttgggtgtgaaattgttagttattgttgtgggtgagattgtaggtttggatgagatgcttggtgaattttctaggttgaatttgatgttttaattaatgatatgctgctggaaaaatatttgagattgaaggtttaaagctcaagtctttgaacttgaagagttgtgagtttaagcatgattttgtgtagaattgtgggatttgtttttggtaaattcagaggcgtttttagggcttcattgagtttaaaatctgattataagttctgattttggttgtgtaaagcaagcttgagttcatggaactcaagcttggagctttaatggcactttttaattcttggtgaaattattgggtttgagctgtaaaatatgtttaatatgtgatttgttgatgctctggaaagtttggtggtgattggggaagatttgagaaggttttggaggtttaaaagttatgacttttcgtgttgttgctgcccagataaccggaattgctgttggttcaggggctattccagcctgaattccggttggactgtattggggaaaatgctgaattttgttttggacataactttttactcgggactctattttgggagttctttatatcgttggaaagctcgttctgagctctatgtgaccttctgaattttaaatgcaatgtaaatactttatgaatgtgaaatcaggagttaatcctatttgtgtaaatcc

SEQ ID NO: 396589 - DNA, 867 bp, Cannabis indica
atttaaaataatttaacacgtcactattttactttataatcgtatgtggtaaactatttgaatgttttctacattctaaatttctaaaataaaacaatgacattgacaacaatattttctttttggaaaaacaaatgtatatttgaaataaaataatgtaatgcactacaatcatagtcttatatatagagatggaatttcatacggcgaggataggtaaccgcgaggactcgtttttaatagggtggagattttttgtcttggtagttaatggggcaatagtaggagacaattttaatactcgaagcaagaatgaggcggcagtaaggataataatatccgcaccgtatcatatccgatcccattaaagtacaaatagtttcttttttatttttaacgtatatatagtatattatcattaataatcaaaattattctgattatcatccataatcaaaattatacatcatatgcttaaataataaaaatttaatggcaatagtgaactgttaatcattgtagattacaagcatgaagatatttttttctcgattttgagtgtcatctttatttacattctaatttgtcgggagacttataattacatgaaataccaatttttataaaaaaaaaaattatatttttacgtttatttatttatttatttttttaatatttttacgatagtctataaaaatacaagaaaataacaagagttgaagaaaattacatcaaaacagcaacaaagcaacataaaaaaataatatacaaaataacaaaaaattaacaacaaaataacataaatacaatataaaaatatactaaaagaccgtattttatgtaaataaaatctaaaaaattataaaa

SEQ ID NO: 396590 - DNA, 741 bp, Cannabis indica
agttatgaattttcgaaaaatcgagtttaaggggtgtcgagtaggtgcatggagtgcaccaggcgctcagacacacacgcctacgcgcgcgcacgttcagacatcttaactgtctgaacccgtgtcttgatgcagcacctggcccacgatgacgctgcgtccgcccatgtttgccgcacagacaccctgcaattcctctttccgcgcacgcgtctctggcatttgcagcctcctggcacatatagagcgttctatataagaggtactgcaattccaagttctatgcgtggatgcaacaaggagttaataagacagtgatttaccttgtaagttctgggtctgcttattagaagctcgattatataggcccatggtccccatactagttgagaccatactacttgtaagactcagataattgattttgattaatcaattatcattctaaaattagactatgtcttgtttatgaatttttcactaagcaagggcaaaattgtgaagaaaagagattctaggttttattttataattaagagactttgattagtctaattaataaatatattagatgacaatattatttaataattaatttttagttattaaataattgtaattggcatttgagtggttaaattggaaaattggcgtttttgagaaaatgggatggaaaaatgacaaaatggcaaaattgtaaagttgggcccaatccacatcctatggccgaccactatgtgt

SEQ ID NO: 396591 - DNA, 905 bp, Cannabis indica
ttaaatgtggaaaacaatcatgaaagagatgcatcaatgcatttgggataatttttatttcttttagcatatattttatattattttaattatgtaactaaattaattttaaattaaatagagagacaatacaaccgcatgtataacaaatttttatttaagaaaataaatccacctataaattttagaaattgaataattttctcattatataataaaggctaattaggatttttgcctcctgaactttgacatgtaccaaatcatgcctctgaacttttaaggtcgttaaaaatgctcctgaactattgagattgttggatttaagaaattttttccaattttagtaaaaaagtctaatatggatgaaagtttagggaatatgatttagtacatgtcaaagttcgaggggtataatttggtaaatgtcaaagtctggggagcatggtttagtacataaacaatcaatgtaaagtctctaatagtaaaattgaatgaaattagacaaaagttcagaggatatttttaacgaccttaaaaattcagagcatatttttaacgaccttaaaaattcaggagcatgatttggtacatgtcaaaattcaggcggcgaaaatcctaattagcctataataaatgtgtatttttgggtgcatatattttttagaaatttttacatgaaaaatcctttttagacactttattacaaaattaccctcacacgcctattactacatttctacttacaaagttatttttattactacatttaccacttactcatcataccatgcatacacgtgtgctctccccatgcatcatcaatcaaatcatctctcttccctctcttttttctattttgttttcattttctatttttcgatttcttctatttctgttctctc

SEQ ID NO: 396592 - DNA, 548 bp, Cannabis indica
agaagtgtgaaatacttctttacgcagaatgagctcaacatgagacagaggcggtggttggaactagtaaaagattacgattgtgagatactacaccatcctagaaaggctaacgtagtggcggatgcacttagcaaacgcaactatgcaagcttgtcaatgttaagggcattaaaagtgtcgttgcaacaggaaatcgagagatctgggatagagttagtaacaggaaagctagctaacctcacaattgaatcaaatttattagagaagatcaaagaaacaagcccaagataagtttttaatcaagaaacgggtcgaactacaaaatgagaaagccagggacttctcagttaatgaacaggacattctactatacaacgcaagggtgtgtgtacctaataaagcagagttgcaatcaaaaatcttacaagaggcgcacactacaccctattctttacacccacggtcaaccaaaatgtacaatgatatgaaaagtaggtattggttttgggaaagtgtgcaaaacgctttgggcacaaaactgaggt

SEQ ID NO: 396593 - DNA, 519 bp, Cannabis indica
ggatcaaaataagggttgtgagtatcacagagacctggggcacaccaccagtgaatgtggatatttaaaagatgagattgaaatgttggctagagctggacacctgggaaaatgggttcaaattcttatcatttatcccggatagggggttgttcactgactattgatcgtttcgatatagcaaagtattgtaaacccaccacaaggagtaagccatccttgtgctcgtagaatacaacttttgaccttgacagctctgccaactcaggatatagttgtggatagggtggatcagagggtacgaccacaacacctgcaacatctaacacaaagtagtggacgtacattgggtcaaagtagtagatgcgtgctcatatcagtaccacctggcactcgaccaacaatgcctcatcccaccacaaactgccatcataatagtacatcgcccgcataggaaccattgacaactcattttataaacaagggaaatagagcctcactataaaataccccctaaaa

SEQ ID NO: 396594 - DNA, 516 bp, Cannabis indica
ggagtgatccgccatgaaataaaagagagaggatccttgcaacagtgaactaagcagaccgagatctgactgaaccactatacttctctttgtgttcattatttttccagtcttgtgctaagtaattttgttcttgatttgaatactcgccattctgggtcgaatactcgcacttattatacatatatatataatattattcttattattatttttggtgttgtaaaattccttcaactacatttggcgccgtctgtgggaacgctaatactttgctgatttagaaggagaatcaccatggctggaaattagatgaatcacttctgggaaatagggtacctcccgtcgataccatcaacggaggagaaggacgaacgagcataaggccactcaatttgttccctgaaactgctgctcatgttggggaaacatctacgccagcggccacaatagggtagttcctgttggaatttattttaccaggatcttagatctactcacaagtatgttgattaa

SEQ ID NO: 396595 - DNA, 1346 bp, Cannabis indica
ttaagttttttgtcttaaatcaactgggggtgccttcgacctttcctccccctttccatgggctcttggtgcatagacacgctctttcggtcctttcggttctaagggccaagactttctcgagggagcttacccctctgcagacatttacctttcaggaaatcagagtagaccttttatggatcctgggcctttttgtttctcccagggattgaagtgggatttttcctcggaaggataccgtataggacttggctccctagttttgggcctttgggtgcttggcgaggactcttcttgtgtttcttctagtcctgcaggcacgactttgggatgcacgtaaattccagctgtctccatggccttttgcatgacaaccattatttcttacatccttctattttgttctttttgggcagccagttcggcatcatgatcaaccgcttttttccttaggaccagtaactcagtgtagctaccgtcgtcataagcatcgtacccttcgagattttctttgtactcctcgtcgttcgactcgtctcgttcctcagagcccacatttactcgcgaggccgcctcttcaccatctgggttctgaggatcctgggggaatgaggttagcgtgtgtggttccgagtttccaccattgtagcttagattcttgattgtcacttttcaaacaacacttcatacagctctcaatgaaagcaccaaaatattgactgagattttcgacaaccaattaaatgagataataagaagaactttggcataattaatgcagatgatttttacatggttcaggcattaaggagccgtagtccacgagtctgttattaatgagaatatttccttacagagaatgttctttgtgtgtttttctctctcctttcttctgatccccttcctcattttctcagaggtatttatagagattggtgggaatagtcgaaaagggataacctgtctttgagagctagctatggataagcataagttcccaaaagatacaaaatagggcatgcattacctacatagtaggcatcatagaggttaggtgagattagccttcatccttccttgattgatgtgattcttcataatggagccgttgccaactcctttgaatatcgtgtaatcgccctaaattaggcttacgatgtctgacacgtcctcttatgggcgttcccagacgcttttcccatgctgcattaaatgcgaggtgactgttcaagtagatccttctcgtcccggaggtgccttcctatatcttaactcctggaggagaaggcgtgcattttgcacttgtctgggagctaacgccatgaaccatacttgttgcctct

SEQ ID NO: 396596 - DNA, 660 bp, Cannabis indica
taaggcttcggccttcactgagtagagggaacgtcatttttgctggactggcggcatgtccactcatgtcttcttggcaccatgcgaaaatgtcaatggcacccttcagtgtctttattatcttttctttttccttcgggtctaggctctttcctagccggagtactttggtgggatcgaggtcgcacactgatacttccccgatgtcctccattggttctacaattttttcggatcccacacggggatcccactcgtcttcttcagccatttctgactcaatagtttctcggaccatcaacacgggtaggcgggcagcaacgttatagcattgcctcgtatccccttgatttcccctcacagtccctatcccagcttcctgggttgggaatttcaggcacaagtgccgtattgacgtgactgcgccgaagtctaccaaggccggtcggccgaggattgcgttataggctgtcgggcagtccaccaccacgaacgtgcagtacttgaaagtgctctggggtgtgtccgggcacaaggtgactggaagcctcacattccccatcgagataagtgttgttccactgaaccccgtgagttgggaaccacttggtgagaggtctcggtccgtcaggcctattgcagtgaaggcctctttgaaca

SEQ ID NO: 396597 - DNA, 502 bp, Cannabis indica
ggacacgaacatagaccatgacctaggatttgaatcgaaatgagatcgggacccaagattgggatatagatcatgactcacgaccaaggcctggaccaaacccgtagtcggtgtctagatcttagaatcgtaccaagacccaaacctagagcaatttctagactaggacccaaacccaaactcggactcgtgacttgaaattggaaaaagaactggaatgaagaccttgggacacgaattagaggttgacccaaaaacggatctagacacagaaccgaacacagacccgaaccccagatcggatcgatagctggacccatacttgcgttaggacctgcgaccaagaacctagaacccaggacccataacctgagaccttgaccagaacccagacccatacaagaacccaaacccagacccagatccagaccaagacccggaccctaaaacggactgaaaccgggacccagacccagacccagacccaaacccaaacccggac

SEQ ID NO: 396598 - DNA, 946 bp, Cannabis indica
  modified_base (893)..(893): a, c, t, g, unknown or other
tatatatatatatacacactttttctgttgaactcaagcacttatacccattgtgacaattattgtaccctaggttcatacacttgagtgagtggagttggaatttgttgttttggtaaggtcttatgtaaggaaaataaaatgagccaaaaactttgagaaaggaatagtcaggcagcttattaaaaagggtttgaaatggtgatttatgttacaggattagagtggaaagtttatttatcaaatatactgtagtttgaaagtatcaacctaatactttaatagcatgttagggtgagctaagagtgctaatccatttctactatgtgtcagtactgttgggttttgtaccgtaaataaaactcatttcaatataatcatatttactaattaatataagatcagaaattattttatgttgcatggttcacatgatttatttcatgattatgtttaatggtagattctatcaagtccagaacatatataaatatattaatatatatttgttcatgattatagtatcgtcagcacagtagaatataatcatgattatatgttcaaaagtttaatttccatgatttgtcaattcactggacttagactgacatgataatcggcgatagggtatagttacaccttggataattgttatgtcctttccagggcattggcaaagtttaccagtatcagatgtatggagtatacactggaagtgatcgatattgatctttaataagataccataaacttaccattatatctttctaaatcaatatcaatggttgatcttaagtctatggatcttaatccttatatgattagattcgacttagtgttatattttatgttcttcaagttgttcgtggaagctaactaatggttctggtagntatttacatcgttggacgatggtagttcaattgagtgggagcactgatcatag

SEQ ID NO: 396599 - DNA, 735 bp, Cannabis indica
ctgtcaagcttgatggtttttctaaaaattttgatagtttggagatgaagatttatttgctgcatacttcccaacagaagatttcttctgatttggttgagttgaaagagttagtttctgcacggtttgtttcctttgctgctcaaatggcttcaatgcagacacagttcctggaaggttatctatttggggccagccaggaggtagcctttctccgcgaaacagggacttccactatcctatttcagttttggtctttttacaaggtcaagtctcgggagcattatctggaggcctcttccttacatcgacctttgcgagcttttcattttagccttatatgcaacttttagggataaaatcttcacagagatgtgtaagaagggattcaggcgtgtcttttcaatttttcaagaattttttgccgaatgtgtttcttatctccgggttcacccttgagcttacccttcagaggaagaatttaagcgtattcctctcgaggagactttggttgagtgtgttcttcgcttttgttgcatgttaggccgagtgatttgggcggatggaagtaggattttgttgttggaatatattttaccaggatctagatttactaacaagtatgtttttaaacatcctaatatggatttctaatacaatgaaaataaacacataaaaggtatgagaaaccttacagtggttgcagcagaattaaatgactcctcccactcagat

SEQ ID NO: 396600 - DNA, 950 bp, Cannabis indica
gaacatgtgcttcatgttcataccagaaggttgtctcacaatcctcccactacgatgatgtacgggggtttcctttttagaaactgtgttaactgttgtcggttgttcaactaatggtgctgaaattgtaggttcagaaatattatgatttctaatttcctcaaatttcctctgaatacatacacactttagttctaggaataagtttcctagtcttgggtttaagaacatgagcaagacaaccccaaatatagaaatatttcaaactgggttttgtctcattccataattccattagagtattgcttatgctctttgagggtactacattcaaaatgtaagtagccgctagaagtgtgtaacccgaaaagtatagtggcagtgatgagtaaaaattaaatcatcgatctgaccttgtctaataaggttggtttcttcttcttgtaacaccattctactaagatgttccaggtgctgtaagttgggacaagatctattcttccagcaaatagtctttgaatttggaatccaaatactttccaccatgatctcattgaagtatctttcatggtttacctaattatttttaagccatggctttgaagtctttgaacgttccaaaagtgttagacttcttggacattaggtaagtattatcatatctagaataatcatcaataaaagtgacgaagtattcataaccacttcgagcttgaatattgataggtctgcacacatcagtgtgtataagctaaagttgttccttggctctattaccttttgcagaataagtctttttgtcatctttccttctagacaatattcgaatacttgaagagttccaactttaggttctctaaaaggaccatcccttgttaaccagcttattctgtctaagttaatatgacctacgcgtagatatcatagatacgtttcatcatcattagaaa

SEQ ID NO: 396601 - DNA, 1387 bp, Cannabis indica
ttggcatactccattgcctccataccttcttgctccgtcaagtcatatttaactaagctcagttcttaaggatcttctatcaactttttcttttccacaatagtatcaatcagatcaacaaagaaacagttatcatttgcctttgggaaagtcattgcctttaacacattgaagaaaacttcttccccttgcactcgcagctttaattcacccttctgaacatcaatcaaagtggccagttgccaagaatggcctcccaagaataattggaacattgctgtcttcttccatgtccagaataataaaattagctggaaagatgaacttatcaatttttagtaacacatcctcaatgaatccccttggatgagctagtgactgatcaaccaattgcaaggttactatagttggctttgcctaacccaactacaatcttctgaaaactgacagagacatcaaattaatgctggctcccaagtcacacaatgcaattatcccttctattctcccaattgtgcaaggaatggtcaaactccttgaatctctaagtttgggagggagtttcttctacagaatggcgctacaaccctcggtcaatgccactgtttcttagtcttccatttttctcttctttgacaagatctccttcatgaacttcacataactgggcatttgttccaaagctttagcaaaagggatgttaatgtgcaacctcttaaagtcctttagaaattttgagaactgcttgtctagattggtctttcggagtctctgcgagtacggtatctttacatgatgatctatactgattggtggagactcttgttttggtgtaagacttttagtagtattcttttttgttgatgttggtgccggttgatccttaatttcttcttccattggttgttccccatcaggcccttcatacttcttcccacttcttagggtaattgctttgcagttttcttttggattaacctcggttgtactaggcaagtttccctgaggacgggttgctatctgagttgccaattgccccatatgagtctgtaggtccttaatggatgatctagtctccgtcataaaaattgtaacaataagtctgtctgaagactagaactcccactagagccttgttgttgtgattgttgttggttctgcgtctggttctaatttctctgctgatagaacccactattcctttgattccctccttgattaaacccaaagttgttgttttgagagtaatttccaatggctttagcttcatccattggcaaactattcacatctaccgggcatctcgcatagggatgagggcctccacatagctcacagacaacctgagcttgttttgcttgcacagctatcagttttgttagggcct

SEQ ID NO: 396602 - DNA, 527 bp, Cannabis indica
cgagggctaaggatgaggctttaaaggccaaggatgaggcgttgaaggccagggatgcggccgtggccacagcgaggcgggagctgcgggattctaaggaggcagtgtaggaattgactgccaagttgaagtctgtggaagagctgcaccaagcgaatttgcaaacgacaaccaacctaacttttgaagtaaaggggcttagtatattcaaagaggaggctcagaaggaggtgaccaaggcgaagagagatgctctcctggctccagtcacttgccaacactataagaagcgctttgatgacggggtcttcatggtctggcaaaccaatggtcagaaccttagcctcaactgttatcccaagcctgaaagttcttgctcgcttctgggagaagaagaagaggctggttgcagtgctagaggagcgcaggggtcctcgtcttccaccttgggctaattgaatcacttgtttatctcctttgttatcaccattatcatcatttttttttacatattcagtccttccccc

SEQ ID NO: 396603 - DNA, 698 bp, Cannabis indica
gacttccagaccaagggagctttcctttgaccaagggaatttgacctctacgaggaaacaatgtacaaagttgtcctcaacttgcaaaaggctggcctccttttggtatggccatagtgacgtggcaggagcatggtcgaccaggcctcatcctacaggccttgggtggccagacctcaccctgtaagtctatgggcggccaggattaaactagcaggattctatgtagaacccaaaatgtggacagcaagctacctacgaattaggcctttaatatcccaacaaactgatggaaaatatctagtttcaaggggtagtttagtcttttatatttaatcaatttaatatataaatatctaaggtggcgtttggttagtaagtgaaaatggaatgggaataggaatgggaataggaataggaatagaatggaatggaatttctattcttttgtttggtaaaggctatggaattaacaatggaataagaattattatgtttggtattgtatggaatggaatagaacatttattattttgcccaaattaccctttacttttctaaaaatgatatttgttttattaaattaccattattttataaattgaaaaaataaataatatttttagcaaacaaatatatttatcacgtgataataataatgcacattcttaaatctaattattaaaaaataaaaataa

SEQ ID NO: 396604 - DNA, 702 bp, Cannabis indica
actaagcataacagctgaatgaacttggatgacgaatagcgaggcatctatctcgctataagaaggtatactctgggtaccttcactaatcagcttcagacatctttcaatgagattcactgctccgtcgagtcagctctctcagatagaagctgacattcaaatgatgtagactgctgaagttcatcttgtcaccaagaactgcgattgtcagatggaaagttatgtcttcaagcgcagaaacgacgagatttacattataaacctcagaaagacatgggaaaagctctagctcgctactagggttattattgttatgttctcagcgagatgtcccagagcgatatgctttacaatgtatttaattcacgtatgcattgacccagtaaaagcagaccaatcacagctgtgtgattttcaaataataatttattttatgtgggacgtaatcaaatcccacaatttcaagggattattattgtaggatatcagtctgatttataattaattgccttcctatgtaactataaataggaggagggaacaatgagaaagggacggaaaatcttttacagtataagcctagaatggtattagaaatatttaataagatagactcgtggactatgcagaattttaactgcaaaaccacgtaaaaagctttgtgttctttattttttctttactactattattttctgt

SEQ ID NO: 396605 - DNA, 1334 bp, Cannabis indica
ttataccgcaaattactctactactaattaaaattaaaagatacacatatttttgtatttagctcatcaaaagtaataaaaagtaaaaatatggagcacgaatttgagtccatataagaaaacaagttggtctatttaagaaaaacaggtcggcccgaatattgtaggacacaaattcgagcatggcacgaaattaccagacttgccagccgtgctgggcctaccctataaaattgttacacagcaagacacgatacaatccattttcttttatggctcaacacaatgtaacgtgcaagctaagatggcacgatacaagctaggtggtgcccacaaggtgaccaagtggtggtgcgtgttggtgtgcatgctgatgcttagtttgtatagtattggcattttcgtaaataacttcaatattgtctaaatcgggacgagacatggtatttgccatttatttgggtctatgaatataatggtgaaatcagattcgagaaactctgtgatttggtatatagtgatgaccatatatctttagagcaaaaatcatacatgttcctagtaaaagactaaaagcttagaatgctccttaagagagtaccttgtgtcagctttccaccacccctggcaccttggtgctaagtgagctactactagttagtgatactagtaaggcgggcatatgaggatcacgaagggactcatatgtctccacaagttggaatcttatggacactatccagtcaaccttatagtgcgtctaaaaatgctgccaaaggttagtaggtatgttttcattggcttgccggtatgtcgcttgcacgggacgtgacttaaacttctgagagatgttatggtgcgccttggccacaagtctcaacacgagatgacacaggtagtcattcgtgcactagtttgcatacgcgcatgagacggaggtaccatgctggaaagagacaaaagtctaacgtatgttactagtttggtggcttgtctggaaggcctaccaacatgcgtgaaggcatggtgccttgaggattggactatgaacgtatgggagtccttgggcaatgagggagattgttcagaaagtatcgaatgagaaatgattagaagggttggcacgtcagcttggcgttggcatcttgccacacatgctacctaggtcacgagtgactaggtgagcaacggtgttaggatttgccttatcatagtgggaacctatggacagtgcaagtatcttgactaaagagcctcgatgcatggatgcactcatggatgcttgcgatcatgactcggcaggagttgttcaagagacgaaagtgtgcatgagg

SEQ ID NO: 396606 - DNA, 612 bp, Cannabis indica
aattgttgtatgagagatctagggagtaaagattttcttgttggaagattgagtttggaatctcgccattcagtttattggaatctaaggaaagtctttgaagagattttgacttaaactctttaattgggccactaaggttattattagacaaggataaaagtggaagggaatatatccaagaaggtattggtccactgagcaagttatgagataagtcaaggtattctaaatggttaggtagtgggctttgggaggagtttgatgtttttgaaaattctggaatctcaccaacgaaattgtttccagaaagacccaaataaatgaattggtgaagattgagataatgcaatgggatttggccaccaaaattgttgtcactaaggtctaatgaagtgagttgtagtaattgagttaggttggtcaacatttcaggatatgatgatgatgatcctgtaaaactacaattactgagacctaaactctgcaaagacttggcagctgtagacaagtatggtaaatcaacagagattttggtgttggaaagacctaagtacctgagtggagtgctccaattaaatgtaggcatggaaccaataacatcatagttgt

SEQ ID NO: 396607 - DNA, 1588 bp, Cannabis indica
gacccaagacctaaccccgatcttgatcccagactcgaacctagacacggacacggaacgggatgcaagattggaattgaaacgagactgggacaaaagattgggatctggatcttgacccacgactcggggcttggacccaacccgtagtcggtgtgtagatcttggaatcgtaccaagatccgaacctggaaccatttccagacaaggacccaaacaaaaactcgaacccgagacagaaattggaacaagaatcgaaatcaggaccttggaataggaaagggacctagaaccaaaactggatctaaactgaacacggacgcacacctagactgtgatcgaaactcgaacccagacccgaacctggacccagacttgtgccagtacctgtgacccaggacccatgacccagaaccttgaccagaacccaaactcgtaccataacccggacctaaacctagacccagacacagaccaagacccggacctagacacggactgaaacctagacccaaacccaaacccacacccagaccaagacccagactcatactcaaactcgaactcggacctagatcaggactgggacccagacccagactaggaccgaggcctgaacctggactaggactagaactcggactgggactgggaccgggacccgggacccgatactgagacataggacatgagaacctaaccgtgacctagacacagactaggccaagactcgagacaaggaccagtaccgaacacgcatcgaaacctgcactcggacttgtaccataacctggactcggtcgtgtacccaaaccgggaccgagacccggacccagacctagacctaggacccgatcccagacccagactcggacctagatagggatctggatacgaacctggactcgaacccagacccggacccagaccgagatcaaaactcgggacctagatccagaccgagaccgtgacccagacccagacctagaaccacaactcggacctggaccagaacccagacccaaactgggatctggacctaaatctagactcagaccaagactcgaaccaggactcagatcccgacctagactcagacccaaacccgaacccagacactaaatcgaaatcgaaactaggactaggacccaaacctgaactgttggaattattttaccaggatcttagatcactcacaagtatgttgattaacaacctaaatatgaacttctaaaacgataataagtaaacacatataaagtatgagaaaccttgcattgggtgcagtggaataatatgtctccttccactcagatctctaacccttgattcctttctgttgcagagtataatcaagatctgagtccgaatgtcgttctcttggatttgatccttcacagtcttccaaactatgattgaggtactgttttttatgtgtgggcactactctctcactaggatttcgaaattgtatctctcttgtctgttgtgtattgttcatcaagaagaagaagagatgggcagctatatataaagaaaaggaaagctcaactttctgaaagaggcagtttcctgaattacagagtaa

SEQ ID NO: 396608 - DNA, 1013 bp, Cannabis indica
actttcatttttgagcactcggacaccctggtgcctaggttaacaatctatcaacctgggccacttccaagcatcagaatgaaaatccaactcgtgcatctcttcttcatcattaaaaacagggatacaagttctttctgcaaggaagaaataacacatcctaggtgccaaagcaagggaccagtgcccaggttgacattttgtcaacctaggccaattccaaggagttttttcgagaagtcttccgggcatattcactatttttcagcatattaagattcaactatttctaaggaccaagcgaaacttacaggaggcttgaaactagacccggggcccatgttcaccctgggcttaacgcctaggttgacatattgtcaacctaggccatttccaatcaagtttttttaaaaagtggtccgagcatttttttcgtcatcagaaataatgaatatacaagcaaatttagggagaaaaccacaatcctaagagcatcaaaactgagcccagcgcccaggttcacctggcactaggcccggtgcccaagttgacaatcaacctagtgcgctgattttgatcaccccaaatgtcaattctgcttcaagctttatctttgaaattgtcaaaaataggacaggagaccttgtcctcaaaatcaagaaccttggaagtgccaaaacgacatcgtagaagctcaaaaataagcacccagtgctcatgttgacaaatggcctggtgcgctgtattctgcttatccagttcagatttcgtctcaactgtgtgtctagtttttcataataactgagagccatgaagttagaagagttaaattcacaacttcatattttttagttttttgacaaggtgatttactcaaaaactggacaattttgagtcatccagttctgcagaacaacatcttcaagaactggtgaccagctttgccagaacacagaaatggactaagtgatgtcaaaatatcagttaagcatcgaaaaacacattcccaatgc

SEQ ID NO: 396609 - DNA, 752 bp, Cannabis indica
aaaattataaacttggtagaatacaatcctcatgtagttgtccctagattgtggagattttttttttattatttttgttttaccagattttaccacattcccaggtttaataatttatttggatatgtaaattaattaaaagtaatttatggtatcaatatttaaatttaatcgttgtaaataaaaatttaaatttaaatttcgatgataataatatttaattatatttttggaaattacataaatattaaatgtctaattattattcacgtgttattttttcttgatatatttaaattaatttttaaataaaaaataaaaattaaatgaactgaactaatgagagactactatgtgactattgacttgacatttaagagtgagatacttacatacaaaattcaaaaaatataattaagtattattaccgtaaaaaattaaacttaaatatttatctgtagctgaaaaataaatttatttatgccataaattatttaattaaaacatatatttttttttattttgtgtttttaccgtactagttaaaaaggtagagaagtgtgatggtgagttgtgaagttcaatggagaatatatactagaattgtacatgtgacttgttttcctttttccataactagttactacactaccttttcttttcttctctgcacctctatatttgcttccttgtgactcttttaattatatattttttttttattctatcaaaaaaaatttatatatatatat

SEQ ID NO: 396610 - DNA, 2409 bp, Cannabis indica
ttttaattttgctaactatacaattgatagtatttgagtaattcgaaaaagaattgttcctattcctccaaatatgataaatggtggctgccaatataacaatcaacaacctcccaatcaagctagaatggcccatccgaagccagttgttccagctcccaaaatcagcagcccaacaattgaatcccacccaagcaaagactgcttcaagaaccatctttgagaacctacaagtgaagaatagatgttgatagtttttaatgtcagaaccacaaacagcacataataaatcaactactgttatgtggaataaaagaagcttatctcttgtgagcaggttggaatgtgctgtctgccacaagataaagctctgttttggaacattcagcccacaccaaatggcccgagctgttggatccggttgctgcaagattagagaattatagagcttagaagctctaaattttcccttagctccaacagttgttatatctttaaccgagaaacaatttctcaaatggcacaacttcttcgaataccaacttgtatcaccttttagatcataattccaaatatcagccccttgagataaacaccattaacccatttaacccaaagcaagtcctctttgttcataagatcccaaacaaacctagcaagagaggatttattccatttaactccatccttgaaacccagacccccaaaagctttcagaagacacactttatcccaactagctaaatgaatctttggccgattatccttcaatccccacagaaaaccacggcataatttctcaatctcctttatcacactttgagggagaagaaatattctcatccaataattccttagactcaataaggttgaatgaattaattgaacccttcccgcaaaagaaaggtgctttgttgcccaagatatcaatttgaccttcatttttttcaaaatagtgccacagtcttcaagcttccatttagttggtctaagggaaataccaagatatttgaaaggaaaactccctacctgtaaattgatgagttgagccaattaacctggttgagagacacctccaaagtaaatatgagacttcccaagatttatagacagacccgaagtattgctaaattcttccaaagcttccctaatcacttgaatagagtcttcattccccttacaaaagacaactaggtcatcagcaaaacataagttggtcaatttcagctttttacacaaaggatgatatctaaatctcttatctttggctgcaagttggaatcttcgagataagtactccataatcagaacaaaaagtaaaggtgatattggatctccttgtctcaaaccctgttctcctttaaacgatccctgtaatcttccattcataactagaggataagaagtgtttctcacacaaagcataatccaagttatgaatttagcaggaaaacgataaagattcaacaacttctcaagaaaatcccaattaatcgtatcataagccttacttatatcaatcttaaccgtgcacctaggggaacaattcttcctcttatagttcttcaacagatcttggagaatgaggatattataagctattgaacgaccttttacaaaagtaccttggttctgattaactaaagtaggaagcactttagctaatcgagaacacaataatttggagatgcatttgtaaagagtcgtgcaacaagctatagacctataatcaacaacttttgaaggattttccacttttggaactaaagagagacctgtgttatgaaggtcagcagggaattgatttgtttcaaagaaatgaataatagccctatggatttcctttcccatttctggccacacagatttaaagaaccccgaaccaaagccatcaggcgcaggggatttagtacttaggatactaaacatcgcagtcctaacctctttaagagaaaaaggtttcaataaatgtacctgttggtccaaagtgagatttgagcccatatcaatacaatcctgctgaatcggccttaatgttggtttctctttgcccatgatgtcttgaaaatggttaaggaagtgcggaactacttctggaaagtgatcattcaatctcccttgttctgtggtaaaagagacaatccacatgataataatgttgatagtaataaaatagtatttattattattgtgagaattattgttatttattttatgaataaagaatattttaaatttttttcaatttggtggtcaacatctcactttatgagataataaaagatggattttgaaaagttacatcttttattggattataagagataatcatctcatatttgagataaggaaaagtggactatgagagttacacttttattggacttgcattgtcataagcaagaacaa

SEQ ID NO: 396611 - DNA, 1152 bp, Cannabis indica
atacatgtcaaaacaatgcgagccgttaaatatttatctcgcattagctttatgttgttttatgagtagatctcacttacaactgctattttttaatttttcctttttaaagaaaaagtttttcaattctttgattttatattgtccatagacaattttaatcaattattctttcttttgtggaaatttttttaattttttgagtttacaatatagtatatatttctagatgaatttcagttattatacacatatacgtatgctcccaagtaattttaaagaagacaaactttgtaattacttgatcaaaactttaactttattcataataagcatttaactatacagagataaatacaacatttacattttgaatttactggtaataaggtcgtaaagtttcactattccagtggttctttattagcgagccgttaagccaagctaatttataaaccccagttcctacgatcgcttcaataacataaggaccttcccagtttgggttaaacactccagcagccggatcttgagtatttgcaaatacacgtcttaacacaatctctaaccttaaagagcctttttcgaactcttttgttaaaatacctcttgattcgatgttgataagctgcattggttatttgtgactcattacgtcgttatttcaagtaagtccaagaaaaaaatcaaaagttcttggttttcttcttgactgtagaattcacgtctgtgggttgcaatgttaacttctactgttaacattgctttcgagccgaatgccaatgagaatggagtgtgtcccgttgctgttttctctgttgttctgtgggcccaaagtacttgtggtagttcatctacccatcttcctttagcaccgtccaacttcttcttaatagtatctcttaaggttttattaacaacttctacttgtccatttgcttgaggtcttgatactaatgagaagcttttaataatcttattcctttcacagatttcagtgaacagattgtcatcaaactgagttccgttatctgacactattttgattggtattccaaatctgtaaatgatgttcttcataacaaaatcgagaacttttttgcaagttatggaaactagaggttcagcctctgtccattttgtgaagaagcc

SEQ ID NO: 396612 - DNA, 747 bp, Cannabis indica
taaatagtgacatactgttattgctgtatttcattattgggtcttacaaattttaatttagtgaataatatgagaaactactaaccaattattaagtgttatatttgtataatgttggacattttaaggtgctaaataataatactatattaataataaaaaaaatgcataattctccagaaaaaatattgtagaaaaaattatatatataaaaatatcttttataagaaaaaagaaattaagatcataaaaaaaacccacaaaaatagttgtaaaaaaatagttatttataagaaaatactaaaggaggtactaaataccataaatagtggcatactattactggtgtcaagtatcacaaaatgtaacaaaacattaaaaaaaaaaactccacataaattgttgttaaaaaattgtaaaagaaaaagattatacaaaataattgtaaaaaaaaattatgaaaaaaattgggtaaatacaatttcagaccctgtattttgcaaaagttaccaattggaccatctgttttgttaaatgacaaaatggaccctgtattttctaaaattgtacaaataggaccctgaactgatgttttgtcaaactaaaacttaataataatctgatctatagattttatgacaaaactcgttacattttccgtatctattcgtgttagaaattgtcttaaaattggttatattaaaaaataaaattgttgaaaaattgagcttaggatcttatttttac

SEQ ID NO: 396613 - DNA, 586 bp, Cannabis indica
gtgccaacaaccaagtgatctcagaagtggcatgagccatagccccgtattctgcttcagcggaagaacgagaaacggtggactgcttttttgatttccaagagataagagatctgccaagaaagacacagtaacccgaaacaaaccttatagtgtcactgcaagaggcccaatcaacatctgaattttttttaagatgaaagtctatgtttgacatatcagttttaacataagcagacaagttagtggaagatgctgagtaaaagaatagtccttggccagaggtacccttaagatattgtaatattctatgagcagcagtgacgtggggaaccctcggattggatagaaattgacttagtttgtttacggtaaaagagataccaggccgtgtaatagttaagtaaagaagtttaccaatgaggctgcattaaatttttggattgtctaatggttttccaacatcggatgagagtcaaatgctggattccattggggtgggagcagtagaagctcctaaaaaacccgtgtgagttaaaagttgaagggtaaaaggttgttgggagacagatatcccagaggaaga

SEQ ID NO: 396614 - DNA, 942 bp, Cannabis indica
agtttagtagcttgtttttcatcaaaatattcttgaagatccctatttcaagaaaataaatcccatccatagttaaatttgggttttagtagcaaatttattgtcttatttcttttaagcaaaataaacaagagatctctaatcgaagagcaagaaatataatcccaacatattgtttaaaataaaaaataaaaacagatctcacttgataacgtttgataacgttatgatcgaagaaatatatatatatatatatatggataatatattttataaattctaagtgagatacatagataaatatatatggatcgtttcttaacggaaacgtcaccatcaatggaataaaatatattattttattgctgttgtggcacggtcaccagcttgacatagcaagtttttaataactttgaaaagtcaaattggtgagttggcataatataagattctagcatttaattcgagatttcttctttttttttttgggccataaggaatggtgattcttcaataaaatacaagctctattaccaatgtaaaatttaaaatttgtttaaatatttttattactatgctcatacattaataccattaattataatttaattatattaaaataaaaaataactcttcttgtttcacattttctcttaatggggtcagctctcctcccttctcctcttcttccccttaggaaacctaaatctacagttgacctcaactttcgccgcctctttccgatacgctgctgtttttgtattcgcagtacccccaaatccaatctctcgcttgggtttacgatcaaccaaacacatctatggctttgcactcctgtgtaggctttttcaagatcctcgtcatagccgaaacatgtattattattttcatattttatctcacactggcttcttcattcaaaaagaccttcttcattcaaac

SEQ ID NO: 396615 - DNA, 872 bp, Cannabis indica
aaaaaaaaaggagatatttacctatttagttacataataaaatataactaaattatatgttaattaacccccaaaaataggtaaataactgatctttatcccctagttatcgtgggttgttgaagctcaatttttgacttggagcccttccaggatgtaagctgcacaacaagtgcctcccaagatgtaggctgcacaacaagtgcttgccagaatgtaggctgcacaataagtgccgcgtaggatgtatgctgtagaacaagtgtctgctagcatgtaggttgcacaacaagtgcctgccaactttggcaactcttggctagcctttgtacaactttccttgaagggtcaggcttccttggtcatataggcccttttgtgtctgacagtcaccctttggccggcaagcttgtggtcaaaccctggttgaccaagcaagcttctccttgccgacctatgtacttcccttggttggctagacatggttgtgcagcttcttgacgacttgcttaactcctttcgcttgttgcttgatagttttaccatgtcttgcaaaaagactttgtcctgctattgacaaggttgtattccacgtgtcctcagtctttacttatgtggacatgccatgttaggtggataacatttgggataacagtgattgttttcacatttggaatttcaaatcctaatgagaaagaaattaatgggaaagttcagactttcttcaaacttttgaattgaaatatgattattcaataatcatacattaatagtgttaacgtagattttcgttaactaaatttgagcctgaatgataaacttgcacagaaaaaaataaaacagtaaaggaaataatatgaacacaaaggttt

SEQ ID NO: 396616 - DNA, 629 bp, Cannabis indica
aattgcccagccaccgaagacatagcaaatccattgcgaagttttacaatcttgctactaagactacatgttaattcagagttattatttacgacaagtgtcaaagtacataagttgagtgagcacccgcgtatcgtaataggaaatcttgaagtaagacaactggaaaagcttctatcactactacaaaattggtttttcccaacggtttataactgtcttttatattatttcccaacggttcctaaaaccgttggctatgtgggtgtcataaaaatgcggaactttaaatgacggtttataactgtggcaaaaagttactttaaatgacagtttataactgtggcaaaaagtcactttaaatgacggtttataaccgttgggaaagacttccatcgggtagtaactgatggaaaacatctctttaaatgacggtttataactgtggcaaaagttactttaaatgacagttaagaaatgttgggaaagactttagtcagactataactaacaaaatacactacttaaaatgacggttataaaccgatggacaatatgaagtaaagtgtaaaatggaaatattaatgcgattctcctcttttatttttattatttaaatttccaatata

SEQ ID NO: 396617 - DNA, 674 bp, Cannabis indica
ttaattcagacctcaaagctataaaaattgctgttcgtataaaatatgggcagctcctgaagggtctcaactcctttttgcaccaaaaatccaaggtctcttggattaaaaatggagatggcaacacagccatcttccatgctagtaccaaggagaggagaaggtctaacaatattctttctattgaagaccaacaaggagttcgaactgataaagcagatgagatttcagctgctttcctttctttttatcagcacctacttggctctaaaatggaaggaaggaggaaggttaacagaggagttatgatgttggggcctcttgttaacaaagaacaagcagatttgttgttgaaagaattttccaaagatgaagtcaagaaagctatatttgtaatcccgggaatcaaagcaccaggtccagatgactacactagttgcttttttcaggataattgggacttaataggagaagatatcagtgaagcgttgttgtctctcttgcatacaggtcagatcctcaaagaagttaatactactgttttaacacttattcctaaatgtaagtgccctaatacagtaagtgacttccgttctattgcatgctgtaatgtcatttataaaaccgccactaaactcatttgttcaaggttgaaagctgtaaagcccgcttag

SEQ ID NO: 396618 - DNA, 833 bp, Cannabis indica
agcctaaatgataatagctctcttagcccatttgtgtgctaggcccaaatcaatagtaagcctaggatacttgatatgtcgtcttcaaccttgcagttcattttttttttttttttttagccatgaacagccagtgaaatctccctcagttcttcttccatagtcctcaatcgttgaccacgattcttcttagcagtaactaggttgatatatatgtatgtatatatttcagaaaaccagtaaacatatagatgtcgtcgacttttccaacttattttctgcgatccggcgtgcccacgcgtcccttcgcccggcagtgaccacactcctccgatgaacttctgctatccagcgcgaccacgatttccatctcccatctgtgctctgatctagaacacgcccaatttcctccaccaatcggatgtgtcgtggttggtgtacccctgttgcagcggtattcagtgccatctccgtcttcttcgatgttggagttcttcgagctgccttcgttgatgtagattgagcaacatccaatgaagccacgacgatcttctccgccttcggtgttcttcgagctgccttcttcgtcatagatcgaaccgacattgattgcgatctacttagatcggatacagctgaaatgtcactgccgacaaaatcaagagccttctccgatggtgcctgagccgagggacccatagatgtctctgttgatgagcaatatttcccaactctaacatctaagtcctccatgagatgcactttaaatgccttcaattgagcatcgaagaatcgatcaatacgacgatccaactccatcaacatctttgcaa

SEQ ID NO: 396619 - DNA, 589 bp, Cannabis indica
cactaagccttcctatattactaatatatttaattcaatccaatataattcaatatttcaattataatttataatccagcccaatctaatcaatcctgcatagaaaacgacacttttgattgttctatgagttttagtttttagttctaaattgttattttttaatatcagctttaacaatatttcaaggaaaaataagatcaaaagtgtaaatgtatctatccaaaaaaaaatagtaattgtagaaacctaacttactctgaattattttatttattattaatttttaggcttgttttgagttaagacgggtcaagcttgtacttaagatccacccaatttaaaatccaaaaaaaaagataatcataattaagaaaatataaaaaaaattggtaattttcaaaaatatcattagaacaggagctcaataattaacttttttttatgatctttacgcaaagtatctaaaattatattatttttcttttactttttcgtacagattttgctttttttacatgttttttatttgtatttttttttctttcacgttgcttttatgttaacatatctgtattttttttttttt

SEQ ID NO: 396620 - DNA, 635 bp, Cannabis indica
aaaaaaaaaaatataaaacctaaaaaacattagacccatttaccactattagtaaagcttgaaaagtttgttgttcaccgaatttttgacaagaagaaacataaaatatagtcccaatcattgataaactctatactcatcatctcatctgattttttttttcattaaacacaaatcaaaaaaattatgtgtcaaaaaatttagatttgaaaaaaaaaagattgaacccaaatgtaagctctaaaatcaaatgagatgactctagatactaactgttaaaaatcactacacaaagagcatgcaattatcaataataatcaatacaaactcatgctcatctcatccaagatcaaatatttaattttaaagctttaactttacaattagtaaacataccttatttaatatttggtattgaatttttaagagctatgaaccattgttgatttcataaacctctttgatttacacacataaagcaaaacaagaaagtttgggtgtaatgaacactactctttcattctctcacataccattgtccacaccgatctcacatcaccataaataaaagacaaactcttatatgagagattatgggctaattgggccaagaggtccaatttaagagaattagt

SEQ ID NO: 396621 - DNA, 552 bp, Cannabis indica
tatatatattttataaatttattattatgatataaaagaaaataatgcaaaaatttaaaatatggtattcttaaccttcattacaaaaatattgtataaaaatacacacaaaaaaaatagaaaaaaaaaaaaatcataatccgaaagtattatttattttaattatccataaaaaaattaacttttaaattttttctatacatggtgtaatttctacagttaaaaatgaatacattagacaaatgaaattaaaacggcgccgtttgagttactatgggggccaaccggaatggaaaaggacaaagaaagaaagaaaggtgacaatagctcatcgaaagtcgaaaacagaagaatgatgccacgtaagcagagaaatggatgagcagagaatagaaaagcataagaaccaaacaaaaagcaattaaaaggaagaacgttattttgctctactcattcctcagtcactcactcaacaacctcttcttccttccttcctttcttctcttccctatccttaaccgctcaaagcctcaaacccaacatctcttctct

SEQ ID NO: 396622 - DNA, 734 bp, Cannabis indica
agcagaacccaaaatgaccgactgctaactgaaattacagctgctgatattcacctcaccttatctcaaattaacgctatgaaagcccccgaaatagatgggatgcctcgactattttatgagaatcattgggaagttataggaagggacattactaaggtatgcttggacatactcaacaaccacaaggactgtaggcaactcaataagactctcctttgtctcattccgaaaaccaaacatccgaaacaagttggggattaccgccccataagtctttgcaatgtgagttacaagattatagcaaaatgccttgccaataggatgaaggatagtcttaagaggtcatttcggaaaatcaaagcgcatttattcggggtcgtctcatccaagataatgccatattgggattcgaaagtcttcattgcatgaaaaaaggccggtttggaaatggaagaaagatggctctcaagctagacatgtcgaaagcctatgatagagtcgagtggcgattcctagaagcaatgatgatttgtttgggttatgacaagcgttgggtggataagattatgaattgcataaagtcaatttccttctcaatacttcttaatggagaagtcagcggtcaaattcatcctagccgaggcatacgacagggagaccccctatcaccatacatgttcttactctgctccgaaggtctgtcttgcctcatccaagaagctgagagagcc

SEQ ID NO: 396623 - DNA, 867 bp, Cannabis indica
gacctcactcctgatgagtttactacttgaaacgattacgacacttgcgtgtggaaaatatcgcaacagttcgcgaattttttctttcttttcttcctactttatctactgtttattattgtctcattaaaaatagatgatatacaccatatttttactaatgtgattaaacgtacatttcttttactttaaaaacaaaaaattaagatatatatagggatatcattttgtcccgtgatgtacttttacggaatgtattccgtggtacattatgtgggtctcagggtacattaaatgagtgtcagggtgcgtttctactttttaaccctaattacccttagatcaatctcagccgtcatatcaaataactcccttatctgacggctgccgtacatcacggattacaatctgtgaaagtacaataacaagacaaaatcatatcccatactatatatatatatttatcaatcagctcaaatattacttcaaactccaattaacaacctaagtagcattaatgataatgattttatttttatgaaataaaataattaaaattaaaattacaataccaccctaagtaattagggcccgtttggtacgcaggattggactggattggactgaaaaggattggactggactggacaagattggattatgctgaaagtaatcctgtgtttggtttaagaatggactggactattttatttattttcttttagaaaaaaaaaaaccttaattaaataaaaatatataataataaattaaaattaaaatatataataataaataaatataaataaataattcgtcgaaaaaaaaaactaatatatcatatataattaagaatatatcataaatata

SEQ ID NO: 396624 - DNA, 1134 bp, Cannabis indica
tgactgttaagcaaattatgagcggttacgtatgcacacgtaatctattgtagtattaaactcacacaggtgaggtcgaactacaggaaattgttattgagtactactaaattagatttatgtttctatttggtaaaatcgaaaaaaaaattctcctatccaattttaaaaagttcatatctcactcaatcttgagtaaaaccttactaaattttggtagagacatcataagaaatatttttcatgaagaaacctcagccgaattcccaacaaaaatcaagttaccaaggtcaagccaagtttgagttctttgaactgaaacttgcataacttttgctacaaccacccaaaatactagggttgtacataaatttttgtaaaccgccaaacccaaacaacccgtccaaaccaaaccgacataacctgacaaaaactgtaaaccaaaaaacccgacaaaaatataacccgcccaatctttatattgggcggattgaaaattgttacccttaattttgtccaaaatacgtggaccaacgcaattgtgacacgtggatttaaggagtaagactttgagataattcgactaagtcttcttaatcaaaaggatcaacaagaaacatgtcccccgaagaaggtatgagggattcacatactcccggagagcaaagctataacaaagcacctccgggaggtatcaaaccctatctgaacagtcacttcgcatttaatgccgcatgggagaaggcgtattggaactgccataagtattaaagtctgagggcgtaaccccccttctgcagctattacgctatgattaatgagcctagtgacggctactttatgagaaatcacatcagtcaagagaggataatgggttacatccacctaacccctaaaaaacctagggtttagaccatgtatttcctatgatatactcgttgggaatgtgtgtctctgctgaataatacagaaagacatgtacctcggttctagggatcaccccacaaaaacactataaatacccccaaactcatttaggtagggtcgagattctgggtttcatagaaccaaacgagaaaagtcaccaagaacattctctgtaataatactctcataaataacaaagactcgtgg

SEQ ID NO: 396625 - DNA, 820 bp, Cannabis indica
ccaatctgccggttcgtcgtacaacatgttctggcgttaaatttgttgcgtcgaaaagccctagtccttcgatagctgaagagtccgtgaaaaaattcactagtttttcggatgtggtaagtgctttaagtttttcattttacatatatgttatgtttttatttttaatgtgatttaatttttgtttatggaaccagttattttatttatcatgtgcttgttgttgttgtcactggctaaatcttattttataactggttttttttacaggatgtttacttgaagatgaaaccggagcaccggttcgcaagtaagctccaaatttggaataacccatgggttattgaggagatcaattcaaatcttactccttctcaaaaggcgttatttctgacgacgcctttttcacaatttttgaagatggccattgttaagtggcacattgccctgcctcaccttgctttagtgagggaggttcaccaggagagggaggatgtagagaagtggttcttaatccgggatagagttgtcgtttcggtttggaggagtttgtattgataatggggttaagttcagaagggtcatttgacttgaacgattttaaacagaagatgtcgttcaagaagaagatgtttcctggtttggctattaaagtcctttaagaacaagttagagcaaggtttttggcgggagaatttgatgatgatgttgacgctgtgaaaatggcgattgtttatttgttgaatcactatttatatgggtatgagaacagtaagagagtcgacaatgagttatttggttttgtcgatggcgatttgtc

SEQ ID NO: 396626 - DNA, 730 bp, Cannabis indica
aactgtagtgaagtaggttctgctattaattatactgcagtcggatgagtagaatatgtatgtcagataagtttgaatattttaaatattcatccgcagtgaagtagattctgcgaatacatgtactgcaattggatgagtggataacttttgtattaatgttattttgtttgttttgtttcttatttttggcatgcttaaaatttttgagaaagttcgattacagccattatgctgctgaaatttcagtagaattgagataaattttcgtgtttagaatgcataaatttcactaaatttatatatgtgtgataattaatttaactaagtaattaccacccatattcaaacaaataattgaatataattttgttttttagaagttttaaaattgatagaatttgatgagtgcaaataaattatcagcggagtataatcaagatgttaattattttttggacttttgtcagaagtatgcaaaaagtcttaaattggttctttgtccttgtcttaaatatggtaacatggagcgtatgaatattactaagataaaggagtatttttttaggaacggaacaaacaagaattataaggtttgggttcaccacgggaaaatattagagtttcgggcgagggaacatctaagtctaaaaaggttaagtgtgttaatttgaactatgaggatgattaaaatctaaaaatattaggagatgaacaatttgaatcaaat

SEQ ID NO: 396627 - DNA, 827 bp, Cannabis indica
aaaaaataaaaaaataaatgcatgtatacaacaaaaaatattgtttggaataaactaaaaatatatatcataaaaaatacacataaactaaacaacaattgtacaataaaaaaacatgtaaaaataatagaataataactatacaacacctaaacaacaacataaaattatcacaagttatattttggcgcttaggtcggcacatgaattaacttgtaatattttgtgaaaaattttgtgggatcccgaaacatgttgtcttttggtttgtttgtaaagtttaaaaattattacaagttatattttcattcctttgcaaataaagtttaaatttccggttcttatctttctagtaattccgatttagcgggtttagggttttaatattggttgtcgtagcgtacctaattgttagggcgtatagatccctgaatctccaccttgaaacactatcaagggtatgaataaaaattgtatatggaattttgaaaaaaaattattttgatcaaaatagtaattatttatttttcaaatttattaattaaataaattgggaaaaaaattaaatttgtctggacaaaaaacatcaccattgttttaattaagacatgcgcggtgccacctacactatgtcctgacatagtgacaggtgtcctactggatttttttggattaattaattaattaattcgaaagataaatatttatttaaatttgaatttaaaaagtagttataatatttctattggttgagatattctctcaagatagcagaagattctctcaagtaattgagaaattccctcaatcggttataggaaataaat

SEQ ID NO: 396628 - DNA, 658 bp, Cannabis indica
agcacatgacttgttgtccatgttttggactgtacatagagtccgaccaggttaatcctggccacccaagtcctataggacttggcaggtcactatagctgtaccaagaggaggccagccttttgcaagttgaggatagctttgtacaccatttccttgtagagaccaggttcccttggttgaacggaagcttccttggtcgaaaagtcacttcttgtccgtccagcttgtgcacagatcttgtctggcctataggctcaccctgaccaaattgcaggcttctcttggctggccaaggatgtttgcacaactccttgagggctcacttcactccatttggtcattgcttgacagtttttttgctatatcttgcatggagaccctgttcttctactagtaaggttgtgtgttggggattaatgtaccaagatgtagatttataaccatgtatgttgtttaacatcttaaatatgaatcttctaaaataatagaatttaaaacacatataaagttaagaaaccttacattgattgctgtagaataatatgtctctttccactcaaatctcttacccttgttcctttctgtcgcagagtattatcaagatctgagcccgattctccttcaggtgttagattcttcacagtcttacacacta

SEQ ID NO: 396629 - DNA, 1137 bp, Cannabis indica
ctcattcagtacaaagattataactattgtgaaaaaaccgcgagaagcgcagattagtgactctcacaatccgcacaatctaatgcaatatatataaatacgaatcaaaaattaatgtataaataaaataaaataataaaagtgctattcatggtaatgtttttaatttcaatgttattactttgtttataatacacacatctaaatgttatattttagattatataactcaataagtataatatatatttatataatttacaaaagttgggcaacaccgcccgaagcgcggcttagttccctagtaataatatataacatatatacataggcagacctatgaagggcgggagcaattaaccccttaattttttgtgtatgtacacttatggcacattatatttttgaattaaaataatttaggtatttcaatactgtaagaaatttagctctgatacataagaattaacttctataatttcattttcaagatcacacttaaacaaacaaatgttaaatcaaaataaacaaatcaggaacaaaaaccagcaaacacattataccagaaaaataacacaggtgaatctagatagctttcagacacaagaacaacgagatttatactggtttcgatcctaagttcaatgtgaacttgctcatactctagtttgaaagcattgccacctgttgaccttaaaaagtaatcaactgatggcggggtcgtatggatctgatgcttgccacctgttttcacaaataagaacgaaaagtagtaaacaacacaaatttgttatagagattcgacccccttgtgatagcgggtaatgacctactcccgtcttagttgtattaataccgagggaaatactatccagatcactatagatgggatcttttatagaacccttaggattacaaggtataaatcaataatggcaaaactcaagtgttgagatgatgctagtgtaggcgtgtgagagagatgaagagaagagaagcccttgggggcatgtagcagagagacagaaagagaggctaggggttctaacttagaatgatttggaggcttagtgacttaggtttctatgctagggttaaggcctttatataggaggcctaaaccctagattacaattt

SEQ ID NO: 396630 - DNA, 1115 bp, Cannabis indica
agagagaagagagattagggttttagacatagagtgatttggaggctaggattagatatgtcttctaggttagagttaaggcctttatataggagagcctaaaccctaatttacaattgaaacccttagatattgacatattaaattgattaaatacaaaagactaaattttcccttaaaagtagatattttccatcaagtttgttgggttgttaaggctccaatttacaggtagcattgagcccacgtatcaggttgtgtagagaatcctgccaggtcaatcctggctagccatacacctataggggaggtttggccggccatgcaaggactgtaggttgaggtctggctggccatgctcctgctaagacctggtaggtcatgtgcctactaggatcctataattcatgttctatcaactttaccaagaggaggctagcctttggatgtggaggccactctttggcaagtggaggacaactttgtacattgtttccttgtagaggtcaggctcccttggtctgaaagtcgccttttggccggccagattgtgccccgatcttggtcggccatattgttaggattttatgccctaaatgaaacctatttcaatataatcttatttgttatcaataaatgattagaagttatttatgtttacatgtatttttcatgcttatggtttaatatacaatttctattaaaccaagttattcacaattatactgatgtcaacatagtggaaggtaattgtgattatatgcttcaaaagtttatgtcccatgattcattagtgcactggatttaccctaatgtgatagtcaacgataaagtttacttacaccttagattagtgttatgtcctttccaggacattggtaaagtatgctagaatagaatgtatggagtatacattggactggactgatattgaactagtaaagatattataaacttactgttgtatctttctaagtcaatattacttggttggtcttattagatcaaaagatctttaccctaatatggttaggttcgatctcaaaagtgttatttatgtacttagagttgttcgtatagatggaaatttataccgcgggatgggtaaccgcggg

SEQ ID NO: 396631 - DNA, 568 bp, Cannabis indica
aacaaatgggtatatcgaatcaaacttaatgtagatggctccattgaaagactcaaagcaagattagtggccaaaggtttccaacaaactcctggaattgatttctttgaaacctatagccctatgattaaaccttgcactatcagaattatgttcactcttgcagtcactaatggatgggaaattcaacaaattgacatcaacaatgcctttttaaatggccaactacaagaggatgtttatatggctcaaccacaaggttttattgatcccaattttcccactcatgtgtgcaaactcaacaaagcaatatatggtctcaaacaggctcctagagcctggtttgacaccctcaaaaacactttgattcaatggggttacaccagcagcaaatctgacaacagccactttttctcactcaaaaatggcacactgctgcttatcttggtatacgtcgatgatatcctaataacaggtgctaactgttgggttttgtgccctaaataaaatccatttcaatataatcagatttacttattaataaagatcagaaataacattttatgtt

SEQ ID NO: 396632 - DNA, 848 bp, Cannabis indica
cggtattaaaaagagagattatgattgagtctcatacaacttcttactcagttcatccgaggtcaacgaagatgtatcaagacctcaaggccatgttttggtggccaagcatgaagaatgacatccctgagtttgttgctaagtgtcttacctgtcagcaagtgaaggctgaacatcagaggcatgcagggttgctgcagctattgaatatttcagagtggaaatgggaagacattgctatggacttcgtggtgggattaccacaagacagtacaactctgtgtgggtcatagtggacaggtttacaaagtcagcgcacttcttacttgcccgaacgaacttctccattgatcaatatgctgagttatatgttagagaaattgtttgtcttcatggtgtcccaaagtccattgtttcggatagagatccgaaattcacatcaagattctcggagagtctgcatcgagctatgggaactcagttaaagtttagcacagcatttcatcctcagatggatggacaatccgagaggactattcagatcttagaagacatgctacgtgcatgtgtgcttgactttgcaggatcatgggtaaagtaccttccgctgatcgagttctcgtacaacaacagctatcaggaaacaatcgggagggccccttacgagcttttatatggaagaaaatgtagatcacctattcactgggatgaggtaggtgaaagaaagttcttgggtcccgaggctgttcagagaacaagtgaggcagttaataaaattagagcgcgaatgctcgcggctcaaagcagacagagagtatgctgatccgaaaacgtcggaatattgattt

SEQ ID NO: 396633 - DNA, 886 bp, Cannabis indica
cctacttgacacttggtgttagttgtgttgagattgttctcacattatatatatgtactgctatttatattgtgttttgtaatcttcttttatatacttatgtgtatattttgtctagagttgtaatattattctatcaatattattgctcttgtatttttcattttgagttgtattttgacattggtctttctattgaagaacctataaatttccaacaatcaaaagcttatccttcctacctagcttcaatggaaggtgagaccatcaaaatgatgaatcaagacctagtgaggttggataggtttgatggatccaactttactaggtggcaagataaagtgaggtttctcttgaccacactcaagataacatatttgagtctactttggagcctctacccgctcaatccgagaaagacactcccgagatggtggagaagagaaggaagagagaggaggacaatctcctatgtagaggtcaaattctaaatgccttgtctgataggctatatgatctctacactaatactaattccgcgaaggagatttggaatgcttcggaagcaaaatacaaggcaggcgaagaaggtacaagaaaatttttaatttcacaatattttgaatttccttttagtgatgctaaagatcctcttcctcaaatctatgagttacaaatcattgtgaacaagttaaaggttctcaagattgagcttcccgagacatttcaagttggtgcaattgtggcaaagttgccaccaacttggacgggctataggaaaagaatcctccataaaatgaggattattcattggaagcactacaacaaaagttagtattaggggcgataattttaggggcgacaaataattgcctctaataactca

SEQ ID NO: 396634 - DNA, 600 bp, Cannabis indica
aatcatagttgagacattaaatattaattagatgttttcacctttctatctgaaaaagctagttctaattcttaccatacacattcaaaacaaataatcaattgaattataacgggaaaaaaattaaaaaaagttgtttaaattgtccaagaatagacctaatttccgaggacccagacctccaacttcaaatgaagtaaaccaaaacaaatttgtgctaagtgggttctcgaagataaacactctcaattacctaacttcttaaaaaaattggtaatgggtttataaattgcaccagaaattaagagaatatgatacatttacatatatctatactacaaaaaactaaagaaaacacttaactttgacactaattcataaattagcaagttcattccaacatacaatttaatatctaaaaaacacaaaaacatatatttacaatcaaatatgtatcctgatttttcaactcatcaaattaactattattggttacatcttttcaccaggttaatcagacaaaaatgaactaattaagtcactggtttttgggtttaactatgaaaaatgaaaaataagagaaagttaaaagacctgagt

SEQ ID NO: 396635 - DNA, 930 bp, Cannabis indica
gtactgatcagggaagagaacaacatccaacgcctggtctactacatcaacgaaacactcattaaagctaaaggtcagtaaccattgatagaaaagctcacctattgccttctcctagcaacaaggaagctatggccctactttcaagctcatcttgtttgggtatacactgaccaaccattacatcaagtattgtaaaaacttgatgcctctggatggttcctcaaaagggtagtagagttgggcccgtatgaaattatctttcagccctgaacaacgattaagggtcaggcatttcagaaagtaacccagagccagtacaagtacctcagccgagcaatagtaaagacaagccaacctagaagctacatgtagacgggtcaactacggatcaactgtctggcacaggaattgctcttgtcaaacttggggggtaacacctgcacgctgcggtcaaatttggatttaaggtatccaataatgaggctaaataagctcttattgctggcctaagacttgctcgggagatgaaattcgaacacatggagatctgcagtgactcatagttagtggtaaatcatgtatctgacgagtacaaggctcagggggagaagatgatagcatatctaagaaaaatacacgacctgcttgaacaattcaaaaactatgctctcaagcagattccaagagaagaaaacacaactgctgatgcagtagcccgacttgcaagcaacatcataaatgataaagcaaatctgattcccatctaatttcttgaaaaacccagtatcatcagcacagaggagattgaaatgattgatagatccccaaactggaggacgccaatagcagcctacctcaacacttgggaacaaccatataacagaaacgaagctcaaaaatgaggagaaaggctgcgcggtacatcat

SEQ ID NO: 396636 - DNA, 1176 bp, Cannabis indica
aaaaaaaatgtctaaatttgcaaatttgatttcaaactttcattattaggtttaaataattttttcaattttaataaataatatataaaaactgttaatcactaataatacacatatcagtatatgatgttcagacactttaaaaaatatagcaatactccattcaaaaattatacttacctaattaattttagtatatattttttcaatattcaaatatataattaaaaattattaataacccttaccgacaaataaaaaaattgcaagggacaagaatttaaacctgaggtttttttttttttgacacaatttgaacctgaatttaaacaaccttaaatttgatgataacaacgaccaaatattagacattaattaaacatttgaaagatacaaacaaaagaacatcatacaacaatttggaattcaactcacttgaacaaaaatatggtatcgtttacaataattagaaaaaatacctaacaccttttcaaaaagaaaatatatacctaacattttcaattaatgggtgatcaaaattaatgaattaacatgcaatatttgagagattttagtctattttaaaggatacgcgtagttcatttaatccaattcatatataatattaatcatagggtatctgatattaagtctaaattttattttagatttaatttaattcgtacaataactcaaatattatctaattaaatctgtaaagtgtgaattgaatattattttgaattgattacttttttaatattaaattattgaatatttatgaaaaatatttttatacataactagcaataaaataaaacaaattattattattttatgtttttaacaacaaattaaaataaatcaaataataaattcaaaggaaaaaaaatttaatgtgtaagtaaatgtttaattttattttaaattgtatgtaagaaaaattatatataaaaatggaataaacatttgatgtatattaaattttgaaatatatttgtattatatgtattaggtttttaaattaatattttccttaaattaaaatattaattatatatataattttaatttttttattataaatatatataattaaattgaatcagttattttatatatataatcaatatttaatcgcatgtacagtaaaaattttgtattttttaattctaa

SEQ ID NO: 396637 - DNA, 846 bp, Cannabis indica
ggctaggtctatcaggccgtcctttcatttgattgtatatggtgaatgatctacacaaaaagtaaagttagcgtagataaatttataaatattaaacactcttacatattgggatgttggatatagaacttgcgtgaaaatagtaaagtttaaatcttacatcgccattgtctgaatccaagtacgccactgtctgcgtacttggttggatgatccagtgaaatatttttctacacgaacaaatatatgtaaaactgttaatatataataatactgaaattattcattttaaatctacatataccgattgttgtagtggaaaataactcatttatctagatttgtcatccgacccagtcatatgagtgactagtgcttgacaacagttacttacttctgtggcaattgcacatggattttaaaaattcatataagtttgttaagcccattgatgtctaataatctttctttcaagtgcctcataaaaagtcataattaataatcgtcattgtcaaaagaacattatcaagtttattattaagagttggaaatcatacttgcactaagctcctatcggttgggctcccaagtattgcatggtgcacaattcatgaatgtcatttttaacaacctaaatagagtcatccttgaccccaaatagatcataagaaacctagaattagattatggacgacttcggccaccttttgacggagttccagaaggtataattgagctaatttgtcgtggttgaatataacaagcatgccttattggcttactcgacctctaagggtattttggaggatgtattgaaggaccgagtaaatcttcaaaggtttgttt

SEQ ID NO: 396638 - DNA, 1002 bp, Cannabis indica
cactttccctccgagcctctccattttggatctctgctgctcggcctctgacttatacttctcaacctcagctctaagctcctcctccttggtcttcttctcttcttccaacctatggaaaacagcccggagaacctccatttcttcttgaaggctggtcacttccttagataaggaggcaatggcggcttcaagctgatcggtggcttgtagatctttggtcagtttggccaccttcttctcagcagcaagaagcttcttattgacctctcccagctccatccgaacaaccccaagttgaacccttgcttcatcgacgtccttcctggccaagtccacttctgcccgtctagtgttggaaatggcagcattcttagaggcaaccgacttagctcgagaataagcataagccatctttagaccggtttgtacagagaaagaatattaaaatctaaactaagtgaagaaggacaaaaagaaactatcagaaagggcttacctttgaaagctccttcagaactcctcccatcaccagctctagagaaaggtcattgtctgccccagccagcaactcgttcacctcaggaactgaccgagtcacatagtgagtgagcatttctctgcctcttttggtctctagatgtagtaccggaggtggggcaggggccttgatctactcgaatttgcttctaaccaactcggatccgcccctcgcctgctctggcgtgtttgagcttcctcctcgagaatccttggacttagtcatttttgggacaggagggtctacaatagtttattcctgggagagcttaataaccacttcagctggtgcgttctctctagacggggttgtctcaccgcccttggacttcttagccggaggagataagcacgagcttcctcccactctcttcttcagagcctcacgcattttctgagacttgtctgcatgaaatgaaagtaacatagttaaaaaaaaagcatgagaaatatgaaaggcat

SEQ ID NO: 396639 - DNA, 734 bp, Cannabis indica
ccaaggccagacgcgagctccggaaggctaaggaagccttaggtgaaatggccgccaaggtgaggtccttagaggaagcgcaccacgcgaacttggagtccagggcaaacttggtcgtggagctgaaggagctcaaggactttaaagaccaagctttgaagaaggctaagaaagatgagctcctttctcccgtctcttgtagccgatgcattaagcgcttcgacgatggcgtttacgtggcctggtcaacaaaaagtcagaatatcaagcttgacttctacccgaaacccgcggagatgatttctaaattccgggagaagaagaagaaacttgacgccatgctggaggcgcgcattggtcctcgccttcctcctcgaattgactaggccgttatgaattaaacccagatttttcttattctttttttttattttacagctaattctctttcatttaagacaatctttatttacagctattttattttgtcaggggaaacaatggttaaggcctatccccgggccctttgtatatatttataattatttttgacatgccgttagggctaggatttttatatatatatatatatgatcttttttgatgtacatatctttcttttggacctgccctttggttcaggatgttttacttttggcctgtcttttgtctgtccgtgtggtatgccctagtacccccctgagtggcatagaaactttgtttttaaggcactc

SEQ ID NO: 396640 - DNA, 1480 bp, Cannabis indica
ggtatactccccaatatacccagcacacagagttaacggactctcaagaacgtgtgattttgtgactaggcagataccactaccggagaccgcctcccctttacaaagatagctcccgaagagaccccactaagagatgcgagtaccataacgacattgggcacagcaccaatgaatgcaaaaatctcaaagacgagattgaaaacttgatccggttgggacacctctacgagtggatcaagaatcggttgcctcacctcaacccaggtcaggcggctggagctttgccacaaggagcaccagggggtgcagcaggagtattggctccagttgttccccccggagatgcccagcatattcccggcctgccacctagacccaacgggagagtggctatgatctcaggaggaccccacatcggagaaactacccgcaaagagctgaaacggtacgcaggggccgtgaaacacgatgaggtttgggaagttactcaactcccggctcaaaggccccggctaatggatcaacccattacattcacggaagaagacgctaaaacggtgccttttcctcaccatgacccgttggtcatagagacccccattgccaataagatcgtggccagagtcctgatcgacaatgggagttccgtgaatctgctgctcaaagaggccttcactgcaataggcctaacggaccgagacctttcaccaagtggatcccaactcacagggttcaacggaacaacacttatcccaatgggtaaagtgaggcttcccgtcactttgtgcccggacacaccccaaagcactttcaagtactgcacgtttatggtggtggactgcgctacagcttataacgcaatcctcggccgactggccttggtggactttgttgcagtcacgtcaatacggcacttgtgccagaaattcccgacccaggaagctgggatagggactgtgagggggaatcaaggggaggccaggcagtgctataacgttgttgcccacctacccgtgctgatggttcgagaaattattgagccagaattggctgaagaagatgagttggatccccgtgtgggatccgaaaaaattatagaaccaatgaaggacgtcgaggatgtgtcagtgtgcgaccacgactccaccaaagtcctccggctagggaagagcctagaaccggaggaaagagaaaaaataataaagatactgaggggtgccattgacgttttcgcgtggtgccaagaggacatgagtggcataagtccccacgtcatcacccatgtcctcaatgtgaacccggacatgccaccgctccagcagaaacgacctcccctcgactcagtgaaggttgaagccttagagaaagaggtggacaaactattaacgagtggcatgattcgagatgtctactacccggaatggctagccaatccggtccttgtgccaaagcctaacgggacctggcgagtttgtat

SEQ ID NO: 396641 - DNA, 612 bp, Cannabis indica
gctattagaaggtcatacaatttctccaccgtcagatcaggatcaggatcatcaccttcatatcatcatagtcagagcttttttgaattggagaaaatgtcgaagcgtcctggtgggggtcggcctctgggtcatgattctataggggataagatccagaggtatagaggaattttgttgctcatttctatgcctttgcttctcgttacatttattatttacgtgatgcctaagcattgtaaatactccatttctaatcgcaaggttttgccaacatcacttagatcctaggcttcttatgccgttattttttatgctggtagctcaggtagtcgcattcacgtatttaattttgatggaaaccttgatctggtccccattggtggcaatcttgagcttttcttacatgtatttctttgttagtattattattgttgtttggaaatcggaatttatgtttttaagaaattcatatagtaaatttctcaaatgtagattaatccaagactatgtgcatattctgattgttgacctcacttttagccaacgacaatgggtcttaattgtaagtgataagtgatataatttagatgtaatatggtaagataaata

SEQ ID NO: 396642 - DNA, 1053 bp, Cannabis indica
aagaactagaaaattaggtccgacatgggaaggaacttacaagatctcaaggatagtcggacaaggagcctacaaactctaagcatcagatggacgtgatagaagcaacagttgcaacgctgttcacctaagacagtatcatttctaaactttcaaatttattttcaatttaagctttaatttttatcatattcttttcaccttactgacttaagcatcagagggtcgacggtaaagtcgtcgaccacaccccctgagattttaggatccaactacaaacgttacgagaccttggtaattgactgtcaggtaaaaaagtttcaatcaattgaattttacaataagatcccaatactaacttaagcatcgacaatgatccagatacgacaaaaatccaagcatcgacatagtaccatgcccatacttggattggggaataagatatgagcatttgaacaatatgaaggagtaatcgcacaacaatctgaggttagacaacttttataatattaacatttagcacttatttagtacaatataatctttatttttcaaatgcgttattttgtaagttcttcatatatagtcaaatggtacaccctaaaataactttaggtgcgtaatcaatatctattacaccttcaagaatcctcattttttccaaagtttaaccctttcaagtctaagacggataagaagtcctagagtggcactctctgctacgtgacatctctaggacggatctttaaatactatgaaggatgattgaattccattacgaatggagagtcctagagtggcaccctttgctatgtgacatctctaggacgaatacttaaatcctatgaaagatgctcgaattcttttacggatggaatgtcctagagtggcactactttgctacgtgacaatacttaagccatatcaaggatgaattgaattccattacagatggagagtcctgaagtggcactctttgctacgtgacatctctaggacggatacttaaatcatatcaaggatgcttgaattccattacaaatggagaggtcc

SEQ ID NO: 396643 - DNA, 502 bp, Cannabis indica
ttacatcaagtagggacaaatttgtcgttctcctcctcaatgtattttatccttaaaatacttagcttcctataaatgatatttcagtaaactaatataattactgaaataagagttcttctgtttatctctattaagccaagtgattaaggctcaaagttgtatattttaagcctttaattgtggatataaaattaattatattaattattttcatggttttcattgtaaaattattttgattggaaatatctaatttaatctaattatttgtgttatttttaagatttaaatggagtctcaagcccaatttaaaagtttaagaagcccaacaaaactattttacataagtgttgtcaatctcatcaaaagagtccaaaaccattcatttattttgtcatggcctgttactacacaataggaagggatatgttgagaaatacctcttttttatatctattaatcaaaaataccctcacactatattttattaaaatatacc

SEQ ID NO: 396644 - DNA, 789 bp, Cannabis indica
aaaaataaaaataaaaagtagtatatgaagtaatttcacagatatctatatagtaactaacagagcaacttaaatcacaaccaattattattaagattttttttttttacactttaaaatagttttttttttaatttttttttacagaatttcacagatatctatataacaactaacagagcaacttaaatcacaaccaaaatccgtataacaactcacatataaatcaccggagcagcttaatgatttttaattttacggtttgagttacttcaatgatttttatgtgggttattatatgaattttagttgctatttaagttgttatgttagttgatatatagtttgctactttgctatgtggatttatataaaaatgtaaaaaaaaaacagtttaaaagtataaaaaaagaaaattcttaattattattattataattattattacacctcaaaattttcataatatttttattgtgaaatgattaaaataaatatttttaaaattaatttattttataatatatatatattttttgaaaaaacaactctaaaactcttaccaaaaaaataaagaaatttacataaattattatttttagttaaaaatttactaatttatgtttaaagattttttaatatatattttttacagtatttataaaaataacacaaaaacaataaaaaactacataaaaataacagaaaaacatctaaacaacataaaaaaaataatatacaaataacaaaataacaagagtacaacataaaaatacattacaaaccaaa

SEQ ID NO: 396645 - DNA, 518 bp, Cannabis indica
atgtcgctggccattgcattatccccacaagaattgtgactccatctttggtttgaatagatgagccgagattagtaagagtgtcggcgtggttgttctctagtcttgacacttggttaatggtgaattttgtgaatcttgaaatcttgtcttgaacaatctggaggtaggatgccatttttgaatctttggcctggtatgacccgttgagttggtttacggtaagttgagaatctgacatgacttcaatggttttggcattcaactcaatggataggtctagcccatcgattaacgcctcgtattcagcctcattgttggtaagtttgaagtcacatttgattgcccgttggataacatctccttaaggggaggtaaggacgattcctaggccattccccttgctattgcttgatccatctaccgctagcatccatgtcgagtttgtttgctcatttaagcataataattccttttctacttgtacctgtccaacacaagaaaagtcagcaataaaa

SEQ ID NO: 396646 - DNA, 553 bp, Cannabis indica
acaaaagttgtggcaacgacaatatttcagttaaaggcaatacataaaactagttcctatttgttttagtttagatgactctcttatcatttattgagtctagtctatgagtacaagacctaataaatgaagtaatcttggtaggacagacaatatagtactgaaaaattcaaaagattttttttttcttttttcctttttatctaatttttgcatctgttcactttacattgtttcttcttcttacaatatttttgtgtgattacttcattacagtgcgacgactaggctgttttatcctggggacgaccggcaaattctgactgcttgcacactcctaggcagtgccgcgaacatcttaaagagagcgacttagtccgcgactcaaccccgaatttttcattcgataatatcgttcctcttttatttttctagcagtttactcaacaattttaagacattctttctgctatgactactaccaatgaatgttttggttctactgttgacattaacaagcattttcgttttgagggtttgcactttaaacgtt

SEQ ID NO: 396647 - DNA, 915 bp, Cannabis indica
ccagatggaggaggatcgtgaagtggacgctgaggtttaggagatcaaggagctggatgatgtacgtcctggaaatccctccgaggcagaggaagaggcagaggtcgaaccccaagttacggggagtacaacgagggtggggagccagtctatgctgacggagacgtcctggttgagggcgtggtctacgtcagtgaggagctcgttacggcagttcctcatagaaggcagggtgccttgggcgccagataggtaagtcgtccgtccaagattacggaggcgcaccttcgagctcttgaccagggcagatacttgggcgagctgcactactacattctagccaacaataatcgtgccacaaaccctgacaagggaatgtgcgtctggtagggtgcccatggccagcaaggagcgttgatgcccttgcataatacttcaaggatgtgcggacttctttggcctctgctcgacccagttcactcttaagggcatcaagtatctgtctgccctcttcgtcctctatgcctcccagaaatggggtatgccctctccccacgaggttgcttggtacttagatttgaagtccacccctaagcaaggcaggtcggggtacttctacttctctcaaccaggcttcaagtggttgacaggcacgaacgataaggccatcagcaagattgggcgctttgctgatgagtacttcaaggtggatggcacgggcatcactcgtactcagttccagttgattccgacctatcaccgccctcccctcactcttgctcttagggatagagctcaaaaacttgcccgactaccgggagaagactggaatattatccagacctctgacgataactttgtgaggtatcggctctatcccaaggacttcactcctaagtccgtgacggggaagaa

SEQ ID NO: 396648 - DNA, 597 bp, Cannabis indica
ggggtgactttaaaagtgtctatttaatgctaaggggcctcaaaatattttttatgacctcgggattacaacctaacaagaagaaaactgcaatttattgtagtggcatgcatgagagtgagacaagaaggctggtagatgcttcaggtttttagaaaagtaagctacctttcaagtatcttggagtgcctatatgtgccaagagaatttcattagttgaatgctctattctagttgagaaaatgactgcaagaatcaaagtgtggagctcaaagaacctctcttttgctggtagaactgtgttaattaactcagtccttctttccattcatatgtactggagccaagttcttatcattcccaagaaggtaattaaagagattgagagtatttgtagaagctttctttggtcagggagaagtgctatgaatggtccatgcaatatagcttgggagcacttgtgcaagtccaaaaaagctggtgggatcagcttccaagacattgctaaatggaatcaagcttcaattgcaacacatgtgtgggcgtcccagaaaataaataatatttaaatggacatattttattaatatgtaatta

SEQ ID NO: 396649 - DNA, 578 bp, Cannabis indica
aaacataataaagcaaataaaagcatcacatacagaattttaatagagagacaaataaataaaaataagtagttgttaattaatttcttaccgcatcctgtcaatgatacctccttcaattctttctaattgaagcattccagtcttgtcttcgtaaaacctcaagtccttataagagaagaagtgggcatgtgaatctagacaaaggacttctaattctcccgcgtaaaagtaaaacttcagaccataatattctatatcattataggatacttccacatacgaaccagctttgatttcatcacatagctgaaaaccccatattcttctgtcactatatacaattttcactttgatactaattttagaacaatcattataaattcttatagtctctcctatcatcttcatcatcttcgatgaaggaataattttatatcttccatcaacatatctgatttcatcctctctcatcttcactgaaggaattgttattgaaagagaagaagatcgatggtagactctgtcagacgtgcaggtgcaatttaggagaaaattaatgaattaattaatttttt

SEQ ID NO: 396650 - DNA, 554 bp, Cannabis indica
gtgtgttagattagcccaactcatatattattctttgttttttaaaatatggattgtatcgtgctatatgtttagatttgtgttgcactcaatttcgagttgtgcttatgcaggctctcattttttaatacaattcgtactctatttttctacattttaattttaaagttaataagataatttctaaattatgtatgttttttttttttttatgattttcagttatatttatgtaatttttcaaaaattttagaaaatattattgttaatgcaaattttcgttaactatattaaaacttaaatcgtgatggatttgcacagagaaaaaaagaaaagaaaagaaaaaataaagaacacaaagctttattacgtggttttgcagttaaaattatgcatagtccacgattctatcttattagatatctctgatacaattctagggttttttctcttaaagtattttttcgcccctttttcagtgtatcttgctcctatttataattatataggagggctagttaattacaaatcagactgatatcctacaacaataa

SEQ ID NO: 396651 - DNA, 522 bp, Cannabis indica
tcctttaggagttgtttgcaacttgatttaatgatttgagagtttgggtgtttattgtcttgatttgttggtgtttaaggtctgaaattcgtgttgcaatgctgttggtttctgggtttgaaacccaggtgccacgtcatgggttgagcatgccgcgactcgcccctgtcggtggaacctgagattttgcctcaggtgccgcggcatggcttgggcatgccgcgacccgcgttcgattttctgggcagttttgggttccaactttgaaaatgcattatttttattccgaactctgatttgggagttatttatatcgttggaaagctcgttccgaggtccatgtgattatctgagttttaaatgccatgaaattattttatgagtttgaaatcaggggttaacccttgttgtgaaaatcccggatttgtgtgactaggattaccagcacttaatccggagcacccggggattcagaatctctgccattgcaggacaacaggtaagacagtggttagcacgtag

SEQ ID NO: 396652 - DNA, 692 bp, Cannabis indica
atatatatatatatattgtctatgaaagtaatcttgatattccatattttatgagtgataaaaaattctaacaagtagtataagagccgccttttatttgtaaaggaaactgactcatgtgggtaatcgagcttccaagctctctctactctctttagatgaatttattgtgttttcatagaatgagtagtgagctcggggatcgagaccctatatttatataggtgagaccttccatcaaagtttctgccacaattaattgtgagaatattttgacaattaattttaaaaattaaatcggataactgaaatatttggtagttaaatctgactataattagaattttaattcattatattttatagagcaaatcaaataaattattttatttattaccatataaaaattattctaatattctcccacttggtcagtatttaaattaatttaccacttaaaattcaacgctcctcattatataataaacatatgaattatagcgatatgtcctaattatatgtcgactattatcttccatgtattacgatatatatatttattatataacaatatacttaatgtggtaatgtacttaagcaaacaaaccctaaaccttatgtttattctggtcctcttatgataatattctcagataaaattaaggtgcacataaatatgagaaaatatcgaa

SEQ ID NO: 396653 - DNA, 601 bp, Cannabis indica
gacaaacataataaattagaatgacatgtattaaggagttaagtatagcacatttttttgttatagcaaataaaaaaaaaacaataatattacataaatactgtgagccaactaaataaatatttatacagctcaataaaaaaaattactgaaatatttcttacgtacaccttcaagaccgcatcatcaatgcttaagagaaacgaatttttcgtacgacacaagggggtcaacaacgataaatcaacttcggcggatgaggaaacaccatcaattctagtgatgtcagttgagaaggagaacaaaatcaaaccgaaaatgaaccattaacgactgatgaaaaatctgtaggaaaactggtttgaaaaataaattgaaccttgaattatgattcaaattccattaaactaatactcctaaatttaatttatagattcatataaaatttagatctgtaggaaatagatcttgagttctcgatcaatccaaattaggtataatctgaaaaatatgtatcactactgtagctaaaattatagatgttaacacaacaaaaatcattgtaagagcttttgagaaagaaaaaatcattcttgctcac

SEQ ID NO: 396654 - DNA, 1007 bp, Cannabis indica
atactttattattaattcatatatatctttccaagaatgaatctcaaaacttgctaatagtttagtgtggtttggcaaatttaaccactaaaagaaattaaaatgggattagttatattttaaagtattagaatgttatttttttaaaaaaaaaaattctattattttagtagaatgactattttaatttaaagtggaaacaattgccattttaaattttgaatatgagaaaaaatttaataattttttcatcaatttttttatatattttaaatttcattcctattctattcttatttccattttcacctatttttatatttttattctttccaaccaaacaccacctaaaaatttagacaacaattactctaaattatattcaatatattttaaaaattaataggatatcgggtataactataatgtaccatcatataaaaaaaatattagtgggatgtgaattaagaacataaacacaaataaaatcaactgaaaaaaagtggcatacacatgtctatatttttcatttggaaagccacattgtaattggatttgtgtgtaattggaggtaattacacagtttggcatgtttgtctgaccatgtaattacactgtaactgtgtaatttgaagtaattgaggggttccaattacactctccaattctcatggcccccatgagaattgaatgtaattacactgtgtaattactaaaaattttccatattaaacattaactactaaaaatattattttcccatgtaattactaactattttgtcgaacaagatattaagaattcatatacaattaccaccttatatccaaacacaccttgcattttaaaatatagtgtaattactacactgtgtaattaccaccctggcaattaccctacttagtaattacacagttacttccaaacgcacttgttgaccgaagttttcggcaaccaataaaagaataatagtttagagagctataagaaattaagagagagatttt

SEQ ID NO: 396655 - DNA, 821 bp, Cannabis indica
ttaatgtgtagctaaatttttaaaatattttagtactacactaaaatactagaattattattttaattataattaaactatttatataagggctccaaaacttaaatttatttaagaccccttatacctttaggccatgctcttatgtttattgaatgggcttctttcagttttaaccaaaaaaagtaacaatattacaaaaatacttccagcttgccaaataaacgaatatacaaccccaaataaaaaaaatacacaaataccacttacaaacaccttcaacccaagatccatgcttcctgagtgtggcgtgctgtcccatggcacacccacaatggggccattttgtaacatgagcatgccttggtgcttgatcattagtcaagtcttgcaccaagcacctcattggggtggggagacttttgttgattagctttctttcttttgtatttcctttcagatatgtataaagagctataatcatatatgttcctagaaatcccttgaaaccacattaagctctttaggggggtgacctagtgacttatgaagcaccttgtcaccagcatgataggggccagctgcgtactcccttgccatatcaaggccatataataataaaatgatgtttatccatgcttcttgtgtatgcttctatgttgcctttgtgatgcttgtttgttgtctttgttgggccattgtgtaccatttgtatatatgtttacttgtgggttgtgtgagattgtgttgggttttgtgccctaaataaaaccttttacaatctgattagttatcaatataagaaatttgaagtgatttat

SEQ ID NO: 396656 - DNA, 860 bp, Cannabis indica
aaaaaaatttcttaatctgaaaacaaaaagtatatcatattattaattactgaaattaattaaaaaaatctacaaataaccacaatacaatatacatcactgttacaatatatataaattatatacacattaatatatactatatattttatatacacatatatataaataaataaaatataaatcttatatatatatatttagaatttctacacattaataatagacatatatatataaataaaatatatatatgtgtacagattaatacatacaatatatatactacacaatatgttatatacaatatatatataatatacagtttttatattttataaaataatgcaatacaatatatatataataattatatacacaaattatgtatatacacaaatatatataaacagatttttatatataaatatacccaattttatatacaaatatatatatacacagacttttatatataaaaacctacatttataaactcaaaaattatttaaaacctaaaatatataacattcgaaatttaaatacacattatatataccaatctaaaacctaaaactatataataccaaatccaaaataaaaaaacaatacttaccaaaaatagccggtgtatgttcggtggtagaccgtcggagtgtggtggtggtgcgtcggggtggtggtgcgtcggagtggtggtgggcagccaagtggggaaagtgaagaagagaggggagaggcggttgggttagggttagggatttgaagtgaagaagggaaaagtggggaagaggggtctgatggggtttatatagtgctattagcggcggggtattagcggcggacccgctaataacaat

SEQ ID NO: 396657 - DNA, 509 bp, Cannabis indica
ttcaccattgaaaatctagaaaataatgaaaatgcatcgagataaacgtttagctatagtattgatgtacatttttttttgaattatacatgagttggattgtttagaaactccagttcaactttttgagatctgcatttcatggatctaaaaattaaagtcaagacattagttttatgcgaattaaactgaatttttagttgaattttagtttgtagtagttttttttgcaaaaaaactgatttaaagaagaaatatctctaaaaaaactgaaatctcatgatcttcaactgctattgaagagtcagcccgtgttttttttctcttttttttttcctacaattttctatatataacgcgttcttcatcttctccatctccctctatggaaaagttccaattacaggccctaaagcttcagaaatgggggttgaaatttgtttccaaaaaagagaaagggaaagggaaaaggaagttagataatagttttcttatgatgattttgttga

SEQ ID NO: 396658 - DNA, 575 bp, Cannabis indica
gctattttgcccaactcactactattttcggtgacatttttgtggctcccgcctttttcaggcgatatcatgtactattttgacaaatagttggcatgggtgtgatctactcgtcgttgtgatcgtttttatatatgctagccatatttttggcaacatttctggtacaccaacttttaccgccactgatatttcactgcttataggtgaggtttcataactctaaactttaactacagtgatattatatgtcgttggacttgattttgaatgtagaatgcaatgatgataattatttaaccatttgatggtataggtgaaagtaatatataagattggactaaataattggagctcgggacttgagagcttaagatcgtcttttcgacaaagtttaacgacttgggagaggtagggactcaacctgattattggacttgatttttatatgtgttgtataacattagacatattctaatttttatgatttgtaaattgtttgaaaaattgacaactgaatctgcatatttttttggattgttctggggcactgagtgccaaatatatttttgaat

SEQ ID NO: 396659 - DNA, 925 bp, Cannabis indica
acacacacacacacacataggctcaatctctctttttggagatttgccacatcaattctcatattgtaatcttaagagagctactacaaattctaaaatacttgtgatttgagtagtattatctctggtatcgatacaactaaaagaggagtaggtcattttcggctaactaatgcggttgaacctctataaaagtctcgtgtctatttacttttctattctaattgtgtaacatgtgtcaagcatcagtaataaatatgactccgctgtcggttggccaaatctgaggttaatagtttggtgctttcattgagagcgagttgttaatttatcggatcaaatgtcatggttaacacaaggagaactccgactacaacatctgcctcttcgggtcttcctcaagatcctattgcgtcagatcctgatgttcgtgttccagccacaactggaatctccatgaacacgatagatgtggccacccctgccatctcggcatgcaccacgaacctggccaccacaactggccaggtcgacataaccattcctgtgggtctgaataattgacctatgccacctagcgaggaccctttgctgttgcctccttgtgaaggaataatccacgtggagcaacccccaggcaccacaactggatatggtccccagtattatgctggagacacaaggctaggaattggtgagccagccattggtgatgttgggctttgtgccctaaataaaactctatttcaatgttatcttttctattcaactatcaataaagaaacagatttattttcattacttatttaatatgttatttggttcatgtgatcatttatttgtttatttaatttataaattcatccaaatccttatcatattgatattcttatttattgtgttatcaacatagtggaaagtaatc

SEQ ID NO: 396660 - DNA, 744 bp, Cannabis indica
tgttgacattctatcgacaatatatcgaccaacaacagttacgatgagaaattaaaattttaacaacacaattgataaagtatcgacaaattatcgtcaatttgtgtgcaaaatattttttgaatatcatcgacatgtattatgcaaactatttctattaattgtttatgatgtgtgtagtgtgatgatgattttattttactttgttatttgcttggaaaaatgttatggtagagtggaatatattgtaccactttgttattatccttaatataattgtaaactttgatttgcttcaccttttaatactctttctgtcttttttctaatttattattattatttatagggaaaaaaacaggaaaattctaaaaagggtaaaatattacaaaaatactgtgggccggcccaatcaacatttgtacagcccacattgaatatattacaaaaataccacttgaccttaccttcagccgcacgtcacaaacggagacgatgaaggaacctccattgatgcagtcggctacgcaaccagaatgaaaccagatcgagcgtagaacaaccataaattccagcgaatttcgataggaaacaaacaaatccaaggatctaaacagaaatttttttaaaaaaaagaccagaaaaccgtggagaaactgaaattaaacatttgatttcggttttttatcgtgcaatatcactcaaacgagcgtcgaaaattcagattgaagcaatgtaaatctg

SEQ ID NO: 396661 - DNA, 881 bp, Cannabis indica
gttcaacaatttccatagggatggactccacatgcgccacttgatgtgtaatactatttttatgcttttatcttaccatccctttatcaatttaatatatatatatatatatttatatattgtagaaggtcggtttggttttgattgtgtggctcacgattccaacagtaatttggtagaagcttacacgaaggaggcgggtgcaacctgaaatagctgaaattattggcatcagagaagctttaagttggattgaccgtcattcgttgggacaagtgattttgaaaactgatagtttagtttgtgttcaagccgtgcaaagccaaattactttgtcatcctcttttggtcttttagttcatgatgttcgtactcttctcttatcattaaataatgttgagttgtgttttttcaaacgatctgcaaacaagctggttcatgttttagccagggattcttgtttctctacatgtcgtgtgcttcagttggaggattgttccaacgaagtgcgttctattgttattaatgattgctagttaataaagttgcttagtttaattcaaaaaaagatataaatatatatatttaaatattgtagaaagaaaaatgttaatagagatctaccaagaattaatatcactattgatatagatggatccacgtagtgcccggaagaactaaaacccaccttgaaatataaaaatatattaatatataattattgcttacatatattagtcaaagagaaagattgattgaaatgctttcaatttacatgggaaaccatatttccaatgtttccaatcctctgaccattttctttatctatattttattatttttttttaaaaaaaaaccaatgaagtataaggtttaaacta

SEQ ID NO: 396662 - DNA, 1421 bp, Cannabis indica
aaaaataacaaagaatgcaaatataatctctttatctaattcatgagtaatacggcgaaaaaagtcatagatattaagatgtttataactttaataatacatagcaaaccttgaagacttccaagcttttctcgatctggagcagtctagtagtgcatgcttgatagtttcagagctaagtttacaaagaggacacaaaggagagtcaacaacacatttcttatgaagagaagaagctacaggaatagcattagacaacattctccacacaaaaactttaacttttgggaaaatttttgaattccaaatttcagggcccgggatcatcgatcgtactctaagtaggtcggccaacatatctgaactgaattttcaggtaagaaaagtatattgtactgcatagtacgttgtatgtaatacaattagtatatttatgaattgattaagattgagatataattaatattattatataatgaaataattgattggttaagcaatgataatgtaatgatactatgaatgtgatgtacaggctcacctgattaggtgatgcgatactcttggcgacgtaccaggcgtaggtacgggcgtcagtgatatatgagtaccgagcataggtacagactcacctgattaggtgatgcaatactcctggcaacgtattgggtgtaggtacgggcatcagtgacatatgataattaccgggcatacgtacgagttcatctgattagacaattactcctggcgacgtgtagatacggcaacagtgatataaaaattaccaggttatggcatagaatgaaaccgttgtagggtttcctcctggaaacgtgtagatacaggcgtcagtgacatatgataagtaccgggcatatgtacgagtttgtctgattaggcgattactccagcgacgtgtagatatggcgctagtgatatgaaaattgccaggttatggcataggatgaaactattgtagggtttcctcttggcggcgtgtagatatgggcatcagtgacatatgataagtaccgggtgtaggtatgggctcgtctgattaggcgatgcgatatattagtgccaggttgtggcacgggctcacctgattaggtgatgcaattatatgatatatgggtgaaagtttttggcaccaactcacctgattaggtgatacatttatgcgatatatggtgtcaagctatggcacgggcttgcctaattaagcaacgcaattcatgattaatagattaaagcatcgacttgcctgattagccaatgtgatataatgaagatggttactttatgaagtagcgtatatataatttatatttttaaatgaatatgattcatattattgggatataggttttgtattacaagatatttgtatactgatgcttattcgtggtagatgccggtag

SEQ ID NO: 396663 - DNA, 645 bp, Cannabis indica
gagtgtgatttggccatgtttttcgaagctggttttaaggttttctgggtttggaacccaggggccgcagcctaactccttgggcgccgcggcccgcctcttgtttgtggcctaagaatcgaacccaggtgtcacgaccccatgtgggggtgccgcggcccgcccccttgtgtttgggtaaattcgaacgcgatattcgaatattcataactttatgatccggactccgttttgggagttctatatatcattggaaagctcgttctgagctctatgtgaatatctttgatttgaatgtcattcttatattttgtgaaagtggaattagggattaaccctatacttgcaaatcccaaaatttgtgactaggattaccggcacttgttcaggagcacccgaggatttggaatctccacatttacgggacatcaaatatgacagtagctagcacgtagagttattcgcggtggcgcttatattgaaaatgatatatgtgagtaattagaaacagggattaggttattaccctaacataagcggtttaacggcctagggttattacactagtagttaataatgtgtaaatgctatgccatgttcaatatactagtatattgagatttagggttatgcgtttaaggcata

SEQ ID NO: 396664 - DNA, 818 bp, Cannabis indica
tttataaattttgaatgatcatctacatattttgaatatctacataattataatccgattactttatacaatagtttacattgtaattatttaaagtattttacaaattttttagaaatttagaataggtcattatacaaaattaaggtttaaataatttgtattgcatgcttaaaaaataaaagagatttacttgtgacaaaattatttaaatcttaattttcaacactataaattacttaaattttttttaaatattttacaaaatatagtatataactaagatgggtaaatatttttatgccttttcaggtgtgggcatactctattttttaaaaatatatgtatttttatttttttttgttgaaaaaacctaagtatatgaagggagtttcttccattttgattagtggagagattataacttcatgttttcgtagaacagtgttgattgtagttatttaggttattatgcaaattttaaaaatttaaaattgtataattcaaacatgcatgtgtgaacacctattttatacatttttacaataagttttttgaactttggacaccctaaataattttaattttcttaaaattttacaaatatcttaaataattataataaaaacactggcattagggatgttcatccgatccaatccgcactaagtgcgaatttcattttttggatccaatccaatccgcaaaagtgcggattggatcggttacttgggattggttactttttaatattaaattatttattatttatgaaaaaatatttttttttcacataactaacaacaaaataaaacaaa

SEQ ID NO: 396665 - DNA, 501 bp, Cannabis indica
taaaatgaaaattcaaataattacagaaatctcaattattgtgtaacagacgaataaatatgagaaatttattttttcgaataaaatgaatactagaaagaagagtggaaaaagaagaccctctgcatcaatcaatttatcctgctcatttaataataattcacaaatttcaaaagcacccaaacttaccataccatgtagtgtgaactgtgaatggtagccctaaacacaaatcatgatggtgtcagcaccatcaatatcaaataaacttatcattataaatcaatatagttaattctataccacttaatttaacacccaatttaaaattcaacacaataactgctgcgaaatgagcatttctcaaatttcaggaaaactgtacaatgaacagaatttacatttttctcatagatatgatgcacatgtaaacagtccctaatagctacatattgcataaatatgatccataaaaaaattaacccaaacagttcagttttt

SEQ ID NO: 396666 - DNA, 1437 bp, Cannabis indica
ccttaaccaggtcaatcttgattacaaaaaaaccctctttcccttttttcctcttgaaagagtgtatgatctcctgaattaaaacattattatcttggatgttccggccccggaaaaaagctgcttgagtaggacaaatcaatctgggcaggaacactctgattctatttgcaatgattttcgagatcaccttataaatcacattgcacaaagagataggtctgaactgggatacttttttagggttggggaccttaggaatgagagtaatatttgtagcattaaagcctctatgcatattccctgactggaaaaagtccacaactgcatcggagaagtcttgtcccacagagttcctgtagtgtttgaagaagagaactgacataccatccggacccggagccttcaagcttcccatagagaacaacgtttatctaatttcctcgtgacctgggatcacctcaagctcagactgctccaaaggggagagatgatcatggattaagtagtctaagctttccagagggccttgaggcgaatttttgaaaatgtcacccagaaaaccagtaaactcattaccaatatcttctttattagttatccatacaccatccttgtttaagatactatccaccgagtttcttctattatgaatcgtggcggaaatgaagaaaaaattagtacacatatcaccatccctaatccaagaaaccctggatctctgttgccagtaaattgttttccgccttaaagcctcattaagcaatttcctcacctcagcctccgtagcccaatttctgtcaccagtaggcaaactttggatagcttgtaattgaccctccaacttagagatgcaagaatgtaacttgccaaattgcacccagttccagttactcagggccaggcgggtcgtaccaactttcttaaacactctagcaggagcccaatcatgggaaacagacccccatgcttgatccaccaccaaggaactacgagggtcccttgtctaccaagcttcaaagcggaaaggccttatggcgttagagaccgaagtgtcggtattaatagagaggggccgatggtcagaattacaggtagtgagataccgaacgactgtcttaggaaagatttgcagtcaaatattatttataagagctttgtccagggccgacttaatgtgattagcaccgtctctattattgtcccaagtcatgatatcccctttaataggcaaatcaaccaacgcatgacaattaattaactccgaaatgaagggaataaattgatccctccccttggacccaacccgctctgagttgctcagaacaaaatttacatcgcctaagattaaccaagggccgccaaatttttcaccattacctttcaagctagaccaaaatttctcttttcatggaagtacggaggaccgtaaataca

SEQ ID NO: 396667 - DNA, 764 bp, Cannabis indica
tcatctcagcaaagttttaatgattctgtctctttgctgccctgtgtgtgaggcaaagattgaaacccatcaacacctcttttttggttgcagttttacaagaaaggtgattatcgagattcaaagttggtttggtcgtttctcttggcctgcctcttttgaagcttggattgattggtgtgccttgcttcgaaattgtctagttgagcagctttttaatgctacaattagctgcaactatctattttgtgtggtgtaatcgaaatagatgtatttttttatctcacttgtagtgttgtgaaggtcattagtgctaatgttaaattggctattaaagctagattgaaaggtgctttgtttcctaagcttggaaggcgagaggcttatgtaatcactttgattaactcttttttattttgtttttgctacttaggtagctggtttgtatgggttggtggttgatagaataaattcttcttatttgtttcaaaaaaaaaattgataataataatgataattaaagtacctccattttatgaagaagtcaaaaaggaattgtcagaacctcaaaagccaatccagttaaacaaaaattgaaaacaaatgaccacccaaatactgaaactgagtcctaacaatacacactaaatccagacccccaaactaagcaagattcaaaacttcagcttcaaataaatatacttacttggaaagaagcactgatgtatatacgaaaccacaaaagctacagtattttcaaacca

SEQ ID NO: 396668 - DNA, 2776 bp, Cannabis indica
caacctacacagagaaaaaacttgaaagtctgaactaagtaaagaagaataaaagcaaactaacaaagacttaccctggtgaattcctcgaagactcctcccatcatcaactccagggaagactcgttatcagcaccagccagctgctcacttacctcaagaaccaaccggttcatgtaatgggtgagcatctctttgcctttcttggcctctggaagcactagcaagggtggagtaggagtttgcacctgctcagatccactcttggctagctcgtatccaccctttgatagctcaggcctgttcgagcttcctcctcgagaatctttggccttagcaacttttggagtagaaggatccgcaacagttagctccccagaaaggtcaataacctccccggttgatgagagacatgactgacacgaaaacaaaaaacaacataggtagaggaaaaaaaggcaatcaaaaatcataaagcatgatagtcaaaaagttttaaaacaagacggaatatcctgcaaagcgattgtccgagcaagactcaagagtccatcatcacctgacaagacccttatctctgccatggcagctttccctttcctagttcgggagaagatggccgagcaggcgaattgggctccctaattcgaatggcatgttcaacaggcctgggctgggccggaagtttcttcctccttttgagcggagtcacctgctcttcctcagcctcatattcaggattcaagggctcatgagcatactgtttggcccttgcacctcccttcaacttagcttcacgcttgagctgaatgagttcatcctcctaatgagctctctcagcccgtccagcacaagatttcctcttcctatccttcactggcttaggaatgaaatcctttggataaagcccgtacttcataaagttgtccttggaggtcaacttaatgatatttcagtcatcccccggcagtcgagcgagcctttgagctctatctctaagatcaatagtgaagggagggcggtgatatgtggggatctcctggaaccaagtatgggtggtacccatgccttccaccataaagtatttgtcaacataatgccaaattttgctaacgaccttatccccggtgcccgtcaaccacttgaagtcaagttgagagaaatagaagtaccccgacctgccttgcttaggggtggacttcaaatcaaaaaaccagcttacctcatggggagagggcatatcccatttctggaaggcatagaaaacgaagagggcggacaaatacttaatgccctttggagtaaattgggtcggacagaggcggaagaagtctgccacattcctaaagtacggctgtaaaggccacaatgcccatgctgggcatgagcacccgaccaggcgcacattcccctttcagggtttgtggcccgattattatgggcgggaatgtaacagtccaatttgcctaggtagtcatcctggtcaagatcccgcaaatgcgcctcagtgaccttggatggagggctcacccacctggctccaaaagtaccttgccttctatgaggaactgcagcagtaagttcctcacttgtgtagtatacgccctcaaccaggacgtcgccgtcagcatcaaatggctccccaaactcattgtatcctccataatttggaggtgaaacctcctcctcttcctccgccttagagggactgctaggacagacatcgtcctgctcctcaatctcctggaccttagcgtccccttcttgatcgtcctcctcctggacggttggatcttattcgccgatgggtaaggtggcatgccgggccacttgagggtctgatgggttgaccctacgcattgtctttttggtacgagccatcatcctatggctaaaccaaagactgaaggaagaatacctgtcactcgaagaagttggactagaacgaacacgaggctgatcctcgtgcaagagttgaagtagatcatggtcgatttagtgtccgcttccctaaaactcaccttggttcatgtacaaaagataaaacacaagatgagtgtttggtcgggatatcgaacgttaaaatgggcaaatatgtctaccaggagtactcaacagattaaagaataagaatattcaacgaaaggtcaaaactcaggaagttttgatttttcacaagttagggaaaaacattttcatgaagcttagaaacagcaagatgaaagacaagcattatgcagttcaaaaagcaagcattatggatgatgaaatcacatgaaccgtcaccaaggaaaatcgtagagtttttaaacttagggtttcctacatatcttctacagcgaaatcaaaagtacattcagaaagcaaatgtgcaaagtaaacataaaggaaatcgagaacttactcaaggaatcaagcatctgggttcaagttacgtcaagccaaactagcagttttgatgaaagcacttcagcaaacttgaagccaaaaacctcttgaagccaaaaacctctctttttgctctgaacttacttagcaaggaaggttggtgaaaaagagtttgtggacaaatgctcacttgtatttataggcagacaacgaaaaggggtaatcatttcaaaagaatctcaaacgccttggttcccccgtaaaagcgaatatgggaaatcaaaagtaatcaagtgtagccgtcaactgtggtgagagaaaattgaatttcaaaatattaattgtcacagcatttattagccgaaaaccgaagggacgcccagtcagc

SEQ ID NO: 396669 - DNA, 574 bp, Cannabis indica
attaaagaatgaaaatatttgacaaaaagtctaaactcaaaagtttgaaattttcgcgagttagggcaaaaaatttcataaagcttaggataagcaagatgaaagaccgacattgtgctgttcaaaaagctagccattatgaacgatgaattcgcatgaatcgttacaaaggaaaatcatagagtatctaaaacctagagttttcaacatatcttctacaccaaagttaaaattgcattcagaaagtaaatgtgcaaagtaaaagaaatcgagaacatactgaaggatcaacgtttgggttcaggttacgcaaagctgaatgaacagttctcgtgaaaattgtttagcaaacttgaagctaaaaacctctcttttcgctctaaacttgcttagcaaagaaggttggtgaaaatgagtttttgaacaaatgctcgatgatatttataggcaaacagcgaaagggggtattcatttcagaaacctcagacgcctcggttccccctaaagcgaatatgggaaatcaaaagcaatcaagtgcaaccatcaaactgttggaagttattttaccaggatc

SEQ ID NO: 396670 - DNA, 1186 bp, Cannabis indica
aaaatatagcttattaaaaaggtgaaatagtatcttagttcttttatttttttcaataatatagtaactcttcaatataaaatgaaactttttttgataaattaatacaataaaaaatacttttagtatatgatatatattaaattttgtttgtgtttaatttttttttaataattataaaaaaaattaaaagattattatttttaacttcaacatcttagtaacagtgtagaaatatatattttctatataatcaacttaaaaaataaatagtgctttatatatatatatatatataaatactactttctaaaataaaatagctaagtgtagttgatattttcttttcaaattgtagtaaaaagaaaaacaaatagggaaaaaagaaattaataattaaaaattcaacaaaatcatgcataaagagaagaagaaaactcaaaagatgaagctaacagtgataattgactataaaaaagaattgcttgcatttgtatgtatattccgtacagaagtaacggtaattgcatcaattaaataattaacggtatatttatttataattacaatattacgtatataattaataattctgcaaaatagaaaggttattgccgaaaatattataaatgattatttttcaataaacattgcattagcattaatcagtaatattatactcgttttttggctcttgaaatgaacaaaagaatcaaataaaatatgcttattttaaagacgtgttgaatttaacgaatcagatatatctctgtgtgtgcatgtgcttataatatagtgtatattaaacctgaagatgactaattcgttttacataaaatagttggagtgcacgttgcacaatactagaagtaaccttccactactcaagttaaacatatatttcttttcagtcgataacttcaataaacctcgaagaatatttatataaaaagaaagtgattcaacaaaaatataacaaaagatgatagcttcataaatcaatattacacacactacatgtcatgtgtcatatgtgaaattgtgaatacagaacctacaaacatataattaataataattcagaaagaaagaaaatatgtttttaaaaaaaaacatcataattaatatagtttattgggtttaaagcaaaaaaaaaaaaaacaacacacacaaaatatagagcaca

SEQ ID NO: 396671 - DNA, 1944 bp, Cannabis indica
tgaaccaaccattactttctagacgtccgaacctaaggactgatttgacacgtgaaacaaccaagataggccgatttgcacgtgaaccaaccattactttctagcatccaaaccatctagtatcatcaatatgaaatcgtcttatgatcacagaacaaactgggagtgctttggacaggatacaccaccataaaactttatgtcactcaaagattttagtattctaaagcttattctagaacaaggagctacctcacaatgaggagccctatccaaagcttgggcaagataggctgatttgcacgtgaaccaaccattactttccatcgtccaaacccaactatcattgccctggccagatggactccctccttttaaaattacacaaaaagtctctttatcaaaaaatggtgtttaacttgtggatatcccaaatcaccactgtctaacagtagattgactactttgcccagtccagtggtagaggagccattagatttcgggaataaatctttactatgagagatctaagggccccacaaatactagtatcccttccataaaccaccaatttatatgcacctttccttaagatagattagttcctaccacattttttcaaaactacgaatccgaatctttagagttgcagttaaggaaatcttctccttttagatacctaactttcataatttgggaacaaagagattgattgacaatcaacatgttccagccccatttttgtagaaaggccggttcatttctctagttttctggaaataaagtccccaatgagattttggtaggcataacttgtccctagttgttaacgcatattttcgttaaccaaaatatgagccaaatagtgataatctcacacaaaaaataaaaacagtaaaggaaaatgtatgaacacaaaggattttctacgttgttttgtagttaaaattctgcatagtgcacgagtcaatcttattagatttctgatggttctttaggacctttctctgttatgattttttcatcccttttttaatctaacttgccactatctataatcacatagtaggccgttaattacaaggttgactgtaatctttacaatgtttatcccctgaaatcgtgggaattgattacatatcacgtagtacaaatgcggctattatttgaatatcacacagctgtaatttatctgcttttactgggtcaaaatgatcgtgtgtttaaacacgtcttaaatcgaagcgttctaggatgtctcgataggaacttggttccaatgaccttgatagcgagctggagttttctcccctatctttcccaggtcgatgatgtacaccttgttgcttctttgtttgaaggcttaacgctttattttgacaatcacaattcttattaacagagagtatctcagtagtaatttgaatgtcagcttctgactcgccaagactataagtctcactgaaagatgtctgaagttaattggtgaaagtaataggaatgcgccttcctatagcgagatatgcgcctcgcttattaggtcttgaatccactcgactgttatacttagtttgtacattatacgctaagtgttttcacagtcaatacgcgtcgatttttgtcttcccagttataaagaagttgatgtctcgccttatgcattcattgcagtatggtgtctcgttaatacctgaggcaacaatttttatatctttacctcgcataagaccctatagtcagcgagttgcaagtatactctgttacttccgcatttaatgagttattccattagaagtgattaccgttccacgcattgatccatattccccttaatttgacacgtgtcctctactgaaatggtagctgaattttgggtataacaattgccctttaaaaagttctttttagtaaaaagtgctttttaataattacggagggcatttt

SEQ ID NO: 396672 - DNA, 1075 bp, Cannabis indica
tacaagagggattgccctcaaatcagaatcgaagcaccgaatgctccagtgaaacccactccagcaatggtgtttttcataactcaggccgatgcagaggccagcccttcagcggtgacaggtcagctctcggttaagaactctttttactctgtattgtttgactctggggccactcattcttatgtggcagccagaatctttagtaaattggatagatcgcatgatagttatgaatcagggtttggaacccttttacctggcggagagttagttatctcctaaaggtggattaggtctatgccgatcaaaattttgatgatagggagttaagtgctgacctaatagagatgagtttagcagattttgatatcattttgggaatggatttcctatccaaatactcagcgagtattgattgtaagaggaagatggtaaccttccaaccagagggtgaagaactgtttgtttttgtcggttcggttcagggatctcggatctcggtgatttcggccttgtcagcttaagaattgttgtgtgatggatgtctagggtttctggccgtggtattagacaccactcgaccagactctgttcggccagaggacatcaaggtggttcgagaatttctagatgttttaccgatgaacttctgagtttaccacctcagcgtgaaattgattttataattgatttggcacctggagcagaactggtctccaaggctccttatagaatggctctagctgagcttaaagaattgaaaatttagctccaggggtaacttgacatagggtttattcgacctagtgtgtcaccctggggagctccagtattgtttgtcaagaagaaggatgggtctctgagaatgtgcatcgactatcgggagttaaataagctaacagtcaagaataaatatccattacctaggatcgatgatcttttcgatcaacttcaggggaagacggtcttctcaaagattgatctccgatcgggctatcatcaattgagaatccaagaggaagacattccaaagatgactttccgtctaggtatgtgttgggaatattttacc

SEQ ID NO: 396673 - DNA, 1290 bp, Cannabis indica
gtttatgatttgaaaaccgtatagttgtgattcaacagcttttattgggttaacactatcatgtattaaacacgtctttaactgttgaatctggagatgtctcgacagaaacttgattatagtgatctcaatagcgagctagggccattcttccttccgaggtcaacaatgtatgtcttgtgtcgattgcggttatttatgaagaggtcattctaactcgctagggttgtaagcctcgctcctgttagttggatgaagctataggaagtcttctcatagcgagatggtcatctcgcttacttgctcttcgagccaatccgacttttacaattagtttgttcattgcaagctaaggacttttatagttggtatgtgtcactttcttcggtgcttcgctattcatattcagcgacatatggtttctcgctaatacactaagtaccagttggtacattgattcctcgcctaagaccttacaatcagcgggttacaaatatactctgatacttacgtaagtaatgagttattccataaaaagatattgcaccgattctcattcccttaatcttgacacgtgtcctccatccgaatttcgagtataacaactgcctcttaaaaatttcttttttagtaaaaagagctttttaataattatagagggcatttttgtcaagatcttttcttggaaaaatgcatccttcaactctggcggttgtacaatttcgagagtcattatgaatcgtctcttcatattttgcacaacttccaaccgttagatttcttaatatttggctttcttgtcactggacttcgtgtataaaatggcggctcaagcttgtcatttttcacaaaccttctggctctttagtgagatccattttcataatgggtcatttctttcctgccaaaatgtcccttctgagttcagaagttcattctttcaaactcataatacctagatgctccaaccattttccatgtattcctacagacttcaagcctcaaccggagctggaaacgatgggttccaaggctgaggagcttccgaccaatccaaactatgggaaccccatagcctgccatgggcaatcctcacaagtgatcatagatcttgtgggcgatttaaaaggtccaccccaggctgataaagaattccagaggaaggttggcatggttgcagatgaatttgggaaggaagctagcttggtttctatcagagaatccgaccaacccaagacccaaacctgcgccagaagatctttgtaccaacctctttctgggatcgaggaa

SEQ ID NO: 396674 - DNA, 413 bp, Cannabis indica
aaaaaatgagaaaacaaagaaaaataagaataattaatataagtcgccacatcatctgaccaaacaataggataacgtaggtatatagatagcaaattttttttaaaagaaaaatgttaacaatattatgtaacagtaatttttatacttacgtaatcttattgtttggtttaattttttttttttaaaagaaaaatgttaacaataaacttcatataagttgccacgtgaaatgttttaaatatttctttatatatatctattctatataaagtgtagttatataacataatttttagtttaacagtgtttttttaattttttacgttaactttaacagaacatcattattacttaacgaaatattctttattaattttataatattattgtacatatttaaaaataaaaaa

SEQ ID NO: 396675 - DNA, 656 bp, Cannabis indica
ataatattaatatttcataataattatatcatactataattatttttgagtacataatatttacacatgtattaaaatttagaataaaattattaattctacataaataaaattataaaatatatatatttttttaagatgtaactattgttatatagaagtatattttgttaatacgggacttgaaaaatgtataactaattacaatatagaggttattcttataactggcttaatatagataggaggttatactgtataacatgtataacacacttagaattcataaaatttctgtaattgagaaatatatcatgtctatttttgacaataatacttatattcattcatgttagtacacacataatcaagagagctatggacacttattctttaattgtttttttaaattttttttttagttacttcttgaatggagaaagtattagataggattggagttcaatgtaattgcagatgtaaaactttggcacgtgtagtcattggaatgctctttcctttcatttcaaaattggaatagtcattctatcaaaatggtggaaatagcattccattgaaatgatattctaatactttaaaatgcaaacaaataaagaaatagaataaaattaatttctttcaattccattctattt

SEQ ID NO: 396676 - DNA, 544 bp, Cannabis indica
tcattttgcggcataaaaccacttgggtttctttcatcttgttctataataccccttacaaagttcatgggattatctctgttctcgatttcttttgtacttccagaatgtatggaagaaaggaaactcatcaaagcatatggagcagagacacccttgttatgcataatactagagctcaaatttgagctagtagaaagtccacaaacatggtgtgcaatctttctcattgcaatgtcgtcaacagattttgaacttcctaaggaactctcttctcttggggacctgtaaaaccaacaatatttaatcactcaaatttcacctccattaacagttcttcatctagcttattccatcaaactaaatttcagaatgtttactcacatagaatggttggtaaacttatatccagaaatcagagtaacaaatctctctctactaatactgtgtcataattcattatcccattcacaatttcacatcttaacaaaaataaacaaataaaaaaaaacatttaaacaaacgtaggtgtcggatttcaagg

SEQ ID NO: 396677 - DNA, 1081 bp, Cannabis indica
ttgaggaaaaacaaactgagtcgttaatcaccaacgcaacatataacatcgagttacaagatatttcaacaaaaaagtcaagaaaagactattcaatgttggagattcggtgttaagacgagtatttgcaaatacgagagatgcatttgcaggagtgttcaaccccaattgagagggtccatatgtcattgaagcagtagttagagttagagattataaattggctcgactcaacggctcgcatataaagaactactagaacgtggaacatttgcgaccctactaccaataaataaaggatgtaactcgcattactgatgtaaaattcaacttcagatatgaataaaaagaatcatttatattaaggaattacaaagtgttattcaataaaaattacttaaggggaatttatgtatgattaaccgaaattcatccagaaattcattgtataatgcatacctgctatttcaaaatttttttgaagttaaaaggttctcgactaaacctctttgacgaaagtagagtcgaaccgttccttgaccaaacctttttgacgagagaggggtcaaatcattttttgacgaagaaggaatcaaacaattataattttttatttaaaacctatccgacggtaaaggaaaatcaaaagttataactggcatctaaaactgaataataacggttctcgcgagctaggagagtactaaacgaggcatcgcaacgccttgataaaagtacttgaacctagaaaatggatagataatataactattcatatgagaaaatcaaaaatatgcaagtgatgaattcattgcagtatattttagtttgcttaaggcagattataactgttatagagaggcaaaattgacaactgctcgaaaatcaaaaactttggtagatcactaactacttaaataggaagattcagagcaatggaaaaacccaaaagtactatacatttgatcaaaatatagttgtttacattgtgaataaaaacccaagaaaacacaattgtattaagttggaatgaaaattgtacaaggcgtttaagataagaaaaacctaaattgggttacaa

SEQ ID NO: 396678 - DNA, 2372 bp, Cannabis indica
tattacaagtttatttccattccgattgttattaaagtttagattctgcgcaaattctattagtaatcccgtttaggggattatgatttcataagtatcttgggtagcgtgcctaattatttacggtgttacaaatatccttgtctaataatcattttagacagactttgccagcctgcatgatccccacagaatccttcatgaatttctctaatgatttcattttcttctacatgaataacacaccgaagtaggggcattgaataccctcttccatagagtttgccttcgatcattgtgtagcgaggcactgaatacaatagttttggctcctcgattttgtcatttggaagttgttcgtcgagtaaataattaataataggtgtcatccatgttggagagctatatatcctctcaatatctttagtttcacatatacttggcacactcagcatctctaccggaaccagattcaattcatccagatcattctacgaggccagttttgctaaggcatcggcgttggagtttttttctcttagaattttttcgattttaaaataatcaaatctttccaagttcttccgaactttctctaaatactctgccatttttaagcctttggccaagtattccctaaggacatggttaacgatcagctctgaatcattatgacaaatgagatttttgcctttcaatgcctctgctatctttaagctggcaatcaaggcttcatactcagcctctttattggatgcgtcaaattggaacctcagagcatagtgaaatttaaagccttctggcgatattattattacccctgcccccaaaccttgctcgttggatgcaccatccatgtataacctccaagtttccgcatctcgctgatcaggtggaatttcttctagatttatacgttctctcaagaagtcagctaaagcttgacccttgatggatgttcgaggatggtatgttatgttgaactgccctagttcaactaaccattttatcaatcttcgagtagcatctggttttgataaaacctgtctcaagggctgatcggttaacacttttatggggtgagcctggaagtatcgccgtagtttgcgagatgcatggactaggaataacacaagtttttctagaggggaatgttgagattctgcccctagtaacctttcacttacatagtaaataagttgcaagtgcttgccttcttcttgcgctatagctgcactaatcgcatcttttgagatggctaaatagagaaacatcgtctccccagttattggtttcgccaaaactggtggcgctgctagatgcctttctatgctcttgaaggcctcctcgcactcttttgtccactcgaactttttattgcctcgcaatatgttgaagaacggcacactcttatcagttgacttcgaaatgaatctgttaagtgtagccattcttaccgccaaggcttgtacatccttaggcttcgtcggtgatggcatgtctattaatgccttaatttttttaggatttgccttaatacccctcgcattaacaatgaatcccaaaaattttcctgaggaaactctaaaggaacattttttcgggtttagcttcatgttatacttctttaatatctgaaagcattctgtgaggtctgaggtgtgatccttactttttattgatttcaccaacatatcattgacgtaaacctccatgtttcgccctattcggtttgcaagcatttcgtttaccaatcgctgatatgtttccctagcgttcttcagtccgaatgacatgactttataacaatagagtccaatgttggttacgaagcttgtatgttcttgatctggaacgtacatttttatttggttatatccagtatatccgtccgtaaatgacataagctcgtgcccagcagttgcatccacaaactggtcgatcctaggaagtgggaaacaatcttttggacacaccttattcagatcagcgaagtcgatacaagttctccaagttccgttaggctttgggacaagaacaggattggctatccacgagggataaaacacttcgcgtatgaagtcattgactaacagcttgtcaacttcctattttagtgccccttccctttcggaatccaagggcctccttttttgtctctttgtggggtagtttggatcaacatttaagtgatggcagataatattagggtcgatccctatcatatcgccatggctccaggcgaattgatcctcgtttgccttcaaatcccacgattttagggatgattgctgttaaattatttcggtcaactttgtaattcaatgtcaactatgtaattataaatagtgacaaagaagatcaaaaaaggg

SEQ ID NO: 396679 - DNA, 1119 bp, Cannabis indica
ctagacgaactgaaaaatatattacatggcatggctagacagagaaacaatgatctcgagctagaccgagcacgcggaactcctttctcacctgagatcaatctcttggcgttgccccacaagtttaaaaagccaacatggaaaatgtatacagggagagaagatccctttcccatctcaagtattttgaaatgcaaatggaattgcaaggggtacgaggagatgtgtgttgcagaatttttcctgctactctgtcgaaagccgctcaccaatggtattttaagttggcccatggaaagtttagttcatggaaagccttctcttcaaaattccatgcgcaattctcctcttcacgccaacttccaggcaagcctcttcgggaatacatcagcagattcatgacggacgcgaccaaagttttatgggtaactgaagatggaaagttatccgtgatactggggggcattgaagtcctcggcgaactctggaaggagataaggaagaacgggccggtagactcaatgagtgattttcttgaccgtgctgaaggcttcatcaagctcgaagaagccattcaacgagcgaaaggtgagcaaaagcctagcaagtcaaaggctccttctactggaacatccgcccaacttccccattacccaaataattcaagctcaagtggtaaacattccaacaacaaccacaggcaagggaatgggaagaaatgaaagttcaccggcaaatccgaacaagctccctgggagaatcaagtcaagtacactggattcactatcttgactgaagatatagaaagggtttacatggcaacttagtcactggccccatataagaagcccgtgcccatgaagaaagatgtcagcaagagggatatgacaaagttttgtcgattccacggagaaacaacccacacctgcataagtatgtcaagaccaatcaggttcagaggaacgacaataaccaagatttgctacctccaccagtagatgggcatctgtaagttatcgttggaggcccggacattgctggagattcggccaaagttctggagaggtatgcccgaacagcgcagcacgagcaagaagaagttatcttggccgtggaaga

SEQ ID NO: 396680 - DNA, 1128 bp, Cannabis indica
tcaatcgttgctccactttaagaacatcagaacctcctaataacactgggggtgcttgattcctgaatctctcatataagggctccatacggttgcatgcaacaggttgttccactagcaccataggaaccgcagcagacggtggttgcaggggaggctcaataggagcatcccattgtctaagccttcgaatctcttcttcttgctgagtaattatggcctgcatctcagcaaacctttgctcccaatcaaacggagcctgagttggattctcttcgccacctctaggagcacgatcatagcctctaccgcgaccacaagggttttggggatttctaacaccctgaccatctcccgtctcaaccattttgccctgtcctctaacgttttgctggacatccattgcttaggacttagcctgcgaacccactaggtaggtaggttagacagtggtcaaggtatttttaagaccgcatttacagttttaacaataatttacacaaatatgcaatacatcttaaaaaatttgcaaaaagtaaagcttacagaaccatgaattgagctcgacactggtcttgattgtacatatcttgacggtcttcagtgaacaacctggtggctctcataccaaactgtaatgcccgtatttgaaaacttacaaaaccaaaattaatgttattataatataattatataaccttataagtcgggatcctgagatttaaaacatagttgaaaattacattttctatatataaagtttcgtaatatagttttttttacaaagaacaggcaaccatacaatatgactccaaaatgttgaaagacagacaccctccaggctgcactgccgcgatatgtacaatcactgccaagctccaacgcactgttcctccagcttagctttgccctcacctacacaaggtagcaaactgatgagtcgacagactcagtaagatatgcataacatatataaaaataatgctgcatcgactttatgtttaagctgtcctgagctcaacaaccgagctcaccagatggttaagaacattctcaacagttggtgctattgaccatgatatcacccactaccagcactataattgcactgcggcaccgacactatgt

SEQ ID NO: 396681 - DNA, 558 bp, Cannabis indica
cactcaaaagctgcaatcaactcatactgatacatcgaaaccatttgcttcacatttttttggtaaaatcaattccttctctactaatttatggattattgacagtggtgctacacatcatatatgttgcaatctttctttattatccaatttacacaaaacaactattactaactctgtttctcttcccaatggttctgtaataaccaaaatattcagttattacttttctattatgctggtctagaaatctcgatgtggaaatagtaattaggtagaataagttacttattacaaaaattaatatttttataaaaatatgggcgttacagtttggtatcagagccttgacctagctggaagtgtggtcgacgaggacgtcggaccctataagggggggtgattgtgacagtcagtagtccggtgatctgtaaggggaaacaccgagtaagctgtgcaatcccacattgcttggggaaggtcaagtgggatgattttaggactatgtaggtatgggactacatagttgaagagagcttaaatggattgattggtact

SEQ ID NO: 396682 - DNA, 1129 bp, Cannabis indica
ctataaaagtgagaatatttttgagctttccactaagtaaattatacaattagcctttactagatattaaattacaagaaaaaaaaattcattattttgataaccacaaaataaataaataaataaatttgctaatgaaacaactataaatatacacaattattattgtgaatcttaatatttctctcctattaacattttttaattaatcctttcattgttttatgatctactataatattttttctttgtaaattatgtttttaaaatacttcttttttaaaattaaaatttatttcaatcctagaaatagtttatttattatttttaatagaaaagacaataaaaaaacacacaatttgcttatgcaagtgtcatttatttattagaataattaatatttttcccttctgaactatcgacactacctgattttaccctcactacgaaaaacagttacttttagtaacaactttttagtcacaatataaatttttggtgactaaatgggcctttaagtcacaacaaaaaattacttgtgactaaaatataatattttgacacaagttgtcactaatttagttttaatcacaccaagtattgtgaccaaaaaacacatttaaaaacacatttagtcacaacaatttgtgatttttgttgctaatacttttagccacggacattttagtcacaatataagaatggtgatttgtaattagtaacaactattttacttttagccacaaattttgttgtgaccaaaagtaagatattttttagtgcccctaaaatttgcggcttgttaaaaattctccttaaatataacagttacataattatgtcccttctgttaggctatgtttattttaccgttaactttgaccaatacaaaatataacagttacatatttttactccatgaactttgaccaatacaaaattttgccatttttttaaaaaaaattaatttaaaaaattataatattttatttttttaaagtaattataatattctattacttctggaaaaaaagaataaaaattattaaaaactaataaaaatatcaaattaattaaaaaaatattatttttatttaaaaaaaaaacttaaattattcctaaaaaaaaa

SEQ ID NO: 396683 - DNA, 988 bp, Cannabis indica
gctccatcgtgcggtccgtagagatatgactggtaccgtccgaacatagcatacgtgtcacccaaaggtctttgctttcttttgaatcgcccttgtaaatggtcgctggaccatgggcaggtacggtggtgcccatgcctcgtattatggcctgacataggagataaagactgacgttgtaccagaaaaagcgttaccgtcaccttcgtggttcgacaggtacagacagagatcttctgcgacatcacatgaggataacacctatcctaagtattctcgtaactcacattggcctgcttaaggtagtcctcggcttctgtgggatgctttccttcccgggagacaaggccttccttccactctcgggaactagagatgtcaggctccttgacgctccatgcgtccttgccttgcgatggatgcatccttcacgaaagtccctccttggagctggggccgaaggcactaattagctaaagattattttggcctcctctgctaaatcccacgtgtcatggttataaaaatttagacaacaactacaatacagtatttttgtaattttaaactttaacacaatatttttaaaacttagtacagtaaaatatatatatataaaaaaaagagtaaaaataattaaaaaaaaaaaaaaagattgtgatagtaaaaatgtaaaaattaacaaaagaaaaaaaaagtaatttttgtaggatccccttaatttattaggggtatgttgaaaaataccacttttattgatcaattaattaaacttacttctaattttatatttaattgaaacatacctatttttatatgtattgtacccataataccctgacataagagagtcacatggagagtatcttgaatataaaaaaggtatagagtgtattttccccaatttattaattagaggagttatatttgcaccccataaaattataaatacactccagtattaaaaaaatataaagttaaataattt

SEQ ID NO: 396684 - DNA, 542 bp, Cannabis indica
tatattatttcaaatttttacattacatcatctatcaattttattatttttttcaatatcttctctatattatttgaataatatagtttttaataacataatacattttaccaagataggaataaatatataatttaaatatttaaaaataagaataatacttctcaacatgtgaagaaacatttcatcattctccaaatgctactctaattactactctaaaatgcatcatctaacagaacatgattttaatattcatatatatttttttaactattttctttaatattttgaggaataacttcatttagagaagatgttaagagtgctcttgatgcccacatagtaattaaaaatttgtatgttaagtttatagtacaccccttaaaaggattgtttgtaatgaccatgaggttctttttttttttttgttaaataagcgtagaaatatattaaataaaactagacatcatggtatggtcgttacacaacatgttttccggtacagaattgatcggaatcgatccatatacctggtgggt

SEQ ID NO: 396685 - DNA, 1028 bp, Cannabis indica
ttattgaccttttcaaggagctagctgttgcggatcttcctactccaaaagttgctaagtccaaagattctcaaggaggaagctcaaacaggccagagcaatcaaagggtagattcaagctggccaagagcggatctgagcaaatgcgggctcctaatccacctttgctagtgcttccagaggccaagaaaggtaaagagatgctgacacgttacatgaaccggttcgttcctgaggtaagtgcgcagctggccggtgctgacaacgagtcttccctagagctgttgatgggaggagtcttgagggaattcaccagggtaagtatttgttgacagtttcctttaatccttctttacttggttcatatttgaaagttttttctctatgtaggttggtctgaagttcgcttacacctactcccgagctaaatctgctgcctccaaaaatgctaccatgtccaacaccatgagggcagaggtggacttggctaggaaggatgctgatgacgtgagggtggaacttggagctgtctggatggagctgggtgaagtcaacaagaagatttttactgttgagaggaaaatagttgagttgactaaggacctcgaggcctccgaccagcttgaggctaccatttgcaccctctcggcataagtgaatagcctttaagaggaaagggcagttcttcagtttgtcttccattggctggaagaagagaagaagactaaggaggaggcgcttacagctgaggtggcgaggctgtaagagaaagttcatgccttagagacagccagtctcgagatcttttatgatttttggaaggctaaccctcaggcaaatttcgattacttgggcaaagccaaaaacatgtatctcgagtactgcgcttcccaagttgcttatggtgaaccccaggcgactgcttctcctctggctagaatgttgatgttccttctactcagacaatagatcctccagctcctaccggcccagaagacccgaacttagagcttgggactccagctgtt

SEQ ID NO: 396686 - DNA, 546 bp, Cannabis indica
attatatgtatgaaatcattgagaatataatgagaattttaagtttacagttttagggtttatataattatattatgaaattatattttgtggtttttgatctgaaattgattatcaatatctcattatcaattttttatgaatgttcttgcatgatttatttcatatttcggcaaagattggtatcacaatcaattttttttatgttcttcaaattttcggattgctttttccattaaatctatttttttagcctttaatactcgaaattagtagtgtagatcgactagaaatccaatcacaagcaaaacccttccttttcccgttcttttctgtcgattttggtcggtttttcacgtcagactcgactggtctgaaaccgggtcgcgtaacccgcctccaacccggctagaggaagaagaatatactgtctagcgaagcccactgtcggccttggcgtgtgggggtgcgtgcggcaactctgggagtcgtttttcaatgtttaattaattttttgactccgtttaataataattattattttaa

SEQ ID NO: 396687 - DNA, 507 bp, Cannabis indica
tcgaggggtacccctagcttggatccttgggggtcgaggggtacccctagcttggacccgtgagtgtaacaccctaactagcaaaggcgtattacgtgatttttaaacgtactgtgcagctcgttgctaatcaacgaggtttatagaaatcgtgattaattaaaatttttgctttttaattaaacttataaaatatttcatacaaaatgctgtgggatcccatttacaaaaaagttttacaaaagttcacagtctaatacaaaatactcgttgcgtagccactaattacaaaagtactgttgtcccgaggatcgtacgctccaagcctaaccgccccataaccctaactgccgtgtcccacacgatactgagtcccaaacattcgtacgacggtactattgacaagtaacaacctatactcggtacactggtcatactccagctgctagtcatactctagctttactaatgtgttacagtatcagcctatactcggttcactggtca

SEQ ID NO: 396688 - DNA, 705 bp, Cannabis indica
aaaaattcctccttaagatcagtagttttttatggtcgagctgcttcaagtgtgcttccaacttgttttcaacttccaaaagtgtcatgttgttgtcaatgttgattgccctgtgtgcaactctagtactgaaactattcaacatgcgttggtggaatgctcggtcgcaaaggctgcttggcatcgtagcatagtggacgttggggctggggctgcaacgttcaccagctggttgttgggaattttcacaaggggcacgagttgaaatggaggaagcatcgatggtgagttgggctatttggcgtgcacggaatgactttgtttggcaaaagaagagttggcttgcttcaaatattgtaacatcggctagaatcttacttgatcaatacaaatttgctcaggaaaggaagggcctttcgttgtctcctttgaatgatgggggcgaaactatgagcgttggattgcacttgtgttaaacaagattaaagttaatgttgatggggctttatttgaacaagagggtcagtttggaatgggctgtgtagctcgagatcatcatggaaccatggtagaagctttccagaaggaaaaggttgggtatgtccaacccgaaattgctgagatcgtaggcatcaaagaagcattgagttagattgcgactcatccctgggacaatgtagtgttagaaacggatagtttggtgtg

SEQ ID NO: 396689 - DNA, 632 bp, Cannabis indica
taccaactcaatataaatatcggattgaaaatatctaattataactcgtccaatgaaaaaatataaaaagtgtaacccgtccaataatttttgtctgtttggttaagttaacccgtttaaaccgatttttattttttattttttttattatggttagtttttttatgttcaaataattgatttgaaaaaaataaatgtatagtacacacatttaaagattaaaagaattatagtttaaattaatattaaaaaataaatataaattgaataaacaataaaatattaaacaacattttttaaaaatagaataaaaaaatatactcatatgtaaattttaaatttcaacttcaatattcaaacgcagtcaaaattatcaattataaattttaaattttaaattaaacactataaaatacaaactttaaatgtaaaatagtttaactattaaacataatttatatattatattatagataattttagcaaaaaatatgtaaattagtttatttgtttctctcgcataattcagtgaacaagtcgccatcaaattgagttccattatcggatattatcttcatgggaattctaaacctacaaacaatgttcttgatgacaaagtcgaggactttctt

SEQ ID NO: 396690 - DNA, 560 bp, Cannabis indica
agttgatcttataaacgagctgatctgttttatggtactttagtgttagggtacatcaagtgcaagtaagtgcctaaatgaaaaccctaaaaagataatgtgcttgagaattaggtgaaaacgataaattcctctcttgatcgattagagattttatttatttttattttcaatggaccgtttactgataaactaatcagtaatagttcattggtataggaatctacatcaaattttgatgagaataataataacaataataaaaagaatataggaaaggctctggtgaaaatggagaggtataaagaatcaatgtgaaaggatttatatatatatagctaaatctaatggatacccaaaagtggaaattgtccttttagataaattatggacaggagaatcaaagtatctaacggggtgcggaatggaatctccttgattcattctaaaaccaaaacgaaccaaaataatagaaaaagaaaaagatcaaaggaaaaagggtatacatgataactaatataaatttatatatatatattttgaaataatgataattgata

SEQ ID NO: 396691 - DNA, 557 bp, Cannabis indica
gtagctggagtctgtactggtctgacattgtgccatttatatgcaattttgtgcgatttttgcatagattattaattttttggtatgtttagcgactttaggcgacattatgcgatgtgtgtgcgatgtatgacatattgggtaggttgtgcgattttaacaatattatgcgattaatgtgcgatttttgtgcgatggtaactgacaggatcttgatttttttggttgttttgttctgtattttttagcgatattaagcgatttatgtgcgatttttctgcgattttatgtcacagtggtaaaatttatgcaattttaggcgatatttgtgcgattattatgcgataaagtctaattaatctttgtaaatgcagatggctcctgaacttattctcccattgtcagagcactttccagggcgtataacatacagagggaacagatactttgcttcaataaaggctaaatttgaagcttttaacttgactcagaaggtgaaggagacgccctttggtgttttttggaatgccagtgaattgaaattcagtggggttatt

SEQ ID NO: 396692 - DNA, 508 bp, Cannabis indica
agaattatatgttgtattccatacaatagtatatatttatacacaaagttaggagtactaattacaaaaaagaaaactactaaatacaaattaccctaatttttacaactaatatacagctaatattccaacactccccctcatgctggagcatagatgttaatcatgcccagcgtgttacaaagataatcaacccgcacctcattcaaagcctttgtaaaaatatctcctatctgttctccggtcttcacatatcctgtggagatcaaaccttgttgaattttctcaataacgaaatgacaatcaatctcaatgtgcttagttcgctcgtggaatacgggatttgaagcaatatgaagatcagattatcacaccacaattttgctagaatagaagtcttaaacccgaattctgtccatattaccttacacataaattgtgtcatagccctatattttgagtcaacactggatataaacacaacattttgtttcttactcttccaaga

SEQ ID NO: 396693 - DNA, 2084 bp, Cannabis indica
ttttatcaactgcctcacttttcctcttaacaacttcgggacctaagaactttctttcacccacttcatcctaaggagttatcccaattgtttcctggtagcagttgtgtacaagaacttgatcagtggaaggtactttacccatgatccttcaaagtttacacatgctcgaagtatgtcttctaaaatctgaatggtcctctcggactgtccatccgtctgagaatgaaatgccgtactgaatttcaactgagtacccgtggctcgatgtaaactctctcagaatcttgatgtgaatttcggatccctatcaaaaacaatggactttggggcaccgtggagatgaactatttctctaacatacaaattaatatactgatcaatggagaaattcgtccaaatgggtagaaagtgcactgactttgtaaacctgtcaactatgacccacacagagtcgtattgtcccatggtcctaggcaatccaaccactaagtccatggcaatgtcttcccatttacattttagaagattcaatggctgcaacagtcttgcaggcctctggtgttcagctttcacttgctaacaagttagacactttgcaacatattcaggaatatcattcttcatgcttggccaccaaaacatggccttgaggtctaggtacatcttcgttgttcccggatgaactgagtaaggagtcgtatgagactcatccatgatctctcttttaatattgtcatccataggcacacaaacacgatttataaattgtagcattcccgtgtcatcgattataaaatcactagtcttcccagccgaaaccctatctcgggatttctctaattgtggatcttgcaattgtgtttctcttattcgctccaaaagagtagattgtagggtaatattagccaattccccacaacgaacttaatttttgctcgggtcatttcatctgccaactgcctggagatttgcttcactgtatttatctgactctgtccttttctactcagggcatcagctacaacgttggccttcccaggatgataaaggatctcatagtcataatctttcaccgccaacatctctgtctcatgtttaggtctttatgggtgaagaagtacttcagactcttatgattagtgtatatctcacatttctcgccatataagtaatgccaccaaatctttagcgcaaaaactactactgcaagttctaggtcgtgagtagggtacctctactcgtactcatttaactgccaagaagcataggctattacctatccagcttgcaaaagaacaatgcccagaccctatctcgaggactgacaataaacaaaaaaaaatttccttatctgaaggaggagttaatactaaagcggtaatcaagcactactttaactctagaaacttttctcacactgatcagtccagaaaaactttaaattatttcgggtcagctccgttaagggtacaacaatttttgaaaaaccctcaacaaactgacgataatacccagctaaacccaaaaaatttctaactattgtagccgattttggtgttggccaatcccgaacagcttcgatcttggccggatcaaccatgatcccatctttatccactatgtgccctatgaaagacacgccagataaccaaaattcacactttttgaacttagcatacaacttgtgaactcataactgttgttgtactaatctaagatgtaactcatgttcctcttctgattcagaatagaccaaaatgttagcaatgaacatgatcacccatctatccaggtaatctttgaacacatgattcataaggtccatgaatgtcactggggcattggtgagtccaaaagacatcactagaaattcataatatccataccgagtacggaacgcagtttttgggacatcatcctctcgaattcttagttgatggtaacctgagcgaatattgatctgaaaaaagaccgtcttctcctttagttaatcaaataggtcattaattcgaggtaaaggatacttcttcttaatagtaagcttgttcaactcccggtaatcaatacacatccgtagtgac

SEQ ID NO: 396694 - DNA, 866 bp, Cannabis indica
gtggaggggtttgtttggaaaaaacatgatatgcaagttcgggctgcctcaagagattgtagcagataatggttcccagttcatcagccagaagttcagaagttttctgtgaacaatggaaaattaaactcttattctcgacaccacgttatccgcaaagcaatgggcaggcagagtcatcaaataaattcatcataaataactttaaaaagcgactcaaaaacgctaaaggaagatgggcccaagaatcgcctggcgtactgtgggccaacctaaccacgccacgtactagtacgcgtgaaaccccgttctcgctagtatacgggatggaagcagttatcccgacggaaacgcaagtgcccacttcgcgatccgagctaagtaacgaagacaactctttcctcagactacaagccactaacaacgtcgaggaaagaagggagtgcgccttgtcccgaatgcagaactactgttccgctgtggcaaagtaatacaataagaaagttaggcccaggaacttcctcccgggagaactagttctaagaaaattttttcagaataccgaagaagcccgagcgaggaagttatccatcaactgggaaggaccgtaccgagtgataagcccgacggggaacggagcgtacagactgtccaccatggacggagccgagatcacaagaagctggaatgcaaggtacctcaaaaaattctatgtataaactaaaagctagggactctaaattccactattactgtcgccgtaccttctcttttaaataatgaaaaaaggggcttcgaaaaaatatcaatcaagtcaaaaacgaaaagaaaagatcttttacaaaaggcaatacaaagacctttta

SEQ ID NO: 396695 - DNA, 566 bp, Cannabis indica
agggtctctatttgttcaattgctgacttggcctacttattggtgagttgttctgctaggtggcactaattttgtccatgtaagcatgccatgtcatcaggataaaattcaggataatatttgccccccaagttcctgtgctgacgtctgtacggatagggactttaccagctatattaatgttgtcggaactgttgtagtctttgttgaataaaagttgatgtgtttcttagccttttgaaacacttttcttggattgtcggatctcattgcagtagagaaataacttctttagttgcctttatgatgtgttggtgaggaaagtaaagaaaagaggcccacatgtactacataagtgacttttaggcggaaaaccctttttccacttctcatttttaaattttcactttctctcactagaaacttgctatagaaaaagctcctccttctctctagatggccgaacccacaagcatcatttttcccaggatttttgtaccgtttcaacgatccaagcttcccaccttcttcttcaacgacttattgtagtgggcaagctttcaatt

SEQ ID NO: 396696 - DNA, 751 bp, Cannabis indica
ttttcatttcctccagagttaccttcaacattagcagcagatggcttgacattgccatttccaatcggttcagcatttcgatttgaaaattttccatacaatttgtggccaggaggatattcgtgcaatctatagcactttgacatgatgtgaccagcaacaccataatggtgacacaccgttttaggcttgaaaggcttgacactgccggcaaattggccagaactcgaatcgcttgtagatttctcaggatcagatggagaaggcaccgattgagaaacattagttagagatctttatctctcctcctagataatagaggcataagctctattaatatttggaagaggatcctgcattagaatttacgatcgagcagcactgtatgattcattcaatcctaccagaaattcaagaacacgatcctcctcttgatgttcttgaaaagttttcaaagctcgacaggtacaggccggttgaggtcgatattcttgaatgagatctcaaagacttttgagacaagtgaagtaattagtgacagtcctggttccttgagccaaggactgtttggttctgatcgcttcgaaaatgcgtggtgcatttttctgattgaatctctcttccagattcgtccatatcgtcgtggcattcttcatgtacatgatgctctctgctatttcactcgacacagcatgaagaatccaatatatcacagtgctgttacatcgatgccatagctcaaaatcatcat

SEQ ID NO: 396697 - DNA, 713 bp, Cannabis indica
taaacgaaaatcaatacatttccattcattccaactaacaaaaaatggcgtttattatattaaaaataaatggaaacatacatgacactttaattaaaaagaatgatcttataaaataaaaacttaacgatctacaatgcacctcttaaaatggatacattaatacacctttattattttagcactcgaaataatttttagtcaaattttttctcatggtcatgtacgttatagttatttaagatatcctgcaaaattttaagaaatttggaaaagtttaacacgccaaaaactacgttcaaacagtgtgttgcacgcgtgactattttattttatacacgtgtaaaatagactatttgaacattgttttcaatattgtaaatgattccaaatttctcaaaattttgtaagttatcttaaatagctataacgtacatgaatataaaaaaaatatagactaaaaaattcttctggatgccgaaacaagtcaagagtgtatcagtacatcccttttaagggggtgcattgtagaatcacccaaaacttaatattccttttacaattttttgaagaaaatttacacaatacatttaaaattggattttttttttagtatttttatggtatttttttttttttttttttgatcttttgtacgagtttagtttttacaaatttttcacctttcttttttctttgctgtccagtagcat

SEQ ID NO: 396698 - DNA, 466 bp, Cannabis indica
tttgatatgccatatatatgtgaattaagtttttaaatcccatatttaatgtttttatttgtttaggtagttttatttgtcactgatgctagaaaagtcgccggagtttgctgcaggtgtcggaaaaatcaccagagtagctgtcggtgccgaaaaagtcgtcggagttgctgccgatgtcggaaaattcatcaaaattggcattgtcgctagaaaaatcattgaaaaataccaagaaactgttcaagaaaccgatttcttgatgaagaaactactttcttggtgattttttcagtgacaatgtcaattatgacgacttttctgacactagtaactactccgacgacttttcacgcaccgacaacaaactttaaaaaagtcaccggaattggcatagtcgccgaaaaagttaccaagaaaaagaaaccagtgtcttaatgaagaaaccactttcttgatgaagaaa

SEQ ID NO: 396699 - DNA, 805 bp, Cannabis indica
tttttgaaggcgaaccaagatcatttcgcttggaggcatgggaatatgatagggatcgaccctaagattatctaccatcacttaaatgttgatccaaactacgcagcgaagagacaaaaaaggaggccccttgatttcgagagacaaggggcactaaaacagaaagttgacaagttgttagttaacaattttatacgtgaggtattttagcccttgtggatatccaatcctattgtcatcccgaaacctaatggaacttggagaacttgtattgatttcttcaatttgaataaggcgtgcccgaaagactattttccacttcccaggatcgaccagttagtggatgcaactactgggtacgggcttatgtcttttatggacgcataatttggatataaccagataaaaatgtatgtccaaaatcaagaacatacaagcttcgtaaccaacatgggactctattgttataaagtcatgtcgttcggaatgaagaacgctggggaaacgtatcaacgactagtaaatgaaatgttcacaaatcaaatagggcaaaacatggaagtttatgtcgacgatatgttggtaaaatcgataaggagtaaggatcatacctccgaccttgcggaatgctttaaaatattacaaaagtataacatgaagttaaacccaaaacaatgttccttcggagtctcctcgggaaagtgtttgggattcatagttaacacgaggggtattgaggcaaatcttaaaaaaatcaagcattaatagacatgtcatccccaacaaagcccaaggaagtacaggc

SEQ ID NO: 396700 - DNA, 720 bp, Cannabis indica
gatctctttggcacgatccggcctggcccgaccacttcttttagcttggcgggtcaggcccggcctgagagaaactagtcgggccggattgggccaatgacccgaataaagcccaattgtcacaggccaaagacccggcccgcaaaaaagtccaaattgtcattcgtatatatacttgttgacccccaaaaattgctaagtgtaatattttgccaaggggagctccgcgcgccctcgcccgcggccctccgcctgcggctgtcgcccagagccccccacccatggcctcgcccgcggccccttgccctagtggtagctcccccatatgcattaacaccctaccgattctcctttccttctttacaccagtagacctactaagaagatatctgacgagataacgatggaacgataagtataaataatggggacaaatttcatttcgcctaagctacaaaatggaaggggcagttttagtataacttaggatttcagatgtgtcatatcacttaggatactatgttgtaatggatgaaagtgacttgacatagggatgttgtgaatattttaccaggatctagatttactaacaagtatgttgaattaacatcctaaatatgaattctctaaaacaatgaaataaacacataagggtttaaaaaaaccttacattgattgtagtggaatatagtgactccttccgttcaagatctctagccc

SEQ ID NO: 396701 - DNA, 756 bp, Cannabis indica
ctaaaagaataacgaaaaatgaattaatcttttcctgaaaatagcaatggctaggtgtccacaccctaggctgccacctaattcctcacttgcccaattactaaaataccccttttgcttaacttaggcaatttaaagtttaggggtaaaatggtcaaaattataaccctgctcaaacctggtattctacttgtttccgataaatattccactaagaaaaaggttctagactcacccatgtgattaaaatagtcatccattgcattttccgctgtcgccaaacaaaaattgtaaaaataacataattcatatataataaaataatactcctagagtttaatgaaatctccggaattaagaaattataactctaatgccaatttctagtaatgggacctacaataattaaattccaaataactataaaaatatcaattattagtgctaattgcctttactaatccatattataaaatgcagtcattacaattatccccctgttaaaaggatttcatcctcgaaatctaacctgaatagctctggatgttgagtcctcatgtcagactctaattcccaggtggcttcctccaccttgttgttcttccagagtaccttgaccaaggctatggtcttgtttcgaagaacctttacctttctatcaagaatctgaactggttgctcttcgtagaacaagtctgactctagttcaagggctttgtaactcaagacatgagttgggtctgaaacatatttcct

SEQ ID NO: 396702 - DNA, 2431 bp, Cannabis indica
ctgaggcgcgcctgcggactctcaatcaggatggctacttaggcgaattggactattacattctcccccacaataatcgtgccacaaaccttgaaagggggatgtgcgcttggtcgagcactcatgcccagcaaggggcattgatgcatttgcattaatactttaaggatgtggcggacttcttcggcctctattcaaccaagttcactcctaagggcattaagtatttgtctgcccttttcgtcctttacgcctcccagaagtgggatacgccttctccccacgaggtcagctggttctttaatttgaaatctatccctaaacaaggcaggtcggggtacttctatttctctcagctagacttcaagtggttgacgggcaccgatgactcggccatcaacgaaattgggcgttttgttgatgagtacttcttggtggatggcacaggcatcacccgtactcggttccagcagattccaacatatcaccgcccttccctcactcttgctcttaggcatagagctcaaaagcttgcccgactaccaagggaagatcagaatatcattcgcttgacctccaaagtataactttgtgaggtacgggctttatccaaaagatttcattcctaagccaatgagagagaggaagaggaaatctggtgctggacgggatgaacgagctcatcaggaaaatgaactcattcaaattaagcgcgaagctaagttgaagggaggtgcaagggccaagcaatatgcacaggagcccttgaatcttgaagatgagactgaggaagagcaggtgactccgctcaaaaggaggaagaaacttccgcccagcccaggcctatcaaacatgcaattcgcattagagagcccatctttcctactcggctgcctcctcccgtgctcgaaaaagggaaagctattatgtctgaaataagaggcatgtcaggtgcgatggactttcgagacttgctcgagcaatcatcttgcatattactccatcctgcttttaagcttcttgacttttatgctttatgtttctgatgtctgtctcctctaaccatgttgttttttgttccatgcagacatgtctcagaagatgctcgatgctctgaggaagaagattagtggaagctccagcgcatctcccccggccaagaagtctaaaagcggtgaggggacctcatctaaggaaaaggtgcctgccggggaggtcatcgatctttctgaggagctaacagttgcaaacccctccactccaaaagttgacaagtcgaaggagtctcgaggagggagttcagacaggtctgaccaactgagaggtgggtctaagctagtgcggacctttactccacctttgtcagtgcttcccgaggccaagaaaggcaaagagatgctctctcattacatgaaccggttggttcctgaggttagtgagcagctggcgggtgctgacaatgactcttctctggagctgctggtgggaggagtcttgaaggagttcacaagggtaagtatttcttgacaattttctttaatcctctttacttggctcaaatactcaagtttttcctctgtgcaggccggtctgaagttggcttacacctactcctgggctaagtctgcttcttctaagaacacggctttgtccaacaccatgagggcggaggtgtacttggccaggaaggatgcttaagacgccagggcagaactcggagctgttcggatggagttgggtgaagccaacaagaagcattttactgcccaagagaaaatagctgagctgactaaggatcttgaagtttcttaccgacttgaggagaccatcaagactttatctgctgaagtgaatagtcttcaagatgagaggctatctcttagagccgtccttcgtcgggtggaggaggagaagaaagttaaggaggaggagcttacgggcaaggtgacgaagctgaaagaaaaatttcatgccttggagatagccggtctcaagctcttctacgacttttggaaggctaatcctcaagcaaacttcgactacttgggagaagctaaggacatgtaccttaagttctgcgcttcctaagtggcttatggtgaaactgaggcggctgcttctacctccggccaaaatggtgatgtgcctcccgttcaaacaacagatgctccagctctcgccagcccagaagacccgaaccaagagcctaagactccagctgtttaaacacttcttcttttatccttttatttttatatatcttattcggccataaggccttttctaagacatcatgaccggccaagcggtctttaaacttggaattctttttcattttatagacaacgggctgactgggcagcttttaatcctggtattacgtgcctttgttatctttaatgaatttcattctctgtttataatcatcatg

SEQ ID NO: 396703 - DNA, 561 bp, Cannabis indica
cgatgtctcgtttaggcgagagtaaaacttattcttattttataaatctcttcattgtttcatattgtaaacactaatctaagttgtcatctttggatgtacaactagaggttgcatttacaaatacttatctgctaagatctaacactattatgtttgtctaataaatgacaatcctttgggattagtcccattaaaaacaacaagctaagttagaccaacaataaagattcaaaaatatactacaattaataacagaaaacaacatacttcaatataaattcatactcattcagaaattatcatgcaaattgcaagtaagaaagacatgtaaaaatacaaaataaacacatcttaaataatgttcaaggttgtcaacaaactgatacaatgtcccgtttaggcgagagtcaaagatatcattcattgaatagagtagtcaactcatctaaaattgataccattctagcaaccttatcttctatcaagactagaatttagcgttgtcccgtttaggcgagagccaatgtaacaccctagctatcttaggcgtattacgtg

SEQ ID NO: 396704 - DNA, 554 bp, Cannabis indica
aatgccatctacttcagtaaaactagaaaataagtaaaatcattggagaaaaaatattacgtacaacaaagtcattgtgtatgctttctagtattgggtgtcttccagcatcaattgccattgggccatcatttatcagcaagtatgattgagttaagaattattccagtcccccattcaaaaaaataaaaataaaaagaagaactattccagccccactctaaaaataaatgagactcattgctatagaacagcaagtaacttgcctgtgaattctggtctagtataacgatcaacaggcttggtagaaattgcatgagcaaaggaattgacaatcatatctaataggtataggacctctgcaagcagtgtgagcacagaaatatcctctcttatggcatctactagtgttgcatatatcatattaccatcaaatttattaatttatagaagcatcaaaaccgttaaagcatactaaaaactagaatcaattagccaggtgtgagaaaaattaaactcatacactactttgtccaaaagtattatttcatcaa

SEQ ID NO: 396705 - DNA, 648 bp, Cannabis indica
tcaacctcccgattccgaggatagaaaatttgaagaacaacctctgcaaaaagtgaacatcgtataaatatcgcaatcatgtcgcacaaaacataacataaatcgcaaaaaaatgaacatagtcatagtaaatcgcacacaaatcgcacaaacatcgcataatatcacacacatagattaatatagttgaatgtcgcaaagatgtcgcacaattgtcgtataaggcacataatggcaacaaataaagtaaaaattgcataaacttaattaatggcgcacgaatgtcgcataaatgtcacacataaacatagataacacttatagcaaaaatagagaaagattcacatactattttatcaaatagtgcagccacatcaggttgcttcacatcgtgtttcgcgactgaatcgggagtgctccagttcaacattcgagggaatcgagtccctttgcactggccatacttcttccccaaaacttgtatggcctcaaatgcccagtattgcagggtaggtgcatatccgtacacattgtacttcgcttctggttgagtaacctttttctccttcttgtgtttctttttcgttttatcgttcttactcgagaccttatccatgtagtttttcctaagctgttgcatattcttag

SEQ ID NO: 396706 - DNA, 456 bp, Cannabis indica
tctctgatcaatacggcacttacgacatgttttatgacagccaggtatattcctaattcttctccgtccagaggttttgagagtacaggaggttttgttagtagtgtttttagctcttaaaaggctttcttgcattcccccgtccatttaaattatttgtttccttgcaggatgttgaagaatggaacacaatttgtaacaccctaactatcataggcgtattacgtgatttttaaacatactgttcagctcgttgataatcaacgaggtttatggaaaacgtgattaattaaaatttttgctttttaattaaacttataaatatttatacaaaatactcgggatcccgattacaaaatcatttacaaaagtttactatctgtacaaaatacttagcactgtgagtcgacagactcagtaagaaaagcataataataaaaatacataaatcccggt

SEQ ID NO: 396707 - DNA, 705 bp, Cannabis indica
gacaagaataagataatatgatgaagtgacattagctcattgggacaaatcatactacaaacacccctattaaattgatgcttatctttccttaattccaaaaatcaaatttctaaaatctatataggagaagcataggataggtccaatattgtcttgttgatattagacatatatcaggccctatatcagacctatcgtgtcataataaaatttaaaattataaggaacatcgggccctatatcggacttatcaggctatcttcttcaacctcaaccccttcaacattaacctaccatcgagcactatattggacctacatcggcctgcattgggctagacaaaaatcacagattacccccccccccccacccacccaaaacacagatatgagcctaaaaacctcaaaaatcacatattctccacaaaaaacacaaatctaaccctaaatctaattgctttaaccctaaatcatgaaaaaaaaaatcacagttaaaaattcatgaaaaaattagggattacctttgacgaagacattatcggcgttgggtggtgtggtcgcaatggtccgtgggtcgtatatgggtcgcgaggtcgaggtggtccgtgagtcgtgtgggtggtccgattgtgtgctcctccttgtgcatgtttacatagagcgagtgagagaagggggaaagagagagagagaggattgttca

SEQ ID NO: 396708 - DNA, 557 bp, Cannabis indica
ctcacgccctaaatatatccaaaatcccatccagtacaacaaaaatagaggctatttgataaagagcaagcagcaagcacgagcattgaaggatgaaattgaaaagtagtgtgcaaataacttcatcattgaagcattctaccctatttgggtttccaatcccgtattgttacccaaaccacacaacaagtggcgagtttacattaatttcactaacctcaacaagtcatgtccaaaggattatttcccacatccaaggatcaaccagcttgtggacaccacaactggtcaggagatcctaagcttaatggacgcatattcaagttacaatcagattaagatgtatctgcctgaccagaaacacacaagtttcctaacaggtgtaggcttatattgctacaaagtgatgcccttcgagctaaaaaaatacaacagcaacctaccaccatctcgtcaataaaatgttcaaggacctaatcagccataccatggatgtaaagaccgcttagtttaatttggaaattaacagttaattatgtttaattatggaaaattat

SEQ ID NO: 396709 - DNA, 539 bp, Cannabis indica
ctgataccatgttagattttgggataaaatggatgaggttccatcttagctatgggaggagtagcccattcatcttatataacataatttatttccacacattaataatgtgagactaattgttaatagtaaataagtggattaatatattatatgtatgtatgtgtgtatataaatattatacacgtatattattattattaacttttaatttaagtgcataataacattttcctttatttattatgaaattccgtattttaatattcccagtttgattatttaattcaatgattaattaaatgcggaataataaaactggtaactgaaaacaagttttctgtagttacagaatgcaactctgtaactccagagaaacccagaaaaacaaacagtgcataaagtaaaaacacacaagattttgtacgtggtttcaacatcctttcagattgtactagtccacggggccacgcccacgagatagattcattagatcggtatcaaaaatacaagtaaattgacttatgcataaatagact

SEQ ID NO: 396710 - DNA, 679 bp, Cannabis indica
tttttttttaaatcaaagttcttcattcaaagaaaaggaggttattaaactagttagatgtggatgttagaatttgagataagatgaatgaggtttcatctcaaaattaattggttatgagaggagtaacccattcattttatttatcataatttattctacacattagcaatatgagactaactcttaatataccctcctcacgtttgggcttggaaagtgtgggtataatcagtgacggatgcacatgtatcaatgtgggggctatagcccccactaacaaaaatattatcttttaaaattttaaatgtaatttttttaatttgatatttatagattaaaatagtagaaaagcccccacaaaattaaataaatataataagaatgattataatataggtataaatatttttcattgataattaagcccccacaaaataaaaattttgggtccgtcactgggtataatgaatgacctttaagaaaccgcaggaccgaacatgacatttgaaagaatcctacaaggctaaatatcaagaaatttgtgggtgtacacgtcgggaaatttgtgaattttgaaacaggtcaaagactttaacactggaaattggcacacaatggaggttcaagtatctgtttggaccggcagtataagtggctctgataccatgttagattt

SEQ ID NO: 396711 - DNA, 590 bp, Cannabis indica
atactcaatacaccacagtatccctatgacacacattaatgattagacatggatataatataatgaacaaattagaaaattattagaacttattcttgatcctgtaattgttccaattagcatgttactgtagtaatagaaatagatatcaatgaagttcttggacatagtatcacaataccttatttgagtgggagaattttaaaattccaagcgcatctttatttggatgacagtagtgatagattactatgttatgatcatgataagaactttagaatttaattaacaaagtaaatttaaccattcatatggatagaaataacttatcagaattttgaggataagataggaaattttgctaagtctattcgaatgatttaggcaaaatacctaatcctcatgaaatgttttatggtatctttaatgattacttaatcttaagcaagtattttacattaatgttaatactagattgctatgttgatgacttagtctagaaggaacttatagtttcagactaagacaatatgtcacaacaagatatccctgaaaaccaatagtaagaggctaagtgtacacttatgtac

SEQ ID NO: 396712 - DNA, 551 bp, Cannabis indica
gaagaagatcaagggtaatctcagcaaagttttagctatgtactttcggcttgacccctttgcatgagaataaaagggtaagtataggatatatggcgggtctggacagacagacccatgacccgcctaagatttttgcttaaatcctactgcttgggtaaattacatgcaatgtagagctgactagatagtcccgtgggtggcattatgctcgtgtgtgtagcagctagataatggggactattttataccacttggtcacgtgttacgcaaaggtttaacctttaaaagtaagggacacgtgtcactcaaagcttgttcctttacaagtagaagtctgtaatgtctgtctggtacaagaatggtggtggagtgtgcactaccatggtcggatgtaggggacaagatctgattctgttaggaaaatcataaccgtcactttggtggcgtggcgtatggaaaaggtcaatatttgtgatacccagtgagggtcgacatccgctttaggtccttcaagtacctgtttggaggtaaatcaaacgatcttccct

SEQ ID NO: 396713 - DNA, 661 bp, Cannabis indica
gttttgaaacctaaaaaataacagcaaacaactaaacctaaagaaaatcgaaaaacacatcaaacataacaacacaataaattattaatagtgaataatacagtaggaaaactacaataaaactatatacaaacaacaaacaaactacaaaacagatacaactatacaaaaataaagagcaaagatctgaaaatcgttttgaaacctaaaaaataacagcaaacaactaaacctaatgaaaatcgaaaacacatcaaacataccattattaaactataaaaaaactaataagaaactacatacgactgattgtacacactaaaaacgaaaacaaaacacagaacctaaaagcacaaaaaaacactgaaaataaagaaaacaaaatcaaatttaaaaaccacacccagaaaagaaccaaataaattgttcaaaaccaacaataaataactaaaaaattaaacaacataaaacgaaatgtgcaaatgaaaccctaaaattacacaaagcagaatgaacaaaaaaacgccaaaatctggggaaagtgtaaatgttggaaaagggggaaacgataatgaaacttaaaaccaacctgagttcgatcttcagcagaggcaagagattttttcccagaaatttctggaaccgtgtgctcctccacgtt

SEQ ID NO: 396714 - DNA, 572 bp, Cannabis indica
aaattattatttttaatatttatgtaataaaattaattataatcatatgtataataattattaattagaaatcaaacattattattaagaaatcaaatattaatattaatttgtccattacaatataaactattatcttaaataaaattagaaaattatcttcaaataaattttaaaacataaaaagtgacataattaaataacctgattatcatttttcaaatcagtaaattctcgaaattcatctgcattcgagctaagtcttgaaccgtcgggattatcacgagattgaagagctggtggggtagggtaataaggttgtccagtctgcagtgtaggtaagatctccacaaattgtcgagtctgcgggcgaaccaaagtaggatgttgttgttgctgactctgcgcactaaaaatctaaccatacataggctgttgtggagatcctcccatttgaccatacacaggttgttgctgcaacaatgacccaaattgaccatacacatgttggtgttgggatgacccaaattgaccatacatagggttagatccagcattgagtttgtggtagg

SEQ ID NO: 396715 - DNA, 723 bp, Cannabis indica
aaattagggccagacccaggaccaatgaaccagaatagaacatgggacccgaaactcggacccacactaggactgagacccaaactcggacccgaaccgaaactggcacatagactctgactaggattagagaccaaaactcgaaccagaacacgaacttggacccagactgggacctaggacctaaatatagatgggggacctagatccgagaatcgggcccccaaaccaggactaggtattgggcattggaacttagacgggatttgggacccgaccctatacccaaacctagacctaggaccaaccttgagatccgagactcgatgcttaaacccgacctgtagtcgttgtctatatataggacttagaccaaaacccaaacccaaactcgaactcaaaccaggacccagacacatacgaagacccatacccacactcatgaacaaaaaccgaagcttgaactggaaccgaacaatgaccgtgaccaggacctagacccaaaccttgaactggacctaacctcggaccctaactgagactgaaacccggacctgaacctcgacctggactaaaattaggttccgaacccaaactcggtcccaaactcaacctgaacacgtagtccgtgacttgaaactggaatcgaaagcacggatcaagacccaagaacaggtcctagagaaagacccaaaactataaccggaccaaaacccggactca

SEQ ID NO: 396716 - DNA, 511 bp, Cannabis indica
ttagttattaatattcttttatacgtgggaattaggcttactatcgattttattttaatattttttttatttcttttttttttagtaaaagtcaaatgtcaaaatgtatcgttaaatttaacagagtaagaacgttaaatttagcagaataagaaaaaaaaaataactattaaaccaaaaattaaccttaaataatcaattttaatatataaaaaatatatatttttgagatatatatattttaaactttatatctttatatattaaaagtgtctatctaacgacatttttggtttaacagaatatactttaaaaataaaagaatattctgttaaatttaacgatgttggtaggtttgatcctcacattaactttcaaaaatatataaataattaaacccaaaaaatattaatattaatattgttacacgattagcttaaaggttacacgatttttttttttaaactcaaaaaattaaaaaatcttttttaaacgtttaaacccaataatt

SEQ ID NO: 396717 - DNA, 633 bp, Cannabis indica
aaaaaaataaataaagtgtaattactaataaaactagttatgtttccgttttagttatatttcaaagatatacattttaatttattgtagaattaattgcttggatgtagtgtcgtaacaacttatattttactcatattttattgaaatttactgaacgtgcgtaacattaaagaatatatagtttaaattttaacttttatatgatgtggtgccttcgaatttatgtttttacacgagtttttaaaaggtaaagtataactattaataaaattagggatattgacggctaaaccacatgaactttacggtttgtaacacttaaccacaaaaattaaatttttggcggctaaactacctaaatcctggttctgttttgctctgcacacctccgtctaaaaatcacagttaagtgccacggtggactgtccacgtgtacacacttgtacacgtggcaagtttttagtggtccacgtaatattaatttaaaaaataattataaatattaaaaaaaattaaaaaatcagaaaaaaaaattaaaaatattttttttttacttttttttttcttttcttttttctttttttttttttttttttttttttcttcttttttcttcttcgtttttctaca

SEQ ID NO: 396718 - DNA, 561 bp, Cannabis indica
aaaacacaagtttgaagtcagaaacacttacttatggaagctacagtcggggatttgattgagacatctaagccttgcctaaaagctgttgtgatatcttgcacacgcaactgcacatattgacactcacttctcagatctcgcatcaaaatcatagacagttaattagtgatcaagtaatttaaagtagttaagcacaaataaaatataatacatagaaattgggggaaaaataaatcatattaataccataaagcaatatcaaacaatatccgtctagccctaattaagtgttttgctactcatatttatgaaagaaaaatcacacatattaactttaagaaaatagaagaaaatagagaagaaaagaatgttgaaagccctctgaagaattccatcagtattgcagttaatctcttaaattcgtgctctatattctgctgtttatttccctcttaattgcttcccccaaaactattgaagtccacttcttttatagccaaaaaatgataaaataaaataaaatttgctgaagaaaaaaacctattctccttaggatta

SEQ ID NO: 396719 - DNA, 600 bp, Cannabis indica
atgatggctcttatacacaggtagctcactttggctgcttcatgggatgacaactgacctacaaatcaacatgcgtgtttctagcgtgctttgccctcactcacacacttcttggaaaaacttcttagaaggtcacccatcttgaaattaccccaggtcaagcacgcttaaccgtagagttctttcgtgatgggctaccaaaaatcaatatgtaccttgttgatagaggtagtaccaatcaatccatttaattccgtttcaattgtgtagttccatacctaaacagtctcaaaatcatcccacttgaccttccccaggttgtgtgggattgcacagcttacctggtatttccctttatggatcacgagactaatgactgtcataagatccgaggtccgagttcggggtctgagtttgggtttagggtttgggtctgaggttcgagtccaaggtctgggtctgagttcgagtccaggtctaggtccaggatgtgggtccgggtatgtaagcaaaaatataaaaaagaatatgttagacaaaaaaaaataaaaaatatttttgaaaaaaaaacacaacattttgatattttctaatttttta

SEQ ID NO: 396720 - DNA, 853 bp, Cannabis indica
tgtgaatcactacagatttcgatatgttcggcttttatctctcgggctaggtttaggccagcgatcaaagcttcatattcggcttcgttattggatgctttaaatccaaactttattgcagcgtgtaggtgttgcccccaggtgtgacaagggagattcctgcaccggatagttgatctgtagccgactcgtccacatgtagtttccaagttaggttgtcttcactattacttggctgaggtatttgtactagctcggggttgcctttcgatatgcttttttctttggctgtgcattctactacaaagttggctaaggcctgacctttgattactgttcggggttggaaagtaatttcatactgacctagttctactgcccactcgagtaaccgtccagaagcgtccaagttttacaatatttggcgtaacggttgattagtgtacacccgaataggatgagcttgaaaataggtccttaactttcttgttgctagaatcaggcagtaagtgagtttctctatcaatgggtaccgaccttcggcctcaatgagtcttttactaatgtaatagaccgggtgttgtattttgttttcctctctgatcagcacggcactcacagcatgctccgtgacagccaagtatatcccaagttcttctctgtccagaggtttcgagagtacgggaggctttgcgagtttcacttttagctcttgaaaagctttttcacattgatctatccactcaaattgcttatttcctcgcaggatgttgaagaatggaacagacttgtctgttgattttgaacaaatctgctgagtgcggtgatcagaccagtcaaactttgtacttcc

SEQ ID NO: 396721 - DNA, 686 bp, Cannabis indica
ctttaattaatattaattttatttaattttaatataatatgaattaatatttttttaagagaaaaacctcactaaaaaaactgctacttttagtgacaattttttagtcacaacataaattttttgtgactaaatgtgacttttagtcacaacaaaacttacttgtgactaaaacataatatttagatacaagttgtcactaatttacttttagtcacaacaagtattgtgactagaaacacatttagtcacaacaaattataatttttgtgactaatacatttagccacgaaccttttagtcacaacataagaataataatttataattggtcacaacttttttacttttaagttgtgactaaaagtaaaaaatttcgtagtgcctataggatttttttttatctctgcttagttatattttccatgcctaaatttgaaggttggtcttttctttctttcttccttctttttttttttttttttttttttttcatgtattgtgttcgcatcacaatagctactacatagtaatcttatggtttaaagctaatatatttatatataaggtggtgacttgtgataatttaaatgatatatgttcaatattttctttgtttgattttaagtcctgtatttatttatataaaatatattattcttggcctgactattgtatatttgaac

SEQ ID NO: 396722 - DNA, 521 bp, Cannabis indica
ttagaaacatggcaacactatttttggcccaaagaatttgtgatacacacagatcatgaatcccttaaacatttgaaggggcaacacaagctcaataggagacatgcacgataagttgagtacattgaaacatttccatatgtcattcggtataaacatggtaaggagaatgtgcatgttgatgccctttcttgcaggtatgccttaatctctactcttgatgctaaattacttggttttgaacatattaggaactttatcctgatgaccatgattttggggagatttatggagcttgtgaaaaatcttgtgaaggtaagttttataggcatgagggtttcttgtttagggagcatacgttgtgtgtgcctaattgttctttacgagatttattagttcgggaatcccatgaaggagggcttatgggacatttatgacttgctaaaaccttagttatattacaagaagacttcttttggccccacgtgaacagagatgttgagcgaatttgtggtagatgt

SEQ ID NO: 396723 - DNA, 1338 bp, Cannabis indica
atcagcaacttgatcatccgtgctgatttgtcgcatcttcattttttcttgaagtactttctctttgagaaaatggtaatgcaccttcacatgctttgttcgagcatgaaatattggattctctgctagacgaatagcagactgattaccacaataaagtggcactgcagaatctgtgaatttgtgtaaatccttcattagttgcatcaaccacgtactttcttaagccgccattgctgccgctctatactctacttctgtggttgacaaagacactgttggttgccttttgctacaccaagacactgctccagatccaagtttgaatacatacccaacagttgatcgttcggtatcgtgatctccagcataatcagcatcgcagtagccaatgatcttaacctcatcatctttcttataaaatagaccataattaatggtatctttgacatacctcagtattcttcgtactacttccaaatgtgacttctttggttgctgcatatatcgagttactactccaactacataagaaatgtctggtcgacttaatgtaaggtagattagactccccaccagctgctgatacattgctccatcttgcaagtcctttctagcatgagcacatagcttagcattagcttccataggtgttgagataagcttgcacttgagcattccaaatctttgcagaaagtctttaacatacttttgctgatagagaaataaaccttccttaattcggtcagcttctaatctgagggaatgtttcaattctcccagctccttcatttgaaagcgcactaataggttctcctttgtttgacaaatttttgcgtcatcatttccagtgataatgagatcatcgacatataccagaataattgcgatctttgcttcctttactttgatgaataagcttgaatctacatgtgccatgaaatatttgttttctactaaaaactcagcaatctttccataccatgcttgtggagcttgctttaatccatacagtgcctttttcagtttgcaaacatagtcaagatgtgttctatcctcaaaccctcttggttgcaccatgtatatctctctatccagttctccatgtagaaaggcattcttcacatccatctgccatagcctccagtctttactagctgcaagtgctaacagaacccgcactgttgtaattttagcgactgggctaaatgtctcgcataatctagcccatattgttgagagaatcctcgagcaactaaccgagccttgtatctctcaattgaaccatcaggacgagtttttaccttataaatccatttgcacgaaatgggtttcact

SEQ ID NO: 396724 - DNA, 797 bp, Cannabis indica
agcaaactctggtgactttttcgtatcagtgacaaataaacattcctaaacaaataaaaacattaaatatgagattttaaaaccaaattacatatatatgacatatcaaataccataaaaagccctaaaaataaaaaaaaataccatataaattggttaaactttaatgtgccatatttatcataagaatctttaaaatcctatagtaggtgtaatttcttctttttagaatgcaattcagcccaacaaaggagcccagctcgtagcccagctggcccatttttcttcaccaaaagacagcctcgccacgaggcgagctgtcattcgcgcgcagcagcacgggccccatgaggaacaggcgtcaggcgcccttgtcccctctgcttcctccacgcgcgcgtggcatgcaccggcccatgtggaccatacatttggcccactgcccagccccgagagtggggcttctctctctcagcactccattagccaaaatggcttcagccactttccacgtggcgttctctcgtctcaccacgtgttcacatgcaaccaatgagagggtgacacgtggtagatccgaattaagttattttgattgtaaaaatatccacatgcaatttgtaataagtttaattgcgcattagtctttttacccttctataaatagaagcttaggtttttagaattcagtatagttccagagtttcagatagaaaaatccagagaaaatgctctaagcgctcggtgttagtttactacttttcttagttaattttcttatgggtttctaagttccc

SEQ ID NO: 396725 - DNA, 501 bp, Cannabis indica
gggttgtttgttgctaagtatgctgagttttttatccacggtgcgattgatttacttccaaatccattagatgtgaagttctttagaaacaagcttgctgtggatctgtatgttcatgctaagaagaaggagatcaatgggtacgagtctgaatctgagtttccagggaggattggaagaagtggacagaaatgaaggcttaggtttagaagtggacagattggaaaatgcatagtaacttttttggattgtttgtaaatagttacaatatagtaactcttttggatatatttagtacctttttgtatttctaagactaagtacgatttgctgttgttattttttgccttataatggatattggcaaagtattatgttggatatatattttggatttttagtgtgatatttttgttgaagtttataatgttttgttgtatgtatgttggttttttttttttaaagattgatattattgaattatttataaaaaggtgattc

SEQ ID NO: 396726 - DNA, 657 bp, Cannabis indica
taagcaagtcagttacagaggtcaaaaaaatatagtaacacaaaacattttatatgcttgtaacttcgacatgttctttacttttgtatctactggttaggagtgtattgcaaatgatttcaagatgtttatagatgcaattacaacacttgaatataagtttccacaacctaaagaaagtatttgtaaccaaaattaaattattattttattatttagtgacggtacttatagaaaactaattcttttgtaggtgaatactatattttagattctagattttcatgtacaaaaggttttttctcatcatatcgcggtgaaagataccatttacaagaatataataatggacgtaatggaccacgtgatatgaaagaactattcaattatggacattcttcacttagaaatgtcattgaatgacattttggtgtgttgaaagttcattttcctatattgaagatgatgctaccttacaaattgagtcgacaaactttgatagtaattgcttgttatactctttataattttattcgacaacgcacccaatatgatcatatatttagagagttagaagaaaaaaacttaagagtgttagagattttattacaatggaagaaaatcaagatattacaactctattgtaatacaatacaa

SEQ ID NO: 396727 - DNA, 1052 bp, Cannabis indica
attattaatttttaatattttgaattttgaaattaaaattggttattttatatttaaattattgttagatttaaaaattttattaattttttaaaacttacagattatttaattataagattagatattttaatactggttatattttaaattaaatgatattattatctttttaattttaaatattatattaaaattatcttatatgataaaattaataataataaatttgaaatgaacctagatattttcatagatattctaaccataatatttttaaattcataaattggttattttgtgatattatttattaattataaatcataagttaaaagaataatatttattataatattatatcattttacttatcatatatttataaataatattacatatatttaaataacttagatatttttgttaaaatttaaaaaaaggcttgatatgagatattttgacatataattgagaaaattatcatttatttattattttattcttaaaataataattgcctaatcatatcaattttaaaatcggtttttttgattattttaattttttttaaattataacattagaaaaaaaatatgaaaaatatctcgttggttatttcatatcatttatcttattagctatttaatttattgggataaaataattcaaataaacctagatattttaaagctagtttaaattttgaaattttgaaaagatattttaggtcgtttcaacaaccataaatttttaaaattagttgattatttaaatgataatttaattatataattaataaatatgtgaattcacatttgttacttgaatgtttgttttaaatgtttaattcaaaacttttttttttaaacaaacctattacttatttgatttaaattgctaggattaatggtaacgcaaattttcgttaaccaaatttgagcctcacgaatatgattcaacacaaaaaaaaaaatagaaaaatatgaacaccgaatttttacgtggttttgcagttaaaattgtatgtagtccacaagttaatcttattc

SEQ ID NO: 396728 - DNA, 606 bp, Cannabis indica
atagatgaacatgaaaacacaaagctatggcaaaaaacattgcctctaatggaggctttcccactttatttatagacaattcaatttagttacaatagcagtaggtgtaacagaattagttagaaaagaatacaactaacacagtgtaaactaactttaactaacttgtctaaactaactgtggttatcattcccctcaaaaaggggtggataccactttgagtttgctgtgtagataattgaacttttctttgggaagacacttggtaaagatatatgcaacttgatcttgagtgggaacatatcgtacatcgagctctttgttcggtatttggtagataagtcctagatactttattccttgttgtttttgaagttttaagcttggttcacttttgtgatttttgagaatttggaggtttagttttttttgaggttgaattgtgttagaaactgttttaaagcttgattttagttgtttatggcttatttttggaagtagtagtagttgtagcagattagaggaagtttgggttctgtgaactcaagctttgctcatccatggtgaatttcattgcatgttgttttagatgcttttgagttgtg

SEQ ID NO: 396729 - DNA, 770 bp, Cannabis indica
aaaaaaaaaaaaaaatttaacctaattaaattgaattcatctaatctaatttaattataaaaattgaatattggattggatgttaaaaattgaattataattagattaaattgtttattaaatgtcaatcttaaaatttaattaaaaatcaattaaatccaattacatttattatctataaccaaaaaataattcatataacaaaaaatattaaaaattaaaatatgtattaattattattttttagtttttactaattttttttaatatttttaaattaatattaaaatttaggtgtgtaattagatatccaattaaaaaattgatacaatctaattagtaaatggattggattagattggattttaaagtctaattggatttgataagatgataattttctaaattcaattacttattggattggatcggatcggatgaggaaaaaaatattagattggatcggatccccagccttaataactacactctaaaatttataaaaattaagctaaaaataattttcaaaaatcactcttaatatttttctaattttttttctcacattattttgtgttagtttcaatacttattttaattttattttcataatatttttaaatcaagtataaattttcttattttattttaattttttgttatcatgtttaaaatataatttatttttgttttagatgtatattttttaagaatataaattggaagaaactaattaaaaaactaatataattaaatatatattttatgta

SEQ ID NO: 396730 - DNA, 881 bp, Cannabis indica
ctaagcttcatgaacttttttgctctatctcgagaaaattttgacttcttgagttctgacttttcctacaaacataatcgttctttaatctgttgagtactcatggtcggcatatttgcttgtttatcgctcgatattccgaccaaacactcatcttctgcgttgtcttttgtagatgaactcaggtgagtcttgggaaaacggacatcgaatcgaccaggacctgcttcaacttctgcacgaggatcaccctcgtctttgttctagtccaccttcctctagcgaagggcattcttcaaaccctgtacccagccatagaatgatggctcgtacaaagaaaactacgcgtctggctgacgcgtctaaccctcaactggctcggcacaccactttgctcagcgccgaacaggatccagccgtcgagatggaagaggatcatgaaggggacgctgaggtccaggagattgaggggcaggacgatgtacgtcctggcagttccttcgaggacgaggaggaggaggcagaggttgcacccccaaactatggggagtacaacgaggctagggagccagtcgatgctgacggagacgtcctggttgagggtgtggactacgtcagtgaggagcttgctgcggggtcctcacaaaacggcagggtgccttgggcacaaggtgggtaagccctccgtccaagattacggaggtgcgcttttgaactcttgaccagggcggatacctaggcgagctggactgctacattcccgcccacgacaatcgtgccacaaaccctgaaagggggatgtgcgcttggtcgggtgcccatggttagcaaggagcattaatgcccttgcatcaatacttcaaggatgtggcggacttctt

SEQ ID NO: 396731 - DNA, 616 bp, Cannabis indica
agagagaaggaaagagagaaagacaggttttgtttttcttttattttccaaataatttctaacttttgaaataaaaataaaaaatgggcataattcacatatattcagcaaaattaacatcaattaacatttaatttcaaatttctaagttcactaaaggacaaaacataaatggggaaaaatgaccattttgccccttcacactaaaatagcataaagagcactaaaggggtattttgggaaattctaaattctcggccaatcccgacattcccaatgtctaaataaccgtcccaatatactaacatactaagttgtgattttactgagccaaagaccgagttgcatgttaccgggcaccgaaaatgcaaaattatgaaaatcactaaatgacataaaatgcatttcagaattcaacaataacagtataaataattttccataattaaacatgattaactgctaatttccaaattaaactaagcggtccttacaaaccataaggctatttttgagaaaaaatcaaatttttaagttcaaaggctactaatatctaaaactaattttaattaataaaaaattaataaaaattagtttaattctgataattagattt

SEQ ID NO: 396732 - DNA, 974 bp, Cannabis indica
aaaaaaaaaaaaaaagccaataaattaacaataaaggatgtcaaatgatatctataaatatatattgacatattagccaaagaagccaaattaattatagtatggactttgaatgctctaaagtgcttgtgccatgtctgcaagaattggcagaagatcccaatttggtgacagttccacaaagatacattcgatatgatgatgaaactcaaattcaaaccaattcttctgtaatttcttctgatgaaattccagttatcaactttcaaaacttattgcttatgtctgaatctgataactcagaattatatgaatctgaactcaataagctccacttagcatgcaaggatttgggcgttttcctaggtatatatatatatatatatatatatatataatatgaaaataaatcatatattcatgcatttctttcgtgtttttgatatttgaataattttaattgtagttttttaacatatcataaaaattcaaatttgtaaaataaattatttgaactcgcttttctatgttataaattattttaactataattatatatattgaattattataattttattttaaataataataatttgcagttggtaaaccatggcgtaagtaattgtttggtggagaagataaaggaaggggtagaagaattgtacaaactaccaatagaggagaagaggaagaagctatggcggaatccgggagagaaagaagggtttggagactctggtgttttatccgatgaacaagttcttgattggaatgatgagttttttctctttactctacctgttgccttgaggaaccctcacttatttccaaaccttcctcttcctttaaggtttagttttttttcacttcatccttttttgtttgtttaattctttaataattacggtggcgtttggtaatacttttttaatcagttttctgtttttaaaagtagaaaagtgaaaatattt

SEQ ID NO: 396733 - DNA, 1202 bp, Cannabis indica
ctattgttatatttgttatccatttatatatgctactttagtttttgtataatttgaataatatagatcgatgataattctaagaaatgaaaatagtggagaacctacttctaattttgcaatatctttataaacttacttttgcaaatggatacaaagaggagcgagaagatattgctatataatattatctttaaaagctgcaaaactaatttttaacctacatacatgaaaaatatttatatattgatgcaaaataaatttaaaacatagaaatttaatatatatatatatatataataacagtatattgtataacagtatatgtatattgtataatgtcttcattattgtaaattgtttcattcaaaaaatacatgatttttagaaaataataatagtatattgtataatataccactcattcagtactaatattttgtaatcacaataataataaaaataaaaatttataagaccgcgcgaagcgcggcttagttgcctagtaattaaataaaattaatgaacaacattaaacaaggaaaaaagaaagaaaaaacaataactgaccaacataggtagtccgagttacaattcgaagaaacttggttggcctaaattttatctttagaaccaagaatgactacaacatgtcaaacacagacacagtataaatctaaagaggaagttatatatatatatatatatatatagtagtaattaagtaaagactaattaagattattgtcttctgaactttgacatgtactaaatcatgcccttgaacttttaatgtcgttaaaagtactccttgaattattgagaatttgagattgttagatttaagaacttttgtccaattttaagtaaaaaaaaaaacctaacatagatgaaagtttaggagcatgatttagtacatgtcaatgtttgagggacatgatttggtaaatatcaaagtttggggaacaaatcactgaaatagtaaaattgaatgaaattagacaaaagtccttaaatctaacaatctcaatagttcagggagaatttttaacggccagaaaagttcaaggagcatgatttgatacatgttaaaatttagagagtaaaaatcccatttagccttaagtaaatgttagataattatacacaatatatactataagaagggaattttgattttatatgcttaaataattaaaaaa

SEQ ID NO: 396734 - DNA, 1074 bp, Cannabis indica
cgaatggggaatcccacgatcaaccgataatcctagagcatcaaaaggaacaaagaaaaaatcctccttccatcgcttagcttctttaacgccaagaatcagatggtcactaccgtttctaacggtaagttggtacctacctttatcatgtggatgctctttcaagtagtagacgtgcaagacttcagcaaccgtaaatgtaatgttatgcctttcggtcaacacttctatggccataagaacacgccaagcatttggcattagctgactgggagagataccatgataggatcatagttcagacatcaatctagggagaggaaatccgaaaccatacttgaatggaagcttgtacaaacacgtccaacccggtatcttccagtcagcccgttccccgctagccggagcgtacaaactaatgtgtatgggaatattataacgacgatgaatttttggctagtcattcaaggttattactgatctaggattaacacccaaaagtatatcgcccgactcactatcactcctagggcgatcaatgtctactccaaccctagacgcacagcgatagacatccgtatcctcacacgcgtcatccaacacataacctaccaccccagtaggaatatttgaaggatcattatatgaacttgtcgtcttattagacgaagtggtacaactaccatgattactgatagacataacaaaaaacccacctaaaacaaagatactggactaagagcgagttcaccgaaaacataatcatatagaaagaaaaacaacggctagacagaacaaaatgatatgtatatatacatatatcaaagctcaaggtggccaaaaataactagacataaaaatggacgccataataatgctcaccaattggacatacgtgttctaaatacaccaccagttatggtcctctaattaactaaaggaagacaatattctagctagccagacagtcattattcaaatcacacttactactatgcaaaaacaaacactaaaaatgtagatttttactacccacgaagatcaaacacaaacacaaacatacaacaaggaaaa

SEQ ID NO: 396735 - DNA, 676 bp, Cannabis indica
ctcttttaattcttctataggtccaacattgatgcttgggtccccaagtcgaggatccacatcttcatccctgactgggaagttccctacttgggatgtttttcccttgtctgtgctctagctggaggatacttccttcttaaacttggccactgcaaggttataacattcccgtgtagacttctggtttcctctcagacaccctaccccattctttattgggaacttcaggcacgagtaaaataattatgtgacagcctttaagtcatacaaggccggcaggccaagccttgcgttaaaagctgaagaaacatcctatattaggaactatgccatgatagtcatgctcgtcggcgcttgtccaacagtgaggggtagatgaatttgtcttagaggtgcaactccttgaccagagaaaccatagacaggctagaggcatgggcttagatccttgagttcgagtcccatcttttcgtaagcattcttgaacaaaatgttggaagaggctccattatcgatcatggttctggccaccattttattggctatctggacttccacgaccagcgcgtcgttgtgcggaaatctaattttgacatcgtcttcatcgttgaaggttatggtcggctctcctgctcgtggaactttggcttcgtttcttccacggccaggatga

SEQ ID NO: 396736 - DNA, 1093 bp, Cannabis indica
ttttttacttaaatatattttttctgtttaattaaatacttaaaaaataaaaattaatttactagaaataacatacatcatttatttcattaagctaagtgtgtttctctaaaattaatattaaaataatctaaatgaaaaattaatttcatttattttaaaaattaattatgttactaatcaatttttaatttgttaaactaatataataagtcttatataattatttatataaggtaaatggggtctttaccaaatggggtggttaatgtgaggaagaattaggttcagtatgtggtacccattactagtatggccccctaactctcacacaaggtccaaaaaagaagaatttaacctttaagtaaataatttattagttaaataagcctaatactaactaagcctaaatgaaactatcaaagtgatcattttatttttaggaacttagtcaaattatacatccaaaaataaatggtttcctatatgtatctaagaacaataacaaatatataggctcacataagcattgatcaggatgtgccctaccatgttactaggtttaacacaaatgaaagaaaattataaaattacctgcaaaaactatttatttgatttattgataattaactatggttgatttggatcattggatccatcaataagttactcatagtcatttaaattaaataaataataggtctgcttttaaaaaataaaatttaaataaacaaacagacgaatatgcaacaaataagaaaaaatggttaaaagattttattcaatttatatttaataaaaatataaaataatacaccctaatttcaaaaatttagggttgtcacaaccctaaattactattgaaaacaaattaactaactatcaaaatttatgttatttaaacaaaatgtattttaataaagtaaatatatagtcatttatctaatcctataatataaattaataaaatatattaagaaataaaacaattttgaaagttgatatttattgttagaaattgaaaaaacctagattatttgttgaatttattataatttttgaaatttcgtattttaatattcccagtttaatt

SEQ ID NO: 396737 - DNA, 815 bp, Cannabis indica
caatgttaaattattaacatatataatatttatgcattttaattttttttattcattttttttttttgaaataaatgggtttcccttgggtattacctgccccaattgggattcctcgccttgcctccgataaggaatatgtggggatggaggcaagaatgtgtattaaaatagttaacgatgatgggacggggaatcattctctacttattatttacctaatttccatccctagtgctgaagtaggggtgcggctagatgcttgttgcagtgtcgtgtggtgtggaatattaaagcattttttttagtaaaaaaaaactttaaaataattttcgtaaaacattagtcaaaaacgtctcgtactttgaaaaactacaaaatgtattttctattcttatttctcaatacaattttgaaagacaaaaaataatgtaaaaacacactccgctgatataatttttaatttctaactaaactattttttgttcaatctgatttatctggtactgtgggaatagtccgtgctgattaatcgttatcattttctaacatctattagctatgttaaattagaaaaaaattatttaatctattattatcctttcttatgttctaatatctcttggcagataaaaaaaaaaacttctgaatagaatgaatattgaagaattgaagacagagtaagatgaattaagtagtgttttatttagttgttcaagctaaaggtaaaaggtataattttaattttaggataaatactattttggaccctttattttgcaaaagttaccaattaaaccctgtgttttgttaaa

SEQ ID NO: 396738 - DNA, 584 bp, Cannabis indica
gaaatggtcacaaggccacatgcagtgtgcttaccaaaatgggaagaatatgcatcaacaaataatctttcaattaccaagcccaaaagagaaaagaaggttcaaaaagtcacattgcctaatgggaaaagagcatatcgtttatgatggtatgcggggtcggctatcatgtctggccccaccattgctatggtgaaagaggtcgagaataagttcactctaccccatccacaagttaataatcagataaaggatgtggaagacaggtcaatatcactcaagctacaagaagagccaaaatccacgtctaacaaattggaagaaattaatttatcagaaaatcccgaagagaaaaaacttgtgttcattttgttgacttacctgtagctatacgagctgaattgatggagctattatacaaatatcgaaatgtgtttgcttggacatacaaaggtatgccatggttagatcctaaactagtcactcacaaaagcacactacaggaagcgaaactagtaaagcaaacctcaaggaatcacaagccagaggtacaacttcaaatcaaggcagaaattgaaaaatta

SEQ ID NO: 396739 - DNA, 975 bp, Cannabis indica
ggacacctcatagaagctaaaacttgggattttgaaggcaatcttgaagcttcgacagttgaggcattaagcatcaaagaggctctcagctggattaaaagcaagaattggcaaaatgttgagatcgaatctgatagtatgatctctgtccaaggcatccgtggaaatcaagtgataagctctcttttcgggttaatcttacatgattgccaaattttactttcctctttgccttctgtgagtttacattttattagacgatcagcaaatcgagttgcccatgttgttgcacggcactctcgctttctctctggtcgtagtatttttgagtataatgtatggtctgatcttgaatctcttttgtactctgaatactaatatttcaatgaagtagctatttcattatacaaaaaaaaaaaaaaaaaagttagcccccctaacttacaaaaaaaataaagtacgtccctcctcaatttaaatcttgggtctgccactaaatatatatatagaagaagtttcaatgattacatctgttatattcgaaattcggctggaggacacgtgtcaagattaagggaatgagaatcggtgtaatatctttttatggaataaatcattaattacgttattatcagagtatatttgtaacccgctgactgtaagatcttaagcgaggaatcaatgtacaaactgacatagtgtattagtgagaaaccatatgttgctaaatataaatagcgagacactggagaaagtgacacttaccaactataaaagtccttagcttgcaatgaacaaactaagtgtaaaagtcagatcggctcgaagaacaagtaagcgagtcagaagacttctttataaatagtcgcgatcgacacaagacatacattgtcgacctcggaaggaagaatggccccaactcgctattgagatcactataattaagtttatatcgagacatctccagattcaaca

SEQ ID NO: 396740 - DNA, 510 bp, Cannabis indica
aaataccatttagaccattattagtttatgtatataatatatatgtaaagcttttaatatatattattattttaataatataaatataaaataaagtaatagttaataaactattctctctcatctctgttttgttcgtgaatgaagtacgggattggcagaaattaagactgtactttggttatcacaccatattgtaggagttgggagcttagagagaccaacttcagctaataaggattgaagccatacgagttcagctgtggcatttgctaagctcctttattcggcttctgtactagatctggagacagctttctgtttcttggaactccatgagacaagattagaaccaagaaataagcagaaaccagaagtggaccgccgatcatcaggatcggatgcccaaaccgcatcacaaaaactagtaagagtgagattggagcaaggctgaatgtgcaaactgtagtccaaagtccctttgagatacctaagaatctttttgacaac

SEQ ID NO: 396741 - DNA, 528 bp, Cannabis indica
agagaggctcattggctaaggaggagttcattggccaaggagaagcacattagccaaagaggagcattttgggcgcgctaagctcccgactccgttaggtgctaaggtgcaaagagctcctcagctgccaaattatctcaatgacctgatgggcacgaaccgacccaattggctctcctcatgtacccatgaccatccgggtccgctaaatgcgagagacgggtgcttttaaagctgttccaaaaatatagtcaaaaaatgataagtgaagagatatttattttttaaataattattttaatattattattttgtatcttgaacctaacccaactataattacgggaatgtatccctatgtttaagggattttaaatcctatatgaatgtctatataaggggcgaaatcacttgtaaaaggaccctgaaattgatactcacgagatcatactcttgagctcccactctcaaattctaaaaactcacttgaggagtgaactcttggagaacataaatctagagaactct

SEQ ID NO: 396742 - DNA, 721 bp, Cannabis indica
catttcgggctgctgtccttgcacctacactcaaaccgagcctcaaaattataatgtggcttcccaatttaaacattggcttgaagcaatggacaatgaaactcaagctttagaaaaaaacaatacttggatcatcactaaactccctcctggacacaaaccgattggttgcaaatgggtgtataaacacaaatataatgaagttggtgaaatcataaggttcaaagcacgacttgtcgctaaaggttatagtcaaaaacctggcattgatttctccaaaacctatgcaccggttgccaagttcaacactctcaaagttttttttggctcctgcagccatcaataaatgggacattcatcaagtcgatatcaataatgctttccttcatggtgacctccatgaagaggtgtacatgaaaatccctcctggttacaatgctcctcccaatatagtttgtaaactgaacaagagcatctatggcctaaaacaagcatctcgacaatggtacgctaaactaagttccacattgatcgaagatggcttcaaacaatccttatcggataattcgttgttcatcaagaaaacgaattctatattcatagctatcttaatctatgttgatgacatgattatagctagcaacaatacaattgccatatctcaatttactcaaaaacttgataccaagtttaaactcaaagatttaggcaaacttcgatt

SEQ ID NO: 396743 - DNA, 983 bp, Cannabis indica
tttagagcagtgtaatggctactgataactctaagatgtagagttactttgatatctttaaacttgaattttaaacaaaataatagagtaattagtgtctatattatgtaattgtgtttagtttattgtgtttttgtaataaatggaagtgtgtgtgtgtgtgtgtgtgtgtgtgtgtgttagtaagtgttaaatagacttatgttgctgtttttgtgtgtattaagtaggaaaagggctgaaatgggtattgggaaatatttgggacaagaagaaaaaagagcaggttcaggcttgttgctgactgtcattgctatagcaattatcgcgtagcaattggccagcccagtaagtgtattgtggcaaaaattccagttggcgtgaatgaaaaataaatgatgcttatgtggcaaaaatgtgtacaatgactcagcaaatatgtggaaaaagaagggcaagtggaccatgacttggatttccaaatagggtaaactttagtaccctaattgggaggcagccaagaaaaaaaggatataggaaatggtggctgcactttgagaaaggaggcagtacgaaaattacagaaaagaaaaaaaaagaaaaggaagagaatacaaagaagactaagaagaaggcaacctcaatagagaagatttgagctcgccaactcatttctcttgctctcctcttccattttgtatcatttgttactctttgagattctctttaactccatgaacatgttattttctggttttaagtttaatttcagatatgaactaaaatctttgagatttgagtggttatgaacccttgtatgaactagtgttatgatttgcaatgattgagtaatcctatctttgttcaattagatgtgatgaaattttgagtgaatgttaatttttggcgagctttaacatttagtaagctagatcttacttggaaaagtagtacctagttgaacccatctaattggtgcatga

SEQ ID NO: 396744 - DNA, 603 bp, Cannabis indica
cacagtaagtatctcattcttcttttatgtttatttgagttacgacttgtcttacatcccattacttcatttggtttatcaattagagttcgtatctcctgggtgattttttagaatttagccatagtttaggtttatcatattccccaagcttctgatttgataaacttcgtccaggaattggtattgtctttcgtttataaagatgtctcagtctggttcaaaaatttattctccagaatctgcaataccgaaatgtcccaaacatatagcttgcccatataaacccaaaaactttgaaactcaaaccaaattggaaataaacgatggcaggattagagattatttgattaagtcgaaccaagaagagactgccaatcattatagccggtttttgcaagagattcctgagggtaagcatcgctttttgcgagatgctgcctggcctgaacccttgtgtttatcttctattccactcgcaagaccaatgttttcacccaacgtcactgttgcttttgaaccaggtgaccttgagtttgaaatcatatctccttagccccgtaaatgaaagaccccctcaggaccccaatgtaagattcgagg

SEQ ID NO: 396745 - DNA, 938 bp, Cannabis indica
aaacttcattgttattgattaagtttgaaaagaaatgtagataaagattgagtttattgtttgctttaaatcctatattctatttttttaattaacttttttaaaaaatttacggtttaggtttctaaaatagttgcagcgctagttgcaatatgggtttctatacaattttttattacaatttaggttgcaacgcaagttacaataggaatttctatgtagaattccgtaaaaaatacaaaaaaaaaatgttttgaagtgtaagaataaaaaaacccaaaaaaaattaaaataaaataaactataattgttatttttaagtcatagtgtatacttccgaaattgaattccatcactcgtgtcaataaataaaatatttagaatttttatcaccaaattatatattatgatgtatttaaattttcagctcattaaaaatattttcataattgtttaaacaattgtcatatcagcgctacattttttttagaatttttacgtgtagcaccttattttatatttaaatttcaaaaataacattgatatctaatttaaattttccttttagtattattaacgttttttaataagtgggcatgttcaatacctgaccaaatatttgctccaatttttttttcttctctttaagtcttaattctttgtttcttcattatattctctgttatctatttcttaatctttttttattatttttaaaaataatttatggtcacattgttattctgtggaccctaaaaagaatatcattgtgctctactcttcaatgtgaacattttaaaatatgaaaagcatatgttttttttttttactatttctaaaaaataaactatttggttactaatatagtgattagttattgttttattattattttttttaaatcttagttacattcattcttaaatagtatggaaggt

SEQ ID NO: 396746 - DNA, 556 bp, Cannabis indica
ttatcacttttagataaacactctatcagtagaagagattattccaatataatctaacctttatcaaatattcccacaacacgtttctaatattccattgatcctcccaggttacccatcgtgcaagaataaaatatcataccattttactttaatctcaatggttctcaataaccttcttttaatattaatatcatagacaaagatatcaactttgggatttcacaaaattagattattccttcgtatgaactccatatcctcatttattgtataaattgtctacactgatagacaaaatattaactcgtatgtccaattgttactactcaatcgaaatcataagatcccacaatacactattcataattatgtctttctattccttgtgtgggatctcctaagttgatgtactgatttaacttattaacaagccaaatattcgtttctgatagatattcaattatagatttccttacttccatccactaatatatactcatctcgatgccttgtaatctttacttataaatacattccttcctcttgataatct

SEQ ID NO: 396747 - DNA, 941 bp, Cannabis indica
agtgtgtttgatgtgtttacaatattttgcaagaaactctaactttgtatgttcttagtttctcttgaacaagaagaaaacttagaacaatcttggcagagcctcgactatttagattgtgatcccctctttgtataaaaatagaagggtgtttataggctaagagcaggtatggacatgcctatgacccgcctagagtttttgctcaaaacccacggagaaaattacatgcaaaagagagctaactattaggtcccttggaaataattgtgcccgtacgtgtgtgctgtagctggaaaattggggacgattgtacgttgtggacacgtgtcattcaaaggtttaaccttaaaagtagagggtacgtacgtcgttaaaaggtttacctttaaaagcaaaggtttgatataactgtctagcaaaaaagtggatgaggtgcgcgcactagccatgcctggacacaggggacaaaatttgattgtcagaaaaatcataaccatcattgggtaacccggattactccaaaggtagatgtctgcgacactctcgggcagtcgaaattcgtgataggccctttgagtacccattcgggtattggttgggcaggcttccatatttgaaccactctgagtccaagacaatgtatcttccgtgtttgagaaatcaggacaaggctaggtaagcttaagccaatctattggtcttgacttgttcccggttccaataggcttccccgcgacaggattgtaatgggaatttcgattaattttaggatatttttagcctattgtttatgttatttttagagttaattttcttctttattatcactttttggagtagaattgtgcttgttttctttaatttcaagtttcaacacgtggaatgtacaaattggtcaaatctcacaaaaagatgatctataaaatagagaaaattgt

SEQ ID NO: 396748 - DNA, 416 bp, Cannabis indica
agagcagagataggagagttagtaaccagtgttaactaacttaaatactctgtctaggtaaatagaggccggaggccacataagatttatttactacctttgtaatctctgtgtaaatgttctagtttattttacagtgtatagttaatatgagattttatttcaacagttagcttgggttggatgcatggatatgcagttggaagggaccgatattgatcttgaactagatatggtcgaccaaataattcttcttgtaacatataggttaagaacatggtagttcaattgagtgggagcgctaatcatagatacagaatctatagcttctatccggataagaagtcaaacaatgatttccttcgagctaattggctttacagagataaatagttgagtactcattttagtattat

SEQ ID NO: 396749 - DNA, 840 bp, Cannabis indica
actaatagttaagtttttttttaaaaaaaaaaataaccgcccaatgtctgacgctaataccaccattattagcagcgaattttgtccgccgataattagcgaatttgttgtagtgaatttttattacatttaaagtcgttgttacaactgtatcttacttgtattgtacctaaagtaaataaataagttgtaatttgtaacataatttgtttagttttatcaatttacaactatcaagatattagtataatatcaaaagtataagagatacaatttcactgtttcaaggacactcttaattggatgttgacttaccatttcatgcacataaaataactccacaattatgtatttctattattcaaactacatcttattatctcaatacaattaaagattattgttgaaggaaacgctacattaatattttttgctccataaatggaatggaagaaagatttaaaaaaatgtgatgttgttgatataaacttccactttcactgatacttaaacagcatacaaaggacagaacagtaaatacaagtaaaatccctaagttgaccttcggtctctaaaaacctaacagaaattagttagaatggatttggttaaatccacacctaactaatttctgtaactacctaactaacacatacagaaactaaaagagaaaccctagatctatatatacctgaaatgtaagcccagatctacgggggttgagggtgtccttcaagatccagaactttgaaagcttgaagaaccagagattgaagctcgcacatgcaagagaaacaacagaggggttagatctagagagagagagggattaaacacaga

SEQ ID NO: 396750 - DNA, 523 bp, Cannabis indica
atgtaattgcgcaagaattaaatgctttaataaagttataaattttattaagaaaaaaaaaaagatagacaccaaagacaatggaaacaaacaaagactattataacaactattaatctagaaaatcaaacattaaaccggactctccaatcttttcttgaatgagtttctttccatgttctgccatttgaggtgtcaaataatttacccaatctcctatctcaccttttctaaagaatgaactattagacatctctaaagaatgtttcccagtcttatttacattgatatttttcaaattctcaaagctacataattgctcaatttgttgtggaactccgcaatgttcttcctctttcgaaaaatgaaaccccaaaaaatgagctatctttgtaataaaaaagacatcgtctttcataagctcttcgtatttcaaaaataagatcttgcgaggcatctctaaacttgctttccaaaatcccaaaatatggtcccaaaagggtccaaatgcatggattccttt

SEQ ID NO: 396751 - DNA, 874 bp, Cannabis indica
agaaagctaaggtcgtactttcaggctcatcctgtgtgggtatacactgaccaaccattacgtcaagtattacaaaaaccggacgcctctggatggttgctcaaatgggcggtggagttgggccagtatggaatcatcttttagccctgaacagcgattaagggtcgggccttagcagattttgtggttgaatgtacgggtaaagatgaaagcacttcagaaagtaacctagagccagtacaagtacctcaggcgagcattagtaaagacaagccaacctggaagttacatgtagagaggtcggctatggatcagctgtctggcacaagaatcgctcttgtcacacatggggggcagcacctacacggtgcactcaaatttagatttaaggcatccaacaatgaagctgaatatgaagcccttatcgtcggcctaagacttgctcgagaattttaagccaaacacattaagatctgtagtgactcgcaattagtggtaaagttatgctctcaagcaaattctaagacaagaaaacacaactgttgatgaactagcctgacttgtgagcagcaacataaatgataaagcgaatctcatccccatccaatttcttaaaaaacccagtatcactgcatggaggagattgaaatgattgatacattctaaaactagatgacgccaatagcagcctatctcaatactggggaactcccaaataacaggaatgaagctcggaaaatgaggagaaaggctgcacagtacatcattgtagagggagttatgtgtagaagaggattctccatgccactactcaggtgtgttacacaaagaagctgcacgaattttgtcggtagtacatgatggattttgcagc

SEQ ID NO: 396752 - DNA, 690 bp, Cannabis indica
tctctattttgtgtgagaatttttcaacgtctattatttttattttattctaacgtttaaaaatatctttttgttgctttcttttttagataaaaaaattgtatgatgaatttttttaccatattaatttttttttttgtataaaaattatgaaattttttagtagaatagcataaggaacttttggatgagcatattcattattccctctaaggtaatggctgccattgataagagttgtcgagattttctgtggggttctaatggcaacaggagcaagcttcaccgtgcctcttgggaaaaagtttgcctccctaagggtcttggtggagttggcttccgtgatggtaaaaattggaacaaggctcttatggcaaaatttctttggcctatttccaacaaacaagattgcctatgggttaaattgatcaactccatttatttgaagggtagagacatatggagcttcccaaagactcaagataccacctggtattttaagaaattgttgaagcttcgggattttacagatgaggccatgttgaggcttgcggtgacaggtaccaaactcaaagcgaaggttttctacaaccttcttgtagagaagccgaaaatccagtactcaagaggcatttgggacaacttgctgctgcttaaacataaatttgtttattggcaaatcatcaacac

SEQ ID NO: 396753 - DNA, 1019 bp, Cannabis indica
aataagcaaccagggaatgatagaatttattctaagatagacagaattatggccaatcaagcttggattgggaagtatgaatttgctgaagccgtttttcttaatgagggactctttgatcattctccagctattctgactttgcatcctcaaatatttggggggaaaaagccgttcaagtattttcggatgtggaaatctcaccctaagtatgaccttttattaaaggaggcttggtgcttgggaacttcaggtagtaagatgtatcaagttgtttgcaagttgaagttgttcaaagagagattgaggaacttaaacaaggaagcatttagtgatattcatcagcaagtgattgtggccaagacttctctggataatatacaaagtcaactacaaaagcaaccacttgaggagagtttgcatcagatggaaaagctagcccgtgaccagttgttacaaaagcagcaggcttattctttgtttctaaaacagaaagctaaattggaatggattcaagatggagactcaaattctgccttatttcatgcttgcattaagcatagaataaggcaaaaccgaatcctttccatagaaaatcaagggggcagcagagttacagatcctgaactaattacatcagcattcctagagttctataaaagcttacttggaactaaaagagagcagaggaagattgtagatagcaaggttcttagatatggcccgattctttctccaagtcaggctgaatctcttatacaggtgttcactaaagatgagatcaaaaaggcagtcttcagcatacctgcaaacaagtctccggggccagatggtttttctagtggattttatcaagataactgggagattattggtgaggacatatgtgctgcagtgcaatcttttctgagttcaggtaacatcttaaaagagatcaattctactataatcactttggtgcctaaggtgaaatgtcctagttctgttaaagattttagacctatagcttgttgcaatgt

SEQ ID NO: 396754 - DNA, 2019 bp, Cannabis indica
cattttcatcaataatatgtcaacaacaagtgaaataagcccccaaagtggtaaaaaaaccccttggctaaccactgccataagaaaatggcagtgctctccaaaaattggagaccactgccatagtagagtggcacaggtcggccactatacaaaaacttggccaagttacatttcctacatatttgcatcaaataaatgtaagaaaagtcacacaaggttttacaaggaccataggtgaccactgccataaggaattggcagtgctctccaaaattggagaacactgccatagtagagtggcacaggtcaattactgcacaaggaaaaggaattcattggccaaattgtgttttcaacatccatgtaccaaatagaagtaggaaacaccacccatggcttcccataatccatgggtgacctctgccattttttcagctctaactgatggtagtggtcacacgttagggttttggatatcaaaatgaggtttttggatcacgagacccccaaaatatgactcaccctcaaaaaattagttaaaacaaacccctaagggtccgagagcatgcatggccaacctctgtcatttggccatggcagtgctcgcaactggtacaagttatcttaaactgtctttagtaaaatagacataactctctcaattttgatctaaataaccttgttcaacttgcattggaaatataattttgagacggatcaaagtgtgtcttatagccatgactcaattctgaggttatagggtccaaaattagcttacaaggaaagctagtacattttactcaagaattgggaaatgcagctaagcgagggttggtggagcacactgccacaacctatgtggcgttgtgcgcgagcatcgacattccaaaacacatgtgttcagcactcatcaccaacatcgtgcatttctaggagagaaagtgacatcccatcactccatttgaaattagtgcatcctcaaccgaaaataatcaattgttcaatatttgtgggatatttgcctagatacaaggagatagttattgatatttatttacttgtaatattttattcataaaaaacagtggtatatggaatttgttagtgagatatcccgatgtatcggggatcactaacaaaccctttagcctatatatacatcaaataggaggctgagaatgggactggaccttcatcttctttttggcttctttttgggaccctttttctctcttttagatattctactcggaaaccttctcctagaaattacttgaaggcaaccaagaacaccacattgattctttcatcttgttcattgagtccactatactcaggtgatgcaaaactttaaaacaccattgatacacacttttctttacaaattattgatttattgttcccaagaactttacaaccattaatttagatcagattcatgaatatcaagtttttcatgagccttatattcataagtctcaattaagatttcacttagaaatcttttactgtacttttatccacacactcttgagaacataactctgatgtgtcaaatccaattaataaaactaccagtagacgtagccccattaccatctcgacatgaggggtgaactactataaatccatggtgtccatttaatttattgcagttttacatgtcagattaattcatcgtggtcctcttttattttatgatcttcttagaacagttgacgaaaaactgcgttaacaattgatatatgagaaacttgattttggactagaagaaggtgttacgaaatcagagaaggaaaatgatgtagtgaaggagtacgaaatcgatactgtgatgaaacaagcaagatttgtaatcataatgaatcttgcagacaatgtgttgagacaagtgattgaagagaagactgatttgggaatttggagcaagctcaataaattctacatggccaagtcctttgctacaaagatcttcttgaaagggaagttttatggttttaagatgaatgctactgt

SEQ ID NO: 396755 - DNA, 1664 bp, Cannabis indica
catatcacataataccgacttgtctctaggtgccgatacacctatttacaaggcttaacagatgagtaagaatgtttcatacaagggtacaaccactgtaccacatacactacgtacctctttgcacaagtgtttgtaggggtttgtttgtaccctgagtaccactgagtgatataccatacacaccctgtactttcccgtacttgtgctggtcacaccgtaatgtactccttaacaatatacattgtaccaatgcactttgtaccatttctgtacaagtgctggtagagtaacaaacatataagcatgcatatacacttaacatatacatacattcgcatattcatattacatattatacacagttcttacctcctttccagattcaagtgagttggccgacttaaacggaaaacctcgtgttggatggatgccctgatgacataacataatcaaataaatcacatgttaaaaccctaatccaggaaacccgaaccctcaattcaaggttctgctatactaattaatagtgactacaatatcctagaaaacaggcaaacacccaactaaggtactgaaatgggcaagaattgagaagacgggttatttggggaaccttccaaaatcggttaaccggttttacaggtactagcaaaccggttaaccgatttgcaccagttttccctaaagaactcccaacttgctcaaaactcatccaaatgctaccacaccttccagagtacctaaaataagcttacacaatattttccaaccaacagaaacttgaaaaatacattgaatcaaaatgtgccattaaagaccaaagtttaagtttcaatactcaaacttgttcaattccatcacaacacatcaaaactagcatccacaacttaaaatcaactcaaataaagctcgaaattcgaaccaaacacaattcaaactctaacgacccctatatctcaaaatcacataatcaaccaaacttaaaagcttcaaaaatacaaaactatggcttcaagaacacatgaatccttagcagaattccagaaaaatactaggttttgaagatgattccttctggttttgctttagccgaaagagagaaagagagagttctctatttttgttttttttctttgatttttgatttttcttaatttcccaacataatgtattcattattcataaaaaagggcagctatcaacatacacaaaagccacctaatccacactttaaaatgactaaaatacccttaaagcttaaacataggctaacttaagcttaggggtagagtggtcaaaaatcataaccccgcttaaactcggtattctattttctccaacatacatcccactaagaaaaaagttctgtacttacccatgtgctaaaaatagacatattcatcgcattttccgttgtcgccgagcaaaaattgtaaaaataacataattcatatataactcaaataatacacctagagtttaataaaatctctagaattgaaaaattataactctaatgccaactttataatgggacccataattaaataaattcacaagtaattataaaaatacaaataattaatactaattgcctttattaatccatattatgaaatgcggtcattacaattatccctcgttaaaaggattttgtcctc

SEQ ID NO: 396756 - DNA, 1329 bp, Cannabis indica
aaaagtttaatttgacacaatttaaaaaaaatttaattagcaaagatagcactgcaatcgaaaaatcactgtagcgtgccttagcattagggcattacaattttggtatcagagccgccaggtttgtctaccgaagctcgccaagacatgtataatcttcattagagaaagctcggctcgcggttcagtaagcccgtacttgtttagtattatatgtgattattaaagtatgttaggaagcatattatttataattgtttattttgatgcgtgtcttaaaatccataagagcagtagtaagtttttatgatcgctgtttgacctgcctcgcttatgggttcgcaggctaaatcctattaaatggacgcccggcgaaatacaaggagtcagggtaataaggtcaagaccggaggcggacagggaaaatcaaattccctaaaatccccgtggtcgtggtcgaggtcgtggcagagttcagagtggtcaacatgtgaatccaccacaagctcatctggattgggagcagaggtttgcagaaatgcaagatcgtatccgccagcaagatgaagaaattttgatactaaggcagtagggtcctcctgcagtgcctccaccgcaagctcaggatgttgtagttcctgcagttctagcataacaacttgttgctggcaaccgtatggggccactatacgagaggtttcgcaagcaagcacctccagttttcttgggaggtcgagatgtgatgaaggctgagcagtggctcaccgtgatagaaagaattatgaatttcatgggagtagttagaaatgatcgggtgacttgcgccactttttagttatagaaaatgctctcgtgtggtggtaattggtgtccctcacccgagacatcactattaagacctgagaagagtttcaagagttgtttaattccaagtattacaatgaggcagtccgcaatgctaagcggaaagaattcactgagttggtgcagactgaaggtatgtcagtaactgagtacacaacaaagtttgaccgtctagccaagctggcctcgagtattgtgcctacagacttcagcaagaaggagaaatatctggcaggtctgaatttgaagattagatatgacctgttgattactacaaatgaagcaacattttatgcggagatggttgagaaggctcttcgagctgagggtacagttaagtttcttcaagagcctcgagtgactccgagtaccccactgttcctactcctgtctatggtagggctggtggtgattccaccactgatcagaaaagaaaggttaactcgacatctggtggttcggggc

SEQ ID NO: 396757 - DNA, 671 bp, Cannabis indica
agtgtgtggttgaaatcaaagtgtaaatgggccaaggaaggcgatgcaaattcaagattctttcataatcttttgaatgcaaggaaagccaggaacacaatatcaagaattgaaaaggaagacggaacaattattgaggagaaggaagaaatagccaaggagataatttcttttttctcaagcctgtacacctccgaaagaagattgtgtagtggtattgagggaattgaatggcatgctataccagatggcgacgctagtcacttagagagaccatttgatgagagcgaaatcaaagaggcagttttcagctgtgaaggtagcaaagctccggggccagatggcttcagcttggccttgttccagtctcaatgggaggtaattaaagaagatttgatgaaagttattaaggcatttgaaaaagatggcatcattcaaggaagcatcaacgaaacatttatttgtctaatccctaagaagctgaacagttgtagggttagggactatagaccaatcagtctcataacaagcgtttataagattattgctaagatgctttcaatcagactcaggagtgtattcagagacactattctcgaaactcaatcggcctttgttgaaggaagacaaatactggactcaattctcattgctaacgagacagtagaaga

SEQ ID NO: 396758 - DNA, 527 bp, Cannabis indica
taactataaataaatagaaaaatgacaagacatcaaccttgctaatatatgcaaatcattcataaatcaattccgaataaactacaaaatatacaaaatactacttttattaattattatctcgatttttgtccacctgatgtggcatgtccacatagccaatatcagcatcacgtggcagtacaactcaccaacaagaaggtcaaagtcatctactcaacaccctagccaacagaggtcccgacactcaaacgggacgatgagcgacagaccagccacctcaaaggggctgtccagccacccctagctggccctatggccagccagcttctggacaacacaaggctggccaacctgcatcctgcaggtgcatggccagctagaactggacttggcataactttggtgtacaacattacacgtggacagcaagctagactgggaattgagccttaggagcccacaaaagtagatggaatatatctatttttgaggggcattttagtcttgttggaaattattttacc

SEQ ID NO: 396759 - DNA, 616 bp, Cannabis indica
attaagagaataaaggaaaaatatcaaatatacgtaacggacataccttatcagaagaaagttgcagtgttacaatattccacgagcaattgagattcagaaaaaaatcatcaatgaaaaattttccattcaacaaattttacaatattgatatgctgcaattgatattaccttcataacaaaacgaaactaagtttggcactgatttaattgtgacaaccttgttcatatttctcaatttgaggcttttcaagtgttgatttgagattgtaagatgctccaaccccgacttatgataagaattatcaattgtcaaatcctcaaggagtgggaggtttgtaatgagatcttcgaatgatgactggcttgtcagatcccattcacaattaactagtgagagatttttgattgccttacatgcagacagatttattttcccgaataaagcccaacatagcaccaaagattcaacatttacggcttcaactcgatgagatacattaggaaacttaagtgtcatgaacttgaggcttgaactttgtactcggagcggattacgagtaaaacacaaacttaacaacagtttctcaagggaagggcaatccatgaaagactt

SEQ ID NO: 396760 - DNA, 899 bp, Cannabis indica
ttggctcagaatcagtagcagtgggaacatgttgagagccagttgcaaattgcatgattgagtagaaaggagcttcaggagggtcatttgatgaagtaacaacagtcttgaaggcaggaaaagtagattcatcaaagataacatttcgagcaataaagattcttccatctgcattttcacacaaataacctttgtgttttggagagtatcccagaaaaatacactcttcagacctgtactcaagtttgtgatgattgtagggtcgcaaatgtggataacaagcacaaccaaatggtttaaaaatattatagtcaggtgactcattgaatagacattcataaggactaagattatcaagaacaggtgtaggcatgcgattaatagagtgtgtagcacattgaaaagcataccaccaataagaaagatcaagattagcttgagctagaagggttaaacctgtttcagtgatgtgtctatgttttctttcaaccctaccattttgagcatgactatgaggacaaggttgtttaaacacaatgccttggtcacttagaaatttttcaaaaggcctatactcccctcccccatcagcttgaacagctttaattggtaaattaaactgtttttcaacaaggcttttaaacttaatgaaagtttcaaaagcttgagacttcatagtgagaggaaagatccaagaaaacctactataatcatcaacaaaaactatataatatttgtagttttctttggatgcaacatgagaaggcccccatagatccgtgtgaactaaagcaagaggttgattagctctagatttggataaagggtacggcagtctatgatttttgccaagttgacaagccttacaaaagtctaaatttttaagagaacatgggata

SEQ ID NO: 396761 - DNA, 746 bp, Cannabis indica
aacagcagttataaagattctgactcctggttttggaagaatgtagttaaagcaagctccatccttcggaaaggggcgtataaaagggtggcagatggcagaaatactagtatctggagggatccttggatccctcacttgaaaggtttcgttccgaaaccaaaagaaggtgtggtgaaggataacaattgtgttgctgacctcttgacacccagggggtgggatatgggaaagcttcatagtctcttcgaccatgagaccatttcggctattctcaaggatggaattccttctgggactggcaaggacagttgggtatggactttggaaagtaatgggcacttctcttctaaatcagcttatcttgcccaagctttggagagagcgccctactgtgatgtcgctccttcactctggaataaactctggaatagtaagattatggagcgccaaaaggttctttggtggtgtatcctctcaaatgcccttccggtaagagctgccattagtaggagatttgcgattgatgattccaactgtcccctctgtggaaggggggaggaaaccttggagcacctctttctaacttgtgatgtggcgatgcacttgtggcgttcgtcaccttggggtatttttccagtgagtgattctggtattcgagtttgggactgggtgaagttcatttggagccttaataatagaggcgttagggctgaggatgtttttctctatgcgtctattgttgt

SEQ ID NO: 396762 - DNA, 748 bp, Cannabis indica
aataaacatatacattgagtctggggttggaatctgagtacatgtagggcctatgcctgtgtttgtgtctgggttttgggtagctgtttaggtccaggtccagctcctaattagggagtcgagagtcggatcgaggtccgagttcggtctaggactgagtccaagtctcggggctaggctgcaattgaggcaggggctgaggttcgagtcaagtcgtggccaaggcctggtgtttgaggtccaatcaggtaggcgagagccgatgtctggggttggggtcggtgtccattcacggggtcagaatccagaatattaataaaagaaaatacaaatttataattaagaaaaaagaatcatttaaataaatttttaaaatgacatttattaagaaaaaaaaaagtaatctcattttcattttaaaagttaaaaggtgaaaatagtttatagactatattttttgaaaatatttttatttttgtaataaataaaaataaaaaattaattggaaaagagttacagaaagcattcttaattttcattgatatatccatttattaatgatattttaaatagaaataaattttaattatattttctttgatcataattgattcatttctaatggttgccatgccaaacatattttttttgttttactaaacttaaaaactaaaatgtaagaaatcattttttttttaattctcacataagaaaaacgagagggagctatccttgttacacccacaat

SEQ ID NO: 396763 - DNA, 1079 bp, Cannabis indica
acccttctctgccaatatgattaaggtaataatgatgttgcacggtgggctccgaagactctgacgaatttcttgagatctcccactcttcaaatccctaagagggtgcgctcctgcaattaaatgcccaagatatcgaagagacatccgtatcttcgtatcccgtaattagatcacatcaaattaaaatagagtactaaagttgaacacgtgtcacctgtccgagcaactcatgggcctagcaagtccacgtatgagcatatggtttccacacggacttatgttatcccaatttctgcatagggtgatgtggcatttaataagagtgacacgtggagagcatttcaaagcctagacgggtgctttaatttccttcaacgatctgtccagagagttttacatgaacttgattaagtttaaaccttcagcaagtataatccggacagagtctataggtgactgtccgagcaggttctcaccatccagtgaaactaaatcctctgagtaggaaagatatttttcataaatatatttgcatttatacctcaattagatccctatttttatgagattgatatgcattaaagaaaagattataggaaactaattattcataataattttagaaatttaattcatgtatgtttccctataaatagtgaaatcacttcattatttgaggatttgaaatcatatgtttttaagagctattatgctataaaaataattgtaagttttccctaaagattattgagaaactcacttggccagctccttgtgatcttgataattccttgaagtaatacaagaaaaagaggaatatgctattaccataatcacgggaccaaacttctataaattttggtgttcttattgcttaattttgtttaaatattattcataatctcatcgctataaagacttagtgtcgttagctaaaagcgaggtcaatagtcgggatcaccatgacttgcagggacggagggacatatgcctatatgtaggcttaagccctcactcaaatatatacatcaaatttttcacatgtagatatacacatatattaattcacttcactc

SEQ ID NO: 396764 - DNA, 670 bp, Cannabis indica
ctcctcgttagcaacatttacatcaaaaatgttcctgataagtccatatttatcttataaatatggtcgtttactcgtgttaatggtattatttttgttctttgaactgttgattaatataattttattttttttaggagaattgatgattaatcatacgttgggagctgtttgacgtgatttaaacacgttttgatggtaaatggtggaggcgggagagctcgatttgactaagtagaatgtaattgtgacttttgatagctttcaaggtagaactggacttggaactaaatatgaaagttttagatattgttctcagctttctagaacaacctgaatcatctaattccaagcaaaattgaagacattatgaccaaaatactaatatgagcactcaatagtaaaaacccagaatgtagcgcccatgcgccacttaaactccgcccaggcactcctgtcccctttcaaaaattgagataacaactttaaagtataaaagttaaataattttgatttttaaaagtaaaaaacatatataaaaataaaataaatcattatgaaaatgaaaataaaaataaaatttcaaccgtatttttttaggggaattaccctatatactatttttttaacttttttttttttctaaatttacggtttgagtttctaaagt

SEQ ID NO: 396765 - DNA, 649 bp, Cannabis indica
tttttatggggttagtattataaggggtacattccttaactgatttaagtgatgtgatcgtatttatgtgttaaaactatttaagttttcccattagtcttgccttctgacatggtgttttagttttccctttagtttttctgattcgattcttgttggttcttcttttctgtatttgcttttgggattttgctgattgtggtacgattatggaagacggtacataggtgcatattcctattgaggaggaggctatggtagaagcattcaagaagaggaagattggttgtgttcaacccaaaatttctgatataataggcattaaagaagctttgagttggatcgctactcattcgtgagatagagtcatgttggaaatagatagcttggtgtgtgtccaagcgattcagtatttttatgccttcacagtttgtcttattgttcaagatgttcgaaatttgcttttggctttattttttgttgatttgtgttttgtaaaacgatctgcaaataagttggctcattacttggcaagagactcttatttctctacaggtcgcgtgcttcagctggaggactgttcatctgaagtgcgttctattgttttgaacgaatttattaattaataaatcttatgatttttattcaa

SEQ ID NO: 396766 - DNA, 793 bp, Cannabis indica
taaccacttgaggctagctcaagtggccatagatgggtgtgtaagtgttggaagtcctgagttcgagtcctagataaaacatattgtaatatataaacgcttaaataaaagaaaaacatatattttaaataatattattaattagaaaataggcgataaataagggaggagaaggtagattaataattagaaaaatataataatattattaatttcttaattacttgaaaagtgtaatatatatagtgtaccttgttctgatttctttctattactcgactcttccttctcttttcaaatcaccacctttgttttttttcctaaagtattatttttgcacagtaacttttttgggagattcctaggcaaattatcacttttgttttaatatacctttacttttggactcaaaaaaaaaaaaaaaaaaaaaatatacctttactttttcttttaagattttaataatttaagtcacggtgtaattggatttgagtgtaattggaggtaattacacaagtatgtttgtctgaccatgtaattacattctaactgtgtaattggaagtaattgaggggtttcaaccaattctcatggctttccatgagaattgaatgtaattgttagacatttatatgtataatataatatatatgtatgtgtatataacatgcggaataaataaacatatacactatatgaatataaggatcgaaatacctccagccattgaatcttgagcttcaaacccacataagctttgatctgcaaaggaaattgactaccatgggtaatc

SEQ ID NO: 396767 - DNA, 904 bp, Cannabis indica
agatgtgtagggagagattttaagagaacacttacgagtgtaaaagtaagaaaaaaattgttaaaatttatcttcaaaagaataatattttcaatttttgaatttgggggcaatttaaactaactttaacacaaaaagtatctacatattcaaatctcagtagtagaaatttattgtgactagtggaaaaaaatatttcgagatgagttcgggtcacatttcacaaaggagtacctattgggattttatgctctaaataaaactcatttgaatataatcagatttactaattaataaaatatatgaaattattttatgttgcatggttcacatgattactttcatgattatatgtttaatatataaattctattatatcctgaatatataattattcatgattatagtattatctacacagtgaaaaataatcatgattatatgcttcaaagtatttagtcccataatttatcaatgcactaaatttacactaacgtgataatcaacgataaagtttacttatacaattatatgtggaatatcttttctagggcattagcaaagtatactagtatcagatgtattggctatacaacggactaaactgatattgacagtggaaaagatataataaatttattgtcatatcttttataagtcaatatcacttagttgatcttagattaatagatcttaatcttaagatgattagaatctggcttaaatgtatttcaaatgttctttgacttgtttgttaaagctgaccacttagatcagcctaatacttacatcttgggaacatggtagtgcaattaagtgggaacactaattatagatatggaatctattattggtaatattttaccaggatcttagatctattaacaagtatgttgtttaacat

SEQ ID NO: 396768 - DNA, 895 bp, Cannabis indica
gaaattacagattacgataggagacaaagacaaagtaaatggaaggagactgaactaaaaactttttaaaaaaaatataatgatacaaacagaaaaaaaaaaaatgatcaaacagcaaaaaaaaaatgatcaaacagcaacaatatgtattactacacctaatgatttatttgaaactatataccaataagaatatgatgctctcaaactcaaggttgaagcaaaatcacaacctgtacaaaaccaaagtaagaagtaaattctgtaagaaaacacgtaaaacgtaattatttttattattgcaaaataattacactaagactttgacactttttttaatcacactacacacgaagctctcactcttattttattagatactcacacttaaattatttaaagtacttagacacactcttagaaattcttaaattagactcactcacttaagacacctctatgaatgattttaaacacacctataatacttgcattctttagagacttaaagtccatatatatatacatggtaatgtcggttgatgttttttactagaattttctagctacaatattacaatgagttttgtaagctaactctagaattttctagtaattattttcttaaaaagtttcttgaaatgttaccacatttttagtgtatatgctagaatcatctagaagactagagaggcggtggtgaataattaatacttcccctcaacacagacttttcatattgagttgttctctgaatttttgaaattttattgtgttaagtccttttgtgaacaggtcagctacttggtcttcgctttttatttagtacatctgtagctcttctcggagtatttttttttcttaaaaaatgataatgcacctccacatgctttgt

SEQ ID NO: 396769 - DNA, 554 bp, Cannabis indica
taaatagcaggtttggaagggtttatagagtttggggttgaatttgttgagttatgaatttttaagtgaatccttcactgaaccggaattccggtttagagggacctgtaggaatcagaattccagttggtcttcaagaaaccccgtagaacttgaattccagttgagaaccggtctaccggttggggcagttttgggaaccctagtttttcccatttttgagatgtttagggtattgccatgttattcatcgatagggaaacttttagtttcaagtttaagtccccggaaagtgatttagagtgtcacttacctatgttatgattgatgtgatataggagcctgtaattcgccgagcagttgttccattcaggttggccggcacacctgaattcggaatcaaggtaagattagtataatgttatgcatatatttatacatgtttagcatacatcttagttgctgacagaataggcaaatctatagccctcagattagcatatctgggcatcggtgaggtgtacatagagatgcaccgagatgccaacaaatat

SEQ ID NO: 396770 - DNA, 482 bp, Cannabis indica
tggtggttgtaaggttcttgaaaatgataaaccaataaagtataagaaggatgtatcaatagtgttttgaggtcatggtgtcaacttcgtatggtggcctcaagtaaaaagaatgaaggaataagtgtggtgttcttggctgccgtcaagtaagtttgaaggagaaggttttgaagagtgaaggtcaaaaaaaaaaaagaagaagagtctaaaagaaggtccaaaaaagtctccttcttagcctcctacttgatctatatataggttgtagggtttgttagagatcccccacatgtcggtgtatctcactaacgaatttcgtataccactctttttaaagaataaaatattacaagaaaataaatatctattaaaatctccttatttctaggcaatatccctgaaatattgagaaattggttattatcggttgaggatgcaccaatttgaaatggactgatgggatatcacctcttggctag

SEQ ID NO: 396771 - DNA, 740 bp, Cannabis indica
caagctgggaaggtacaacaagagcatggagctcgttcacctaccaagatactagaatagagagcacctttgcaaatactatcaataatcaccttacagaacactactctaaagtagtagttctacctattcaaccttagtgttcatgataccttacaggtcatgaagatcacccctgtggacatgataccttccccctcgttgcatttccacagatccagacctggtataagcacttggagaacaactatgagaggaagaggaatgggattcaacatcgtttacttcaatttgcagctgggctcaacttcgagggttacaccacttggcatcctcctcctattgtattttgcgatcagtgtttcgaatgacttgttacctatgtgtaagttggttcaagtggaatccctcctgttcatttcaatgttccttgcgagcacgattattattagtttgtcccctaatggttgttacctgagggttgtctgaacgcgtgcttagtgctcgaggaggacgtcgggtcctgacccttccatcaatctcggcctacaaagcttacattttctcttgtagtgtcgtgtactaggctgtggccaattgaataatcccttcagacaccatggctttgtgatagacgggaagcgtcccacagtggtcgccggtgttgaagtctctccagtatgaccagtggtttcaggaaacaagttgagggagtgacagtggtgttggaaattatttta

SEQ ID NO: 396772 - DNA, 994 bp, Cannabis indica
ctttaaaatgattaccccttttttgttacttgcctataaataccaaagagcatggcacataaacttattttcaccacctttctttggtaagtgagctcagagtgaaaagagaggtttttggcttcaagtctgctgaagtgccttcattggagctactcattggattgacgttgcttgaacctagatatctgatccttgagtaagttctcgatttcccttatgcttatttttgcatgtttacatttcgaatgcacttttggctttgctgtagaacattcgtaggaaaccctaggtttagaaactctgtgattcttttttgccatgatttcatgcgatttatagtgcataatgcttgctttctgaactacattacgtcggtcttccatcttacttattctaagcttcatgaaattttttgccctaactcgagaaaatttcaaacttcttgagttctgacttttctttgaacattcttgttctttaatctgttgagtactcatggtcggcatatttgctttgtttatcgttcgatattccgaccaaacactcatctcgtgtgttgtcttttgtagatgaaccaaggtgagttttgggagagcgaacatcgaatcgaccaggacctgcttcaacttctgcacgaggaccaccctcatcttcgttctagcccaccttcttcaaatcttgtacgcagccatagaatgatggctcgtacaaagaaaacaatgcgtctggctgactcatctgatcctcaagggctcgccacgccactttgccctgccccgaacaggatctagccgtccaggtggaggtggatcatgaaggggacgctgaagtgtagcaaattgaggatctggacgatgttcgtcctagcagttcctccgaggcggacgaagaggcagaggttgaacccccaaactacggggaatacaatgaggctggagagctagtcgatgctgacagagacgtcctgatcgagggcgtggactacgtcagt

SEQ ID NO: 396773 - DNA, 677 bp, Cannabis indica
acacattatgaacatgtcctaaccgacctagtaagtttaatcagtaagcggcctccccaatcctctcgatgacctcgaaaggtccaacatacctcagggctagcttacccttcactccaaatctcgttaagaagacataataactcaccgtcaatggagattggcataacttttataacaattcggaacaaccttaagtctttcttgaattcccttaatctttttagtggtactagtgataatttggggtcaaatagtgacatgctcatctggttctgcccaacacaatggcgatctacatggtctcctatataaggcctcataaggagccatgcctatactggcttggtagctattattgtatgtgaattccatcagtgacaagtattctccccagctacctccaaattccaaaacataagagcgaagcatgtcttctaaagtttgtatggtcctctttgactgtccatctatctgtggatgatgggcagtactcaagtgaagtccagttcctaaggtttgttgcaagaccttccaaaaccttgatgtaaattgaggatctctatcagaaataatgcttgaaggctgttaggctatttttagcctaagtttcgggtcacattttatagttgttttccttctttattattatttttagaatagaattacgcttgttt

SEQ ID NO: 396774 - DNA, 700 bp, Cannabis indica
agagtctgagcttctctcccacctcgtcgcgggctggctcgaaccactctttcaggaaccagttcgccggatggagctctctctccggcatgatgcagccgaaatcgctcaggagcgagcaaccgaccggctctggtggagataagcaccggcggtagtaattggacatccacatcggagaacggagaccagcggcgagctcgcgctcgttcgcctgaacaaggaggcggcatccctctgcaacgttttgccttgttccgtaaccgtcttggaggcaatgaccgagctcgcgtagtgcgtcgatttgatatttaagattggaaaaatgatacttttatctaattaaatctaacgatttgtttcattctcttccccgaatttttagcataattagttatttttggaatatgaacggaatatgtgtttttttttcaataaaataatataaattaattgggaatattctgttaaagttaacggaggaaacaaaacaagatcgttaaaccaagaattggcgttagataggcacttttaatatataaagaaatatatatttttgcataggatttttctaaggtagagaatttaaaaaatatcctttttatatcatttaatagtttgttctaattgggcaattgtattgtaacatatacatgatcttgaatgcaacatattcaaactaggattgattaaaatcttt

SEQ ID NO: 396775 - DNA, 1137 bp, Cannabis indica
gtattggctccagttgttcccccaggagatactcagcatatgcccggcctgccacctagacccaacgggagagtggctatgatctcgggaggaccccacatcggaggaactacccgcaaggacctcaagcggtacgcaggggccgtgaaacacgatgaagtttgggaagttactcaactcccagctcaaagccccggctaatggatcagcccattacattcacggaagaagatgctaaaacagtgcgttttcctcaccatgacccgttggtcatagagacccccattgccaataagatcgtggccagagtcctgatcgacaatgggagttccgtgaatctgctattcaaagaggccttcactgcaataggcctaacggaccgagacttatcaccaagtggttcccaactcacagggttcaatggaacaacacttatccctatgggaaaagtgaggctcccagtcaccttgcgcccggatacacctcaaagcaccttcaagtactgcacgtttgtggtggtggactgcccaacagcttataacacaatcttcggccgaccggccttggtggacttcggtgcagtcacgtcaatacggcacttgtgcctgaagttcccaacccaggaggctgggatagggaccgtgaggggaaaccaaggggaggctaggcagtgctataacgttgcagcccacctacccgtattgatggtccgagaaactattgagccagaaatggtggaagaagatgagttggatccccgtgtgggatccgagaaaattgtagaaccaatggaggacgtcgaggaagtgtcagtgtgcgacctcgactccaccaaagtcctccggctaggaaagagcctagaaccggaggaaaaagaaaaaataataaagacattgagaggtgccattgacgttttcgcatggtgccaagaagacatgactggcataagtccccacgtcatcacccatgtcctcaatgtcaacccggacatgccaccggtccaacagaagcgacgccccctcgactcagtaaaggccgaagccttagagaaagaggtggacaaactactaacgagtggcatgattcgagatgtctactacccggaatggctagccaatccggtcctggtgccgaagc

SEQ ID NO: 396776 - DNA, 678 bp, Cannabis indica
ttttttttttggactccgatcaattagaaaggatcacacattaccttcttttcttttaagaatttgtaacttcattaagataaaacattgttagaaggaagataaaaatgtgtattcatttctttagaaaagttggtactgtgtacacgatttatataatccacagaatgaagagaggacacttgtccaataaagagagaaataggaaaaacctattgttggataaattcccatactattgtctcacaaataaagttacaagaaaaataaattagacctctttataaagcctcaacagaccattataactcataaagttgtcagttctgttttcctaggcttaggtcttttatttctttacaataaaaggaagcaaataaaatatctcaagactctaacaactttcaactttacaaggaaaatatctcaacagattacaaccacttttctcagatcagaaacaaacacagcaacaacaacaacattataaataagtggttcaaccttccactttgggcagcataacatttcggccagcagagagataaggacagcaactgtgattttctcttggaacccacatcagaaataagagaaaaagagagagagttagtgagagatattgttatgtaaatcagaaaataaagtgaagaaagagagaaagaatagagattacct

SEQ ID NO: 396777 - DNA, 683 bp, Cannabis indica
aaaaaataggaaaaaaaagatgaaatttgtagaaatgaactacgcccaacctcgaatagtttaggtcgtctatatttatactcaatcacaaagattatcgtttgaaaaatagtattatcatgtgtaatatttgaaaaatgctaatgggtttggcataattcaccaaagagtgaaaaatatgcaaagaaatataggaaaaaaaaattaaaatttatagaaattaactacacccaacctcgaatagttgaggtcgtcaatatttatactcaatcacaaagattatagttacaaactagagtaacagaatgtagctcatacactcaaatttaacaaatatgttgctcagttaggatagactttttaattcctataataaaaggtactctaggtgctcaggtttaatacgaggtgtcatattgctagaaaatttagttcttcacttaaaaatacttggtcgaacggacacacgagatcatgtggggatctaccttgcattgaatactcaagtccccaaagggaccctccttcgctcagcattaccatgggatgcgaggaactcgcataagggggtcccttacgcttgaaggcctcaggtcgtgagggtcccccacaaggaggtgcctctcgctggtgctgactgttggaagttattttaccaggaacttagatctactcacaagtat

SEQ ID NO: 396778 - DNA, 1048 bp, Cannabis indica
actagaggattaaagatgatttagttggtgtcaacacatcactcaagcatcaaaaaatacaagtctacgacattttggcactcacctagcgtccaggttgacgtcaagatgtcaaccccagcgttgtgtgtcaacctgagcactgggttgtcaacctggcaggaagatgttgaataacttttagtaaaatagttataactcactcaatattgattcgattgacgcaattcaacttgtgtttttaagctatttcataaatatatcaagtttttttcacgcccacattacaattcttaagattttgggtccgaaactcatcctcaacaaagttgcaatttttccaacaaataacccgaaaacgatccaacggacaagattcaaaatctgaacattggtgattattattttaatgaccacatttgtaaaatggattggtaaaggcaattagtactaattattaatatgttagtagttatttgtgaatttatttaattatgggtatcattattaaaaatgggcatttgagttataatttctcaattccgaagattttattaaactctaggtgtattacttgtattatatttgaattatgcaatttttataatttttgttcgtcgacaatggaaaatgcgatggatggctagttttgatcacatgggtaggtctagaaccttatttcttagtgggatgtaaattggaagaagtaggataccaggtttgaacggggttatagattttgactattttacccctagtcttaaaaatacctaagttataagagaaaggacaatttagtaataagccaaaggagtgaattggtggctgcctaggaatttgatacctagcacctaatatttcagcaatgattaatttagaaaaatcatttttcatttagagaaaaatcaagaaaaagccaaattcaagaacaacatctctttcccctctctcttttcgaaccaaccaaaaataaggggattagttgctgatctttgtgttttcatcaagaattggagaaggttttgatcaaggtaagccctagacactc

SEQ ID NO: 396779 - DNA, 682 bp, Cannabis indica
actctcattgatcatgtttctcccatttttgctaatccttcatcatgcattatttttctgaaacaaatgctacacattttgagccggaaccttccataattcaatttttgccatctttttaagggttagatatagaagatcgatacatgtatgtgaataattttttttggaaatttgctctacttttagatttttattttttttttcataaatctgttaggcttagactttttccattctcattaaaagataagtctaaagcctggttaaattcactcctagcccgatctatttctacttgtgatgaattagttaataaatttttggccaaaattttttccatgtctaaaacagataatattaggagaaaaaaatggagatcggtaaaatacttttataatggatcatctccctcaaaccgacaaatggtacaatcaatacacactgaatttttttttgcaatttaaaggggaagaggcttgggagtctcttgagaatcattctgcaaattctcaaaagtggacagggccagccctgagcataggcgggctaggcttgtgcctagggcccacctagctcaggggcccaaaaaaaatttgtccccttttaaaattatacatatttttttttatcaattttgaaaaataccatattttttttctaaatgagggctcaaaaatat

SEQ ID NO: 396780 - DNA, 603 bp, Cannabis indica
ttgaagagcaaaatatccttagaaagtgccagaggtaaggtatttgtttaactgtattttggtcttaaaatatgctccaaacatctgaaggggctttttgttatgatccaagatagtgttcaagtggggggttgggttcatgttgtatctgatactatgctgcaatattttcgggtgtagaaagagatcgatatggtgtgatgtggtttgaaaaactctgccttgatggttaaatgcttgctttacttgcaccatgggaactaaagattacatttttcctgtccttaaaaattttgctttgcatattcattttcatatgccaatgggagcaaacaccagtatttttttgtcctcgtttaatctcacatcgttcattttagggagcagtatggctcatggaaggctgaatgccaaaaaatggttccagttattggtagtggaaagtatatcaccgcaacattcattactgatggtggtcgaccaatagaggatacaaccatcgatgttatgagggatagtgaggttatgttcaccttgctagctcattgtgatcttaggaattgtaaagctcgcttagttaatttggaaattagcagttgttta

SEQ ID NO: 396781 - DNA, 715 bp, Cannabis indica
tccacctactaactgaatcttgaaaaaaaaactccaagtgatcgaaatcccttcgatcaccttaaagagtgcttgcttcctcccgatgcaagacttgaaaagcaatctcgaaagctttgtaaaaccttctcccgatggttgagtgcttgcttcttcccgatgcaagacttgaaaagaaatctctcgaaagctttgtaaaaccttctcccgaaggttgagtgcttgcttcctccatatgcaagacttgaaaagcaatctcccgaaagttttgtaaaaccttccccgaaggttaagtgcttgcttcctctcgatgcaagacttgaaaaggaatctcccgaaagctttgtaaacccttctcccgaaggttgcactaatgttcttcttctttgtagacttgaatatagactcaagacaatacaaaatacaaatacacagagtatgagtcgaacaactcttctctttaaaacaaagacactctttccttaagatatgaatacaattttaagtgtatgaaagagatactaaacgtagctgctataaggtgtatttataatcaatatacaccttattgacagcttacatacggtctgaacaagaccccagtccactagaaacttttataaaataaattttcaattagcccaggaatttccatttctgtacctacagaatcgtgagcagtaagtaaaactttccttttatagaaaaggaaagt

SEQ ID NO: 396782 - DNA, 943 bp, Cannabis indica
aaccattgggttacttaaagggtccatattaaagcgttttaggacattttcaatgtagtttgattgatgcaacattatcccattgtgggtatgttcgatttgcgagccaagacaatatttagttttccccaaatctctcatttcaaattctttcttcaattacaatattgcctcatgtaactctttatcagtcccaatgatatttaaatcatcaacatagacagtaataattacatatcctgattttgtttttttaatgaaaacacatggactaattggattattattgtatccattctttaataaatattcacttaaacggttgtacacatacgtccagattgttttaagccataaagggatctctgtaactttatcgcacatatctctttgggtttaaaggttagtggttcaggcatcttaaaaccttcaggaattttcatataaatatcattatcaagagatctgtataagtaagctgtcactacatccataagatgcatttttaagttttcagaaactgttagactaatcaaatattgaaatgtgattgcatccattacaggagagtatgtttcttcataatcaattctgggtctttgagaaaaaccttgagcaacaagcctagctttgtatcttacaatttcatttttctcattttgttttcgaatgaagacccatttgaatcctactggtttcacatcttcaggtgtgggaacaatagtccaaaaatatttcttttggctaatgactctaactcaacttgcatagcatctttccatttatcccaatcatgtctattttgacattcaaagacagattttggttcttgatcatctatgtcattgactatattgcatgtcacattataagaaaatgtctcgttaataactttcgaatcaatttcatttgatgagtttttagtcctgacataatcaactga

SEQ ID NO: 396783 - DNA, 574 bp, Cannabis indica
cctgtatacttctgatactgttatttgctttccttgaagaagctttggcatgaaaaaatttcgtgtttcgatcacctgaagtgagccattccaccctagatcgttgttgccaatattgttcctcattagctagcagttcatctaaaatagcttctgccgaggtaattttttgtgaaaaatcagttgctgaagttgtgtcattatgtaactgctgaacttttttctgagcttctttgatatcctttctcatatgcccgaaggtgttattatgccactgctgcaaagattgagcacaatcagctaggctcacggtcaattgatcaacacaatcagtagcaaaagagtcggccttccaagaatcagcaatcaatcgagaacagtcaggagaattcaaccacatacgttcaaaccgaaatcttgatttcctcctttcaacagtatgttgagtagcaaaactaagcactacagaaagtgctctatggtcagaaccatagtaatcttcatgtgtgacagttggtggtgtcaaattatcaagccacaccgaattgacaaaacaccagtcaattcgttcttt

SEQ ID NO: 396784 - DNA, 843 bp, Cannabis indica
acaagtggaagcacagcaattgaacgacaaggattttcattctatgtgcggaaggcttcactgcattgcttcaaaaatatgaacaaagagggtggcttcatggatgtaaagtggccaatggtgctcctagagtatctcacatgttatttactgacgatagttacctttactgtaaggctacagaagatgaagctcggtgaatccaggaagaattatacaaatttgaacttgcctcgggtcaaaaggttaatttctccaaatattctatcttttttagtgttaataccctgagttccatgaaagatagaatcaattctatcttgggtatgaccacgactgctgaagacaaattatatttgggtttgcctagttcaatggggaggaataaatcgattgctttgggtttcttgaaaaacaaagtaaatagacttcttggctatggtacaaagtttctatcaaggaattaataaaaacggtggcgcaagtactcccaagctatgctatgagtgttttcttgattccacaagaggtcataaaagatattgaaggcttgatgtcaaagttttggtggcaatcttcaagtaactctcctaaaggtatccattggatgtcttggaaaaaactttgcaaacacaaatctaaaggaggtatgggttgtcgtaacttaagaagttttaacttggctctgttgggaaagcaaggttggaggtttcttacacaacctgatgcgcttgttttaaaaatctttaaggcaaggtattatcctcggggttcattttttacagctggtattggcaataaccccagttatgtctggcgtagtgttcttgaagctcgtcaatt

SEQ ID NO: 396785 - DNA, 556 bp, Cannabis indica
gtaaactatttgagagagagcaaaggatatgttctttcggtttttgatgatctgaataccaagaacataagtagcttctcccaaatccttcatttcaaattgagtgtcaatccattccttgatgtcattcattttcttgatattgttgccaataatcaaaatgccatcaacataaaggaccaggaatactaccacttaattatccttgagttggtaaacacaaggttcatcattgttttggtaaaagtcgtaggtcttgattatttcatcaaaccttttattccaagagcgagaagcttgcttaagtccataatggacctattgagtttgcaaactttctcttcttgccctggaagcacatagcattctggttgccatatagatggtttcttcaagaattccattaaggaaatctgtcatgacatccgtttgccaaatttcataatcgaaggcagtagatatggagagaagaattctgatgaatttgagcatggcaactagactaaaagtatcatcatagtccacaccttctttttgggtataaccctttgcgacc

SEQ ID NO: 396786 - DNA, 761 bp, Cannabis indica
gttcactaaaaagagactgaatccatacaagttcggtagtggcaagagcaatggctcggtactccgattcagtacttgagcgtgctaccactgtttattttcgtgaactccacattataaggttgccaccgaggtaaacacaatagccagaggtggatctccggtcgtctatagaacttgcccaatcagcgtctatataggcagtgagttaaagggtggcagctggtctgaagtgaaggccatagtctatggtgcctaccaaatatcgaagaagccgttttgaagcaagccagtgatcatttgtgggattcttgagatattgggacaatttattaactgcaaaggagatatctggccgtgtgagagtcagatattgaagggcaccaataacacttcgataaagagttgggttgtccattggagtgccttgggtggcacttaactttgtgtttggacacatgggagtaggggttggggctgctgcatccatgttggtgcgagcaagtaagtcagatgcatatttagcttgagtgagatagatgccagactgatttcttgtgacttcaaaacccaaaaaatacctcactggaccgagattctttaaggcaaattgctgatgtaattgagaaataagttgattaatgaactgaacatcttctcctgttaataagatatcatcaacatagattaagaggagagtaagtttgccattctttcctagaaaaaagagagaattatcggcctttgaattatagaatccc

SEQ ID NO: 396787 - DNA, 908 bp, Cannabis indica
ggcatttctaggaatttattagaacgatttcttgaatgacaaaaaacctgtcccggcaagtccaaagtactaacaatagtaggacacaatataattaattatcatttatttaatttatttttcatttcacaaatatcatcttttaatcctaactttataaatatcaattctatttatttaataattataattaattatcaaataaaattagcatttaatttggtcattaattaaacattacaaagtctcttaattaataaataaaccttaaatcttcttttattctcaaataagtcattgcttagaattttaattgattaattaaaaccaattaattgagactagaaactagcattatctcagttagtgtggggatcatgggtctatgtaatcaaacttccaataagtagatccaaaatttaccaagtaaatttcataacttattaattcctcctgactccactataaattcagaaatgcactcctaattacatagaacgctctattaccaaaaaatagatgcgctttgaattacccattattttaatctaaatagtcaaagatcctgtatagataatctacatcgagtaaggaaaaatttactgttctaccattcaatatattttatccttaaaatactttagccacttgtaaatgatattcagtaaactaatataattactgaaatgagtgctcaactatttatcgcgttaagcaaagctcgaagaaaattatcatttcacttttaatagttatagaagctatatatttcatatatatgattagcgctcccactgaattatactacaagatgtaagtattgggaagatctacttggtcaactttaacgaataagtcaaagaacatagataatacatttaagtcagaacccaaccatctcaggatta

SEQ ID NO: 396788 - DNA, 588 bp, Cannabis indica
tttgttgaagtatcttgtgactggtgttggtatgtagcgttggtgatctgcgaatcagctcgtttttcctcaagtagacccaaggaccattttaaaagtttatggttttcttcttgattataaaactctcttctgtgagttgatatattcacttcaacaggcaacattacttccgagccaaatgctagcgagaaagcagtgtgtcccgtggctgttttcttggtagttctgtgggcccaaagtacctgaggtagcttgtcaacccatctgcctttggcaacgtctaacttcttcttgatagtatcctttagggtcttattaacgacttccacttatccattttcctgaggctaagatattggcgagaagcttttgataattttattcctctccgagaattcagtgaactagtcgccatcaatttgggttcccttatcgaatactatcttattggaattcgaaacctacatataatgttcttgacgacgaagtcaaggactttcttacaggttatggatacaaggggctcagcctccgtccatttagtgaagaagtcgactgctaaccccgcatacttagctcctcctt

SEQ ID NO: 396789 - DNA, 890 bp, Cannabis indica
actaccgatcgcagatcttccattttcaatcgactcatccatatgggcaaattactctggcagccaaaatggcaagttatacttggagactgaggggtcatcaatggctataggattttggtttctcgccattgtacggaacgaaggtggcgaggatggcttacggggatgggttttcaaagagagagagagttggtgcattcgacaatcaatgataatttatggttcaagaaggaggtaaatatgtatacatatatatatttattattatttatatttatatattagcttacaaatcgtaagctatttaatattaattttattttattggctagctaacgtcaatcgttaaattgattatttagccttttaaatgagatttattcacttgataaggttttcaaattgattcagaatttattttttaaaaaaaataaaaaataaattaagttaatacttaaaaacaattaacaaactgaatcgttttcgtgagaataggaaggtttgatttgaaatattttaaaagtctcacccaataatttctcataaaccaagaattatgttatatagtcccattttatatagaatagatagatataatagaaagaaaaaaaatcttaataaagtccacaattaattgttcaaataaaaaattaatattaatttgagtatgcaaatcaaaagagtattactattaagtattactccgatatattgcgttgtaaataattaatgactttttataatatttattaaattatagtagaaatttttacatgaaaaatccattttacacaatttattacaaaaatactcctacacgcctatatcaacttttttacttaccgtatttgttttattacaaaaataccacttagtcatcatttcat

SEQ ID NO: 396790 - DNA, 1762 bp, Cannabis indica
ctcttaagtgaatggccttttggacggacctcgcccaaaggttcggatgaaatttcaaagtacccaggccggatgaccatcatttaaagtacaattcctaatttctgcaatttgttttaatcaataaatgaataaagatgtttattccaaaattcaaattgagttgaattcactagcatgttgttaatttaccatccagtgcgtacaaaaggtttggtcgaacccaaaaccccgaacagacaaaaaagtatacttgcaaaaaataagtgaccaagagtcataagtctgctcggttacttagggggcacctatacatgtacaaagtatttggtaaagataaaacaaacacagttgcacgatgattataaatagaggatgaaattcattaaagataacaaaaacacgtaaaaccatgattaaaagctgcccggacagcatgttgtctgaaaaatgaaaagtaattctaagttcaaagactacctcttggccggtcgcgatgtcttaaaaaaggccttatggccggacatatataaaaaaaagaagaaagataaaaagagaagtgttcagacggctggagtcccagactccttgtacgggtcttctgggccggtaggagccggaagatctgttgtctgggtagggggcatgtcaacgttcagaccggaagtagaagtggttgcctcagactctccataggctgcctgggaagcacagcactcgagatacatgtctttggcatcgcccaagtaatcaaaaattgcctgagggttagccttccaaaagtcatagaaaatatcgagaccggctgtctctaaggcattcaccttccctttgagcctctctacttcagcgttaagctcctcctccttggacttcttcactgcttccaacctgctgaaaataattcgaagaacctccctttcttcctggaggtcggtcacttctttggacaaggaggtcatggcagcctcaagttggtcagaaggctctaaatcctttgtcagctcgaccactttcttctcggtagcaagaagctttttgttgacttcacccagttccattcggacggctctgagttgtaccctggcttcatcagtgtccttcatggccaagtccacttctgccctcatggtgttggacttggcaacgttcttggaagcagctgacttacctcgagaacaagtgtaagccatcttcagaccagtctgcacagagaaaaacgttagaatatgagcaaagtaaagaacgattaaaggaaactgtgaggaaagacacaatctcgtaaaatccttcaggacttcagccatcaacagctctagggaaggctcgttgtcagctccagccagctgctcattcacctcagggaccgaccgattcatgtagtgggtgagcatatccttgcctcttttgctctctggatgcaacgatggaggtggggtaagagcctggatttgctcagatccgcttttggccagctcggatccgcccttcgactgttcgagcctgtctaagcttcctcctcgagagactttggacttagcagctttcagggaagaagggtccacaacggttagctcttcagaaagattgataacagcttcagccagtgccttctctctggacggtgccttcttggctggaggagatgagcctgagcttcctcccactctctttttcagagcttcgagcatcttctgagacatgtctgcacgaaataaaagcaacatggttagacaaatgcactaaaagtatgaaagcataa

SEQ ID NO: 396791 - DNA, 507 bp, Cannabis indica
gctgcagctgaaaatgagactgggacttcacgcaccaccactacagtgggccattcttgggataggaagttggcgtaaaattccttgacaacttccatgaccgcctgctctctttgttggacaaaaagtccccaatctcgctgatgaatcgtagcactgacccattcgggcaactcatcaatgtcctcaatatcggctactaatccacgctccatataaaattcccgattggccaccttctcgtgatactttgtctcagctgccgggcaatgaaacttaggaatttcatgcagtgacttctttttattcttgttggcggtcttcttaaccttaggcattttcttttctttgcacttgcacactaccccaacacaatgactttcttctttgttgccttactcactgctgccctttttattcaacaccactactctgctcaatttgcaatatttccaacaatactacagagtccaagtcaaaagtgtcacactgctaccacacttaaat

SEQ ID NO: 396792 - DNA, 545 bp, Cannabis indica
atcttttctccgcgcgtttgatactgtcccgacacttggtgtactactagttgcgaattgctgtagacttcgactctttttgccccaacggtttttgccaatcttagtcttgctatcagggctttgtattcagcctcattgttagaagctgtgaattcaaaccgtagggctgcctggattcgaagtccgttcggggatatcatcgcgacccctgctccggacccattctcgttggaggcgccatccacaaataccttccacgctgggacttgcggtgtgggtacacttgcggtagctcctgcttcatggcactccgtgatgaagtttggtagtgcctgcccttttatagaagtgtgtgggatgtattgtagatcaaattggcttaactccatttcctatttgagaagtcttccagacgcctctgacttttgtaggacttgccgaagcgggtggttggttaatactttgattgggtgagcttggaagtaaggtctcagctttctagaggccattaggaggcaaaaaactagtttttcgatcactgg

SEQ ID NO: 396793 - DNA, 1077 bp, Cannabis indica
gctaagtcaggtctggtgcttaccattaggtacatcactgatcccactgcactagaataaggcacttcactcatagattctttctctgctgtagttttaggacattgctccttgcttaggtagtactgattagtcataggttgcttagtttgctttgcattagtcatagagaaattctctaagactttcttaatgtagtttttctgatgtagccttagtgtcccatgttccctgtccctagagatgttaatgcctaggatcttagcagccttgcctaagtccttcatctcaaactcttcccttagccaacctttcattaggtcaatcctggtcctttccttgctcacaatgagcatgtcatctacatacagcagtaagtagatgacttcatcaatcttagtgcctttgtagtatagacaggtgtcataatagctcctagaaaaccctttcttgatcatgaactcatcaaaccttttgttccattgtcttggtgactgtttaagtccatacagggacttaatcagtttgcaaaccaagtcttctttgcctttttcctcatatcctttaggttgttgcatgtagatttcttcctcaagttccccatgtagaaatgcagtagttacatccatttgatcaacttctaggtcaaattgagtagctatggtaagtataattctgatggttttatacttagccacaggtgagaatatctcattaaaatctatcccttctttctgtgtaaatcccttagccactagtcttgccttaaacttcttaggatctgtctcagtgagtccttctttgtgtttgaaaagccacttgcatgaaactatgctctttcctttaggtttcttcactagtatccaggttctgttctttctcagagattccatctctgtgtccattgccttggaccatttcttggcatctttatcagtcatagcttcctcataggtcttaggttctgtcatttccactcccatagcacaaaagaatgcataggctagcacttcttcccaagcagtgaaactgaatctctgtgtaggtctaggaaccctttgttggaaattattttac

SEQ ID NO: 396794 - DNA, 617 bp, Cannabis indica
gtggttcatcttctaagaagtcttatatagaggacattgaattgttgaaatctaagttggagctggtcattttgaatcaagaatccttggccgaagacttcatttctttgaggtattttgttgaccttaatttcaagtctgtaacgactgtaattaaggatattcaagaaaaagttaatgtcattcatcgttgaccttctgatgaggtatttaattatactttatagtttcagtttttaactgcttttatttttagtttttttcctgttttattttagttgcattactgttgtatgattcagggtaaatcatctgatgagttagtaacccaagattctgatgatgatgatgatgatgatgatgatgctgaggatgatgacaaggaattgcctgatcctgagaatattgattcaaactccgatgatggtgatgagttggttaaagatggtggtgatgatgctggagatgataaggttgttagtgatgttcctgttgctgatgtgaatcaatctgagactgttgtaggcagtgatgagattgagaacgttaaggccaaagagtctagtttaaagggggatgattttttcgatggtttaagccagcttgaaattgatgat

SEQ ID NO: 396795 - DNA, 538 bp, Cannabis indica
ccacattagtgacggtttttaatagcattgcctattttacctattttacgacggtcgtataggcgacggttatagaaaccgacagaaatactttaaattactgtttaaaacgtcgagaaaaactatttttatagttgtgattgtattgttttaatgttttattctgctctcgcttaatcaaaaaaaatcttaaatctgctagtgtacacaaataatagcaccttctacttaagaagaattgcataaagggtacctatatttgttagagattttattacaatggaagaaaatcaagatattacaactctattgtaatacaatacaatgaccaacaaagagattaaataaatgttacaacaacataatatacaatatatatacactatatattatatataagaaaggtagaagaagataagaacacatgtaatataatatatgtatatatatataacaagagaataatatatatataaacactcactcacagccttgagtgtagattagtgaggatcaccatgacttgaacaaggtatta

SEQ ID NO: 396796 - DNA, 942 bp, Cannabis indica
cctgtaaaaagcccaaacttcaacaacccagaagataatttcaaaaaaaaaaaaaatccgtttcctttctcttaccaattccaccatttcttctgctctctttcctctagacaatccatcagaaattcctttaagcactgaaacaaacaacaaagtgtataagatttgaagtgaaattcaaatcaaagactataactattctaattgtgaccatatgtataatcaattagatcccaatgaatatggagtttcatttctctcagtctctttcccaaatatgaaataagtaaaggagagaagtaagatttacctcggaggcgatccatggcgaaaagctcaaaatcttcgagcctgacttcaagtgcgggagccgaacggtagagagggagaggagaaaggacatcgttgaccaagggtttccgttgagttcgaacggtctgcataattttcttattcttcttcttctgaaagcagtgagaaagtgcaaaatcaaactgagaaatggaaacaaacctattctgaatttctcccttctctttctgtttttattgttcccgcgcaaaataggtgaaaacggcgggagatcactttggttggttttgggccgataaagtggacctgatacacttggcccaatggatctttaattttagtttaattttgggatttttacaaaaatactaaattttggacaaaagtttacaattttactgtcaaagaatgttttacaaaatactatctttttatataacaaaaaacaacaaaacagaacaattaaaataacagtgaaacaactaaaaaataattaaatactaaaatattacatatttcatagtttaaaaatacaaagttaattaaattttaaatgatatttttatgaaattaaagttatatatttgtatgttgaaaatattttatttagaattaattttatctttgttt

SEQ ID NO: 396797 - DNA, 649 bp, Cannabis indica
tgtgaaaacacttcctgatgtcgggatagctgcttaatattctttacaagaataagagcgcctattaaaggcctgagcacctctaattaagtcaatcaacatatcatttacaagctaggtgactttgtaccagcagtattaattagttaagacaaacacaaattgatgtgtccaacatatatatttatttacaccaaagaataagtttttgaaaaataacaatttggtcccgtgcttcaaaaattgttgaattcaccaacaattattccgttcaacatattaaaatacaactaaaaagttaactattataatttagtaaaattgttgatattggaatattccaatattaatatgacacaatatgaatgaaaataattattagaaatgtacaatagcatcctagctatacgatcaatatatatgtaaactcatagttagtatatattgtttttattatatatatatatatatatatatatatagatatcctgttcagaataagaataaaataagtataaaaaaccatgtatatatccatatacagtagaacctctattcaagaatactctatttaagaataacctctaatttgttataaaaaaatgaagtcccaatttgggccagttataaataagaataacctctatat

SEQ ID NO: 396798 - DNA, 1012 bp, Cannabis indica
gacagagaatgaaaactaggttttgttttgttgaagtgaatagttggatgagatgagagcaccatgttcctttagtatttcaactaaggtttaggtttgaattatataaattaaaaaaaagaataaaatattaggcaaataaataccaagtggtcgaccacactttgtgcgcttcactagctataatttttccactttatttcaaccacttatttttccttcaataatacaatattttccaactacaatcctataaatgtcaaaactatttattcaataattataattaattatcaaataaaatttctatttattttatttattaattagacttaacaacgtttccaaattaacaaataaatcccaaaatatcttttcttcacaattaagcccatacttagtgaaaattcataaataagccatagtctaattttaaaattataattgattaattaaaactaattaattgagtctccaagcagtattatctcaactagtgtgggggacaatgggctatataatcaagcttccaataagcagaactagaatttacaaagtaaattctctaacttattaatttctccttgcaccactatagatcaagaaatacacacttaattatatagaacgtgctatatgtagcaagatatagatatattatgaattatctattgttacaatccaaatagtcaaagatcctctatagatgatctacatcaaatagggacaaatttaccgttcacccttcaatgtattttatcttaaaacacttagcaatctataaatgatatttaagtaaactaatataattacagaattgagatctcaatcatttatctctattaagccaagctctaagaaaattattgtttaactgctgaatacttatagaaactatagattccatatctatgattagcgttcccactcaaattgaactaccatgttcccaagattcagccacctagactttaacgaagaactctaagaacataaataatacaactaagat

SEQ ID NO: 396799 - DNA, 782 bp, Cannabis indica
atacattcaggctattttttatcatagataacgatataacagttaaattgacttcggaggtcgatcatcaattttcagagcttgagtcgcacctgcgagacccattcagagtaagctatggcttaaattcgtaactctcttgagagtggaatttagagttgattacttcataattgcgattgaagtgtgatgcatgacttgatagagcattgaaatagctttgaagtgcaagtcgaatcacactaatcagatcaatattgagggagttatggctattttactgaaggttgttctgctcccaccgcctaggttgacatcccagtgcctaggttgacatattctagcccctaagttgacttgtgatgttaatctggacactgggtgagtgggaaaacgcattgggcatgtatcttttgatgcctaagtgatattttaacaccacttaacctctttgtgttttggtgaagctggtcaccaattcttggagatgttgctcttctgtgaaaatgggagactcgaaactacccgatttctgagtaaagcaccttgtcgaaaaagtgaaaatatgaagttgtgaatttgactcttctaacttcatagctcttatttaccataaaaaactagacagatggttgacacagaattagaatcggataagcaaaacccaacacaccagacatcatatcaacctaggcgctgagtgcttattttggtgcttctgggatgtctttttgatacgttcaaggctcttgaacttgagacgagatctcctaccctatttt

SEQ ID NO: 396800 - DNA, 601 bp, Cannabis indica
ttcaccagcaagattcgaaatcctttcaaatacaagaatccctcgattccaccactcaagatccccttgagtaagctagatgaatcccttcaccagcaagattcgaaatcccttcaaaccagatctaaacctccgacggctctagcaagcttcaccttctttttttttggaaatccggggatacattcacatggctaattttgagatttggctctgataccacttgtaaggaccgtcggacaccatctatttctccattggaatgacattgtccgctttgggccaagccctcacggatttatttttgggcaccttcccataaggcctcattccaatggagatagtgtttatccttatatacccaagatccttcctatttctatccaatctgggactttggatgtacacccaatagataccaattaaaaaactgagtttttgcaaatgtcaataatgtatacaaaaatataaaaatgtatacgcctgcagaagtataatgtaattctgttactacagaaactagttttgcagtgacataacagaacagcgagaatataaaaatatttgcagaaaattaaataacttgacacaagagatttgt

SEQ ID NO: 396801 - DNA, 604 bp, Cannabis indica
gttctatcactagatgtatttcatgaatatctatcagtttaatttggatttatttaatattttaggcttattatttattggatattaaattcatctaatttttagttctagtatctatagattgaattggatctatccaatccaaaaagaaaaaaaaattaatattaattactcattcaaactaattcaaaatattaattagttcgattagatgttagatgtattggatttttagacgctccatccaacatccaatctgatctaaatggatattcaaaaatagcatttaatttgatccgatcacaattagatatttaatgtttaacgatcgctttaggttggtcggttgttattaaattggatcaatttatgcacactcctaaaatttagaaaattttaatgttatagtacgaattttttgcctagaaactcgagagcagtctcaaagacttagcctcgcttgatctgaacttgcgagatgatgcgaccttgacaagttctagtcgcatactatgccttgcataatataagaaaagcaagactgagacatgttaggctatttttagcctaagtttcaggtcaattttacagttttttttttttt

SEQ ID NO: 396802 - DNA, 622 bp, Cannabis indica
ttgcatggaaagatttggatctatgaaccttcaatcgttcagggtgattcaaatatgaagaacgcttcttaggctgaaagccctgaggaaattattccgagacctcaggagattatggcagaggttcaatatattacctgcgtgattcaaaattatggtggaagtggtaggagctccatgattgagcggaagaggaaacctacgtcatcagtagtgggtttaagacagaacaagcggttccgaaggtttcaagacaaaggaggacgccagggttattcttaccctgagttcccacgttgcatgaaacaccatcccggagaatgtaagcgaaaagtatgtttttaatgtggtatggttgggcattttaagaaagattgcccacaggtggagaaagaagagcaagagctggaagcgatatttgttcctactctggtgtatgctaatgtttaagctgctgatgcagcgagtccttctgtagtggcaggtcagctccctgtaaacgacttcttttatatcgtgttgtttgattcgagagccagacgttcatacgtagctatgagaataattaatctttttgggtaggccttgtgatattttagaaagagggtttggaaccctaatg

SEQ ID NO: 396803 - DNA, 533 bp, Cannabis indica
tgatcgtgttttgtttttctgggattattttgggggacttttagtaacaagagaagaagatgatcgggcaacaaccattgttaatgagaaaatggggaagtaggggtaggaggattatctttcaaactcttcttacccattaatgatcgtgttttgtttttttggggctgttttgggggatttttagcaacaggactagaagatgatcgtgcaacaaccattgttaatgaggaaaaacaatatttatagaagaataccaacaaccactacacaataatcgcctgtaaataaataaaaaaaccggaggaagaagatgaacggtacaaaatgggaaaagtgtgaattatgtaataatttttaaatatgaaaaaataataaataataataaaaaaatacatttaataaaataaataaaccgtcacaaaaagtgacatctcactaggggtgttcacaaagtatccgatccaatccaatccgcacgatccaatccaatccaatccgcaaaatgcggatatccgcacttgtgcggattg

SEQ ID NO: 396804 - DNA, 1450 bp, Cannabis indica
ttatgtgtatttttgacttttattctaattaagttttgttgattagtttagtatgttcgtattttttgagtttcatactttgaaaatttttcaatctaaggtattcaattcaatcaagtgtgttgatgactaaacttgtgtatgtgaattaattcatttgtggtggaccgactcaatttatgtcctagtatagttggaattgtattttcttcgtttttttttttttttttttttttcttttaatttataattggttttatgatatattgtgtgttatttatttttatttattttattgtgaaatcggttttattttaatttataccccaagtaatttttttattcaagtcatttaagaaaatatttcttgaattatttatttcaaaacctagttttttttatttaattaattcaaggaacaggtgtttaatttagtcatttcgggaattgatttttaatttagttaattcaaggaactagtttttaatttatttatttttatctaactggttttttgtgtgtacgtttttatcttggttgttttacagaataaattttaactagttgataaatataagaggttcgttatattattttttgagttattgtgtgttattatttgtttttatttattttgttatggaaccggttctatttatatttatgccgcagtatttttagaattgatactcacatgtttaaaaaaaaatatataatcggttttaggaggtactatgtgttattcattttttttacttattttgttatggaactattttgttttaatttatttttagtgttttaggaactgattctctttatttttttaattataacatgtttgagctattatatgttattcatttttactcattatgttatagaaccagttctatattaattataactcgtttgagttattttgtgttaattcatttttattcattataaaattgttataaaacttgttctattttaattataattgatttgagctattttgtattatttatttttattcattatgttatagaaccggttctatattaattataactgatttaagtaattttgtgttatttatttttattcattatgttatagaactgattctattttgaattattactggtttaaattattgcgtgttacttatttttattcattatgttatagaatcaattctattttaattcatattttttttgctgaacatattttaatttataataggtttgagtttttctgtgttatttgtttttatttattatgttatagaaccggttctattttaatttatatctgagacatctacatttggtgatttttccagtgatagtgacttttccgatgattttttcggcgacaataatttttttagtgactttttcaatactcgtgactttttcagtgattttttcaacaccagtaactgttgggttttgtgtcc

SEQ ID NO: 396805 - DNA, 619 bp, Cannabis indica
atatgaatttctaaaacaatataaataaacacatataaagtttcaaaaaatcttacggtgggtgcagcgtaatattaatggctccttccacttagatctctaacccttgtatcctgtctgtagcagagtatcaccaagatctgagcctgaatgtccttctcttgattctggattcttcacagccttacatactatgattgagataccacttgatgtgtgtgggcactcactctatcactcaaggtataaaagtatgaaaaaagaaagagagaatggtgattcgaaaatagaagggaagatggcttaggaaaattttactgaaggtgaaatttcatcatctttaagtgtgagccatcactatctatttaaaggaacccacctaggtttaggttatgatttattaggaattaaaataatgaagaaattaaatggaaattcctttccctagtggccggccataggatgtttgggccccacttggaaatttttccattttacaacagtcttttcttattttcttaaaaatgccatttttctaattctaaccacttaaatgcccaaactatttattcaataattaaaattaattatcaaataaaatgtccatttaatatattta

SEQ ID NO: 396806 - DNA, 1177 bp, Cannabis indica
ctgtccttgcaaagaggtcaaagttttaccagcgcacatttgcagtagctaaaatctaacttttaccagcgtatttgcgcgctaggaaaagtcacttttgccagcacttttcattttgtgttggtaaaagttctaatacgtaccaacgttgatttaccaacttttttgtcaacacatcagaagtaaattgtattttactagcgcaatatcaacttttaccaacacaaaaatgtactaacaaaagtgacaggacattcatttcctattatatattcatttgtttttatatagagaacatacatagaaatattgtaatatatattatattttggctaaattttgtttagcttttagctgaatacattgatgggagtactgctcaaagacgtttctctttcattggtattaactaagcatacacgctgtcaaatcttagagagactttctcaatacaagtgattaaaatggagtaggtctcttaatggttgagccactataaaactgaccagttattatatatatatatatatatatattttttttttaatgttgctttttaatcttcatcctcttttaatttcttagttgctgaaaaatggcttcaacagtcctaaacaatcactccatgttattcatactatcaagctagtccccccaaatactatcaaattaaccatcttccctcaagtgggtgagcttggttgtgtagaggtaatggcttagtcgccgagaatgctggtgcagtactcacgagaaaagacgataataacttcatgatggttgacaggctaagtgtatgttttttgtgaacaattagaccattaaaaaattgtgctatatttctcacaaaaaataactttatgtttatggtagatataaatcaaattttagcattatactctaattttatattgcaaaattttaatgtaaaatttaatatttagccgattaatatttttattaaaaataaaattaataattttattattattttaatatataaaataataaaaaataatataaatacaatttaatgttatagttaaatatattaataaaataaaaatattgttattggccaacagtgttgtctatcacttttttagacatgttattttataattggctagtaatactttctaaaaaattatcatattaaattatatgagacatgata

SEQ ID NO: 396807 - DNA, 523 bp, Cannabis indica
cgactactactagtactaggtgtcaagcgatcttctacgagaccttcttctcttagtcagttaccctgggtatttggaacaatagtgggctcaggttcaaagctacaacagtatggacctctgtatattgatcgtctcttacatcatcattgccttcaaaataccattcagggcctgaaccatcaccaaaatcatcatgaatgtgcatttgtgctacaatatcaattgttggcatcatattgtttaattcaagtaacacatcgattgccaacacctctagatttgtttttaaaatgaaactcccaacctcgctacgagtatcctaacaatacttgttgtgggactaggatcgatacaaatattattcttcaccaaagacacaaacaaatgagtaaattcatctggcttcttcgcaagcatagacaaaaataaccttacacgcttatcatttccaataatttcaaggcgaaacattatgcctttcatcatttcatgtacttgtaattcacttctaatttcaagt

SEQ ID NO: 396808 - DNA, 1204 bp, Cannabis indica
agtgttgtgttatttggagcaattttttccgccttctttttttgacataatggttcacctaacagtgcatttggtgagagaggtaaagttgtgtggaccagtgtacatgaggtggatgtacccatttgaacgatacatgaaaatcttaaagggttatgtgagaaatagaagtaggcccgagggttgtattgttgaatcatacattgttgaagagacgattgaattctgttcagactacttgtcagaggttacaactattggcgcttgtcctactcgggtcaatagtgaaataagtaaagggagtaggggtgtttctgtttgcggtgtaagtcgagctgatcgtgaagaagcgcatcgtctcgtcttgcaaaatattgacgaggtccaaccatacattgagtaagattaaatcaactattcatacttaaaacaaattaataatattcaattgaaactaaaatcaatcgaatgctttattatgttgaagggaacattttaattggattaagagtaataatccgactaaggcaaggaatcaaaaatgggtacaagatgaacattatcgaaatttcagtacatggttaaaaaaaaaggtattatatattaacattattgttttgtttcatatcttatatatacacatgtgctcactatttcattggtgcatattaggtatatgctgaaaattgtgaatccccaagcaatgtatccaacacactgctttgcatatcacgaggtccttcgtgtgatgtactcaagtaccaatcgtactatataaatagtactaaattttgtaccaaagatcgtgataaatctagaaaaacacaaaatagcggtgtcatgatagttgctagagctttccaaatatctagttcaaaagataaaaacccaattgaatgtaatatgtctttttacggtgtaattcaagaaatttgggaattagattacagtagttttcaaattcctgtttttctttgtgattgggttaggagtgataatggggttaaagacgatgaacttggattcaaattagtggacttgaatcgaataggccacaagtctgataggtttgtaatggcgtctcaagccactcaggtgttttacatgagtgacccattagatgcacgctggtcagttgtcatgacaacgcaagcaaaagactatgctaaccaagagcataatggcgatgatcttatgataagtg

SEQ ID NO: 396809 - DNA, 864 bp, Cannabis indica
ttttgcttgcgagtttaatgctcatctggtgactagtgcaagcatgtcaccgtattctggcccatactcttcatcttctatagatgcatcttccaatggtggcatatcagcaagctcttcttcatcttcagaatctacttcaccgttttcccgcatcaccataactctcttatttggacattggctagctatgtgtcctcgcccttgacatttgaaacactttatctcactagaacgagatgaaagaggggctgcttttccttgaggggttgtagttgcggtggctggtttgggtgcagaggatgaactaggttgatcctctttctttgggaagtttgacctccaaggtgttgtatttggattgtgtggacttggccttggctttgagctcgaactacccttcttgagttgtctttcaactttgattgccatgtgcaccaaatcttccaattccacataatggtgtagttcaacggtattagcaatctctcgattcaatccattcaaaaaccttgccattgttgcctcccgatcctcttccacattggctctaatcatagccatctccatctccttgtaatactcatcaacactcttgtagccttgacgaagaccttgcaacttgaggtacaagtctcgataatagtgagatggtacaaaacgccgtctcattaccctcttcatagcctcccaagagtcaatatctcgttctccattcctcctcctgttcatgcacaactgatcccaccaaacatagcatagtcagtaaattcaatggcagcaagttttacctttttcatttcagaatagttgtgacaatcaaacaccaattccatcttcttctcccactccaggtacgcttca

SEQ ID NO: 396810 - DNA, 709 bp, Cannabis indica
gctatagaaaaataatataagaatacaggatttttacgtagttttgcagttaaaattctgcatagtccacgagtcaatcttattcagatttttgagtatcttttttagggcctctttcatatgagtttttttttatcactttttgagattgtttgccactattaataagtacatagtgggcatttaattacaaagttgaccagaatatgtttacagccattatccctaaaattgtgggatttgattacatataatgaaatgtaaatgcggtgtatgattttgaaaatcgtatagctgtgattttcccgcttttactgggtcaaaaatatcgtgtattaaacacgtctttaattattgaatttggaaatatctcgacagaaacttgattatagtgatcccaatagcgagttgggaccattcttctttccgaggtcgaaaatgtatgtcttacgtcaatcgcgtgtataaagaaatcttctgacttgctagggttatgagcctcgctcctgctagttggatgaaactataggaagtctcctcatagcgagatggtcatctcccatacttgttcttcgagccgatccgacttttacacttagtttgcttattgcaagctaaggtaggtgtcacttttctccagtgcctcgctattcacctttggcgacatatggtttctcgttaatacactaagtaccagtttgtacattga

SEQ ID NO: 396811 - DNA, 773 bp, Cannabis indica
agatcttctgctcaagaacacaaaaaaacagtagcaataataggagtagacaatagcaaaacagtaggaattgtatattgaatgtatgagaaattcaattacaaagtaagggagcccttaggcccctttggtgcaattagagatttactcaaaacattgcataaccaccaatcctcctaagtattctatatatactattgtaatctcactcaaacactcctcttaatacaatgacccaattacccttttatttaatatatgttagaacaccacactaatcctaggtcctaacattaccggccgcccgagtttcaccttgtcctcaaggtgattgatgaattcactcaaatctagagccctatgttgtatgcgacctctgtcaaagaaccaagttagtaatgtggtattttgacgtgtcctcgatgcacccttggttggttggagtcgtgtttggcgccctctatcaaaaacccaatacttgaatggcactagtaaagcaccaaggttaaacttctcatccaccaaaggtattttatttttgcctccaataacatgacaaccttcaccatttatgagcaaaaaagtcactttcaagtgttctttcccatctcttgtctcatgattgtgaatgtaacattttgggtaggacatccaaagttgcacccctttaaaaataaaatggctcatttctttgtttaattgggccatgaccacaacttggtcaaagcaatataaactttggaatgtctgggcccaagatggagtaagtaaat

SEQ ID NO: 396812 - DNA, 886 bp, Cannabis indica
tgtaattgagaatttgtattgatatttggatcatgcttttatgtatgagcttatattctgcgattctaatgcctgaaaatacattggtttagcatggtttttgcttgtgtatgacttaggtgaagttaggtttgtgtttgggcatttttaggcgttaaaaatgcaatttttgggtgttctggacccagtccccgcgactaggtttggcagtgggattacttattttttccaattttgttttagccataacttttgactcgggactccgtttggacgttctttatatcgtttgaaagcttgttttgaactctatatgttagtctataaatggaatgctaattatgtgattattgaaagtgaattttgggattaaccctatttgtgaaatcttaggaatgtgtgactaggactaccaatgcttgctcaggaacacccgagaaatttggaatctccgcatacttgggataccatgtaagacagtagttagcacgtagagttaagtgcagtggctctcatgtttgatattatgcttgtgattaagtgagaaactaagattatggttattaccctgaagtgagtggttatatggtctaagattattactctagtgattaaatgattttgaatgcaatgtattgctatacatgttaagataaataattatgcgggtaaatcgtaattaggttagactgggtgatcaaaatcgagataaaccaatctaaggtcttattgtaaatagacgtgtgagagcaacacgtaggtctatgctaaatagatagtagatgcagtgacatcagtatttatttaaattgagaatatatttcatattgtttttttactgtcttcctgggcttggctcacgggtgctctactgtgcaggaaaggg

SEQ ID NO: 396813 - DNA, 792 bp, Cannabis indica
ggggaggtgtgtcgagtggtgtgtgtgggtgtggaggctcgcatgtgagccgtgtgtgcatgtggagaggtgtgtcgattggtgtgtgtgagtgtgggggctcgcatgcaagccgtgtgtgcatgtggggaggtgtgtcgagtggtgtgcgtgagtatgggggctcgtatgcgagccgtgtgtgcatgtggagaggtgtgtcgagtggagtgtgtgagtgtgggggctcgcatgcgagccgtgtatgcaggtgtgagagaggttactcggggggactataaacataaaatgagaggtaggtacacatcgacaaggatgacattaggtgaggactcaagataaaaggcgtgtaagagaaagcatacaaccacgccttctgaaacctctgaatgtagggaggtacgagtagcagagacaggaaggtctgaggatccgaccaagggcacgcatcaaccactctcctacaacgaggaccacaagcctgcaaccatggaccacaggcctgcaactagggaccacctgacaccagataaaagtacgaggtgcagggccacctccaacacctttggcctacagcttgaaagtaacattttgtcccctagggaccaccttgtactctaggtcattagagcctataaataccctcctcacatgtgagaggggttgggaaaatcaattggtgtaactcaaattttaaattcaatagagaaaacaatattcagatatccttgtttctttattctcattacattttgaggtaactttgtgttttccaaccactaacttagttga

SEQ ID NO: 396814 - DNA, 634 bp, Cannabis indica
gaattaagttatattaagcaatataagatagatttaattgaagttaataaccctaaactctaatcattttaattttcattctaaattaattgcttttatttgctttagattttaatattcttccttaaatttttattgtgaaatagaattgggaattgaatctattagtactttataactacaatactcgtgggattgacctcactcttgtaagtttattacttgaaaacgatacgtatacttgtgtattgaaaattcacaacattaagtccccataaatcataatgaacttagtctagaatatcttgtgatttgtgtgtgccaatttgaaattttaatctatatattttcctaatatacaaaattcacaaaagtcaaccttggttaccttttctttaccaagtaaaatttgttcactcatgatttgtaagcctctttcactaatatgtcctagtcttttgtgccataagacaactttaatgtcttctattacatgttattctttaatgttgtggcggcaagtcattggacttccttgtaggtaatagaccatcttcaatggaagatctaaaatttgtattaaatttggcacaaaaaatgagtttgtactatggcccactatttacaattgtgc

SEQ ID NO: 396815 - DNA, 760 bp, Cannabis indica
tgtcttttccaaagacccctttctgatgtagaattttcagacctttgtgactcacatgcccaagtctcttgtgccaagtcatggtagcattgcaccttacagtggcattgatctggtccttcatggtgcttccttgtaggacatagatgccatttattgatgaacccctcattataaccttagaacctttcatcaccttcatctcaccattctctatcttgactgaacacccctcatgatccaacatagcaacagagatcaagtttctcttgatctcagggacatgtctcacctgattcaacttgacatttaagcctccacctagaaccaatttcactgtcccaatcccagaaatagtacaggctctgttgtcaccaagtttcacagagccagtcttgatttcttggtaatcatggaattggcttctgtctgggcatacatggaaagagcaacctgaatctaagatccatcctagatcagattgttttttcgagacaacaagtaccccagcactctcataaccatcactgtctgaacattcagacacaatgtctgcatttccatttctgttttggttatagttcttgaaaattggacaatctttcttcaggtgagttgattgattacagatgtagcatctcctcttgttctttgaatttgtctttcccttactcgactccttctttccactgttctctttcttgaaagttttccctcgaaccatcaatccatctccagagccttcatcttgaagctcagc

SEQ ID NO: 396816 - DNA, 703 bp, Cannabis indica
ctcctctattatgcatcttttcagcttacttccagcaggtggtgtattctcaacactcacatttgcatcaacaggcacaattgctaattcaccattgttgcctccaaaagttccagataaatcagcataaacatccaccttcctatatctctgttgtctcatgtcctcaaacatagccaacaaatccttgtcagtcttaagctcaaatccatcatgtagttctttgtctttaggcttaaaccagaaatacagaggggaaccatgacaccactgtacttgcaaaagcatcccttcaagttccatcatgttgaagaaatctgtatggcacttatcaaactcggttgtagtgccacccacatagtgtttcaacccatttctagtgcaccaagaacccccatggtgcatattcacactaaaatacaaacctgccagcaacaaaccaaggccaatttacaataaagttgatgacatagagcctaaaactatgtgcaaagatgctcacatgctcacatgctcactagtcaaagcctataccccacacaacattgaaaaatagtttaataccaactttatcatgtcccaacaaaaacaatatagatcaattaaatgtgtacacctaacacattatactcaaccctatataaatatcaaactgccatcatctacacacttttttcatacagtgaatgggaaatggaaaaaa

SEQ ID NO: 396817 - DNA, 633 bp, Cannabis indica
ttagttatacaatttttaagtcttgtatttaaaaattatacatctatataagaataattatgtccccaattaattaagtttctacttttacttatagctagaagtataagataagtataatatacttatcttaatgatattcaatcactttgaaaattactcgtgttgtattagacctcacctggaccacttattaatacagcttacagagaagagaagagatacaaataaaaataaagaccagactagatcctatgtggcttcgcctctagtggatcaagatctggtagttagttacaaccgaaattgtaactaactcccagaccttgatcaaccctaatctacatgtatataaagagtactagagccttaccaatctctcagttgagagataccagaaaccagaagccagaagccagatctgagagttttactctcaaagttacagatccagattgtacatgcaaaagaaaatacaagagagttagtgagatagtgagaaaaccaaaagaaaaacacagaaaagaaagatcgagtgaaaaccagaaataccagtcgagattgtgacttggatttctcacctgtttgtaatactcttctcaaaatagtgcagatcctgagaaacgtcttcaa

SEQ ID NO: 396818 - DNA, 935 bp, Cannabis indica
aataatatttatctcaagaacaattccttctggacctatgacttaaagaatgatacaagttggtattggaggaagctttgtcaccttcgcaacaagttctcaatgacagatatcaggaaagcaggggctggtgcgaatcatttcaagactaagctgctgtataacagcagtattgctcaagaacaattcggtttcagcaaggttatttggagttctctcaacatgccaaagcatagattcatattctggcaagccatcaacgatcagctcttgacaagagataagtttgccaaatttcagattgctttagatactactctatgcccggtttgtgctgttgtagaggagagcaatgcacactgtttttttgagtgcatcttatcgcaacaggttatggcccaagtctgcaactggtcgaagacatgctgctggccgactggtttttaaattggcagcagtggttaagtttgaacagcaaggacaagcgacaaagagtgcatgtaacaatcctggcagccatgatttatagcttatggagcaatagaaacaattgcatattcaacaacttctcaaacacagctgtaaagatcacgaaggacatcaaaaatatagtatatcttagacttcaaatagcaaagaaaggtagtctaaaagactatgaaaaaagatacatagagagattgtatatgtaaagcagtttttttttcccatggtttgggctattttgatgtaatttgtttctgattaatgaagtttgaaaaaacttcaaagcatgcaaaatttccatttcttacaacttacggaaattaagagaaagttgctcaaagtttaccttagcttggattacacttagaactgctggaaaatactgaattgaaggagcaaaaacaagaaccctagcttgtaaagcccgcttagtttcatttggaaattag

SEQ ID NO: 396819 - DNA, 537 bp, Cannabis indica
agttaaacgtaaacgtaggtagttgtagttttgttagtacatactatattatttagtttctttagtttttttaggttttttttttttttttttttgaagaacaatatatattttgttatagttgacaattcaacttcttgaatttgaaaaatattattaataaatcattaatattgataattttcggtttatcatttaacttataatttcattaattatttaaaaaagtttattctacaaagatcccatttgaatatttttttatttgtttaattttaaaagctaaataacttattaatttgcagtatttatacaagagaaaatatgaaatagaatttctctaacattcctctaaaaatcatatttgagtatccctcatgtttttcaaaattactatatttcctcttaacaagggtcctttttcttcactaaggtaattgtcctacattgcttaggtatatttattctagttcatcatttaggtggcgtttggtaataattttttaatcagttttctgtttttaaaagtagaaaagt

SEQ ID NO: 396820 - DNA, 627 bp, Cannabis indica
attggacctcagtgccaacatagtgacagatgatcaagatttcatgatggaagcgaatcttgcttggagaagattcaaacatcagtatggccgtggtgtaggaaattttggcaatcaatttgccaatcagtttggaaacagaggaaattgtggaaatgagcaaggttacatgactggacaaggttctggtagaggcaatttccatctgaatcgtggtggcagatctggagttaatttgaacaatagagtccaatgtcaactgtgtttgaggttcggtcatactgcccatgattatttttatcaatttgataagaactttacaagctcacaggcaggagcaaacaatagcagcagtggtacaggacaatctcagcagccacatgccaacttagctagcaactgttggaaattattttaccaggatcttatatctactcacaagtatgttaattaacaccctaaatatgaactttctaaaacgatgaaataaacacttataaagtttagtaaaccatacattgggtgcagcggaatataataactccttccgttcagatatctagcccttgattcctttctgtagcagagaattatcaatatctgaacctggatctctttctctgattc

SEQ ID NO: 396821 - DNA, 692 bp, Cannabis indica
atatcttaataaccatatgggtcaggattccgagtatcaaaatacatttaaaagtattttactaatatctacatataatatttattttttttaaacttgctagcacgaaagctcaaaatatagactccaaaacaataaaagaccgaaaccctccaagctacactgctacgatatgtacaatcactgccgagctctatctcactgttcctctagctttgcttttcctttacctacacaaggtaccaaactgatgagtcaacagactcagtaagatatgcaagatatatatatataaacttaacgcgatgccggctttatgattaagccgccctaagctcaatagttaagctcccaaatggataagaacattcttaagggaagtacgactactgtaccaaatgcactaatgtaccaaccctgtactagtgttggtagagccctaactgtactcccgcgatttactaagtgttgtaccacgaacacgacgtacccctcgtactcgtgttggtaacaccgtaaccacactaatatacaacactatactaacaccctgatagttacattcatattagtgctagtagtgcaatcaactaaaacaagcatatattcatatatatattcttacgctatcttacctcgttccgtgctcaagtgtgccggtcagcctgagtggaaacgcagctcgacgcttt

SEQ ID NO: 396822 - DNA, 894 bp, Cannabis indica
gtaaataataatcaaacattaaagcatataaaagatacataatcatgagaaacaattaaataaaattgaacataaaataaagcagattcaataaaaatgtagtacatactttcttttgacttctagctttctttcgtgtattaatttcctttgcattatcaactttcttgcgaagctttagcttattacaatcgaatactcgttctatctgttaaataaaataaatagaaaattaaaaaaaaaatagcaaggataataacaagcacaataaatataatttaataactaaaatcggtttataagctcttacataactgccaaaatttaataaataaaactgatttataacaaacacaataaaaccattccttttctagaaaagacaaaataaaagagtatgaaaatggcaatcacaaaggaaaactagttatgtattattgtttccgttctttttaacagccacctcaactattatacatcaagattcataaattacaacagttttaattccttttaaccacacctcaatatatccttccataatatgttgtaatttattgaggatttgtttccattcctgaataaattacatcatatcattagtttgttttttttttttaaaaaaaaaaaaccagtttcaataagggcaagcataacttttaaccggtttaaaaattacaatagttttaattcatttagtttttgaactagtggtgtggttgtatacatcaagtacaccaaatagcttcctcctgcaagtccctttgacaattttctcaaggcaggtggctgttaaaaggatactactactataaatctcacactatgtcaaagtgcttaacagtgttgtaaatcactaggagattctctgttttaagtttataattaactcag

SEQ ID NO: 396823 - DNA, 828 bp, Cannabis indica
agctgtgccaaactgacccttagaaacgaaagctataatttggccaaagagagaaagtagcgggtcaagacaacttctcctcattgattcggacaatttttcccaatttgatgcaccaacaggtgctttagtcattagacatccaccgttacaccacataaaagagcaataacccctagtttggctagcaatgtgtgaggaacattgagaattttccaatcttatttgtgttaaaattttatactttaaataaaattcatttcaatataattaaatttacttattcactatataaataaaagaaaatctattggcaggacaaaaatggtgcatagatttttcgtgccaatatacgtttaggcacgtcatgtcgtgcctaaaattttgtgcctaaaggagtctattggcactacaattgaatgtcggacctaatagaaatttttgaataaaaaaaaagagaaacttacaaaaatctgacttttgaccaaatttttacaaaaatactgtcacacggtagaaataacttttatattgtcctggccctttttttttcttttatactgtgaacagtaaaaagagagaatgaggcctccttcttggcattatcattggtggcatctttggaagtagaatcaattttggcacaatcatcatcctttaaaacaccttcagcaacaacaccagcatcatcattcctcacatctccaactccaggctcaccctacccaagacaatctccagcatcatcgatatcgacgtcatcatcactaccatccccataatcatcatcaacaatatcatctcatttctcatcctcttcttcagcct

SEQ ID NO: 396824 - DNA, 541 bp, Cannabis indica
ttacaagctcattttagataacgaaaagcaatttggttgtaaggagatgcgacagttgtgcaatgacttaggaatcaaaaaagcattttcagcagtcgcctacccgcagagtaacggacaaactgaagcagtcaacaagataatcatacacaccatcaaaggaaaactcgaagagcgtaaggcggtatggccagacgagctttcacaagttttatggtcatacaacacaagcccccaatccacgactggtgagtctcccaacagaacgaagaaaaactatcgctttacctcgaccttctagaagaaaagcgcgatcaggctcacctgaaaaatgtggcttatcagcagcgaaccgcaaggtatttcaactctaaagtcaaggaaagagttctgtgagtaggagatttggttcttcgaaaagtaatggcaaacacgaaaaaccaaggacatggggtcttcggagaaaattgggaaggaccatatctcatcgcagaaaaaattggtaacgcaacataccaactcgcaaaactcgatggtactg

SEQ ID NO: 396825 - DNA, 619 bp, Cannabis indica
atttgttatgtattaaataatactatcaaaaattttcatcgtaataattaatacaatacattactttatctaaacataatattatttattatttaatacaatataaccttaatacagtgtaccgaacgagccacaataatatattttaacaattctttattgtgaaactcaattatttaagattatatatgcacatgcatatctgttgtagaatgagattgagttgacactatgtggcacaacttaatttttttttttctacaaaataataaaaataataattgcaaacattttaatgattattaacgtaaaggtaggtatagtgattgtaaacataaatatttttacatatatataaattaaattatgattttaattatttatttttggggggtccttcaataagaggatccttatctacacaacaatgaaattgttgatatttataacaaagcatccaaagtcttcatcgatgcaatcaatttgtcaatgtccttaaaatacttccaaaataaataaaaaaaaataaaaaataattaactttttttattagatactcctaaaataaatattattttttaataaaaaaatattttttttactactacttgcttcgaac

SEQ ID NO: 396826 - DNA, 577 bp, Cannabis indica
acagaatcaacctgatcctggagcaagaaggccatgaggtagacctaggggttcaagaaccaggaggcaagaagcaaatcaaagaaatccccaaaatacctaggaggaacaacctgggggtattagggatattccagtatatgaacaacagaataaccaagcacctcatcaagaagtacctcaaagacccaaaggatttacgaatcaggggaatgaaaacaatgatgtactagagaattctcgcagaaacgagaatataaggcaacccagaactaaggaacatgaaatccctcgtaataatgagagaaatcttgagactcaacctagaacaagtgggttaccacaaacgcaccctcattatccttctcgatctaatagggaggaggcgtacacatacctaaacagagggcatgtatctaaccttttttgaaggagaaggattgtacaagacaaggcaagttttagcttaggacactcgaggtctcgtgagcaaagccgattaagaaggcaaaagtaagaaggatgctgtaaagaccgcttaactttaatttggaaattagcagataaatagggttta

SEQ ID NO: 396827 - DNA, 723 bp, Cannabis indica
tgtcataagttacttctatgaggttggtttgttattgttttttcttttttttttttgaaagaaagatgtaattcattaaatcaaatcagctgttacaggagtactaataaacctaggacaagcatctgtccacaaatcaacccctacagaactagtaacagactttgctagtgcgtgggccacaccattcgcaacacgcgaaatggcacaacaagaaccaccaccaacagcagctaagagagaaataatctcctcaacaataggtttatactgaaaaattagaattcggaaaagtaatccaagaattaacaacagaagaatccgtctccactctcaccaaccagtaacccagcatagatgcccaccgcagcccaacacgcatagccaaaagctcagcaaccacaacctgaaactccccaaccccacccaccgcccaagccgcccacacctcaccatcccccccccccccgaacaaacccccccaaacccagcaaaccccctacccggtgtaaccgccgcatcaacagacaacacaaactcaccccgcattggaggacaccatctacgagagacaaccgacccaccatcaaccccactcctcatagccgccccctcaacccccacacccgccccatgaaattcaactaaagccgcatgcgcaagctcgacaatcccacacaaccgcgattgtttatgcccgaacaagacagaattcctatcata

SEQ ID NO: 396828 - DNA, 620 bp, Cannabis indica
aacgtgtgaaccctaaacatagattaattgatacgaagtaacataatagagaatttattggtataactaactacggctaataataatgaactgattttaattagtgtaattaatgtaataatgttccagtaccctaatactccaaaatgttaaagacatatataaaaaaaaattattaaaacattaattaagatttttgtcccactagctatatattaattatgtattatcatgcttcgatttttttagcttgtttaaaaaatcattaattaagtattatcaattggtgccccactatatgtgatatttattatttaatttttaaaaaatcatgcaattttttttttaaagataattagctaaaataatagtttgcaatccaattgaagtatcttcctattaaaaataagatcgggattaaaattagaaaaacgagtcaactaatcgactatttaattcttctatcatttcacaaaaataaatatataattataaatgggtagagccttagtactagaggttccaatcaggcccagctatggcataagcgggctaggcctgtgcctaggacccacctagctcaggcgcccaaaaattattttttccttttaaaattatat

SEQ ID NO: 396829 - DNA, 623 bp, Cannabis indica
tggcagtcttctttcggcctatagtattctgcaaaccgagataggtggtgttatcatcggctttataaatccctaactgtccacagatcgaatctctcatagcagcttttagattagaattgaagaaataaatgatttatcaaaattcattcgttgacccgaagcttgctcataaagatgtagttactccataatagaatcagcttcccgagtattagctctacagaagacataactatcaacagtaaagagcatatgggaaataaccggagccctatgagccacttttcacccatgaatcttgccatcaacctcatattaccgcaggagactcggaaaaccttcaacacagagaatgagataaggagatataggatccccctgacgaataccatttgtaggaagaactaaacccgtctcacgaccagcatgcataaaagtatatgataccgattccacatagtgcataatcaagttcacccatctcccatcaaagcccatcctcagcagaaccgcagaaagataaccccactccattctatcataagccttactcatgtcgagctttaaagccatcaagcctttcctcccctgggttttcctttttaaataatgcatgattt

SEQ ID NO: 396830 - DNA, 577 bp, Cannabis indica
aacaattttaatagtccaaataaaatttttaacgacaatgaaaattaagagacatgatttagtatatgttaaaatttaaggacactttggtatacatatctaagaccctgataaacctaattagtattaggagaattggatgagatggtcctacaaattgagaaaataaatttgaatatatagtagtagatgataacctagtttgggaaaattaaagttattggtaaagttacgtaaagttacgtataccgtttaagttttaagattgatcaaatgaagaaagtattgaagagtacatatgtagtgaccaggagaggttcatatatttactatataatggatatgtatttatatgagctattattgcattcttcgcgtatagaaaattagtaatagttgattttattgtcttagggaaatttgattttttatccttacattaagggaaatttttttccttaaacctaaaataccttatattgttaaaatagaacaatatttacttaattcccacattaccccctcattaaatttgactcaacacttgactatgaacctagccccccatcggatccag

SEQ ID NO: 396831 - DNA, 538 bp, Cannabis indica
agctaagttggtctggcctacaaccatcacatgtttaatacaaataaatgaaacacttatgaaattgtactctcaatctcatcattttatttatgtatgatctcttaatttataattaatatctaattgttattaaccaatctctctctctctttttattttttttttatcataaccagtaaattttttaacaaattcaaaacaaaatgtctgtgatggaaacaaaggtttcatctccctcaaaagaaaacaacaaaaagaaacagtagaactagaaccatttttgttatatcataagcaagcagctctattaaattctctaggaatccaaaaaaaattggcgttagacaacaaatcaaagtctgtaaatagattcaagagcaaaacttcatcctttcaagttagaactttctccataacgttaggcaatgagagaaaaaaactggatttggctagttccaatttacaaaaatctgttttaattaccagtacacttacatatatcaaacaacctaaagaatgaaacatacatatattt

SEQ ID NO: 396832 - DNA, 613 bp, Cannabis indica
tcaaacacaactgaaacctactagattgggttgagaaaatttcagcttggtgctggttcttgccaaatcgagagaaagagggagagagaagtagctttttctaggtttttcttaattccttccaacctaagctaatatatgtttctttctttctttctttcttttttttttttaaattaattcactttatattcagcattacatcacttaggtaagaaaaataaaatcctaccaaaagactcatttgcctttctaactaacataggtagctacaatttcccaagggtaaaattggtcaattttcgaatctcgaaaattccaacacattcaatattcaacaatgataccccaacaataaaaatctaaaacatataaaatgcgactctctaaaggcccaacatcgctttccacaacttccaaacacaaacacagaaattgaaaaatttacataaaatagcataataaacatatatgaacttaaatatatttccataatatacatttataaaataataattaaatctgatgcataaatcttaatgatttaataattcaatgtgttaatcttaagcggtctttacatggtgggcgctgctgatcatgaatactccaa

SEQ ID NO: 396833 - DNA, 609 bp, Cannabis indica
actcggtgttggtatgctacatttataatttgcgactcaataactttttcttcaagtatatccaaggacaatttcaagagttctttgttttcatcttgattggagaaatctcatctgtgggtcgcaatatcaacttctattggcagtattgcctccgagctaaatgccagcaagaatggagtctgccctgtatctattttctcagtcattcggtgagcctaaagtacttgtggtagttcatctacccatcaaccttttgcagcgtccaacttctttttgatagtatccttcaaggttttattaacagcttctacatgtccatttgtctgaggccttgagactaacgagaagctcttaattattttgttcctttcgcagactgcaaaggatgccgtcacggcattgaaccctcctgctagtggtaatatttgtaagcggaccgacagtggtaaccttgatcacaaacggaaggatgatgcttctaaaacatcagggggcaatagaaagttttgaggaaatagaggtggccgttagggccacggatcttcatttcgatcttatcctgagtgtcctaaatgtaaaaaataccattagggtgaatgtcgggcc

SEQ ID NO: 396834 - DNA, 716 bp, Cannabis indica
attggttgtgttcaacccgaaatggcagagataataggtattaaaaaagttttgagttggattgcaactcattcgtgggatagagtcatgttaaaaacaaatagcttggtgtgtctaagcgattcagagcggcatttttatgccttcaaagttttgtcttattgctgaagatgtttgaaatttacttctggcattatccttagttgatttgtgttttgtaaaatgatctacaaataagttcgctcattgcttggcaagagactcttgtttctctacaggtcgtgtgcttcagctggaggactgttccactggagtgcattttattgttttgaacgaatttattaattattatatcttatgatttttattaaaaaaaaaagctctgatgataaatatggcacctttaagtatgaccaaatttatatagtatttttttatttttacgtctttctatggtatttgatacgccatatatatgtaaattaggtttttaaatcccataattaatgtttttatttttttaggtagttttatttgtcactgatgccgaaaaagtcaccggagtttgttgtcagtgttggaaaaatcactggagtaacggtcagtgccatcaaagtcgtcggagttgctaccgatgccgaaaatttgtcgaaattgacattgttgccggaaaaatcactgaaaaaaaacaccaagaaactaggtttcttgatgaa

SEQ ID NO: 396835 - DNA, 608 bp, Cannabis indica
tttttttttcatggtcgtgtagactatatatatatataaaatcacttataagttttcaaaaattgtgaattattttcagtagcaaaaaataaggttcaaccaattttttactacgcatataagaaaaatagtcatgtgtacaacaatatatatatattttttattttgggcattgtaaaatactcaacttttttttaaattttacaaataatgttaaataactgttatatacacattcacgaaaaaaatagatttaaaaaacttcttttgaatatcgaaatagataaatattctatcaaaatgtgcacttaaagaggtttacgatagatttacccaaaatttaaaatttatcatataacttattttaatgcatgcatgaaaccatggtcaatgttcaaattttttacacttgaatcttttttagaaaaagaatccaaataaatatgtgaaataatatatattaaaattcttaatatcttaaagataaaaaaaaaatactacaccaaatttttatatgtataatagaaagtattgtaatgtccccgcttcaagcctccattaggtccttacactcacagaatgaatggctcttatacacgagtacgtca

SEQ ID NO: 396836 - DNA, 592 bp, Cannabis indica
cttatagacccgtctgacactctggccgcggctagtttatatctcgccgtggcgagatgccttcgaaaaaatggtctttctatccagtctctatggccgcggccacatgtatctcgccgcggccactgggccgaacccgaaattttttttcttttctcttttttttttttcatatacactacaaaattttaaagaaaaccaaaattgagtttaccagttcaataagcataaactaagaagagaaataaaaataacaactcaaacaaatgaaagttcaactaaaacatcaagaaaatttgggttgcctcctaattagcactgtctttatcgtcactcatctagacgttgactgagctcttcatagtggcgctagaatcatggcggacttggattggtcaaattgacctccaaagtagagctttaaccgctgcccgttaactttgaaagtctcggggctttcaccttacagttccaccgctccataaggaaacactttgacaactgtaaatggccctaaccaacttgactttagcttaccaagaaacaatttcaaccttgaattaaaaagtaaaacttgttgcccaggttgaaa

SEQ ID NO: 396837 - DNA, 815 bp, Cannabis indica
ttatgatcttttaataataattattattattatctatcttaaactcccgaccccaccaccaatatatatacaaatatatatatataacagaaataaaatcaaaaccacgtaaaatattcgtgctttgagttgccggaatctaaagtttgccggagatcttacgcagaaattcataaagaagaagaaataataggaaaatggaggccggtcgtcttttctttgatcccacgtccggttgccacgctggcaacatgttgttcctcggaaatggagatcccgtttttcgaggtagttattatatattattatcatttaataaattcttgagatttattattcagcaaatttagaatttttattttttgagataagtacttatattcaatgcagtttaattttgctaacttaataattatttatttatcaaattatgttccttaatttaaatatttagtcttcaaattttaacatgaattacatattaaaatttgaataataaaatttttaaaataaatattattttagactctgtatttttataaaaattattaattagattttttattttattaaatattagaatagatcttatattttccaaaataacaaaaatatgacactggttcaattttaaaaaaaattatttttaaacataataaacttttaagacaatttaattttgtcataagattactagattagattattattatattttatattgacaaaaaattaattcagtgttctatttatataattttagaaaatacaaggtctattttgttatttaacaaaatagatggtccaattagtaa

SEQ ID NO: 396838 - DNA, 608 bp, Cannabis indica
attttattttagttttggagataccactgacgcgaatcaattattatttacgacagtgatcaacagaagcaaaaagcgtgggttgacttttgcatcggttaactagtttgacccgacgcgttgaccaacgcaaaaattttttttttggtaactttatttacttttaataagtttataatacatgaataaaaataaaaaattatcatcataacaatattaggtcaatatcaaaattctatcaagttgttctcaaatgtcaacattttgttcatataataggtaaaaaatataatacataatgtattagctcccattaagtatatataaaataattatacagattaatttgattgaatcgctactgaaatttctaaaatcgtacgtgatcaaatcgaagagttttaaatagtctggctagactaaatcattcacactgaatttatttagtgtggtctaaaataattggggaagtactccatatactattttttttaacttttttttttcaaatttacggttttggtttctaaagtggttgcagtgctagttgcaataggggtttctattatacgattttttgttgcaatttagattgcagcgctagttgc

SEQ ID NO: 396839 - DNA, 1615 bp, Cannabis indica
cttttgtatgatcttcacactttgccgactttaccaacaaatcatcgacatagacttccatgttcctccttatctattttttgaaaattccatttactagtcgcttatatgttgccccagcattcttcaaaccaaaaggcatgactttatagcaataaagtcccatgttggttacgaaacttgtatgatctctatctgggacatacatcttgatcttggtatatccagaatatgcatccatgaatgtcattagctcgtgtctagcagttgcatccaccaactggtcgatcccttgcagtggaaagcatcctttggccatgctttatttaagtctgaaaagttaatacaagttctccaagtatcgtttggcttctaacgagaatgggattcaatatccatgaggggtagaatgcctcgcgtataaaattgttggttaataacttgtccacttcttctttaagtgccccttgtctttcagaatccaagggtcgtcttttttgccttttagctgggtaatttgggtcgatattcagatggtagcaaatcactttagggttattccctaccaaatctgaatggctccaggcaaattgatcctggtttgtcttcaaaaagttcattaactgctattttagtttttcattaagatttttcccaataaacacacatctagtgggattgtctgaatctaaaataatttcttccagttcttcaattagttttaactggtttttctcatcttgaatctagggatccaaatcctcttctttcttctcgctttcctctgttatggccaccattaattgatagttggcttgtctattctgaagttctatgcgatagcactcgcgagccaatagttggtcacctcgcactacacctactccggatgatgtttggaactttaaggatagatgcttgattgaactaactgcccctattccaatcaatacagggcgacccatcaatatgttatataccgatggtatatcaacaactaggaaattctgcactatagttgtaggtaatggttgctcgcctatagttaatgggagttcaataatgccttgactggtgacactatctccggtagatccacataaattcaccatacaaggttttaacttttcattttatattcccatttctttaacgtatcctataaaggatatttaccgagcttccattatccaccaacactatttttatccttttgttggcaagttgtactgtaatcaccagaggatcgacgtgtggatacctcacatgtttcgtatcttcctctgagaacacgattggaggttcttctattttttctttctttgatggttctagagcaaaaactgattgctcgtttttaacttcattgacatatcacttatgggcattactgctttctccagcgaaatgtggccctcccaagataaccaaaatgtcatccccttccacgggaggaggttgtatcccttggttttcctgggttactgggcagattttgctgattttgttcattaccttgtcgtcatacatactattgaaaataaccacgcgagataaggctctctatctcgtctttcaactgacgacattctttcgttgtatgccctatgtcctt

SEQ ID NO: 396840 - DNA, 525 bp, Cannabis indica
aatcaagagaagctctctctttcattctcgcttcttgcaactggttttgatgtttgttttaggttttgtgcaagtttgagcatagaaaccttaactttgatctctaatggcatatttttattcagtgggtttttctgtggtttattggttggattatgttgtgtataccctaattaggtactctggaaggtttggttgcatttggtggaggattgagcaagaaatgaaaaatttggtgtgagctggtgcaaaccgggtaatcggttttggcaagatccccaaatgtttcgttttcttgattttcgtccatttcagtgtcgtggttgggtgcttccctatttccagagtttgtgtaacccctacgattgtgggttcgggtttcccgggattagggttttaatcatgcaacttacttggttccataatgtgattagggcatccatctagcgtgagactttccattcaggtcggccagcacacttgaattcggaaagaaggtaagaactgtgtatgatgtgtgatatc

SEQ ID NO: 396841 - DNA, 894 bp, Cannabis indica
cattgtccattgctctttatcaggactggtatagattccataacctctcatgtttcacaatatttcatttacttgaccttttctccaattaaaacaaatgtaaaataacactaaaaaataattcataaatatattctttctgttatcctttttattatttggctaattcccctaattagcaatgaatttattgttataagcgaagaacaaccttgaattttgtaatgacattataaatcgtttctcagggatgatctatatgaatattttttttcttttttaaaaggcatgtataattaaacattttcaaattatactctttttaattttttgaattccagatctaaatctgggtgtgttttattttattattttaaaattaaaataatgtgggtttaggtgtatttacctcttttgtttcctttgaatctagcttaaatgttgttgttggatcttgattagtggtcgatttactaattttcctctttgccggattttatgggtgtttccctagtgtttctatgatttcggtgttcctctgtccatccccaatgaagaaggaggggtcgtttgtcccattttactgttcacagtataaaagaaaaaaaatgggcctagacagtataaaaggaaaaaaaataggcctggtcatataaaagaaatttttgccggatggtagtatttttgtaaagatttggcaaaaagtcaatatttttgtaagttttcccaaattcctctcttttgggccttgtgtgagagttaagaggtcatagtagtgggtacaacatactaaacccagccctccctcacatgaactacgccaactgtgaaggcccattttaccttattttgataattgtattaggttaataatattagtttaaccaaattaaa

SEQ ID NO: 396842 - DNA, 583 bp, Cannabis indica
taatttttttcttttaaaaaaatcaaacgaaaaacataaacaataaatataattttgagaataattcaattttatgtcaaattaatactaaaaaatcaatcaatcatcgatatttacatattaatataaaggaaagtatataaaagtgtaggtgactttctacaatttttttttcatatttttctaatttttttaaagtaccgtgttaatatactaagaaaatatgattatttaatttattttttgtaataatcccacattatttagaaagtatagtatcactaacttatgtctatgaccactgttaaatgattatttggaccctatgttaaatgaagacacgggcgtgacacagcttcagataagcatccgtgtccccatacgtgcgcgtcttgtccgagtgcctggtgcacacgagcacccactcgacaccatatgcaaccgattttttcaaaccttcataacttcttcgtttttcatctgaattgagttctgtaaaaaccaaagttgcttaattttttacaaggaatcaaaatataatattttcagaaagaaaataaaattaatttcatggaaaaatttc

SEQ ID NO: 396843 - DNA, 824 bp, Cannabis indica
ttttagtatttcttcaatactttgtaacttgcccgatgatgtaagtcctcttctgcaacttgttctgtttgatatggcagcaatagcagcaaacatttcaacataaagatttcaatacagtagctaagatcaagataatgtgctcctaataagaaatcttccagcaagtatagctacacccaacacaaaaccaacaatcaaatattaataagagttacaaaaaatgtattagtattacaagagttaacacactaaaaatattagttacaagaaaaactaaacaaaatcataggctataagataccaaatttgctactacaaataaattttgataattactatgcagagaaaataacaaaaatgatcctcatctccgatccaaatgacaatgaaaatggtatgaaacttttaaaggacctaaccacaaatgcataccattttcaacaacaagcattgaaagagatacaactatcaaataatggtaccaacttaccactgaatatctaagacaaatatacatagatatgcacgcatatatctttacaccatacatgttactaacggaacaaaatggaagccatgatggttggggtgcctgttgtattccccccattctacataaatcaaatttagaaatgatattttaaaaacaaaaaaaaataattgtattgtcttactataattcttacaaaccatgtttacaagttcttaaaatgactatttagtcaaaaatataatagcattttgacatatatgcgcaacactcaacagaaacttcaatgttttattttaaagagagactaaagaattatcttgtaatgaat

SEQ ID NO: 396844 - DNA, 534 bp, Cannabis indica
gaacgccaattaggaaaaccagaaccgatcgaaagaccttcacggaggatggaatggagattgggaggaaaggtgaagttgaagagtgactcaatggaggagaattcgatgttggagaggccttcgcggcaacaaggacattagagcagcagagattctcaagtggagtagtaactaaataataattagtcaccaaaaaaaaataataataattagtcacaaattttagttataaaatttataattgtgactaaatatttttagtcacaacatttagttgtgacctcttacaaattataaaatttaaaaatgtaaatattatcacaaataatttattatgacttattatttgttatacgttgtgataaaaatatatatttagtcatagattattagattatttttgttgtgacaaattttttttgactaaaagcataaacttttttgcagcgtatctctaccatatataatctgtaaacaaatatcaaactcttaaaaaatgtagtaatattaatattatcgactcgtttgata

SEQ ID NO: 396845 - DNA, 1029 bp, Cannabis indica
tgcagatggagaggagaaaagtgtttcaaccgagtagttaataggagcaataggtatagcactagaggaataagtgtcagagatgatagagttggtatttgtagagaatgtagcataagggaattggaattcatcaaatattacatctctagaaatatacaagcgaccatttgaatctagacacttataacctttatgatttagactatatcccaaaaatgtgcaaggtgaggatctaaagtctagcttgtggcgattataaggcctaatgttgggaaacataggcagccaaacactttaagggtagtgtagacaggtttggttttgaacaatatttcaattggtgagatttggttaagaataggggtaggcaaccgattatgtaagtagactgcacatcgaaaagcctcatcccaaaattgtaatggcatagaggcttgagcaagtaaactcaatccatgttcaactatttgcctatgttttctttccaccaagccattttgctcatgagtggttggacaaggatgtctatgaataataccaacttgtctaagtggttcagtaaatgtcctatattccccaccccaatcggattgaaacactttgattttctttcctaattgtaactcagtttctgttttgaatgcaagaaaggtttttaaagcctcagacttatttttcagtaaataaatccaagtgaaacggctataggcatctacaaaactcatgtaatatttgtatccattataggataatgtatgagaaggaccccatagatccgagacaatgagttgcaaaggttcagaatacattgtattggaaacttttggaaagggcattttatgtattttgcctaagcaacaagcttgacatacactattggaggttttattacatgaaatattacaagagtttaatacagatgtgaccaccttgtgtgaagggtggccaagtctgttatgccacaaatcaaaagttgaaacagaagactgagtacaagtattgctggaagctgaaacagcagggtca

SEQ ID NO: 396846 - DNA, 605 bp, Cannabis indica
gtgttaaagaaaagaagaaaaaggaaaacaaatgagaaaccaagtagcaaaattgaaatgaaaagaagaaaggagcaaagaagcccaagaggagaagtccatcagcctattccacttgccacataaaccaccggtcccactgctccatcagcaccaaatggcgctctttcattcgtttcgcctatccggctcagtgccaatgtggcgccttctcctcccccaacatgtgcgccacatggcaccataggattggctcagcttgaccctgtcctttctcatcagcccacatgggccgctacagttgggcttcttcacacgccaacccccatgctcccattggagtgatttatcaatatcacatacaaaatagttttactgctaattaattgagatcaatcaacatcaataataagcatacatatattttaggctaattaacaatttttcccccgaacattgacatgtactaaatcattccccctgaacttttttgaccgttaaaaattccccctgaactattaagattgttagatttaaggacttttatctaattttagtaaaaaattctaacatagatgaaagtttagggggcatgatttagtaca

SEQ ID NO: 396847 - DNA, 656 bp, Cannabis indica
tattatagttttctattatttaatatattatctatatactgataattttttttcttcataattttagaatcctaagagcatctctaatggagagctataaatgtagtgtattgttattttttagaatattttactaaaacttaactccaatggcagggctggccctgaactaagacgaaggaggcggccaccttaggccccccaccgctcagggctccattttagaaaaaaattaaaatatagttagtaataaaataaataataatagttttaatgctaaatatgtgctgtagcctattggtaatttgattagtttaataactaagaggtttagagttcaaatcccaatagtcttacttttttactgggccccaatttttatttttgcctaaggcccaaattaacatagggtcgaccctgtccaatggtgatgtaaaatgtgggtcaaatttggttcaagctaaaaattgtgccaagtttgacacaaaagatatcatgggctaaattttaactcacaataaatactaccttttttaattacctctttgccacctattaataatattcattcactttaaataagatatatttataagatattaaaataatataaataaaattaattattttgtatatcatatcgcgttatatattaa

SEQ ID NO: 396848 - DNA, 1278 bp, Cannabis indica
agtcgatatggaatcagcttatgataagcagaacccaatgcactaggccacatgtcaacttgggtgatggtacttcctgagtgacttcccaaagctcgttttgatacttataaggcatttgagattacaaacgatgtctcctaccccgtttttaactaaaataagaagaatgctcaaagcgaaatttgtgttgaggggcagaaacatgataactaggttgcatgtcaacctggacggagggcccaatgcccatgtcaacgtgggtgctggggccctttgttagctcccaaaggatctcgtttgctccccgagatcacttgtatcttcgttatttctaaaaaaaaaaaaaagatgcacgaaacacttttcgggaaaaatgactggaaatagcttaggttgacaaggtgttggcccaacaccaatgctactgggcgttggatctagatttttgcttttggttggttctgtttcattctcagaaacagtcatatctcagttatttgtcaaaacagagaatatgcctggaagacttctcggaaaatctaattgaaaatagctcatgttgacaaaatgccaacctaggcgttggaaaacacctaggtcaacctgggtactgggcctagcacctaggtcaacttgggcgctgggtctcagttctggctcccaaataactccgtttgttccctaaaagcatcaaaatcttaattattgacaaaaatggtgaattcgtccagaagacttcttttgaattgctaatggaaatggcgtaggttgacaaagtgtcaacctaggccctgggcccagcgcttaggtcaacctgggggctgagtccccattttggcctgcaagttaattcgtttctttctcaaaagcacttgattcttcgttttagatggagaagaataaactgctcgagataatttgtgattggaagcttcttaggttgacaatgtgtcaacttgggcgctgggtgcactaggttcccagggggcctagcgcctcaggtactaaaaataaaagtgttctgattcggattcctcaaatatgtttgtgacaggtcttattcatgtcaaagtgtaaagtttgagctatttacactaagacggacccaaaaaatgaatcccttcaacttgggcgctgggtgaaaaccctaggcgcctaggctgacttctggggtgtagttttgtatcttttagtttccaagccttggacttgattcttctgtgttaagaatcacggggttccatctcaaaaccaattggcaatgagtggagtagc

SEQ ID NO: 396849 - DNA, 916 bp, Cannabis indica
agtatttaatttaagtcgacctgcgggaggattgatccaagaagcttcagttttttgttgcattctgttaggaggagcagcagcagagggtacagagctaccacatgtcgtctgagcagcttggaaatcttccaaataagaaagagcaaagtatgttaggatgtcatacggctttgtcttattaccatgcttttccttatttctctcgtgccaaagaatccaaaggattgtgataaattgctccatttgaagagctgtccacaaatcagaagcatgaagcaagatttctgtaagggacatacgctcagtaatctcattggaaagtgaaaaggatgaagttggccatatcttttttggtctcttgcagaaaaacaatgcgtgtgtagttgtctcagcagctgatttgcatattggacatagaggggaatcaccaatatgtctgtgatgaagtgttgcagctgtgggaagacaatcatttagagcccgccacaagaaaattcgcactttggatgggagagaataagaccagaacttattccaccaacttcgaatttgaatacccgagacagcaggctgctgttcttctaaatcagtggccaattgtttacagtcaaattgttttccattgtccgaaatgagtttatgcggaatgccaaaacgacaaatgatggaggtgtagacgaactcgcgtaacttcgttgcagtgatggttgcgagtgcttttgcttcagcccacttcgtgaaatagtcaaccgcgaccacagcatatttgactccgccttttcccttgggtaactcgccgattaaatcaattccccatattgcaaagggccagggactcgtgatagaatggaggttactcgggggctggtgtgtgtaagtggctattcgctggcatctatcacacctttttgca

SEQ ID NO: 396850 - DNA, 721 bp, Cannabis indica
tcgtcagtatccaagcctcaggtaaatggacaagttgaagtcgttaataaaacccgaaaggataatatcaagaagaaattagacgctgccaagggctgataggttaacgagctacctcaggtgctctgggcccacaaaactactaagaaaacagccacgagacacactcctttctcgctagaatttggctcaaaagcaatgctgcctattgaagtgaacatatcgactcacataagagaattttataatcaagaagaaaaccaagaacttttaaaattgtccttcgatctacttgaggaaaaacgagctgagtcgcaaatcaccaacactgcatatcaacaccaagtcacaagatacttcaacaaaagagtcaagacgagtctttgcaaatacgagagatgcatcagcaggagtgttcaccccgaactaggagggtccatatgtcatcaaagtagtagttggcgttagagtctataaattggctcgacttgatgggtcgctaataataactactggaacgtagaacattagcgaccctactatcaataaataaatgatgtaactcgcattactgatgtaagctttaaacttcatttatgaataaagagaatcatttatattaagtaatcacaaagtttcattctttaaaattacttaaggggcatttattgttgggttttatgccctaaataaaactccatttcaatgtaatctattttat

SEQ ID NO: 396851 - DNA, 797 bp, Cannabis indica
atcactgggggctgcacgagcgcgcttgagcatgctcctaacagaatccccccacctgagtggactgcgagtgaagtgttttctggttccaacagaggaagtaggagaagactgtgtaggaaggttcattaataaccagaccagtgcgagggggactggaagtggggaaagcaataccttttccgtttttgcagtgtgggggatagtggaagtagtcatgatggggggtggaatggtggagggtaaagtctgagaaggaggggaagtagggatggcagtattggaagtagcgatggtggcagtacgaggtggggagtgaactcgaagaaactggtttacggcatgctgcaggctatgggctggtgaagagggaggaggaaagagttcctcaaaaggagtagcattggatatttccaagggattctttttatagtgggattgcgccgaagcacgaagagtgtcacggtattcgaaaatgggaggggaggggaaattgtcacaacgaagcaaatatttggaacatcgattgtaggtatgatccatatggccacaaaactagcagaagttaggaagactctcgtacttaaaacttatccatttgggttcatgaatggaccgaaatcggattgtcattcccctgcgcaaaggcttagtaatgtcaagtaaaacacgaatcctaagaaaaggaccagatttctcaagcagtgaaagaggatatatttcaataagatcgcccagttcatccgctatgaactgagccaactgagggcttctgcggccaaaaggaatgtggtggg

SEQ ID NO: 396852 - DNA, 649 bp, Cannabis indica
tcgggaaaaatgagtattctcgaaagtttttaacagtagctaaaaaaataggcgacgtttattattaaaaacgagattttttaaaaattatttaacccctatacccggcggtgtaaaaccgtcggatatagtatagccgaaggtatactatacccaacggttttaaattgtcgggtataccccatttaatttttcttttcttatatatactacaaaaaggggaattcccgacagttcaaaaccgtcaggtataaaatatcacttacttcttgctacattttccacgtgccaacctacttcttttctatttcccacaggcccaaacccatacatttcttctctatttccacaccctaaaacgaaaatctgaaccctccaaaaccccacccacgcctctgcaccatcgccctcctctcttgtcctctttctccctctctcgatctccctttcttctcgtctctctcgtccatcgatctccgcccacccctcctcttgtcagtctccctctcctctctgtcgcatacgtcggaccaccaccatctcccgtcggtgtccctctcatcttcatctcatacgccggactaccaccacttcccgtccatctccctctctctctttctctctctctgagctcgatataaatgcattt

SEQ ID NO: 396853 - DNA, 977 bp, Cannabis indica
cctttgacaattgcccattcaatcctgcatctgtgttttacataggaagtcagaatacctacaaccagacatacaagcaacacccaaacttggcatacagaaatcaaggggctggtactagcaattcatctatgcttcctagatccaactttcacccgggtttttctcaacaagcctttcaacaaagacaacaacaaggtgtccaaacaagttctcttgagagtatgatgcgtgatttcatggccaagacagaaaatttcatgacaagaactgagagttatatggcgaagaatgacactgcgatccaaagtcaagcaacctccatgagaactctagaaaatcaagttgggcaactagctaatgagcttcgaaataggccacaaggtactttgcctagtgatactgaaaatccaagaagagatggaaaagagcattgcaaggcggtaatcttgaggagtggtaaaattctagagtcaaacgaggaagaaactaaggataaaaatgagcccacttcaatccaaagtcgagtagagaaaaatgttgaaccttctaatatggcaaaggagcaacctgaagaaaatgatgcagcaattcctcatcaaaatgcagcagaaaagttacttagcaaacgacccccaccatttcctcaaagattcaaaaagtagcaagaagatggtcaattccaaagatttcttgatgttctaaagcagctccacatcaacataccattagtggaagctttggagcaaatgcccaactatgtaaaggaggctaggtgagtttgaaatagtggctttgaaggaagggtgtagcggcatgttgaagagcaaaattcctcctaagttgaaagatctccgaagttttacaatcccatgtatcattggcggaagagatgtgggtggagccttatgtgacttgggagctagtattaatttaatgcccatgtctattttcaagaagttgggaattggagaagc

SEQ ID NO: 396854 - DNA, 843 bp, Cannabis indica
agccatgttgaattttatgtggcgaacttcaacttttgcgatggaaggctaaagttgcactaaaattcaagagatgactttggtttaaaagactaaagtgtgaaacatcactggacatgtgaaagaatccaagtaatccttttcttctgggaaggagggttgaagacgtattgaaccctagcgttctttcacgcacaaaaaaaccacatgcatgcaagagccatgttgaattttatgtggtggacttttgctcctgtgagggaaggctaaagttgcactaaaatccaatagattactttactttaaaagactagagggtgtaacataaatgggcgtgtgacataatccaagcagtccttctctttttggaaggagggttgaaaacctatcgaacccctagtgatctttcacgcacaaaaatccacattaatgcgagagccatcttaaatgttatgtggtagactttggctttcgcaaaagaaggctaaagttgcactaggcgtgtgatagactccaactagtccctgtcttctgggaacgagggtttaagatgtattgaaaccacaatgatctttcacgcacgagaaaatacgtgcatgcaagagccatgttgaattttatgtggcaaactttgacttctgtgaggaaaggctaaatttgcactaaaattcaagcaatgacttcgctttaaaagacaaaagggtgaaacatcattgggcgtgtaatagacttcaagcagtccttctctttttggaagaatggctgacgacgtatcgagctcccagtgatctttcacgcacaaaaaactatgtgcatgcaagagccattttcaattttatgtag

SEQ ID NO: 396855 - DNA, 955 bp, Cannabis indica
atagacctttcatatctaagtattttggggtccctcaatgttttagtaggtctaagaaaggcagctttaacttcattcttgatcgtgtcagttctaatttaaaggtttggagccataaatttttttctaaagcagggaaagaagtccttttaaatgctgttattcaggcaataccttcctatgtcatgtcctgttataaacttcctacttctatttgtcaaaaaattgagaaacttatggctcagttttggtggggttcttttgggaaaaactcaaaactcattggaaatcctggtctacgctttgcaactcaaaatttttggggggttgggttttccttccttaattcatcataaccaggctttgtcggctaaacaagcttggagagtttttaccacacctgattcccttgcttctcaaatccttaaagctagatattttcgacattcttcttttttagaagcaagtaaaagtcattccctctctttttcttggaatagtttgctctgggacagggatcttcttaagatgggctcatttggaaagttgggagtggtcactctatccgtaccattcaggattcttgggttccaaatcttaggatccttaggtataaggataattgtcttcctccttctgataaagttagttttttcatgagttctaatggtacatgggatataaataagttatcaaattactttgataatgacactatggctaatattctccaagtccctattggaggtcatgataaagctgactgtcttatttggaaaggagatccttctggccttcttactgtcaaatctgcatatcactttgtaaatacttcttctttgcctccttgctcttctaatactagtttctataatagctggtggaaatttttctggaatctatgtattcctcccaaaattaaaaactttggttggagaactttttatcacatttt

SEQ ID NO: 396856 - DNA, 1035 bp, Cannabis indica
attattataattggaaatgctatcagggtaccattaataatttatataattaattatcagatttgatataatttaaaataatagttttataaaatatcgttaaccaatcataaaatatcacttttaaatattgctaagcctcatactttattttttttacgtggtgaacagagtcacacatgattaacaatgcagcacaccacaatcggcggtggaacccctcgaatcaggatagcttattgtctaaccaaagggtatgttttgccaaaccatgagctatggaaatcaaatctccatccacataggacaaaattgtctccagaaaatatagacaataaaactataacgtctttgaacaattacccatcaccttgaaaaacatcttccttttattaatagttgtcgccagagttaacaaaactaaaaaaaaaaaacatcacaacacagttatattagaatgacaatcttcaaaataaaaattaatatacaagtatagaatttaacacacaacccaaattactagctcaaaattactaaaaaactaatgaaaccaataaaatttcaagaataactagccaaaggtattaccctttggttagtaacaatatactaacaccctaatttaaaattgctaaaaatcaataataaatagattatatttaaaattaaaacttatcggcaaattctctgtaaatgtaggcccttcacaaaacaacttacaaaataataaaaaaataaaattttattaccaaataatataatgaaaaaatgtatgcggaagaaatgatggtaaaccaattaatccatattaaaattaaggacttaaaaagactggaaatactagtatgttaaaatgaaaaagttattgaagaaacaaaagtaattacaagacttttgtgtatttttactttatgatatgcttattttgattttacaagaaaaaaaataatataaataacataacaaaataaaagagtgaatatactcatttagtaccctatcttttttcttaaaacacatttggtaccttgtgtt

SEQ ID NO: 396857 - DNA, 690 bp, Cannabis indica
agcctccgtccattttgtaaagatgtcaacagccaccattgcgtactttgctcctcctcgccctatggggagtgccccaatcaaatcgattccccatattgcaaacgggtaaggcgaggtcatcattcttagttccgtttgtggtacgcgaggtatatgtgagaatctctgacatttatcacatttcctgatgaattcatgagtgtccttatttatagtaggccaataatatccttgtcgaataatcttctttgacaagctttgccagcctgcatggtccccgcaaaagccttcatagatttctctgatgatctcgtttgcttatgcaggaagaacacaccgtaggagaggcattgaatagccccttctatataattcgccctctactatcatgtagcgaggccctgaatacaagagctttcgtgccttgtttttgtcagttggaagttgtctgttgagaagatagttgactatgggtgtcatccatgtgggcaagctatctatcatctcgacatcttccttttcacaaatacttggcttgtttaacatctccaccggaatcaatttcaattcatccaattcattttacgaggccagttttgtgaaggtatcggcattagagttttgttctcttggtatttgctcgattttgaaataataaaacttttccaagttcttccaaaccttctc

SEQ ID NO: 396858 - DNA, 1226 bp, Cannabis indica
ttgtaaatattttgtaaaacaggctcccagtttattattagtacaatatattaatgtctattgttaattaagtaaaattttagttaatcctaattttcaataaactcattgaatagcaacgagttgcacctttaagttaaaaatcacgttaacatgcctaaaatagttagggtgttacaatttggaatcatagttgccaggttgtctttcgaagattgtcacgacatgtacaattatcatcaacgatcagctcgtctcacggtttagtaagcctttattgcattagtagtttattttgatagtatgatttaagaaaagcttgataggaagcgtgttagttgcctgatagctgaataggcgcatgtttttaatttccaaaataagcggtaattagtacgttatacgtgatcacaatctgacaagactagctgtgtgttacacgggctgttctagtagtatggacgccaggcaaaacaccaggactcagggtaactcagtcagatctagtggtggtcaaggagttaagattcccccaaatgttcgtggctggggcaaaggccctagaggcagggcacgaagtcggggtgatgttaacccgctgcaggctgctaggctgcccatgaatgggaaaataggtttgcagaaatgcaagccaaaattaatgagaaagatgaagaaatgaaacgcttgagataacagtgtgctcctacgatccctgctccataaatgcaggtagctcatgcccctgctatgcaggcaggaccagttcttgcattgaaccgagtgaaaccactgtatgaaaggttctgcaagcaggcacctccagtctttccgggaggccccgatgtgatgaaggccgaatagtggctaatggttattactagaattctgaatttcatgggcgttaccgacaatgacagagtggcttgtaccgcattccagttttaagaagatgctctagtatggtgggacatggtgtccctaacttgcgatgttaccactatgatttgggaaaagttctaggagttgttcaacgcgaagtacaacaatgaagcagtcagaagtgcaaaaagaaaggaatttactcaactgacccagaaagaaaatatgagtgttattgaatacacaactcagttcgatcgattggctagattggcctcgggaatagtgccaactgattttagtaagaaagaaaaatacctagatggattgaattcgaagataag

SEQ ID NO: 396859 - DNA, 660 bp, Cannabis indica
atgtctccatgtgaccatgaaaaaaggtccaggtttgccctagaaattctatcaagattgacttgaattctggggccaaaccttcatcgatttttagtcttcttgttaagatagtgggatcaacctccacttcttccaactcttctacaggtccgaagcttcctacagcaaccccaaagcaaggatctacatctgtgtccctgccttgggctagaattcatcgccccttattaggctcatcttctggactttttgcgggaatcgtttccttttggtcatggatagggccaagttgtaacagtgatggctagactgttggtctcccctcaagcatgcaaccccatgccttgttggaaatttgaggcataagtggtagatagacatcaccaccttcaggtcattgagcgtcagtcagccattcatggcattgaaagtcaaggcaacgtcgatcataatgaactgcaccatcagtgttgtagtggttggatcttctccaactgtgagggttaatctgacatacccgacaggtgcgatgccttggccaaagaagccatacatcacctagttataaggcgtcatgtctgtgagttggatccccatcttttcatatgttgttgaaagtgcaacttgtagattttaatgattcaaattaccaagttg

SEQ ID NO: 396860 - DNA, 762 bp, Cannabis indica
aaaacacgattcaaaatagagcaagaggtattaactgcctcagccaaaaaatattttggtagttaaatttcatttagcatagacctagccatttctcgaattgttctattcgtcccttcgaaaactccatttgttgtggagtccttggagacaaaaatttatgcctataaccatgttcatcacaaaaaaattctaagccatcattgttaaactcaccaccatggtcactcctaatgaatgtaataaaatagcctttctcattttgcacactcttacaaaatttaacaagattttccaaaacatcacttttgagtgttaagaaataactcgtgtaaatcttgaaaaatcatcaacaatcactattgacttagaatttggtcaactgatcacacagccttatttatgattaccaatcatcacatgtaaataagaacagtaaatagtaaatatgacaccaaaatttttagaggtttgacctccttatttagcgggtaatgacttacttcccttttagttatattgcttctagagataataccatccagatcataggtgaaaaccatattgttgacctcaaaaaatgatcaaccaacaatgaggttgtattaatctgatgtttgccacatgttacacaacaagatcaataaagtaaatgagacaaggatttttatagaggttcggtccccttagttgtcgggtaatgacctactccccttttaattgtattgatacctagagataatactattcagatatctataa

SEQ ID NO: 396861 - DNA, 906 bp, Cannabis indica
ggcatgtccaaaagattatttccacttaccaaggatttaccagttagtggatgcaactgcaggacatgagctaatgacattcatggatacctattctagatataaccacatcaaaatgcatgtccctgattagaacacacaagttttgtaacaaatataagactttattgttataaagtcatgccttttggttttaaaaatgatggggcaacgtatcaacgactagtgaatgagatgtttgtaaaacaaattaggcaaaatatggaagtttatgttgatgatatgctggtaaaatcaataaaaaaggaagatcacccggagaccttgaagaatgctttgggatacttagaaaatacaatatgaagcttaacccaaagaaatgctcttttggggtctcctcagcagaacttcttggtttcatagtaaatgcaagaggaatggaagccaacctagaaaaaataaaggcctaatcgagatgccttcaccaacgaagccgaaagaggtccacgccttaataggaagaatggcagcattaaacatattcatttcaaagtcaattggtaaaatttcttccattctttaaggttttacgaggcaataagaagtttgaatggacagtagaatgcaaggaagcttttaagggtataagaaaacatttatcgacacctcaagttttggccaaaccaatcactggagaaactttatacttttattagctatctttgagaatgcaatcagtggagccttggtgcaagaagggggaaagcaacaacaccttgtttactatgttagtaaaaggatactgggtgcagagtcaagatatccccctctacaaaaacttgccttatgcctgattcatgcatctcacaaactatgaccttatttccaggaacatcccataaaagt

SEQ ID NO: 396862 - DNA, 617 bp, Cannabis indica
ttcactaagtctactataatatatatatatatatatatcctttagttgtaactctaacaaataacaagctaaaggaattatattaaactcataactaaagtggaacatagaataaatgtagcttgattattctaattttctattttgatctttctctaatataactttgtcaaatctacatagtcgagttctaaatacatcatatttgacgagattggtaattttgaaggaattcaggcctaacaatattattgtgtcaatgatatatttcttctttagtgccattacggtgatatatggtgtcggtaatcttgtattgatccactatataggttgatcatgagtaaatcatatctttcggcctcatctaccccgacatgccttagatattcccagtttgctcttagactatgttggacatgtaacatactgagtgcgtgcatcagggtcctgtacttctcatgtgacttcaataaacaattccaatggtatattatcttatccatcccctcatgtattttgttaattttatcaaagactttgttttcttcacgcacgggtggggttttcgaaactctctttaaggctttaatgtgcctaacaatgtgttctacttg

SEQ ID NO: 396863 - DNA, 558 bp, Cannabis indica
ataacatgaggatgttcagagattggtggtgtgtaaacttgttttatcaaaacttaacgtggtaaacatgataatagggttgtattcttttttgtattttcagaactctattacaattgtacaaacatagttgcatagttgtttttaaatctgtacagttttatatgtcgataattgtcgctaatatgtcgtttaatatcgaaaagtgttcaagtttcaaatttttagttacatgtcgatacaacatcgctaacatgtcgtttaatgttgaaaaaattatgtttctaagtgtttggtagcatgtcgataacttatcgctaatatgtcattaaatgtcgatagcaaatcatgttttgactgttcagtttgaagtcgataacatatcgcaaatatgtcgcttaatatcgctaacaaaagacgtttctacattaaatggtaattaatttgtgacatttattatcccgcctaaccaactgcttcagtatgtcgtgaacatgtcgcctggtgtcacgaaatattgcccagattgctttgtgcatgacaaacacgtgtacaatt

SEQ ID NO: 396864 - DNA, 470 bp, Cannabis indica
taaagcttgcaactcatttacccacacacttgtgagtatgctaaaagattaagagaaataagaaaaatgtgatttatcctagaaatctcaaaagactagtttaggagttttcatgaaaggcaacatcgaggacaatcatcttaactaatgtcttgcagaatgtgaccaactatttcttgaaaactgatcaaaagacgtgagccatagttgggatacataacctcaatttcaaaaagattatttcttgataagatcaaaaagcgattatcaatatttatttcactatatctacatgttgtaaatgtgaaacatggggattgtccacgtatcatgagtggttacctagataagatcaaaaaggaagtaactgccatccctaaaaaccctataaataggtacaaaatctaaaggggaaaagggcaatcattttggggaaagaaagtgttggaagttattttaccaggatctta

SEQ ID NO: 396865 - DNA, 553 bp, Cannabis indica
aaacctcgcctgaactaaactcaaaaggataatgtgaccttgacaaagtctagtcgcgttcgtatagttcgcacgaagtaggaccgaagattggttcaagagtcacgtataccgagatatatgctaggactaaaaagatcttcgtgcaaggttgtaaagaataaattctttactctgcaagttggtctggatgacccaacaacctcgacaacccgataaggactcgcatgtcttaagttgtcgacttattgcaggatgtctgtatatgcgactcaaacaggatgcacacatctcatactcgactggtcttccacgcatcttaagcctgcaagcttacgcgagaatatgaacagacaactcatactatagaagtcgcatacgttattatatttagtgaattgggccgaaacttttcttcatttattgtatatacattttttattgatttaaatgttatattcaatgtacaaatgaattgataatgaattcaatctctgtgtaatcaaaggcacttgctttgtatataaaggagtgatccaacatgaaatggata

SEQ ID NO: 396866 - DNA, 1019 bp, Cannabis indica
tcaggaaactgaagtgagtttgacctttaatagtttgactccagcttttctgccatttacatcaaattatgtcatgaacaagttgactttttgacatccacgagttaatcaaaaaccttcaaaaatttgagaatttgattggaggtccacaaaaaggaggaaacaaagctcctagttttggcactactaatggtacagccaaagctgaggtaaatattgcctctgcttcgaaacccagcaaaaagaagtggaagaataacaagaagcctcttaaagcttttaacatagctaataagaataaaaaggatgctgattaaaaggcaaagcaaaaaggaaagtgcttctattgcgacgaaacgggccactagaaaccccagtgtcctaagtttttggcaaagaaataaggtatttctatttatgctataaactcatatgttttagaaaattattatcctctttggttattaattcgagatctactaaccatgtttattttcttcttatttcagctctagctgcttaaacttggattactaatctagcaagttgagtcagatggttggacagaagggtggagattgtccaagtgaagatgaagctcgaaatcttctttaatttttgaattaattgttttagtttatgaacaatttagtatcaattaattaatttggaattttattccctatttcatatttatgcagacaattcattatgacaattttgagattattaataaaattttctctttaagatattttcattatgaattgcttttatgaaattgagcttcatattcactttaacttgtatgccaataccaattatatttatatgtttatcatgtttgtatgtgtttatgttttattattgatgcaaaatctatggtatattattctctgcgaagagataataccacataaaacctagaatttaaattcaatgtttatgaataattgtcaattcttaagaaattattaagattttgtttaataaaaagatcttttgatctgataggggtg

SEQ ID NO: 396867 - DNA, 800 bp, Cannabis indica
aaaaacgtgatcaattaaaatttacttatttaagtaaaaacataaagtaacacatttataaaattctgggatcccgtttacaaaatacatttacaaaagtttactactcatatacaaaagatttgtcgcctagcgaccaaacagcaaaagccctagatgtaccaaagatcgtacgcttcaggcctaacctccccgacgtgtacaatcttcacctgctcgctctcacggctcctcagctttagccttgcccttacctacacatggaaatagaaatgtgagtcgacagactcagtaagaaaagcataaataataacatagcaataactcagattatgatcggacgcccatacccccaatcataaccctatccccgtgacccgcatggtgctgagtttagaatgttcatacgacaatactattgaccataatatcagcctatactcggtacgctagtcctgtaccgatgtgatactgtcaattagtacggtactatcaaacataatatcagcctatactcggtatgctagtcatatactctagacgtactgatgtgatactgtcggatagtacaaaagccaacatacatatctaatgtaatctaacaggcttaactaacatgcacactaaacatgtatatacatatacataccattatactaatcttacctcgtttacgaattctggtgtgccgggcaacctgagtggaacactgctcggcaaattacatgctcctaaatcacatcaatcataacataggtaagtgacacactaaatcactttctggggacttaaacttgaaa

SEQ ID NO: 396868 - DNA, 595 bp, Cannabis indica
tcaaatttcatcattaatcatatgtacaacatgtgtcactatactaaacagtaaaagaccataattgaaactctttaacaacaaaacctgatatgacaccatacagtcaactactgccctaccacaaaaattgctatgcaccattctcaaaaatattaattacattgcaatataacttgctatgtagttcaattaagacaaaaggaaaattactttataactctcagaattcatcttacccaagacaaattcccatggcccaacaaagctttcaaaattgtcacatacattcctgttgatgaagaaggcttttaattcaaacagacaatctttaattttctccctaaggatgttgttgtattgtcatcgtgtcatggtctcattttttgcaagagtttcttccctactcaagatctaacaatctacatttgcaatcatttaaacaaggaaatgacccaatttagttgggattcacttggaaatgacagcattgtatctttagcttttgacccatctcagaatcccatacacatttctacagaattcaagttagtgatagttgaggcatttgagattggagaagaagaagaaaagt

SEQ ID NO: 396869 - DNA, 498 bp, Cannabis indica
  modified_base (360)..(360): a, c, t, g, unknown or other
aattaatgttcgctcaatatctaattctttgttatggtatgggtcttgggtgggtcgttggtggctagggctactaaaggagagggagatgtagagactaagtcacaaagagagatatcgacagggtgggacgaagctttctgtgggattgtggctaaggctgaggaagaaagagtcgctagggagaaaaagtgaggaagacgaagagagaaagagaaatagagatcttttctttaatttttttttttaaatatagcttaaattacatggaccaatcttataataatttagaggttccacgaatgcatccaattttaacaaagtttttagaaggaaattacactctatactcttttttanattgtcctcttttatttttaccctcttttttaaagtctatcatttttacctcttttttaattattgtaccaattttgtccatgtcacttcaagatactctccatgtaactctcttatgtcaaggtattttgggtacaa

SEQ ID NO: 396870 - DNA, 1230 bp, Cannabis indica
attgtaacattagtaaaattgtttagattaggagtgatcaaggaaagaatttgaaaatactatatatgttgagtttatggtttactgtgatgcctcgagacaaggtctcgactgtgtgcttatgcaagctggaaaggtaatagcctatgcttctcgacagttaaaagagtacgagcagaggtaccctactcacgatctagaacttgcagtagtggtttttacgctaaagatttggcagcattacctatatgtcaagaaatgtgagatatacactaatcataagagtctgaaataattctttacccagagagattagaatatgagacaaagacgctggctggagttggtgaaggattatgattgtgaaatcctttatcaccctggtaaagccaacgtggttgttgatgccttgagcagaaagggtcaaattcagttgaacactgtgaaacaaatctctcagcaacgagcaaatgagatgacccgagctaagattgagttagttgtggggaaattggctaatattaccttgcaatccactcttttagagcgaatcaaagaagtacaaatgcaagatccttaattagtgaaaacccgagcaagggttttggctgggaaggctagtgatttctcagtagatgaaacaagaatattgcgattcgaaaatcgtgtttgtgtgcctatggatgagagtatcaaaagagagatcatggatgagtctcatatgactctttattcagttcatccagggtcaacgaagatgtatcaagacttgaaagccatgttttggtggccaggcatgaagaatgacatcgctgagtatgttgcaaagtgtcttatttgtcagcaagtaaaggctgagcatcagaggcctacagggttgctgcagccactgaacatactagagtggaagtgggaagacattgctatggacttcgtggtgggtttacctagaaccacatgacagtttgactgtgtgtgggtcatagtggacaggttcacaaagtcagcgcacattttacctgttcggacgaatttctccattgacgagtatgctgagttatatgttagagaaattgtacgtcatcatggtgtcccaaagtccattgtttcggatagagatccgaagtttacatcgagattctgggaaagtatccaacgagctatgggtactcagttaaagttcagcacgacatttcatcctcagaaagatgggcaatctgagaggactat

SEQ ID NO: 396871 - DNA, 967 bp, Cannabis indica
ttatagatgttcggccccgtgatgatggtaatatctctctcgaaagctcttacaatgatttttgagtatttcagtcaagcaatttagagggaaaaaaggagtacgactttcagagaccaaagtcaatactggaggcattcaatagagggttttcagtattattttattctctatcttcttctctttcttaaagttaatatgtgtgattttgcttccatgaacatgtgtagctaaacacttgattagggttagatggatgttgtttgacattgctttatggttttaatatgatttattttctccctaatttctatgtattctatttcattcgtgcttaattacttttaattgtctggccatcaattaactgttttatgatttcgatgcgagatctgagaagtgagtgtcgattatgctatagtgaaaatagaactgaattttaatataggacgagagtacctgtatggtttagatagcttataagatttctgtgtttaatgcctattgcgtgttaaatttatcacgagagtagaaagtttacatgtgattgaggtttatatatctgagaagactataaattacattagtaaacctgctattgcatagaaattgataataggaagataatcatattaagccatattcaatagatacaattaaaatcaaagtcctaatttttattaactgtcaatttctttattagtttaattgcttattatttcattgtttttattttctcgttttaatcttctcttaattttcatttaaccaaatagaattagaagtttaattttaaaatactaaactacaatccttgtgggatcgacctcactcttggtgagtttactacttgtcacgatacgtgcacttgcgcgttgaaattaccacaacacaaataagacacaataaatgatgatttgaaagtggttgtcacatctgataattttttaataaaaattaaaatttt

SEQ ID NO: 396872 - DNA, 575 bp, Cannabis indica
ttgtgtatcgatgagaaaccatgaaaatgcaagtatgcaagatgaggcattaacctcatcgcgtggaggagatttaataacaataaaaatatttggcgtatctagggaagtatacaaactaaggataaacagtttggtaggtcaagatgacagacagtgaggcatttatctcgctgcaagatggcctgcatgcgagaaagatcatctcaacaccagaaactatagttaagaattaaagtagtatgaatctcgagaagtcatatgacgagcaccagcttgccatcaaagttaactcggctccatttctagcgaggcatccccatgagataaggcttaccgtatatctttaatatgcattcatctcggtccaataaaagtaggatactcacagctgtgtgaattctaaataaaaaccacatttatttagcgtgatttgtaatcaaatcccatgattcgaggaaataattgttgtaaagatctcagtcaacttttgtagttaactgcccattatgtaattataaataggggaagaaaagatcaaaaaaggggagggggggacaaaaaaactcatacaa

SEQ ID NO: 396873 - DNA, 553 bp, Cannabis indica
cgtttgcaagctccccaatggtcagttgtgggggctttaagaaattggctaagcttgtttacgacaaaggagatatccggtctagtcatagttagatattgtagggctcctatgacacttcgatattgctgaggattttcaagaggttgtccggatgtgagagataatttggttgtggcacacattggtgtggactgtggtttagcctcaagcatgttggttcgatggagtaaatctcttgtatatttatgttgtgtgaggtaatagctgtttccttgtttgaatgcctcaaacccaagaaaatagctgactgatcctagcttttttaagtcgaattgctggtgtaattgttgaataagatgttgaacttgttgctggtctgcacctgtgatcaatatatcatcgacatagatgagaataagaagaagttggccatgattgttgctgtaaaataagctagtgtcagcttttgagttggtgaacccgagttgttgaaggtagtttttcagctgctcaaaccaggcccgaggggcctgttttaactgttgggttt

SEQ ID NO: 396874 - DNA, 788 bp, Cannabis indica
tataaccaagaggttaatcatgcgctcctcgcagagtcctttgatgaaatcaaggaaaagggaaccgcaacaaacttgaaattggtagctcaccaataaaaggtagctcggtattttaacaagcaagtgaaaggacgaaatttttttgtgggagatatggtcctcagaagggtatttttgaacaccaaagacagcacgacaggtgtgctcagaccgaactgggaaggaccatatcaggttatcaaagttctagaatcaggagtatataaactgggtaagtatgacgaaaaaatgcaactcgttctagtaccaaggtattggaacgaggaacacttaagaaaatactaccagtgaaagtaccaggtcaaatgaccatgtcaagtacgaaacaaaagaacatttactttaagtgaatggccttctgggtggaccacgcccataggttcagataaaatgacaaagtacttaggtcgggtgaccacttatgaaagtacaatttttattttctacaatttgttttgtttatgctaagctaaagattagactagatcaatataatagcttcaatgtaagttactatggtaacaaacatattcccgatcaataaatgaataaagaggtttatttcaattcaaattgagtcaagtttattaacaagttatatatttaccattaaatgtgtacaaaaggtctgctcgtgccaaaagacccgaacagacaaaaaagcatacttgtaaaaaacaagtgaccaagagtctaaagtctgctcggtcacttggggggcacct

SEQ ID NO: 396875 - DNA, 696 bp, Cannabis indica
tacatcgaacttgaaccaacttcatatagtcaggccaagcaatactctcaatggctcgaagctatggacaatgagttctttgccctcaagaaaaacaatacatggacaattgtatctcttcctcctggatgccatgtaattggaaacaaatgggtctacaaaataaaatataactccaaaggtgaagttgaaagacataaagcgcgcttagttgcaaaaggatacaaccaacaacatggcattgattatgtagaaacttttgcacctgttgcaaagttcaatactctcaagcttttctttgctctcactgccctcaataactgggaattacatcaaatggacattaataacgcctttttacatggtgatcttaatgaagatgtttacatgtccattcccaaaggctatgtccatgatggtgaccttcctcctaatgcagtttgtaaactaaataaaagcctctatggcctaaaacaatcatcgaggcagtggttttcaaaactaagctccactcttcttgccattggcttccaacagtcacccaatgatcattctctcttcattcgaactattggagaccaattcctagcactattagtttatgtcgatgacatacttattgctagcaataaccataacgatgcctctgctttcaaactttttcttcactcgaaattccatctcaaagatctaggt

SEQ ID NO: 396876 - DNA, 1109 bp, Cannabis indica
ttcaaaactagagttcaagggctccttaatttgatcactaacctgttgagcagattttgaaattaatatcaacacatacagtaacaataactcaagggagaaaatattattaagatcacaaagtaaattgatgtcattacttctttcaaaatatattattattattttaaaatttaataaattctacattttgaaggaaaaaaattattcattgaggcaaacacaataagaagaaaaatggtggagctattataggcgtaacttaatttcgggtaaataaagagtctccattaagactctttatattttattagttgtcatttcactataaaaaaataaaggactttacaagggaaatgaaaataaaatctaggagttactaagtctattggaccagcaataatacacgatgagagtgagattgagtttttggacttacattatattaaccttattttttattgaatcacaattttataataaatttattttatttaattttaataaattattaattacattaagagaaatttgcggccaaacccctttatgtttatatttgtagacacttaacctcctcatgttattttttggtggtaaaactatcttatgtttacttttgttagcaaatttaaagtacaagttaactttaactattaaatgccacataagactgccacttagtacattcattggcatatatttatgggaaaaaacaagaaaatacaaaaaggggaaaaaaattataaaattactatgggccggcccattcaacatttatacagcccacatacaaatatttacaaaaataccacatgctctaaactttcagccgcacggactgaacgatgaagatgaacatacctcgatcgtttcaaaacagcaaaacaaccaaaatgaaaccaaaacgagggaaatacaaccattaattccagcgaaatcaactggaaaagaagacatgcaatgatctaaacagaaatttacgaaaaaaaaccagaaaaactgggaagaaactgaaattacacaattgttttcggttttattcgatcaaaacaactctccctaatatcgaaattcagattcatgaaatgtagatctgtaacaaacag

SEQ ID NO: 396877 - DNA, 774 bp, Cannabis indica
agcctcgtaattataatgagtgtttcaaaagaaaacaatgttgaacacgttttataaaaagcttacctaccaatatggctctatgcagagcgaatatattcacctggtacaatgtcaggggaaaagaccatgactgtacgaaaagtttatgagcaataataaccgttgattctaatctcaatgtcatcggggaaagagaacttttgtgcagttaaaagtagtgttcctctattttttttctttctttttgaaaattcataatggttttactgtgttatttattttttatttttttataattggaatcactcaaaaatttaagatgaaattatcagcaataagcgcaaattcagataacttaaagctagtttggtatgcttgtattgcggagaaaagtaactatataattgtgagaaaaaatatatgtaacataattgtaaaaaaaaaattgaattgagtgtttaataaatataaattttaaagtattgtgaatttataaaattctactataataataagaatgttataatttagttaattataattataagtttatacaaaaaaaataatgttatataaattttttatatttaatatatttttaattatttttttctacagtataaatttatacacatttgataaaaataatttataataatttaaattatattttataacttgtagtttatgggaaactctaagttgatgtagtttattaataataaaaataaaaaatataaatatgaagtactttttaaaacaaaataaaat

SEQ ID NO: 396878 - DNA, 843 bp, Cannabis indica
agccagactggccaaatcccttaggcgtgtctcattaaccttggacggagggctcacccatctggcacctaaggccccttgcctcttgtgaggaactgcagcagtaagctcctcagtgacgtagtccactccttcgactaggacctctccatctgcatccaccggctcgccagcctcattgtatcccccaaagtttggaggttcagcctcttcctcttccccagcctcggaagggctgccaagacggacatcgtcttgttcctcaatttcctggaccttagcgtccccctcatgatccccctcttcctggacaggaagatcctgttcggcgctgggtaatgtggcgagctgagccacatgagggtcagaagcgttgaccctacgcatcgttttctttgttcgagccatcatcttatggctgaacagataatgggatgaatgccgagcaactgtgacgtccggaaaagcaaaggaaataccaaagttccccaaacttggacagccagcgggcaaagtatcagcagcacttggccactatgtctagttggacggcagatagcgcctccaacctttcttcaactccaaaatgaagcggttgtatccctctacgacgatctgctcggagtagtagtggtgttgtacttcaggttctggagtagaagggtgttcactactcacctcccaatcttcaaggcttgaattggaaagtctgtcacttgaagagaacggacttgttgggattttatgccctaaataaaacccatttcaatataatctgatttgttatcaatgaaagattagaagtcatttatgtttacatgtagttttcatgtttgtggttta

SEQ ID NO: 396879 - DNA, 563 bp, Cannabis indica
caaaatttttacaaaaaatttaatacaaaactctataaattacatttattttttacataatatatataacactatattaactatacagtatatacagtgtatatacactgtataaaacagtatataccgtgtatatactgtatatatactgtgtatattatatatacagtgtatacactgtactatatacacagtatatacactgtatataccgtatataatgtatacactgtgtacaaattgacaatatctacaaatttttcattcacaacacacagcatatatacaaaatatataatttacagtacacagtatacacaaaacagcaaaaaatacactaaactaaaatttttcaaatataacacattttccattcacaatacacagtatacatacatatataatattttttacagaaaaaaaattatttttatgagatatatatacacaaatattgtaagaactaacctccaaatatttagtacaccaaccgatcccggcgttttactcagaaatttcttccccacagattatttatcccaaactttaaagatggagaaaaa

SEQ ID NO: 396880 - DNA, 588 bp, Cannabis indica
atatatacatgttatttgcgtagctagttcacagaaattttggccattagatttgagaacatgcatataatttgtgaggtgataaatattaatcaattatttgatgagattagactaaattcgtaagttggctctgcctatatatagttcctatgatcaattatttgcctatatatttggtttgttgaatcatactactatatatatggctagatatttttataccgtttaattttttggtttaattaattattaattattaaatatacagctagattgattatacgggtgtttaattaattattaatattgaatttaaaaaaaatagaaaaatgagagaattaaaaacggaataaataaaattatttggtttcgttacctaatttttatttttaaatttatataataatcttataaaattaataaagaatattctgttaaggaatcgttaaaccaaaaattcttgccacattttatataaaataaatatgttagttcagaattctttgctatattttatattttatatcatcatatctcactcattcaatttaaagataaaccaagatattacaatactattgcaat

SEQ ID NO: 396881 - DNA, 1984 bp, Cannabis indica
tgtaagttcttcacatctcgtacacttgcttgctgtttgtttatatagcatgctttacggtttctgggttggatgttgaacttctgggaatagttttgtttgagtttctgaatgatgtgttaaattcctccttttttgcgtttaccttacttcttttcactacattcttgctggggcatcatcctcattccatgtaatgaccactttagggcttagagtagaccttgccttttcggttttacccttttttccctttctctctctacttatttgcaatgtcactacctttgggattcttgcacccgactcttgtcttgtcaaggaaaaccaggaaaaccttttggggctttctattttagcaagtgtccggagggggcctctttccagcagttaggggacccccattccctttttgaattagggcttggtctggggcctaactgctggatatttttcgattttttttcagaaccagaaatgtctacttccgcatccggttctaagtcttcaaagaaaggggaagtacgcctggccaccctaaaggaggtcatgcaggggcctgtggcccaggaagggtacaagtcccgtgccaacgggtgggaggcggctgagctccactctaccttgacctgcgctcaccagctggagaagattgtggtggtggcaggcatcaagccttcgacctccgggacctatcaccggctgcctagggacgaggagacacccaaccataattacgggggttttggagcttggagccagacccacctgatgtccggggccatgcttcccctccaggactattttataaatttccttgtatttgttggccttgcgccgtaccaactcattccccaagcctaccgcctgctttcaggcctttttattttttatgctacccggagctggggctcgcccagtccggcagaaattttgtatttttatgaactagtttctatccccaagaagggagacaaatttaaggacggtttttatggccttcgggcccatcctttgaatgagggcccagtccctttcaaccatcagaagcacgtgaaggagtatcgtcaccgcttcttcttctcctccggtttccaggccatggaccgcccggagcttctcacggagtgggttaggatccctccctacatgaggaccgcgcctacccaaattttccttcaacgggccaagaccttctccacatacgataagaaggccctcgatgtcggggagttggtcacgacagagaactgtcggaaggccaaactaatatcggagaaccagtcggtggatgacttcaacctttccaaagtcatctgcacgaatgcgaggactccagcagcagaaagggcactccgggtagacatcatcgccacggcggaagacaagtaccagaagtacctctttaagagggaacaggagctggcctatatcaaggcccaggcggccgccgggaggactcttcgcctggaagctccgccggagcggaggacccgcaggcccaagcctgtggtcccggttccaaataccggagctcccgatgccagcacttcgggttctggtaagtcccctttaacaatacattatgttcctcccgtccgtgagtataccagccttaggcctatagggttcgatgagcgtctccgtaggtttagaatgccttctacccggtgggggaatcatgccaaagagtattatttttcccacttaggctattatttaggtcggtcccggatgggttctggacctccggtgcctattcctttggatcattcagcctacgtatcttccagctggtttcttccatcggacagttatctcggggatgatgacgctatcgtcatgattcgagactttgctaggaccgaattagagagtcagggtaggactagttttattgcttttttgctaagtgtatgctgctctcatgaatgtcctaatgcttaacttatttctttgttgcagcagccaggcccatggacga

SEQ ID NO: 396882 - DNA, 695 bp, Cannabis indica
ttcgttagtgttctcttaaaatctcactctacacatatcgaaaaatcgtaaaatttcacagggagaaagccaagattgttgtccatcactaagcactaacaattatttttatcgaaatagtgtaaatctcacatttctaatagtggccctttatgaaatgtgacccggactcatctcagaatattttttgccactagttacaatgaattagtactactaagatgtgaatatgaagattattttcgcgttaaatttagataaaatggcccctaattcaaaaactaattttttttagtgtaaattttaacaattttttttctttactctaatactcgttagtgttctctgaatatcttacctaacacatcttgaaaaatcgtgaaatttcacaagaataaagctaagaccgttgtccattacttttctattggacatgttgagaggaacatagttttcaagcactaacacttagtatattcgaaatagtaaaaatctcacatttctgatagtggtagctctttgtgaaatgtagttcgaacccatctcaaaatatttttttttcactagtcacaaagaattcgtactactaagatacaaatatgaagattggtttcatggtaaatttggttaaaatggccccctaatccaaaaactgaaaatatttttattttcaaggtaaattttaacaagttttt

SEQ ID NO: 396883 - DNA, 632 bp, Cannabis indica
acgactactcttgaacccctcactttttgtttgtttttctaattatggtgtttatttaatactttttagggtttttttatttttacattttaaaatattttttttgtatttttacggaatttcacacaaaaaattttataacaactaacggagcaacttaattcgcaaccaaaatccgtatagcaacctacataaaaattactggagcaacccaaactataaattaaaaaatagtatataaagtaattctcctactttttatttataactttataagttatatagtttattgatttagataaataaataaaatatatttacaatttttttcacggttaccaaatagaagaaaagtattatattattttttataactatgatagttacatttttttatgtcaggttactaataggtaaaaattaattataattaattattttttttaaaataattaaattttaatttaaatattgaacaataacctttttagcaattaatgtttataaataattttatttttatatttttaaccgttaaaccatttaactataatatttatagtaaaattttatttcttttacaaaaattagactttcacctaaggtggggctaggacctaattactaggggg

SEQ ID NO: 396884 - DNA, 373 bp, Cannabis indica
acaattggttggaatgcctcagtattatttttcccaacatttatgttgcttgctggtttttttgtttcttttttaaacacccactcctgaagcttcccctctttcttcctatagtcacttgtctcatgtcccattcctttgcaatttttttcaaaggattggtttccattcataagagaccttaataggtacattagagcaatattcattctcaaaatatatggtatgaggaaattcctggtgaatagatacctcgattagcaccctagggtaactaagcttatctcgttcctttgtcactgcatccaccattattggctccccaacctgccctataatttttaatagagacttttgttggaaattattttac

SEQ ID NO: 396885 - DNA, 537 bp, Cannabis indica
cttaaatcaagcaatatgaacctaatctaatcccaagacacgaaatcaaaccaccccaaaacctacagcaacttaaacacccaaaattcatgcaatacacatcttaaacttaattaaaacttaaaatagaataagtaagggttcataccttgattgaaagcacctcaaccctatcaaaatctagaaatttagcaaagaatacaccaccttccttcctggattgtttgttcgaaagaaagagaaagagaatcggaggatagtgagaagtttctaggttttctcttaatttctctctaactataaataaaagcttcttttctttttctttttttaaattataaaacttataaatcagccttaatttaattcaaataagtcaaaagaagtctttgccaaaagaccttcttgcccctcaagctaatcaaataattacaaactcccaagggtaaattggtcatttaccaaatcccgaaaattctaacacctctaatacctaacagtgataccccgataataatattctaaacatataaaatg

SEQ ID NO: 396886 - DNA, 764 bp, Cannabis indica
tttgtgcaggccggtttgaagctaggttatgcttactcccgggctaaatctgctgcttccaagagtacggctctgtccgacaccttgagggcggaggcggacttggccaagaaggaagctgaggaagccagggcggagactgcagctgttcgccatgagttgggtgaggccaacaagaagctttttgccgctgagaagaaggtcaccgtgctgacaaaggacctcgaggctgctgatcgctttgaggaaaccatcgagtccttatctgctgatgttgatcgtcttcaagatgagaggacttctctgcggcaggtcctccttcggctgaaggatgataaggacgctcagacggtcgaggcgaaccgcttgagggagaaggttgatgctttggagactgccgacctcgagctcttctttgatttttggaaggcaaatccccaggccaacttcgactacttaggcgacgccaaggaaatgtacctcaagtacttcgcggcccaagttgcctatagtgggaaagaggtggatgcttcaactttcggccaagcttctgaccaggctgttgatgcttctccggctcaaacaacagatcctcctgctccagtcggctcagaagaaccaaatccagagcttgcgactccagctgtttgaacattgatctttttatctctcctgtttatatatatattatatatggccgtaaggcctttaagacatcatgaccggccaagcggtctttaaacttgaaattaattttcattttt

SEQ ID NO: 396887 - DNA, 511 bp, Cannabis indica
aaatgttgtgcaatgagcaaaaaagaaaagaactaaaatgtgtgtaatagaaagggtaaataccattttagaccatgtgttttgcgaaaattatcaattgaactttttattttgttaaatgacaaaatagaccatgtattttctaaaattgtacaaaataggactctgaactggtttttttatcaaaataaaacttaataataatccgatctagagatgttatgacaaaactgattatattttctgtatatgttagtattaaaaattgttttaaagttagttatattaaaaaataaaattgttaaaaagtgagctcagggtcctatttttaccattttgaaaaatatagggtctattttgtcattaacaaaacagagagtcaaattaataacttttacaaaataaagagtacaaaatgacatttaccctaatagatattagataatagaccaaaaatagagaagtataagggaaatttgaaaaaatatgcataaaataccttaatatttta

SEQ ID NO: 396888 - DNA, 985 bp, Cannabis indica
gcttaccaataaatatatatataaactttatatctaaaaaaacaacagcaataacaacaatactagtaataataataataaaaggataataatcccaatgtttatttttagcggcataagtacccaatgtttgtgaaactgtaatttttctctaatttcgtcagtacaagctctattatttttttaaacaggccacatataaggtccagattttctatcattgggtctagagagaaacatgtagtatcagttactttcaaatgttcttttaaaaaattcaaaacggagtctgtactgacaaaattggaggaaaattacagttttacaaacattgggtacgtatgccactaaaaataaatattgggtttatgccgcttacaaacttaaaactttgggtacttatgccgctatttaccctaataataataaaagattattttattatttcttagttaataagaaatttctaaccctagggtatttggtcattcctaagtaccccaaaatactccgataattctataatcaacttatctcaataattccatcaaccttactaagtaatactattgtgacatttttggctcccgatcgagtctctaaggtcgccaaacatgaaaatatttatattctacaaatagctcatattacattcacacatgctatttaaatctccgtaatttataaattacgctttatttgttcatttagaacctacttccgagtataatatgaaactcatttagaacctacaattcagtatccttctctgactgatacaccaaccttgtctttatatcgtaaaagcctttcaaacgtaatcaaaaagtcctttgtcattctagttcctagcctttccttgtacctctaaagttcagagtcactttgatgggccactttaattctctctaatagattaaattacaatgtaatattatcaagttctcgaaccacaaactcaatccctgttctggttacatttcca

SEQ ID NO: 396889 - DNA, 675 bp, Cannabis indica
atatttctcaatttaactttttttattttctttctcccaatctttggtgcttatatagatggtttagaggttaattaagtaaatttacattttattattttttataaaaataagaaagaaaacactgtttggatttaatataattgagtgttgtatttagtatttacacaccaagtaggtgaggatgtttattgttaataaatgagaagtatttatttttttcaaaaaatatctcttttgctgcactcacaaaaaataaataaatagataaataaataaacgttttttttactccctaaaagacaaaaataatccacactatcttcattaattatctcattattttttttttttgataattttattttatggttttaaaatataaatttataaaaatatagtttatctcaaaatagttattttatagaaaaattatagaaaataggtcaaaaaaaattatgaaaaaaaatgtctggtttcctatatttttttttaatttttccataatataatatttttggaaaaaaaatcatatttctttatatattaaaagtgtctatctaacggcatttcttggtttaaacattcttgggttttaacagaattatacttaaaaataaaaagaatattctgttaaatttaacgattaggtttgatcccccattaaaaaataaa

SEQ ID NO: 396890 - DNA, 1096 bp, Cannabis indica
caatatgtaattataaatagtggaagacaagatcaaaagggtgacaaaaaatctcatacgagagaggccctaaaaaaacacacaatcagatatctgaataagattgacttgtggactatgcataattttaacttcgaaaccacgtaaaaaccctgtgttcatatatttttttctatttcttctattttctctgtttggaatttttgccgtgaggctcaaatttagttaacgaaaatctgcgtcaacaataggtttagataatctcaaacctataatactaggatcaggaagttttgctaagtctattgaatagacttattttcaaaatttcctttcttgtccttgtaatataaaactttttggttacaccatatgaatggtttttaaccatagttctctttgctttgcttaatagttccttattctaactatccattacttgtttaaactaacaatggatttttaattacgagtgtcttccaagttataacagggtgagttctttaaaaccctcccactatgacaaggtaccatgactatctgtctaagaacactaaatggtattgtcctcatcagttgtgtcaataaaacagaggcagtgggatcatcttatgcaaaataagatgatggaacacttttggaatcatgaaaaaaaaatatctcctctactttgctactttatttttcaaatttaatcatattcttagaagagtagtgttttttgaaacaacactttcttattttaataccataggtttgtccacccttaatcacttagaatagctatcaaacatgcaaatcttagttagcagttctagcttttcttaagttcacgatcaagacatccctgaatctagtaatagtttacactaagtacacaaccattctatgattctaaaaattttcctatcactagggtatttccctggaaggacttaggcaattgctagtaactaatcataaacctttcattctcatcaatatgcaatctgaatttctagggaggtaagtttggatacaattcaaaaattcaacttaatgatctttgaactgcatatccaccaatattcctccacccctatcagttcgcagactc

SEQ ID NO: 396891 - DNA, 612 bp, Cannabis indica
tctacgatacccacatattttaatacactctccgtaattaataaattacgctttatttattcatttactcaaattccactaattaactcgtaattagcttaagtaagattataatgttactctaatatccacataactacatatttaataaaatatggccaaataaatatcaataaaattttcgggatattacacttgctgacttgaccgtcgaagtttctttgaccggcaccatcacggtatcccaagattttccggttactctcttctttgttctacaggttgtcggtgcccgcataggatcatcttcgattgattatgaattttagcatctacatatattgagttaaagttgattttactttaattgtatgtatcatattagtaatttattgatgttggacaagaatatatagtgataattaactttgttcaatttaagataggagaactaaaataaactaaagaactttatatatatctataccccacaaatttatttacactccaataaaataaatcaatttaaattattttaaaatttacacttaatatttatatatatatatttgttctctattcatgtaacgccctaatgctaaggcacgctac

SEQ ID NO: 396892 - DNA, 605 bp, Cannabis indica
gaggtacgtcttgatagagctctaatctctaattcttggaatcagatttttcaatcggctgtgctctctaatttgggttttgctacttcggatcattctcctttgtttcttgaacccattgcggctaataattttactcctaaccatcgttttcggtttgaaaattcatggttgaaggaacctttgtgcttagaaattgtgcgtgatgtctggtcccaagaacaaaatgagagtatctcccataaactcaagctttgtgccgagagactttctgtatggggtaaggaattgacgggttctattaatcaacgaattaggcgtcacaaggctgatttgaagaaacttcaaggcttgcgagactccatctcagttcagaggtatgccgagataaagaagaagctttatgaagctcttgaccaaagagaaagctactggaagcaaagagcgaaacagttttggttacgggaaggggatcaaaatagtagttattttcataaggcggctagtaatagaaagaagaataatcagctgaatgagcttcgtgatgctaatggtaattgggtttcatgggactcgggtttaccatctgttgtagccgattattt

SEQ ID NO: 396893 - DNA, 1066 bp, Cannabis indica
tctattgatataatcaatataaacagttttccctccaattattacttcataattagagttggttaaaatatcgttttacccttctgttatctcaatttttatccacctgatgtggcatgtctacatggccaacaacagtgctacatggcaatacaactcaccgacaagaaggccaagtaatctactcagcacttcaaccaacgagaagtctaatactcaagcagaatgacaaagtgacaaccatccacctcaagggggttggccgacaacccctggccagccccatggctagcataggccggccaagttctggacatcccatggtcaaccagcatgcatcctgtaggtgcatggcctaccaacttttggcctggcaggattttagtgcgcaactttcatacgtggataacaagccaaatcttgggccttaacaactcataaatagagggaaaatatctatttttgagagacattttagtcatttgtattttattaatttaatatgttaataatatcttattttacctatttctaagggatttgaagggtataagctcacctatataaagagccttaatcaaaccctaaaaccttgagtgctaaatctaaaatcattaagtctcaaaccctagctctatgtctgataactcacatctctctcttacacgcccactgttatactcatacttaagatttgccaactctgatttctacattttaattataagagagctacttaagatcccatcactatagtgatctgagtagtattatctcttggtatcaatacaattaaaagaggagtaggtcattacctgctaactaagagggccaatcctctataaaattatgtgtctatttactttattattcttattgtgtaacacgtggcaagcatcatcattaaatacaactctgttgtcgattggcaaatggaactatggacctatattttgaagctctaataaacccaagattattatcaatctcatcaataaaataagctgatttattaatttcattattactccactataaatatggaattgcactatttgacaatata

SEQ ID NO: 396894 - DNA, 731 bp, Cannabis indica
ctcgaagttctgaactgccaaaagctcaatgcatacgatttttaaaaaataggttaatacgattatacccctacaatcatttaaaaaattctttttaattaaaagtactttttaaggggcaactgttataccaaaaatgtgactatttaccagaagctgacacgtgtcctacaaaaggaatgtgaatcaaccatgataatataataatgatgtatcattaaatctaatttaaataactcatctcaattaagtataaggttgatagataatgttcaaacttgttggctgcttagtcttatgcgagacaagaataataactattaaactagtattgccaagacatatatctgtctcaggataaacgcacttacatacaaaggaagaggaaactctcttgccaagcagattaatatagcaacacacaactgctttgcattacacatagcaagaagatcaccttgcattacaaataccagtaaagggatacgacgagatgaattattttccaacactcaacgtgttttcctattaagatgacaaggagaactcacatctgacgagatacaaccttccaaatcaacaataaccgtctaaaggataaaagtaaagagcaattacgtagttattagatattatcccatgtgtgattatgaaatatgaaaattgtccacgtttcattagcagttataaatgaatcaatcttaaaagaataactaccaacctatattcct

SEQ ID NO: 396895 - DNA, 1337 bp, Cannabis indica
ggtaaaataatatccaacagtctgatctataatagttccatgattctcagcctcctggaagtaactagtcatcttgagtagatgataacgcacgttctgatgaggtttcatccatgcattgatgaaattcttggtcacctcaaaccggcttgatctgacgccatcccaaacatttcagttaactggttcatgatatctgcagccgtgagagtattggcaaaccttgttttcaaggtgtcgaccatgctagacagcataaaatatcgagctttgttgttagcattctgccaacgctagaacttttctttaaatgccttggtcacattctcacctggttgttcaggagcctcttcagtcaacacaaacagggcattttcacctatgagagcaatattaatgttctctttccatttgacaaagttagctccagagagtgacaccattgggttgttcatagtcatattgggtactacaaatatcaataaatagaaatcaaataaggtttaatacaaaatcatacacattcagaaattattagcacttaggaagtaggaatgacaagcgaaaatacaaaaacatacaatcctaaataattttcaaggtttctaacaaactgatacagtgcattatatgtcatttagtagttttcataagtttgcatttccggtgcccggtaacatggaacacggtgtttggctcagtaaaatcacaacttagtatgttagtatattgggacagttatttagacattgggaatgtcgggattggtcgggaatttaaaatttcccaaaatacccctttagtgttagttatgctatttagtaaaaaaggggcaaaatagtcattttgccccattgttattttgtcctttagtggactttatatgatgaaaatatataatttttaatgttgtttgttggctgaaacaaataaggaaaagtgattattttaactcatttcttcaaaaattagaaaattagaaagaaaagcaaaatctttttctctcaagcctctctatttcggcccccctttgagcagcaccaatcttggtgtttctttggttttcaagcatatttttgtgtgcaattcaagctctaggtatagctcttactcttctcctctttagtttcttgaaaaatcaagtaagattgggttgcatgcttagttttgtggttgttcttactgctgaatgttgttgttgatttctggagttagaacatgatttaaaatgttgattcaagcatgattgtgttggtgatttgttggttttatcaagctatgaaatttttactcaaaactattgtttttcaaagaaattgatgaatctgttgctgctc

SEQ ID NO: 396896 - DNA, 1289 bp, Cannabis indica
agacaaaagaggtaaattagggtttaacaaaattaaattgaaacaaatgtcttaatcctaaaaagttgatgactacactgtagataagggtattgcatattagaagaaaaataattcaaaaagcacattcccataaaatcttttcgccttataagtgaagaaccactgttaggggtacccaaatatgttagaaaggcaacacaagttttgtaaaagagaggagagaatagcaaaaacaaacaaaaaaggaaccagacccttgcaactgaaaacatcatgtgctcgtgaattcacaagaccagtactagtaagtagtatatagacttctaatactttctaatagtttctgggtctccataggtgcttattccaaatatgcagtaatgccctctctttcttgaaaagtaactattatagtaagacctatatatatggtagtgaagtatatagaaaattggtcaattgaagaaatgaaactgagttttttatggaatatactacatattgatattttttgaagtaataattacacactcatgaaataaagttatcatcacattaaagctttaagttttcagtttcgtggtatactagagtaaagttttaatttttattctagtttattcttctttgaaaaagaaaaaatggccttatttgatgaggttcaagacctacaaaaccctccaatggttctttatgccttggttaatgaggaagaaggttttgaagatgagtttgaggaggaaaatcgagctggtaagtagctaattacatacaaaaacaattggctaaaactttgggatttgaatgtactagtcttactaggagagacaagtacttgatgttagttgggaatgaaggaatagttggtgataataataataagaagaaatcagcaggtttctcctatttctagttcaaattattaaaaaatataggctaataaagatttttgccccctgaattttgacatgtaccaaatcatgctccctaaacttttaaggtcgttaaaaatacccccagaattattgagattggtagatttaaggatttgccatgtttttttttggtttgggtaccagaaccgggttggccaaccactccgggtagtatacatcacggataaaaatgttggacaataatttgtctacctccttttccagggtgtcaactttcactgggtctagcagaagtcttttttgttgcactgggggtatatctgggttaacatttaggacataagtaatcggacttatcccggtcatgtccccatggcaccatgcaaacac

SEQ ID NO: 396897 - DNA, 626 bp, Cannabis indica
tcaatccatcccacttattttttcagctagactctagtgtaatctctttcagttgctttttcatatttgtaatcaagttttgatatccaattttatctaaataagtagtaggatgatgctcatcatcaacctcttttatatagaattaccaagaaaaaaattcacactctcagaattccatattgctttacctcgtggtactgctacatcactttagtacaaatatttttttctttctctgtctaattaaattaaaataataagttttataaaaaaaataaaaaaatataataatgagacataaagctaaagagtgatccaacacgaaaaacacataatgactatgttgaaagcatcatcaccatcctattctacttgggtatctaaaaattttatcataaataaggaacaattcactcttaactatgttgttgcattaccttcctgaaaaaaaaccatactatgttcgagaaatggagtagtgatagaggccatcttagcccttaactggacgagatcttcttagcagatttcattaagatgcaacaaccataatgcattgatgactaattactaatgactcgagcaaccacaggaaagaggagacaaaagaggtaaattagggt

SEQ ID NO: 396898 - DNA, 990 bp, Cannabis indica
taccaacatttaatatgtgttgacgttttcgctcaacgacaataattttgttgaggacgaccaacacaagaattatttattgagattcccttagtagcgtagaaggctgtataattgagctctttagtattgtcacaacgaacaactttaatgttaactgaaaattgagtggcaatgagagaaaagaattgagaaataatgaaagaaacatcaaatttagaagtgagcatgtatacccaagtatagcgagaaaaatcatcaacaatagttaagaaatatcggtaaccttcaatactagtaacatgaacaggaccccatatatcaaaatgtattaaatcaaaagcagaagaggcaaaattatcgttagatgtaaatggaagtcgcttttgtttggcaaaatgacatatagaacacataaaattgaaaggttttttcacaaaattgtaaacgattatttaagatagtagaaatgttcatagaaggatgacccaggcgaaaatgccaggggtccttcaaattacatgtattgtttgcaaaaacagaaatattcgtagtgagaaaacgatgattttgtttaaagaaaaatagttgtccaactttgttagttgtcccaatcgtagaagtcagggagggatcctgaatcaaacattgatcaaaagtgaaagtgagtttattaacacaatgttcaagatgagcattggcagaaaataaattgaatttgaattcaggaatatacaagacattcgttaagacaagttggtaagaatttgtaacagttccaaatttgttgatatgaatttgatgaccattacgtaatgtaaccaagttaacaacattatttttatttaaagatgtaaagcaatgaagagagtgatatgtgatgtgtagcgccactatctacaatacacaagaaaagagaaaaaagatcgtcattaccgaagatgttagaaaccatagggagattagttgttgactgagctgaagttggga

SEQ ID NO: 396899 - DNA, 675 bp, Cannabis indica
tttttttaattttttttttctagggggccactgccccacctcgcctctaggtgggtccgcccctggttatggtgttggtgtttcagtccatctatattaacagtaaataaggaaatattaagtcataatactcaaattggattgtgattatattaattatttcacttgggaaatttgttaaaatatacttaaaaatttaggctattctttttaatatactacctttaaataaatactttaaatattctccaaacactctaaaatcccaaaattacccttacaattcaaaagctctcttctcctactctcgctgtctaacttcccctcctctctctctctctctctgttattctcatctagccccaaacctttcaagccctgtctgttcacgagctccgaccgaccaagacgacccacaaccgagaagacccatgacgactcgcgacgacccacaacgacccacgagaagcacccaagacaacccacgaccaccgcattttttttctctagtttttgacccatctaacgcttatttctgcattttttttagtttttaacgatgtcgcgaaatatcgctagatgtcacaaaacatcgcgaaatcatgaaacatctctaaatgtctccaattcacaacaacacttgttttctgcaatttttttttctgatttttgacg

SEQ ID NO: 396900 - DNA, 575 bp, Cannabis indica
tttaccgtaacttgtcgaagaaagaaaatagatcgcttaatccagtttcattgggccttctagcatcactaggaccactagcatcattggtctctctagcttcactggttcttctagcatcactaggacctctaccataagtggttcctctgacattaattgtttcgcctggacaactaatactaataccatgtgtttaacaattttctctacggggcattctttttcgtttccctggcctgggtggtatttggtacgatcgtggagttaaattcaaagctacagtaagagggacctctgcagcttggtcgtctcttacatcatcattgccctcaacatagcattcagggtctggaccatcaaaataaacatcaatgaagggcatttgtgctacaatgtcagcacttggcatcatagtgtttaattcaggtaacacatcggcaaccaacacctctggatttatttctgagataaaaatcccaacctcgctacgagtgtccttaatagtacttggtgtgggactaggattgatacaaatattcttctttaacaaagtcacaaacaaggaagtaaat

SEQ ID NO: 396901 - DNA, 550 bp, Cannabis indica
cagctaaacccaaaaagcttctagctttagtagcagatttcggtgttggccaatctcgaacaacttcaagcttggccagatctaccatgatcccatctttatctactatgtgccctaagaaagagacacgagataaccaaaattcacacttttgaatttagcatacaccttgtggtctcgtaaccgctgcaatactgatctgagatgcaacttatgttcctcgtctaattcagaataaaccaatatgttatcaataattacgatcacgcatctatctaggtaatccttgaacacccgattcataagatccatactaaagatgatacacagccttggcccgacatttaccctgatggtcattcttgcatttcgaacattctagatatgacttaaaagaggatccgtgaccttgacgaccacctctaattccctgaaactttctaatactccctgatgttccggaagcttctgccttccatttatgatcagggttaccaccatcggtccccttactgaaattaccacccacaggaggattcgatgccatggc

SEQ ID NO: 396902 - DNA, 1290 bp, Cannabis indica
agatcaacttataaaataacataaagctacatgcgaagttgaatacttaaaggctcacattattctggcatgtataacaaacgaggcacaaaaatgcatggaaaaataatacttaagctaaaatatgaatagatgagataactactcatataagcaatcaaaaagatatacaaaatagttccagaggtgaattattcaaaatattttttaagtttgctctaaaaaataaatatttaaatatagcagattataaactgctcgcatataacagggtgaaatcgaactgctcgcaaattaaaattacacgcagatgataactgctcaacatatatatagtagattaataactgcttaaacatatcaaatgaaaaaaaaaaacaatgggaatacttcctagagtataaataagttggatcacaatataaatatttaaattgtaaaataaaacgcaatgaacagacatattcaattcaaacataaggtacgaggcattaaaagtaaagataaatgcataaataagcaaagctggccatccaacaatacaaaattccttacaaagataatgccactaggggcaaccattgtctcggccaaagggccattttcctaaatatatatataaaaaaaaggaaaaaaaataaaaagaactgatttagctagctcttcttgatcttcttcaacctcatctgcctcttcagtctcctctttcttggtcttctcacagtatgcaagcatctctttggcccctttgcccagaacgctcaaatccatctcgggattggctaaccaagcttgataaatagactgcctgacaattctgttgaccatatttttggtgtcaactttggcctcctcaagctttctatcagcctcagcctgaatagccttgttagcatccttgagatcttttattttcttctggttagccctttgttgcttctcagcttccttctttacccgagagagctcagactccgagtcattccacttattggccatggcatcacgatgctctctggtctgacagagttctgtctcgagcatctccactcgttgaagccccctatgttaagcagtaaaggacaagagagacgcctgcgaggaaggaaaccatagagtaagagagtataaaaacaatgggagtgaaagaacataggacgaaaaaaaaagactaacctattgcctgagatcataactcctctgtacctaggtcgcaacataaaaaccgctaaaccgtgggaactgccaaacccattagaatccgcctgcatggaaaccacccattaaaaa

SEQ ID NO: 396903 - DNA, 753 bp, Cannabis indica
gaagcctctgaacctctattttgtgctgacttccattgcaccagacaactcatatatgagataagaacatcatccaccgtagcatacttttggttccaaaccaacttatttcgagccttccataactctcagcacacacaacaacctccccacagttatccttattgcacttttacaaaatttgatcaaactggcaacaaaaaccagcccacccgaaagcctccccaacgaaaaacctctgctagaattgagcggcaaaggaacaagaaataagcatatagaaaatagttttcttacttttttaacaaaccaaacacataatttgaactgagactcattacctcttaattaaattaaggtagacaaacaatttaaagcaacctgtcatactaaattgagtcgacttaattagtattagtatttatatcaaaaaaagtaggttaatgttcgtttgaattttaagttgattacaaagttattcactttacccaaatatttgtaagatccactacattttcacataagaaaatacaccaaacaaaaaaattacttcatataccccagaaaaatttaaacaatggccccttacagaaacacatcagaatgttagatttgttcttctgaaatcattaaaaatcgtagttggcatggcttaatgaagtacacagtacacttgtttttccatgccaaaaaaagaagagagaaaattaaattaattgaccaaattgttgttacaaacaataaccttttcta

SEQ ID NO: 396904 - DNA, 579 bp, Cannabis indica
cattcttatgttataactaaaaaagtttgtggctagagatattagtcacaaaaattacaattttttgtaaataatagtgtttttagtcacaatacttgttgtgactaaaattaaattagtgacaatttatatctaaatactatgttttagtcataagtaactttttattgtgactaaaagacacaattagtcacaaaaaaattatattgtgactaaaaagttgtcactaaaagtagctgtttttgtagcgatatcaactatttaatataattttataatatttaaataattaatattatttggatcaataaaaatatgccacatgtacataaaagggcaatcccaaatgttatttaatggtgaaaattaactgacatataaaatttgcaaataagtaaagttatagggttatggctaggggtgggcatcatccaatccaattgaagcgaaccgataaaatccaatctaattacaaaaagttagatatccaattacaattagattggattagatgctaaaagttggattctaattggattggatcgggtattgaatgtcaatctcaaaatccaattaaaa

SEQ ID NO: 396905 - DNA, 1494 bp, Cannabis indica
acttgcatcgtgaatcacagaggaattccctataattctgagatcatatcacagagatatggcaagctgtccagatcccttaatcagggtattctgtatttaatgtgtaatcttaccaagtatagacattgtaaatagaagagaaacttttccctcatagctattgtagccctataaatagtgatctattctcactgggcaaagggtcaaaaaacttatctaaaagtatatactcaaagatatcattgtaagagctctaagaggagaatcaatacattctttgttcttaagtcaatacaaatcaaggggagtaggctattaccgaactgctcggggccgaacctctaaaaaactcggtgtcttgatttatttcattatattacagctatattatatcacttgttgcttacaatcaagacttattgtcgttggccaaaagcgaggtcaacattttagtgctctcattgagagttgaactcaagctcgctctttacttcaaatttaataataaacgcgatggtggtacagactcgtagaggcgtaatcgatcccgcaaatccactggcagtggatcccgcaatgcgaaatccaagaattgcaggggttccactagccacaaatcatgagcaaccgccaaccgtaggtcagggtgtgacgagtcctttgagtggaatcacgcctggtgtgcaagagactggaaataccagttcaacagccaatcaaggtattcccaatactagagttccgccagcaacaaatgttcgacaaccgttagagatgacaccgagatccagagcctcctgctgctcttggactcatgcaaggtcatactactaccctgcatcatgaccaggaggaactccattctgcagtgaatcttgcatttgaagagcaaagccatctgttcgctaaatggagggataaagagatggaaatgttgagggctcaggaagcagccattcacgactgaacaagacaggccactgtgctgaagagcctttcaggctaccaaccagcaacctgcaaccatcatcccgctaggcgaatcagatgaagatccagccgtgaacgcttctcaaaccctaaacggtcaaccgcccaatccccgatcacaggttccacctgtgggccaagcggtaggcgaacataccttgtctagtaattcttcaagagaggtcatacctaataactccacccaagttaacggttccgaccaattgatcaatcaaaccaattagtcattgagacaacctagtgtatctatattgaatagattgggaacagctcatgatctcagagatgatttgaacagaagaagagggctagatgagcagtatgtcgcaccagtaattcagcccgaggcccgtgttcaaaatcccgctcgaagagatcctgacgtgaccctagttggccaagaggttgaacaagttaatccatccgtgcaggcatagttggatgaactaaaaaatatgttccaaggcctggccggtcaga

SEQ ID NO: 396906 - DNA, 745 bp, Cannabis indica
ttttaatcagttttaaatggtccctgagttattcataacattgtaaattgatcattctgttaaattttgttatacatgaacaaccaacttatcaattaatttcaaaagtgaatagcatagaactaagtgctaacagaacttaaaattaagggattttaccatcaaaaaataaatttaaagaattaatttctaacgaagcaacactattgaagattatgccgcaatttaccgtaaacaataacagctatactatagcacatactagaatactagagaggacacatatactagctagtatagggccggaccaactttacatgtttatatgtaaactctcactacaagaaattaggttaataccggcggtattattcccggcggaatagacccgccggtaatagtctgggtattaccggcggatttagtaatccgccggtaatagttattaaataaaaaccattttccaaaaatatatattaattaattataaatcaattattaccggcggataggacttattaccggcggaatcccgcctcgaaaaatgagggcgggaattttaccgcccatttaattgaaaatattattgccggcggattaataccggcgggtcccgccggtattaatttgggattctgaccgtttagatttataccggcggaacccaattaataccggcgggtcccgccggtattaaaagtctataaaaacccctccccatttcagaaaaccattttccccattt

SEQ ID NO: 396907 - DNA, 657 bp, Cannabis indica
tatttttaattttattaatattatcaattgcgaataatatatttttagcaacaaattttgtgctaagataatttttgcaataaataaaataagcccagcacagacacaatacaatactatatgaagaaatatttgttctcttttattgagatgaacatgatcatgatgatcagctcatcatacaattaatcatgaaattgatacaaaaattaacaaaatatataaataattaaaagatcgatacaagagattgcatgcaaatgaaaattaaatattgaaaatgatatatagtgatgatgatgatgatgatcatatcaccatgaaatgactagttggaatattgacattccttgggaaggccattagggaaacgtttccaatctttgcaataattgtagatcatgtaattgttcttaacccaattcaactttcccatagcaccattggtaagtgatttgaacaacacatcaggactagtccaaaatgagaatattgattttgaaggtggtgagcaagaagcatatcctcttgaccaatcacacttatatttttcagctctgaattctttgaaggatgctttgaatggtgcttttgaccaatcagtcttgatcaaaccacctcttgtggcccaatcatcagcattccaaaggcttgagt

SEQ ID NO: 396908 - DNA, 640 bp, Cannabis indica
tatatatatatatatcacatggagtagattaagggagaagctataccatgtcaccataaattactcaatataaaaagtacttttaaataagcaaattaatcataaattgtggctcatgaatgtttgattaatatatgtattatatttgtacatacacgtaataccttaaatcttcacgagagacatgttgttttttacgtagatctatacgtaatctctagtctagacttagttcgttcgattattacaatttagggtggaataattaattataatagtcaacactaattttcaatatcacaaatgtagaatatagagataatctaccgttttcaatgggcaagaaaaattattgagaaatagtgtttggtttgatggaatggaatggaatggtaattgtaatggtaatagtaatataatggaataagaattgtaataggaattgattattatgtgggtaaataccattttggaccctgtgttttgcaaaagttacatattgaaccctgtgtttgattaaatgacaaaatggaccctgtattttctaaaatagtaaaaataggaccctgagcttaatttttgataacttttttttaatacaaccaactcgaagacaatgcttaatacgaacagatacaaa

SEQ ID NO: 396909 - DNA, 859 bp, Cannabis indica
agacacagcgaccaaaggccaaaagttggccgtttctctcgtgcaaagacgcaggcagcaaactcgtcagcaggcagggaactcgtcaatcctcagacgaaccgcctctcctccggcgaacccgtgcgaccatagggccaaatggcctccgacgatctatcggtattttctttttgtttctctctctttaaatgtgaaaactgcttgaatctatcctggatctaggtgtttgaatctcgtcggtggatctttggagttacattcggcgtttcgagatggtggtcgacgacgatttgttgtttgtggtgcactacggttctgggttcatggttaacgccggtttggttcatataaatagtgtattggttttttattttaagtcaagagggagagacaaagagataatgaactgtgtattgttcatacatctgattttatttattttttaatttttaatttttagtttatcttggattgatgtatagctgatatgagtttctatttgtttgatagaatttgatttagggatttgtatttagtttatactattttatgttattgtgattgttttgtaatttttagtgattgttttgtaatttttagtaaatttatgaagaaaatttaaaattgattataaaatatttatttggaggtaattatgtaaaataagttctataaaaattggaagcatagtggaaaaaaaatggtaatctcttattattggtaaattttctaatgtatatcagatttagattaataattataatagtatttataattgttaaatttaatagtattaatatataattaattaaattattatttataatttttacaatatataaatcagaattaaaaa

SEQ ID NO: 396910 - DNA, 1041 bp, Cannabis indica
taattaaaaattgaaaaaaaaaattcatcttcatgctatcttcgtaaatagcctttgaattaacataattatatggaccataattgatcagcatgtgggatataaatcaaattctggtatatttaacagaaaagtagtaacggaagtaacaaaaatgtaacataaggtatgtaaatccgtcgaaaaaaaaagaaacatgtgatatttaagtgtataaaactcagaacatatagtatttatgccgcaaatttcccttctttaaatgtatttattttgaatccttttcgttactatatatggtttatagagaatttttaaatagaaaaataccagactttatttaacttcaaatatattgattttggttttagatttttaggtgcatagacgcataaatataagttattctctttcttcgccacttaaaacaaattttcccgcaactttacctaccattgaaggcgattatttttattagtgggaaacataactttttaagatttatttggtatgttgtactacacttgattatataatattatattaaattgtattttatgtaatatttttatataaaattatgcctagtttaccttttatgagcatataaatatataattttttagtataagttaaaatttaccatagtaatatatgaaaatagtagaaattatacaatatatgggaaaattttaagtttatttttttatggcataaataaataatacccatgtcaaaaaaaataataataataccatgaggttatgggtttttttttacatttatatgggattttttatgccatgtttttgtaaaaaaaaaaagatgaaaaacgcatatttttaaaacaataataaattttgccggaaaagtcacaagcgtcgaaaaagtcaccgaaaaagttactggaaaagtcacagttgccgaaaaagtcaccgtcaccgaaaaagtcactggaaaagtcattacaaaagtcaccaaaagtagatgtctcaaatataaacaaaaatagaactgattccataacataatgaataaaaa

SEQ ID NO: 396911 - DNA, 937 bp, Cannabis indica
aatatggaatacattatgaacagttgataacgctagtggtaaagctagccgatacgctacctacccgaccttctcgagtgtctgaaatggcccaatgaacccaaggcttaacttacccttcttcctgaagcgtctaatacccttcattggtgaaactcataggaaaacatattccgttgcctgaaatgtaacatctctgcgcttcagatcagcataacttttctacctgctttgggaagcaagcatccgagccttgatcttatctatagcctcattgatcctctgaactaatttcggtcctaagttcttcctttctccagtttcgtcccaatgaataggggaacgacatttcctaccatacagcatctcatagggagccatacctattgtactcttgtagctattgttgtaggagaattcaattaatggcaagtacttactccatgaaccctcaaagtccatgacataggctcgtagtaaatcttctaatatctgaattgttctctctgattgaccattagtctgagggtgaaaagctgtactaaacttcagctttgtgcccatagccctctaaagactcacccaaaattttgatgtaaactttggattcttgtctaaaacaatggatttaggagccccatggagacgaactatctcctttacatatagttcagcgtactaatgcaatgaataggtaattttaactggcagaaaataagctgacttcgtgaaccgatccactatgatccatacagaatcatacattcccgtggttttatgcaaaccagttacgaaatctattgcaatgtcctccacttccacttaggaagggctactggttgcaataaccctgttggcctttgatgctcagctttaatttgctggtaggttaaacacttggacacataatctatcacatctctcttcatcccatacc

SEQ ID NO: 396912 - DNA, 772 bp, Cannabis indica
agaatattattaactaatcgtaaaatagtggacttttgataactaagacaaatggcatcacatggttggatccaatggaataaggtcaggtggtgctataacaaacaattttcttttttaaaaaaaattaaaaatataatcaacaacattaatcaattgttgaattttattttttaacatcctaaattattcataattaattttctaaaagttatagaatagatactacaactatttttttaaagatagatactataactactttatgtaggggtatttttgggattttcatatcttggttaggcctatatatatgtaatgttttcatttcaatataattagaaaaattcccaatctatcaaaatatataaaatactaaaaacaggttcttccatcgaccaaagcatcaaagtaagcaaatcaaatcttctttttacaatcttacttatcaataatattaattactcttatatatattttttgttatgttagttatagattaagactatttcttcttaataaagactgtttaatctgatgatatttatcattattattattattattcttattgctgctgtgtttttatttaatattattttatgtcagaatttaacagatatataattagggttaatagtatataatatattttgtatatgtttgacaagttgattttgtattgataattttatagtgttatgacgagctgaatcgttgaaatataacttaattgattgtgttgttgatgattttatagtgtcaatgacat

SEQ ID NO: 396913 - DNA, 2635 bp, Cannabis indica
agcctggaggtccttagtcagcttgactactttcttctcggcaccaagaagtttcttgttgacttcacccagttccattcgggcggctccaagttgaactctagcttcattagcatccttctttgccaagtccacttccgctctcatggtgttggacatggcagcattcttggaggcagccgacttagcccaggaataagcataagccatcttcagaccggtctgcacagagaaaaaacattagaatctgagctaagtaaagaaggataaaaggaaactgtcaagaaagactcacccttgtgaacttctttaggacaccttccatcaccagctcaagggaaagctcattgtcagctccggccaactgctcattcacctcaggaactgaccaagtcacgtagtgggtgagcatatctttgcttctcttagtctctggatgcagcactagaggtggggcaagggccctgatctgttcagctccgctcctgaccagctcggatccgcccttcggcttttcaagcctgtctgagctccctcctcaagagtcattggacttagtaacttttggggcagaagggtcaacgacggttggttcctcggagaggtcagtaactgcttcggccagggcctttctctagacggggtcgtctcaccgctcctggatctcttggtcggaggagataggcccgagcttcctcctactctctttttcagagcttcgagcatcttttgagacatgtctgcacgaaataaaagcaacatggttagagaaaagcaccaaaagtatgaaagcataataatcaagaaagttaaaggcaagacggagtatgtttcacttcggaagaagtgtttgcccgagcaagacctgatggctcatcatcatcagacgagtctctttgctcctccaggacggctttcccctttcctactacaggagtggatggttgagcaggtagattgggctccctgatctgaatcgtatgttcgataggcctgggctcgaccggaaggtttttcttccttttgagcagagttacttgctcctcctcaacctcgtcttcctgctcaagatgttcctgagcatactgtttttcccgtacacctcccttcaacttagcttcacgcttaagttgaatgagttcattctcttgatgagctccctcagctcggccaacactggatttcctctttttctccttcacaggctgaggaatgaaatcctttgggtagagcgtgtactccacaaagttttcctctgaggtcaacaaagtgatattccgggtagcacccggcagctgagtgagtctttgagctctatccctgagagcaagcgtgaggggtggacggtgatatacaggaatctgctggaatcgagtataggtggtgcccatgccatccacaatgtaatacttgtcaacaaaattcacaattttgctaacggccttgtccccggtgcccgtcaacgacttgaagtctagctgagaaaagtagaagtatcccgacctgcctttcttgggagtagacttcaaatcaaaaaaccagctaacctcatggggagaaggcatatcccacttttgggtggcatagagaacgaatagggcagatagatacttgatgcccttgggagtgaattgggtcggacagagacggaagaagtctgccaccttcctcaagtacgggtgcaaaggcagcagtgccccttatttggcatgagcactcgaccaggcgcacatccccctctaagggtttgaggcttgattgttcgaggcgggaacgtaacactccagctcgcccagattgcctccctggtcaagatcccataaaatgtgcctcagtgaccttggacggagggctcacccacctagtacccaaggcactttgcctcctttgaggaactatggcagtaagctcctcagtgacgtaaccttgaccaagacgtcgccatccgcgtctaccggctcctcaccctcgttatatcccccaaagtttgggggtgcagcctcctcctcttcctccgcctcgaaaggactgccaggatggacatcgccttgttcttctacttcctagacttcaacgtctccttcatgatccccctcctcctacacgggtggatcctgttcggcgctgggcaaggtggcgtcctgggccacgtgagggtaaaacgcgttgactttacgcattgtttgtttagtgcaagccatcatcctgtggctggacgggaaaattgaactaaaatgttcgtcgcttgaagagggcggagcagaacaaagatgagggtgatcctcatacaggagttgaagcagatcctagtcgatttggtgttcgcttccccaaaactcacctagcttcatctacaaaaggcaacacgcaagatgagtgtttggtcgggatatcgaacatcaaataggcaaatatgccgaccaggagtactcaacagattaaggaatgaaaatattcgacgaaaagtcaaaactcagaaatttgaaattttcgtgagttagggcaaaaatttcatgaagctttgaataagaaagatgaaaggcaaacattgtgcagttcaaaaggcaagcattatgaatggtgaagtcgcatgaatcgttacaaaggaaaatcgcagagtttctagacctagggt

SEQ ID NO: 396914 - DNA, 815 bp, Cannabis indica
aataagttctttcaaaattgacaattcgtccccctgtaagaagtattctagaaatgtttgcgatcgagtaaatagctttacgaacgaatggatcagatcgaattggaaaatagaaagatttttacaagttttaacttttgtcaccattttgtgaaaaattgtaaggtatgaatatgttagacacctttaactcgattggtaaaatagtatctctttccaaaaaaaacatatttttttaccgttgtggaaagaaaatattttgttgcaaacgaacaaggtattgcggaattgtccatacataaaatcataattattggtacgggccttttccacataaaaaggaaatcctttgttacaatagaagcagaagtgatgtggattattcaagaatcgaagtcgatttgctttataaaaagaagatatcaatgagcttctatgaaatggtttcacgggattcagccaattgtcttgatcgtgggatatcattgagaaataggaatccgtgttatcaaaagatttcctgcgattatttctagtatggaatgagtcaatcatccactttggtatcttattgaacaaaaatggtgatattgttcctccattgatcaagaatttcgatttttgggaagtatcatgatcatccaataaaaagggtttccatttttttaaatgaacgatttgaagacctattgattctaacaactgatggcagagttgatcattcggacctttcaattcatagatgtggatctcggacctatgaatggggatattcccgaaactcacaaagaaaaaaggaagtgagttagacaaaa

SEQ ID NO: 396915 - DNA, 708 bp, Cannabis indica
ttattgatgagactaaaaaagttttaagttgtatcagatcatgtgttgtgaagatatagtaattatagacttttaactaaaaaaaaaaaaagatttagaaaaataactccagcattaatacatataagacatgtgtttaaggttgtctactatttaaattttttaataaaattaacactatttttagtacacatgatgataaaccatataaacaataaataataaggttcaaggttcgaattccatactatagttcgaattcttcctagtttttcggtgggttgggttttttttttttttttgaaaaatttatatataataaatcaaaaaatttaacaattataaaaatacactagcacggaaaaattttaatgtttactcgttaaacttttttatttacgaaaattcctctttccataaagataataaactgtttttcggattgttttatagtttgtattatagttatgataaggttatttttctagttgtggtgaatcaaactcacctttctctctcactgttccttaacaacagtggcaagatcgaactcaaacaacaataccttgaacaagaaacttaaaacaagaaacagagataaaaacaagagaattaatggacaaaccaacttgagaacttgattaacatttgaatgaaaaacaatgaaacatatagccactttattcctcaaatgaacattgaatgtac

SEQ ID NO: 396916 - DNA, 627 bp, Cannabis indica
gaacttggtgttgttccaggaattgaaaaacaattggttttactttgtgagaacacttgtaaaagccaatagtaaagaacctcgtagccacaagagaaccaaacacattgagaggaaataccacatcatcagagaatatgtggcaagaggggacatactggtggggaaagttgatactgaagacaacttagctgatgcattcaccaaaattttgactgtaactgcatttgaaaagcaccaaatgaatctaggattaattgaaatgtactgattgttttatgttagtgcaactgggagttcctaaatgaaactctatttcaatgtaatcttttatattcatttatcaatgaagaaacatatttattttcattatttattcagtgtgttatttggttcatatgatcatttatttgatttatgacttcatccaaatccttattacattgatattcttgtttattgtgtcttcaacacagttgaaagttgttgacctcgcttttagccaacaataatgagtcaaatagtaagcgacagaaaatgtaattaacgtacagtataagcgaataaataataaagaacacaagtacaaagaacatagtgtttcctctcttgaagctctcacaatga

SEQ ID NO: 396917 - DNA, 295 bp, Cannabis indica
caaagtctatcccaagagtggaccaattcttttgatagaaataagcatttagccatccaaaccaggggccttgtccccagaaaggttaaacagagctctcctccagaatgagattaacagcatcagcatcactaccaggagaactaaacaaatcagtgaaataagaaactaccaggatactcatgtcattatgattagaaacaattctttgattatcatctttgagaaacttaatggtattattctttttacgtttagaagcaaaacgatgaaaaaacttagtatttttatctcc

SEQ ID NO: 396918 - DNA, 806 bp, Cannabis indica
tgagttgatcgactatgggttatagatctcctcaaagtcacacttgcttcttcacactctgctctttcctcccgagagcagtttgtcgtatttcccccatcagggtacatacaagtcctcgctctatggaattgggaagaacgtttggcgattcctagcaggtgatctctgttctcccggctgagttccaagatcatcctcattttcatgagggatttctcgttcattagtttctgattgcctcctttctggtgttcatcctgattctcagggagtgtctcattttccctgggttgttcttcgcatgacttttcttgtctcctggttcgtgagccacgaggtctgcctcgtggtcttctctctccaggttcaggttgattttgaacgttcgtccgtcgcgccgccctggccgaggtcgcctctcgttcttactcagcattttaatgttgcacctcttctagacggcgtctcaggcggcggctttccgtttcataagttctttctcccacagattgggcacgtccacggttgaaatcttcatccctcgtcgcgggattttgaccattcccacgttgatttctcctcgagcgcgttgtctgtgtgctaggaccaacgtcgtgttgagttctccggggatgtgtggtcctgctggactgcggattggtagatcttctagaacccatgggcccttttccagaacgatgattagtttcctcatgtggggtgttaatattctctggattttcagccataaaagagaaggtttttctttaaaagaagggaagactttttttgagctttttcac

SEQ ID NO: 396919 - DNA, 935 bp, Cannabis indica
aaagattaaaattgtctgaaaaaggggaaaagggactgcaaatgtaaaagaaaaaaaagagagatagtagtaaaagtagtagtggatgatgggttggcttaatcaattcatggtggaagacgaggccccctgcgctcctcgagcaaagcgtcaagcctcttcttcttctcccagaagagagcaaggacctccttaggcttgggataaaagtcgagcttgatgttttggccattagtttgccaggccatgaaaacaccgtcatcaaagcgtttagtgcaatgcttgtagacgacgggggctaggagctcatctcttttagccttcttcagggcctgatctttaaaatccctgagctccttcacctcaacggtcaaattggctgtcgactgcaagtcaccctgatggagctcctccatagacttcagcctggcagtcagctcctcgacagcctccttggcttccctcagctcacaccttgccttggccgcaacctcgtcttgaatcttcagctcctctgccttggcctttaacgcctcctgatgcctcctctccgactggtcctcctcccggaacgcctcctctcagtcgccaaatctcttagactcttcatggcctcgtccatgcccccaaactcggacatgacgtacccatgatctatcaaagtctttgagaggcgaccagtctctacagcgatctggaaaagaaaaaaagttaactatgagagatcaaatgccatagggtaaagcacagacaaaaagagaaaaaccaataacaaagactcaccgcggtcatggcagcactgatatcctgaacctgataaatatcgtttgtggaagtgcaggctgcatctcttttggccgagagttgggtcagatgggaaacaattggctcgtcagttcgaaggcaaaaagagcaagtgcatggccgagaacgac

SEQ ID NO: 396920 - DNA, 681 bp, Cannabis indica
gtataaaaaaaaataatttaatataataatataaaacggacacttataaagttttctacattttaaatttatcataacatcttatttttatatgcaatattgacaataaattttatttttatttatatgattctaatctttcataatcatgatcagtgcccatcttgaaacacagtattaaaataataataatgttcttttttttaattattatttctatgaataaaaaaaccttttcttcacaaaaataataataataaaaaaaagtagttatttttcttaggattcggtatatttaatgcttcctaatttctttatttaatacttttcacttgtatatattgtaataacaattacatcaaaataaattatacttaattttgtagtaaataaaagaaaataattgcgatagatcactaataaattgttaactagaaaatgtaactagaataatataataatatattatattacacattaatttatatataattttatcagggcgttattaagattttttattattatttaaaatgttattaaaaaaaatctatatttgtaaaaaataataattataatcataataaagttaccctagaatttacagggggaaatttgattttctatacttagaaaataaaaaaatttgatttctaaaccaataatttaaaccctaaaaaa

SEQ ID NO: 396921 - DNA, 1035 bp, Cannabis indica
ttgaaaaaattccagaaatcatcaatttcttgttgttattcctccgtcgctgccagtccaagttctactgtcggacgacatcaactttttgctcatcaccattgtgtaagtttctgggtacactttacttttattattcatttgcatgttagggcaagatttagggcattgtctttatttaagttgtatttgatttctacggtaaaacggtcatggtgaagaccatcatgtgtcgtagttctttgtatgcttaccgtcgcttcccttttggattttgcaaaaaatttcttcacttagggaccgttgagagtatgaagtgattttcatacttttgttccttttttgtttcctcttttttcactgcctttcggatattttcacccgatctatgcctaggagaatccctagattccctatctttggcagacattcagagggagcctccttccagcagttagggggcccccattctctccttttattttagggtttggtttgtgggctaactgctggatgcaggttccacagaaactaaccctgcaggtacatctattagagtcactcaaatcggcccaactgaagtggagccaaatcccgatcaggtggaaccaatttaaatggaacctcaagaagcaccaaatcaggtggaaccagatcaggtggaacatgcagttcaagatgaagaaaacaggaatcaggaagacctcacagaatatcagcttacaagagatagagccagaaagtacctcaacctaaccaaaagtacagttataatgtgtgggatgagagtattgcctatgcctatatgtgcaaacttgaagctgagatctatgagcctcaaccttatgaagaagcacttaaagacagaaattacaaggcctggttgaaagcaatgaaggaggaaatgtactctctcataaagaataagacttggagagttgtacatagacccaatggcaagagtgtggtatcttacaaatggcttttcaaagtcaaggaagggaggaccaaggatgaaccagtaaggttcaaagc

SEQ ID NO: 396922 - DNA, 553 bp, Cannabis indica
ctcccaacttatcaagtgagttctagtctgattgtctttcaacccccaaaaaaaacccctacataatttctcaatctcttttatcacactttgaggaagaaggaagacttttatccaataattccttaatccaatcaatgtagattagattaattgaattcggccagcataagaaagatgcttattagcccaagaatggagtctatgtttcctttttttcaagatcagcccacaatcatctagcctccattttgttggtcttagagggattcctaggtacttaagagggaactcaccaatagaaagatttatcttttgagcaagaggaatcagttgaaaaactccaccaaagtaaacttgagattaagcaaaatagatggaaagaaccgaagtcttgctaaactcatcaagcataaccttgataacacttaaagagccctcattccctttacggaagatgactaaatcacctgcgaaacaaagattagtaagtttcatttttttgcataagggatggtaccttaaatccttttctctggctgcttgttggatc

SEQ ID NO: 396923 - DNA, 2536 bp, Cannabis indica
cctgaaccggaactagactgggataggtgatcgggaccagattagggactcaaaccaggactcgaacccgaacccgacccaaacgcggaccctgacccagacccgggagacggaactggaacctgaacaagaactgcaaaaccatgacccttgaacaagactaggactatgacgaagacccggacccaaacctagaaccgaactcggacctagccccaaacccaaagcgagaccaaaactcgagcccaaacacgatcgtgtacccagactgggagcgagagccggacctggacctagacctgggacccgatccaagacacagactcggacctagatagggatccggatacgaacctagactcgaacccagacccagacccaagtcgggatcgaaactcgggacctagatccatactgagaccctgacccacacccagacctggacctgcacctaagaccaaaacttggacctggacccgaacccagacccagacctagacccagactctgacctagactcaaaccaagactcagaccccaaccaggcccggacccaaactcgaactcagacactgaatcgaaatacaaactgggactaggacccaaacccgaactggaccagcatctggatttagacccgggactagacccaagacccaaggcttggacccgacccatattcggtgtctaaatctggtaattagacctaggcttggacctagacccagaccagaactcgaactcgtaccaaatctcgaaactagactcgacatgtggtttgtgtttggatttgggactaagactcagacctgaaccaaaacacggacctagacctaagccaggactcggacccagacccacacccgaaccttaaatcgtactctgtgacccgaaattggaactggatttggactcgggacgcgaacctgaacccagacacggacatggaccgagaccaagacctaggattcggactgagattggagactcggacctggacctaggaccagacctagattggggaaccaaactcaaaatttgaaccagaatcgatacccaggattgggattgggacccaagacccgaccacggtctcggtcccagacccagacccgaacacggactgggacccaggatccgaattaaaacgagatcgagacccaagattgggatgcagatctagacccacgacctagggttggacccaacccgtagttggtgtctagatcttggaatcgtaccaggaccctaacctagaaccatttctacaccaggacccaaaaccaaactcagacccgagagccgaaatcggaacaagaaccggaataaggaccttggaacaggaattggacctggaccctaaactagctctagacgcgaacccggaccaagacttgtgccaggacctgcgacccaggacccgtgactcgggacttggaccagatgccagacccgtacaagaacccaaacccagactcaaaccaagacccgaacccaaacactgactgaaacctggacccagacccatacccagactcataccaaaactctgacttgaaaccgggactcagacccgaaccaagattaggactgtgacccagacctggacaaaaactgagacctgaacttggcctaggactagaacccagactgggaccaggacctaggacttaaacatagattggggacccagacctgggaattgggcccacgaactaggaccagaactctggcctcagaacttggacccggacccagacccagaccagaactggaacccgtaccagaactccaactagattcgacatgtggttagtgtctggatttgggacaaagactcggacctaaaccaaaacacgaacctagacccagaccaggattcggacctagacccacacccgaaccttaaatcttaccctatgaccaaaaatgtgaactggaactagaagaagacccttaaatcctaaaccctaaaccttaaaccctaaatcctaaactctgtacacttacccctaaatcctaagccctaaaccctaaacattaaatccctaaacactaaacccaaaaccataaacccaaaaccctaacctggacatgggcctagacccatacccataccgagatcggaacccaggacccagacccaaacctgaatatagacccgaacctagacccagactcatgacctgaacctggatccaaacacagaccggaacctggttcgagacctagaccttcattgggacccagattaggaccccaacccggacccgaatagggacctggagtcagaccgcgacacagacccaaactcaaacctgaacctgtactgcgacctagactcagacccaaactcgggatccaaacccgaacctgaacttggacctacaccgcgacctaggatccaaacctagatgggggacctgggcccaaaacgcgaacctagacccagaccttgaccaaggattcagacctggataggagacttggacccaaaactgggccttggaacagggactaagacccaaaactcgac

SEQ ID NO: 396924 - DNA, 884 bp, Cannabis indica
gctccatgtatcatagtagagatactaaaagatagtgagttgattcagtattgaagtccgaatccatccccgaagctcccaaagtcaacctgcgcacagggctacggggtcccctcccaggtcgactgttatgacttgggctactcaacaccgtgacatcatccttctttccatgtgtcaaacaatgatgtcaatgtcactaggaaaagtttctaggttaacatttgcccccaagtcaactttacacttgtgtgtagttggttagatgacgtgaactaagctcgtttcttttaaaaatactagatgggcatcaattttaaaaatcttaggagattctcattcccaattaaattaggacttttgattcccttgcttagtccttgcgaattattgaaaattaattaacaaagaaaaagaggaaaacttatccttttttttcacttatcttttatctttttctttaaaaatttgaaatttccgtatatttgttgtgccattaggattaattagattcaaattctaatcttttttgttaatgccattaaaaaattagagagagatttgatattttgcttatcatttatctttttctttaatcgtagtagcattaagaatggaggttacattttaaattaaaaaaaaaaatctattcctattgctatacaaattttgaatttcacttaaaaaatcttatcatttacctcttgctttacaactttaaatttaaaagactcccaattgctctagaattaggaaattgagtttatctataaataagagagttttcaatcaaatttttcattcctcccactttgttctccacgctcaagccttaataaaagcattggaattttatcttcatcaagccttcaagtgttcttcat

SEQ ID NO: 396925 - DNA, 666 bp, Cannabis indica
ttaaatatatttattaattaggccctctaatgtctcataattaataaacaaactaggaattctcttttcttctcaattatgtcattctttagtaaaatttataaataagacatagtcattatttagaatcctaattgaaaataaatcaattaattgaaactacaaaaacatattatctcagttagtgtggggatcatgggcttaagtaatcaagctcttaatttctcctaactcaactatagattcagatttgtactcttgattatatagaatgctctatataccaaatatagatactctacgaaatatccattgttacaatttaattaatcaatgatcctctatattgagtagggataaatttaccgttttaactttcaatgtattttatccttaaaacacttagttacatataaatgatatttcaataaactaatataaatacagaaatgagtgctctatcaattatcgcgttaagacaagctctaaggaaattatagtttcacttctaatagttatataagctatagattttatatttatgattaacgctcccactcaattacactacctaattctcaagatgtaagtatgggctagtcctacaggtaagctggtaacgaacaagtcaaagaacccgtatagtacaattaagttagaacttaa

SEQ ID NO: 396926 - DNA, 1549 bp, Cannabis indica
acatagacaaaaaataaaaagcaatcgttttagtagtcttaaaaaaaataaagactaaaagtcaaaaatcggtaatagtgactttatggaagcaatcggcaaaggcaccattgccattgacactaaaaaaggcaagagatacatcaatgatgtacttttggtacccaatacttagtgcatgtaggcaaaatgattgaaaaagggtactcttttgcatattgaaggagatttgtgcagcaagattctttcaaattgcaaaggtaaaaatgagagaaaacaaatgattttctatacaatagaaatatgcaagtagtgtagtgatgtaagcacaagcagatgagtcgtggctatggcatagaaggttcagtcactttaacttccatgggctaaggatcctaaagcaaaacaatatgatgcgagaccttccagcacttaaggatatcaacataatctacgaatgatgcatgctcaaaaaataacatcatcaaccttttttgtcaggcaaagcttggagagccaaaaggatgttggagttggttcatacaaatatttgcagggaaattcacactccatcaaatgatcaaaataggtacttcattctcttcatcgatgagtttactaggatgacatgggcttattttttcgaacaaaaattgcacgttttcaatattttcaaagaatttaaaacccgtgttgaaaaacaaagcggtcgttacttcaagacaattagaagtgatagaggtaaagaatacaactaactcccacttgcactaatataaaactaaaagtccatttcaattaatctcaacaccttgatatctagattaagtgtagtatgtagtattatctttgtaataagatctgacaggttgtattcattataaactttctccaccattacaactctttagttacaaaacccttgatattatgaaactcctttctatatatgtctactcctcttgggatactggattctttactatttgacaactacatctatgttagtcaggaagtaacatttgtagttaatccattactgcaataacaccaaaaattgtatagaactttaaatcggttgaataattatctagtagcctttctggccaccttaacattcaatctcactggtagagttagagattctggattggtttttacacttctccaaaaatcactcctccaccccaaagtgatcaccatcttataagtagactttctagcattgatacaagtacagaaaccttacttggtgtagtctaagagtattaaaataccacccttatcgactaacatataattcctcttttgatcttaagatttatttgattgtcttccaacattctttttttggattaaattgatacctactaataacccccactcaacagcaggtgtctggtctaatgcattcgtgagacctctcactgttgatgcttagcgaattcctttcatgactttatcttttctggaatagttgaaattgttccttagataaataaaatctatgtctaggagccaaaaaaacttcctatagagttagccatta

SEQ ID NO: 396927 - DNA, 588 bp, Cannabis indica
actcccacaccttctggtgtttaaaacttcagagataggttcttgatcgaactaactgcccctagtccgatcaatgctggatgacccaataatatattgtaagtcgatggcaggttgacaactagaatgtcttgcataattgtggcagataggagtgcctcgcccaaggttaatgcgagctcaattatgccctaactggtgatactttcgtcggtgaagctgcaaggatttaccatgcaaggcctcaattttgccttttcgagtcccatcttcttcagtgtttccttataaaggatgttcattgagctcctgttatctatcaacaccctctttatccttctattagcgagctgaatagtaatcaccaatggattgacgtgaggatatctcacgttcttttcatcttcctctgagaatatcattggaggttcttcagtttttaccttcttggaaggttctgaagcaaataccgtctgctcattttttatctctttaacatatctcttttgggagttgttggtctctctagcaatatgcggccctgccgagataaccaggatgtcctctccttcaacaagaagaggttgt

SEQ ID NO: 396928 - DNA, 537 bp, Cannabis indica
ctgtgctttcaacacaaaatttcccacaaagaaaaaaagataaaatacatactgagtgaacaattgcatactcatacataaagatgctcacacagtttgcaacaatttcatgtaaatgtcaatctaagaagctctcgaatagaatctgaaataaatttcagataaacaacccttacatatttaaagaatcaaatcagtgtattattagcacatttcaaaaccaaactaatgcttatttttcactgatcagaacaaaacacaggcattgattcataaacaagattacaccataggaaaaaaaatacagaaaggcgagaaatcaaaagattatgaaaatggaaaaatgaaatctttgaagaaatagatgaaagctacaagaaaccattgtttctcaaactcatacctgtgagtgaagctgagatgataatgaagccgatttggacaactgaacggcctattagcaaacggaatccctcatctccgatcggtgccgatggagagtaacggagagcgaagtatggagagagaagctctgta

SEQ ID NO: 396929 - DNA, 656 bp, Cannabis indica
gatcattatgcgggaaactgaccggtgctgcatcttctttagaaaaggagatcatgggctctatgggctttgttgcttagagctccggtctctgacagctaggatgtcgcctttgggctcaagtcaaagcgtctgagcatatcacttccacctttgtagtttcgccagaaatgtaaggtcctgatgacccctagatgtcctgccacgggttgcagcatggaatctccattttggcccccttgcacctgggtctagtcgtcttgtacataacgatgtaggtggggattgttacgccttatcaggtactcaatctccctcttcagattttgacactcattagtgtcgtggctgaagtcgttgtgatatctatagaactttgacatgtccctcttgcccatctctcttctgataggaaagggctttcggtatgggaccgttccttgagtggccatgaagatggcctcaggcttctctattaggagggtgaagcaagtatacttctcctccttgttcttctgtggagtgggagaagtgttaaacttcccctttttaccattgttcctcccagagttgttggtgcaacactagtttctagtgtttttaccactagaggtctgggcagcattgttgtgtttgcctgtgcgcctggtgggtca

SEQ ID NO: 396930 - DNA, 648 bp, Cannabis indica
cttgtactatagttctctgagaaggaactcagagaaggttattggcaacaagatcaactgatcaaatcttgaacacatatcaactgactttttcagaatcaagaatcagacaagtctaggatctaacacaaaattttagaaaatttcaagctctcataccaattgaaagaacaacttatccaaatttcatgatttaagttactgagttgttcaagattatattggttaatttcaacttatgcattcaagattcggattgaagatacagtaaagcacacaatgatttacaagcttcgtctgcactgagaacaaatttgagccgactagtgcttgagtttctcgaaccagagtaataacatccactaaatccaaaagattcgtattacaatctccagttcacaatttagaatttaatacaatctttacagtaattagtaatgaattaccaataacaaccaagaatcttgattgtttgcacaagatcccttatgtagcagctaagttcgtcttcgacacttttcttcaatctaaatcccttcagatctaatgacgaagatgacactgaactctcttcagtgtgaactcaataacaccaggctctgacccttctgctatggatctccatctccaagctatgcaatcagacct

SEQ ID NO: 396931 - DNA, 944 bp, Cannabis indica
gttgagtcatttacttgtgtttaaattagttagtgtttttctaagcgactagcaaattctaagtgtgagagaatttgataagagccttttaggctctaaagttattgatttctccatagttagaggatgttgttagtaattttagtatttgtcattatttttgaaataatttggtttttgaaagaaaactaattttatgagtaaaaagtaatggatttggtgttttcaatgttatgtgatgttagtggatggaatgacgcaccaaaacaacatttttctagagttttagaagtccatgaagagccgaaacccgtgagttgtcgctgcagcgaagggtgaaggctcaccacaacgaaaaaaaaaaaaaaataaaagatatggtgtgaggccctgtcgctacagttacaggttggctcgccacgacgagcaaacccgtggtcgcagcgaggggcgattcctgggtcgttttgaatttttatcttttttatttaaaagggagttatctttttttagtgagatattttcaagcactataaataggacttttaggctacgaattttagagccctggagctactaaattgagatagaaacttaaagagagagcaaggaagagacggagatcatggctttgaagtgttcttcatcatagttcttttttctccttaaactcttactatttattataattttcattataatatctagttctgagtagtttcctttcagttaagggttatttcaaaatatgagacatgactttttaatttcattattgaatgttaatttctcgtttctattatatcaaattatttctattcttctatgttcaatgtcatgattattgttttaatcttgttaaaatgaccactaaattaggttttactttaatctaccgtcatcttaggattactatttacttaatagtctaggattttaagtgt

SEQ ID NO: 396932 - DNA, 509 bp, Cannabis indica
gaacttggcagtcctaagtagaagctaccttccggagcagtgttcatagatagactatgacatagtcgctgtttcatcccttcctctgtgttggcactaaagaaaatggatgatttcgtaaaattgacttgttggcccgaagcattctcaaacttgtgtagcacttccttgattcgagaggcttcatcttcagttgctttacagtacaaatagctgtcatccgcgaacagcatatgtgaaattcgtggcgctccgtttgcaactttgcaaccatggatccaacctctctgctcatacttctttagaatggccgatagtccctccgcacaaagaataaaaagataaggagaaagtgggtctccttgtcttattcctcttgtcggaataattgggccaacttcatgattcccatacactaccttgtatcttgctgaagtgacacaacgcaacacaagttgaacccatttttcttgaaaacccatcttacggagcatagcttcaagaaaaga

SEQ ID NO: 396933 - DNA, 768 bp, Cannabis indica
ttgtttccaaaacttgttctcaattgtctcaatcaagtccgtctcaccttttagctcctgcaataaacggtatgcgctctttacagtatacacacccgaaagttctcgagaccacaccaagcaatctctgtaagtagacggatcaagagttatttgcaggatcaactcacggtctcttggttcaaataaatcattcaaaatctcctcatcccattcgaacctgtcttgtttcatcaaattagtgactctcgcacacatgagacttgggtgattagacacaattctgggatttgtttcattagggagccaagcctcacccaaaacagagatagtagtaccatcaccaacctgccatcgaactccattagccactaacttttgagcttctaaaatactcctccacacatagcttgggttggaacctaaggtggccgaggtgaaggtaccattgggataatatctagctttgaagacccgtgacactaaagaatcttggttgattaaaagcctccagcattgtttgcccaaaagtgccacattaaaatctcttaaatttcgaaaactcattccaccctttgatttgtgttgacatagccttttccatgacatccaatgtatacccgaactagttgtagatgaagattgccaccagtattttgctattaagctttccatttccctagtagtttcgagagggattaggaaaacattcatagcatagcttggaagcgaccgagccacagcttttatcaacacttctttcccagc

SEQ ID NO: 396934 - DNA, 952 bp, Cannabis indica
ttgcatgtttgttggaaattctatggagactaagggtggactataatagtcgcaaggatgataaagtgttcatttctacaagcgccactttccttgaagatgactatattaagaatttcaagctgcaaagcatagtaatatcagaggaaatgctttcaaatataactccaaacaatgttccatcttcttctactcaattagaggataatcccactcccttggttgaacaaatgcaagttgatataactgagaaatctaccactaatgtacttattcagaaggtcacgactcctcgtcgtagtgggagggtttccacaaaaccaactggttattgcttggatggtgaaatcaatatggtcgttggtgacagtattgatgacaatccattaacctataaacaggcaatgacaacttcagagcggaaataatggtcagccgacatggattccatgtaaaagaacaaagtctaggaatatatagatgcacttgatgattatcatccaattaaatgtaagtgggtctacaagaagaaaagaggtgctggtggcaaagtcaaaacttttaacgctagactggttgctaagggttatatccaaagagaaattgtggactatgctcaaatctatcaaaattcttctctccatagttgccactttcgactatgaaatttggcaaatggatgtcaagacaactttccttaacagaagtcttgaagaaaccatctatatggagcaaccagcaggttataagcttccagggcaggaagagaaagtttacaaacttaataggtccatttattgacttaagcaagcttcttgctcttggaacaaaatgtttgatgaaataagcacaacctatggcttttaccaaaatgatgatgaaccttgtgtttaccaactcaagtatgatcaagtggtagtattcctggtcctttatgttgatgacattttga

SEQ ID NO: 396935 - DNA, 744 bp, Cannabis indica
tcttactcttaataatgacaccattgttgccttacctgtcattaataataatgcatctgttttacctgtccccaccaacaacacctctgtagcatctgatgtggctcctactacttcaacacatccaatgaccactcggtcaaaagcatgcataaggaaacccaaggtatttttggtgttctgggaaccaaaaatagtcaaacaagctctacaggaacctcattggtccaatgccatgtccactgaaaataaggctttaataagaaacaaaacatggactcttgtcattttgccacccaataggactgccattggatgcaagtgggtttacaggatcaagtataatgcaaatggcagtgttgatagactcaaagcaaggttagttgcaaaaaattttcaccaacaggttggatttgacttctctgaaacatttagtccaattgtcaaacacataactataagggttgttttaaccattgctgttacaaaagggtgggcaattaggcaactagacatcatcaatgcctttctcaatggtgatcttgaagaggaaatctacatggttcaaccacctgggtttgttgatccagagtatcctgacagagtttgcaaactaaacaaggctatttatggcctcaaacaagctcctcgagcttggtttgcaaaactctccactgttctacttgagtatggcttccacttctccaaatctgatccttcctagtgttggattttatgccctaa

SEQ ID NO: 396936 - DNA, 635 bp, Cannabis indica
aaacatgcagcacatatggtaagtagaacttttattggccttgaggatcaaggttcgatccttacttgttcactttttttatacttttagttgtttgtgaaagattttacttagcatttcaaaaataaataacaatattataacttaaatatttatattacactatataaataaatatattgaagtatttctaattttaaaatattaatgtacattttgaacgatattattaataataaataaaattacatttattattattttttaaatatatataatttaaacacattatttttttctttcaaatgtgctaaaatatatagcacttcaatagagatgtccttaataattaaatattacttgatcgagttagcttacgttgcaaaaaattatttattacgtagagataaaagaattaaaattgatattgtgtcaaaatttaattaaaatttatttttaatttttattaaaagaaaagtccctgtttcaaatttcgccctaggcttctcatcaccttgagacgaccctgctactagctaaagggtattccctttgactagttctagtaattttacagggggatctagttgtttagtttcggtgtttgattgattttgatgagcttgataattttt

SEQ ID NO: 396937 - DNA, 693 bp, Cannabis indica
gcgatttaaagcagcgactttacttgtaaggctttagacttctttgggtttagttggagatcgcatttccaccaatgctttaatcttcacgaggtttgcttcaatccgtccctgatttaccgtaaacccgaggaattttcctgatccaaccccaaagacacacttatgaggattgagtcacattttatatcatcatagtatctcaaacattgcttgtaagtgtgtaatatggtcctttgcatgttgagattttatgagcatatcgttaacatatacctccatggtttcaccaattagatttgcaaacatcatatttaccagcctctgatatgttgcccctgcatttatcaaaccaaaggcattaccttgcaacagtacaaacctcgatctgtaataaaagaggtatgctcctggtttggttcatacattaggatttggttatatctcgagtatacatccatgaaactgagaagttcatgacctgcggtggcattgacaagttggtcaatgctaggaagttgaaaatgtcctttggacaggctttgtttaaatcagtgaaatcaatgcatctacgccacgagccattaggcttgggcacgagtacgggatttgctaaccagtttgggtagaactactcccttatgaagccgcacgcaaaaaggcgatccacttcttctttcagcgcttggtacc

SEQ ID NO: 396938 - DNA, 943 bp, Cannabis indica
gccccccaggcgtgacaacgagcaattcctgcacagatagttgattttgactccgacccgtccacatgtagtttccaagtcggcttgtcttcactattgcttggctgagggttttgcaccggctcggggttattttctggtatgctttctttttttcttgtgcattctaccaaaaagtctgctagggcctggcctttgattcctgttcagggttggaaggtaatttcgtactgacccaactccactgcccacttgagtaaccgttcagaggcgtctggcttttgtaatatttggcataatggttggtcagtgtatacccaaacaggatgagcttgaaagtagggccttaactttcttgttgcttgaatcaggcagtaagcgagtttctccatcaatgggtatcggccttcggcctcaacaagtcttttactgatgtaatagatagggtgttgtatgttgttttcctctctgatcagcacgacactcacagcgtgctccgtgaaagccaagtatgtcgctagttcttctccgtctagaggtttcaaaagtacgggaggctttgcgagttgcatttttagctcttgaaaagctttttcacattcctccatccattcgaatttcttttttcctcgcaggatgttgacgaatgggacacacttgtctgttgattttgaaacaaatcagttcagtgcggcgatcgaaccagataaactttgcacttccttggttcttgttggagacttcatatccaggagggcttgaatcttctctggattggcttcaattccttaggcattgacaatgaggcctacaaactttcccgagctgactccaaaggagcactttaagggatttagtttcatgttgtacttcctaaggactttgaagcattcgtccaggtcatctatggtcccccccagccttcctggattcgatgagcatg

SEQ ID NO: 396939 - DNA, 546 bp, Cannabis indica
aattaagtacttaataaaataacacaaatatgactaattaataatacagtatagactagtcaataacaagcttataattaattaatttgaaattttgaatggttccattcacatggccaatagcagctgtctaattaccttaacttgacaagtttaagcaacatacataatattcattaattagcacatatatataaacaataattaacattgattcgatttaatttgttatctagtcaaccaagaaatgtagaaagtattattcaattaagcctaaacaaatatcactacaagaaatgtcacttttaccagcacagttcgttactgtgctggtaaaagtaacttttaccagcgcatttcacgaactatgctgacaagaggtcaaagttttaccagcgtacatttgcagtggctaaaatctaacttttactcgcgcttttcattttatattggcaaaagttctaataccaacattgatttgctaaccctcttttgccaacgcatcacaagtaaattctattttaccagcacaatactaacttttgc

SEQ ID NO: 396940 - DNA, 596 bp, Cannabis indica
catactgttatactaatcttagagaccaccatgtagacgaagacactcagttaagatgaaaaggtcatggcaatgacagctggactaacagtattgagttcattctggaaaggcttgaggcttaaaccagtatacaccatttaagagattctagacaaagctagcggttttaacaagcttaaagaagccctcaagaacgtcaaaggagttgctcaactagaagtacctgattaccctgcttatttatttcttgagtctcgaatagacattgaccaggaaagtaaagaaggatcaacaactaatgcctccacagaaacagactcctctttggtttcccaagatgaactcgagtagggagatagtgacgatgagtcccctgctatttctcaagaagatctcgagtgagaaagcaatgatgaagaatctcccctacttcccaagacgactcaggacaaaaggcagtgacgaagattctccctctatttccaaaatttatcaagaataagggagcaacagtgaagatgtgtcttatgagtcttccaaagatagtgaccaagaaagtgttgggttttatgccctaaataaaactctgtttc

SEQ ID NO: 396941 - DNA, 1008 bp, Cannabis indica
gtattatctttctatatattagcaatgtgggactactcttaatacctttttttacttttaactcactaaaattttgttgtgaactaaaaagtaaaattttttttattttttctacttatattttttgtttgtagtcgccctcccattccatcaggaaggtctttcgcgagttgagccgacccaccatatttacattttttaacaaaatatagttacctacgtagatggggcgttgctattagtattaaagattgtgaaggtatatattatttgtgttgtatgggctgcatggggcacttgggttaaggatcatgttttcgaataatgttactgaattattggctattattcaaaacttggtcttcagtttgctttaagtaatcagctgggttctattaaaattgcctggtagactgttgattggatttctaaggtgtgtgttgattcctctatgcatgggtcctataatgatagatgttagctagtactgatctattaaatgttgtgggtggtggtttgtgtcatcacctcatttttggcttaaatcgacttactatttttgtacattatttattttctgtattagaagactctatttaatttgttttttttctttgtttgttatgttctctatcctatacacattttttttattttttattattattttttgaatgtaaattggaattttattaatttgctaaatcagccaaaagacaagactgtaatttagtaagaacatcccttctactgaaaactcgatctgaaaaagaatatgacgctctagcaaagttgtgtgcagtcatattagcagatcgtttaataaaaaataaagaaacattgtttaaaatagataaaaactttcgacagtttatcaccactcccccaagaggtgaaactatggtgatgttacttcgaatagcttggacaattgagagacaatcggactcgagttcaacattatccttgatctaacttaacgcctttttaatggctaaagctttagcc

SEQ ID NO: 396942 - DNA, 588 bp, Cannabis indica
aaaaaaaaagtttgagcatgaatttagtgaagctatgaaaattcaaaacatatactgctaagatattttttgaaacaataataatcaattcttatttttcaaattaaaacaataattcaattaaaaaattatgataataaaaaattaaattaaatttaaatgtaaactatacttaagatatttttcaaaaaatatataacttttattttttctcaaattatcttaagaattattttagaatatgtatatattttcacattatatatgtatgactaagtttttaaattaattaatatagcatattattattaataaattaactacgttaaataataggtatggttatatatgtagaatattattaaaacaattattctatagattttaaaataaatatcaataataattattataatctataaaattgattgttatatctattttctacataaagtgtgcctatataacagaattcttggtttatgagaaattcatggatgactttttatttatattaaaaataaaatggtttattaataaaaataatatagtttatgagaaattcatgggttactttatataatgaaa

SEQ ID NO: 396943 - DNA, 681 bp, Cannabis indica
atttatcccctatttttgtgggtggtttaagcctaatttgtagcttgaattattgtccaggttgcaagctacgcacctagtgcctgccagggtgtaagctggtcggacaagtgcctgttaggatgtaggatgtccagcctttcctttcgttggaggctagccggcctatgctggcgatagggccagccacggggagtctggctagaccccgttaaggtggccagtttgttgtttctttgtccgcttaagtatttggcgttcttgttcacaagttatactccacgtggctaattaatcttgctcacatggatatgccacgtcatgtgtaccaaaaattgggataacaatgtctaatatcaatacaatacaaaagagaagtaggtcattacccattatctaagggggccaaacctttaaaaaatactgtgtccaattttatttacttgttgttattctgtacacgtggttatatcagtcatatatacgactctgttgtcatttggccaaatttgagctcaacaatgagatatttgattgattaaataatgttacattagtgtactagtgtgttacacaaattttaatcttgtggaaaatgctatattatttttttaacaaatactgttgatctagcttttggcctaaacgcagtgagtcaaataagcaattgaataatataat

SEQ ID NO: 396944 - DNA, 800 bp, Cannabis indica
tcaacgatatcagttcacgtgcagcttgttccaattgagagaggcttaggcccactaatgacaaatattcggaccttctcatcaaccacttgcttgaaaaagaagaatattcaactccaatacatatttgtacatataaatgtaaggctgtcaatcgttgcatactctttatctcaataagactcgcatttcttattccgacttcttcatcaataatcttatcccatccttcaaattcacgaggaagatagagctcttccatctgtgtcaaatttgaaatgacatttgccttaatgactcttaaatttctacatcctcgtagatctagcacttgcaaacgctgtaatgctcctatttcttttggcagtcgcataatgaaatcagacttggacagatcaagagcttttaaattctttaactcaccaatcactgctatgtcttccagagaagaaccacgcagacataatgtttggagattttgaagagaagcaaaagacgaaggtaatgatcctatccatgtacgattcataatcaaaactttaagcaggccagtttgcctaaaaaattcatctggaatagattcaaaagtagacccactggatagaagaagcaattctaaactaggacattccaattctggaggaagattatcaaaatggtcataatcaagaaaggaaattgctttagatgctttaagtctttcatcttcatacataagaatgttactcatcatcctatgcccatggtcttcttttccaatagttatgcaaacatctcgaatgacatcgtgcatcttcact

SEQ ID NO: 396945 - DNA, 796 bp, Cannabis indica
caacatcctaaaaagagcacatctacacatatacaacctttaatacatataaagtagagtgataaatacttaaaaacatagaataaaatttgttgatagagaaaattatcacccatcacctatcaaatttttccctcataattaaatatagttccaatatgtgagcatcatagttctccttcctttatacagtttgggagttatgcttgtgcgagatcaggtgcttggatgacatctgtgagtgtcatagtgctttccttcatttataattttcatttatataattctagactatataaagcaggttaataaatataattatataaacaaaatggaaagaaggctgaggaagtgtactgagggagcagcgatggaagaagaatttatattctccaaattagttgagttcatcgtgaaattgcgattaggaaatattagggattttacttcagagagtcaagatcgggaggtttgttatttactaatatttttatataattaaattaatttttttatatatagggattttactttagagagagtcaagatcgggagattggttatttactgatatttttatataattaaattaatttttttatatataaaataattaaataaattttatttttaaatacatataataatattataaaaagaatattctgttaagtaattgagatattctgttaaagttaacgtagaaatcaaaaactttcgttaaaccaataattgccgttagatagccacttttaatatataaagactaggtgattgttacgtgccaagccacgta

SEQ ID NO: 396946 - DNA, 974 bp, Cannabis indica
ccatgtggcttttaagggtgtaagatcgtactagttgtactcgacgggcctcaaatgcgtgtcaccctagggtcgttcatgtttgaattttgttttctccaagtcgtttgattatttagctcagtacacacacacaaatttgataacaaatttttgtatgtctctaaatttgctgcaaatcttttactgaaattgagaaataaaaaatacacagtgttttacaacactcctcacaacccacaccccatttctactcaagaatttttctcataaaaattctttcaaaaatcttttctctctgtaagtttttaactaaagctactcttcttttttgttttgggatatatttaaatgaaacctatgtgggtttatataggctttggacaaataaaatgagtggtagaaattagcctatggttatgcactttccattatgaatttgctaacttaggcttcttaaagataacaatgcatatgatccattcctttaacttagaaaggataatgttatttctttaacaatctcccatttgaagactgattttaaactgtcttcacactccacattatgtagcaaagctttctggttttgttattcttgtaggccaactaaagttgaacataacttcagtttctcaatcgtcactgtctttgtcaacatatctgttggattcttacatccttcgatcttctcaagtattaacatttcatcttccaatagagatctaatgaaatgataatgaagtccaatatgcttggttctagaataaaatgttaaattctttgtaagtggatcgcactctaactatcactgtgcaaaacattattctcttccttgaatcctagctcagttaacaaaccttgaagccatatcatatctttgctggcttcagtcaccactacatactaagcctctgtagtggataaagctacaattttttacgattgagacatccaactaacagctgtatttc

SEQ ID NO: 396947 - DNA, 816 bp, Cannabis indica
ttagaatcctggatgaaactcttatgccaaaggtgtttaccatcgcaggacaacattcataaaaccaaactatgaacacccaaggacaccccaacgctctataccaaccatcataggactgacctcccttctcctcttttttatttttcattttaatctcatgctctattcttcctttaaaagaatcaatagtcaattcaaacgacccctaccccaacaatactcatcccatcgaccgctgtcaacgacatctagatcaaacctagaaacttccttatctggagtattgctaagaaggaaacattggatgaaatacaaaacaaatagtttcaaacctagggacgcatcctgtccccacctacttcccaagaaagcatcctctatagctctatgatcaatgatttttatgccacggaaacaaaccttaattaactggtttgattcttgggaaaacaatagtttgttgcaatcgccaaagcaatcaagaccagtaatcaagtaatactcctcggcactgaatcgtatacaacggccagcaaccttatcccaaaattctttaggattgggtttgtaaacctccctcaaaagtagtctatgaacaacttgggggtgaaaaacaaagtcgggtatatccaaaaaatgaccaaactaggtgtctcagaacatagttaacaaattcacagacaaagtattcttaatgttattaatgacagagaaattactcgtacatacacactttgatctgtagaaatcattgggactgtatttgttaacccagtcgtgcatttacaaaaaaaaaataaatataatgaaata

SEQ ID NO: 396948 - DNA, 590 bp, Cannabis indica
cttacgtgattttattaacatttattgaatccgccattgccgtactcactggtatgtgttctttgaaatatcgactctgacctagcagcagtcaacaaaggcacaaactttaaaaacataatttgcgtttatgatttgagccgatactgtttgcctactgcatgctttaatacattgtacatacatttcaatgctttttctaagaataataataataataaaagaaaaaattgtaggtttctttttctttctttatgacaaattctgggttacactagggagattcccctctgtaaaaccctctttttctttttcttttatatatatgttatttggttttgtctcttaaaaccctctaatgatattgttttctaccaaggacaactgatctaagtcacccttttgcttaaattcaaattgccttgtacacagtttacctgattttattgtcaatactagtatacagttgtacttgctcattgaatattatcactatatgatatgaaaaggaaaatagcctttatatacctagatatgttaaaacttaaatctgaatgatttttaaggattacatatgtctatatttttat

SEQ ID NO: 396949 - DNA, 669 bp, Cannabis indica
ttgacactaccctaaagtttatttagtaactcattatatagtaactatgggataatagtagggatgtgtcatttttgctcggataacttccttatctataaaaaaattttagtctaaattttttcataagcgtatacattataatgattttctacgttggttgagaatcatggggttccatctcaaaaccaattggcaatgagtggagtaacccatgttcttatatatggctcaattttctaccatttattctatgtgggacattgtccacaatacaatcggtagtagaacctcctcgaaccaggttaacctattgtctaaccgaagggtatattttgccaaactatgagttgtagaattcttaatgccagccacatgagacaaaactaccctaaaaaatttagacaataaagttataacgtctttaaacagtaccctgtcacaatgaaaagtaccttcccattataataattatcaccatagctagcgaaactaaaaaacataacaaccaccaaactaaaaaatacaattatattagaatgacaatcttcaaaataaaaattaatatacaaacttaaaatttaacacataacccaaagcacaagctcaacattactaaaaaaactaaaaaaacaacaaatttccaagtataactagccaaaggtatta

SEQ ID NO: 396950 - DNA, 725 bp, Cannabis indica
tcgtgcgaaaacccatcttcgaagagtaagtgattcatccctttttctctggtcctttctttttcctgagttatccttattttgtaattaattgcatctttgtttgctctgtttggttgtagtaatttcgatttaatttcttggtaatttttagggtttaatcaaagtgaaacttacgtttatcatatttataagtttctggttttaataaatttcttctaggaattgggattgctctttttgtaaaaaatgtcccaatctggttttgaaatttattctccgaaattcttagaaacagagtgtcctaaggaattagccctctcattcaaacccgaaattcttaaacctcaatccaaacttgagataaatgatgcaaaaattaaggacctcaatcaggacgaagttgctagtcactataggcgttttctataagagataactgagggtaaatatcgttacttacgagatgcagcctggcctgaacctttatcattatcttctattcctttggctaagcacttatttttacccagagtcactataacttttcacaaggtgaccttgattttgtaattatgtgttccaagcctagtaaacaaaagaccctaatgtcacatttgagctgagctcatcgagtcaagaataagagccataggagattatgttggtggcgttctaacaacttgcggcatcaatcaaaggcgaggatgttgggttttatgccc

SEQ ID NO: 396951 - DNA, 655 bp, Cannabis indica
ttatactaaatttcagtaaaaatgcaactgtaacagtagattgtaatcttgtcactgtagaacacagatttgcagaatcaaaagagaaccataaataaatagtgtaaaatttaaaaacttcacacaagagaattgtacgtggtatcagtgttctttcaaacactactcgtctatggggcctcacccagagaacaaaatcaattagcaaagtatcaaatattacaaaagcaattgacttaaacaaatttagactccctctaatgatttgccgcaactctttgtaatctaccttgttaatatgatctctgaaccatgccaagtagtgaactcctttcagctattgatgtgtgcttacttccttccaaagtaagacttaaataaatcttctcccggagatatatgctcactttctcccacaatgaaacttagaaaagtcttctcccgaagacccacactttttcaaagcttctcttcaacttactctatgaataatatgggatcataataagaaaatcgaaatctagttgaacactctatgctttacaaatgaaacactcttctcacaaataaagatttgaaaatatgagactagaagagatgaaatcgtttggctgctctctagggtcttatttatagaacatagcaaccctagaga

SEQ ID NO: 396952 - DNA, 554 bp, Cannabis indica
aaaaaaaaaaaaaaactttctaaaactagcaatttgtttccaattaattttttaaaaatatttatattatagaatatttgtacacgtacaaacaaaaaaaatgaaattaacgtgaaaaccacatgaatttcttcaaagaaagaagcacgaattgggcacagcttatcacctgtggagattcaataacataacatgggagaggaactgactgtgttttggaaagaggctgaagagaagaagtttaagaatacagtgaggtaaaatcctccctctcttcagaagtgcttctggaatgaaatttgtaagaactttccaagtatgagaaagacagatttagaattaacagtcaaggaaagccgagaaagccagagacagtcgttggacagaccatcagctttgtcaatgacgaagccacaaattcgctccaccctcaccatgatgccttagtcatttcattatatattgcaaactgatttattaaacatgtattgatcgataatgagagttcagctaacattttatttctcaatgctctcagggatatgaaagttgac

SEQ ID NO: 396953 - DNA, 596 bp, Cannabis indica
ttttttagttggttgtactagattactggtttctgtgtttaattgttggtatgttgttttacgtaattgaggtttaagtttcattatttcttttattattttaggaaaatggttttactgtatcagatttatgtaatttgcttattttatgtaactggtatttttgtgtcactttttaattagttgtttaatataacttgttaattctatttttggcatctttaatgtgacaaaaatattatataatttataatttaatttcaactgtggtaattaaattggtttccatattttatgtatttgacttttatatcaatctatttattttttgaagaaaaattgtctagcttttctatttatggaaaataaggtaaaacggataagtttggtttctcattctctttctatctttctaactgtgttaatatgatattgtgtgagtcttctattatgtttgattagattttttgaggataaaatcaaagctaaactttccttttctataaaaggaaagtcgcacttacttctcacgattctgtaggtacagaaatagaaattcctgggctgattgaagatctattttagagaattgtcta

SEQ ID NO: 396954 - DNA, 680 bp, Cannabis indica
ttttttggaaaattatttttgcaacgtggattctcccccttcatgcaaacatttgttttgttcaaatccccacaaggtccatgcatcatgtgttttacaaccgccttgtgcaagtggatgttagagtttttatctggaatctctgctgacacgatctcatcgaaggattcaggagcatgtaatttccaatcccttttcaatataattaaaaagtgtgcatgtggaagacctcttttttggtgctcaataacgtagacatatgctgcgaccttgccgaatatctctttcttgaataacttgtcctttaattcctctagttttgcatggaaaactcgtgcaaccagatcaggtctattttggctctcctcgtgttgacataattcatttgtgatttccttccagtttgggttgcatgtcatcgttagaaaaatatcaggtttaccaaagcgttgtactaacgccatagcctccatgtatctcttcctcatgtctcttggtcctcctatgaaagacgaagggagtatgattcgtttcccaacattagaagcgtctcgttctcccagcgtaatcgtgtcaactataccttgatataattctgttcgtatgtgcatttgctggcctctataataatccaatcttgaagactccatcttgacatacatgtctactgcatattgttg

SEQ ID NO: 396955 - DNA, 816 bp, Cannabis indica
taccgattgttccccatataacaagtttgtttgaaattcaatattttcatatcttcgtatatggatcacttctacctcatacttctgaaacattgaagtacatgttagaaactccagataaagcagagagtatggctagctaataagctacctgacctaccctttccaggataaacctgggacttaattttcctttcttttcaattctcgagttcccttcattgaaaccacctaaaaaaagaaattcccaacttggaatttaatatatttctacaccttggatcaacatagctcttccatccattataatagcaatatacaaacttgaatctttaaactacatcagtacaacaataacagtactctaataactgttattacatgaaaactcattcagtagattatccttgttatagattctctcagcatttagatgtaaactttaaatctcaatctgagataattactttcacagcatcataggattgaactattcctttgacaaatagattagtacactaatctaccacaaacgcatttcactttgataaagaaaccgtactgatcttatatattttagttattcccgaatataaagagtatagcgtagtatgaaactcatttaaaaccttctactcaatatccttatctgactaatacgccaaacttgtttttatattataaaattccttcaaagaaaatcataagtcctttgttaatccgattccaagtctttccttgtacttctaaagttcggagtcactctgctgagccattttatttctttctacagattaaactaccatgtaatattaa

SEQ ID NO: 396956 - DNA, 664 bp, Cannabis indica
agtaaatgctaagacattagccaaatattagagtaaatgttgacgttccaatgatgacatgatttcacaatatcttaatcaaaagaaatcacttaagaagtcatcaacttaaaattatgaattttactactcaatagggaatgtggaatcaaaatcctgccttagtgggatttcttgaaaaatagaaaataaatatccaagattttcaaaattgatgcccacttggtagtttcaagagaaacgggcttagttcacgtcattaagtcaacctcacacaagtgcaaagttgacttggggcacaaatgcttacaccaaaagtagccctgatgacatggacatcaatgtttgacacatgaaaagaaagatgatatctcagagttgagtagtcccgagtcatagcaagtcgacctgaggggtccctagccctgtgcctaggctgactttggaaactctaggatggaagtttaaacttcaataacttgaatccaactcactatctttcagtattttgtaccatgaacacatgcatggagcaacctaatccaagcctcgagagctataattacacgaacccgcaaatcgaaagccaacttgggcacccaagttgacatctctaactagggtcttaagagaaacgtgcttagtgttgggttttgtgccttaa

SEQ ID NO: 396957 - DNA, 693 bp, Cannabis indica
aacaaacatggttaatagatccataattaataaaccaaagggataataattctctaaaacacatgaggttatagcataaatagaaataccttgtttctttgccaaaaacttaagacactggggtttccagtggcccttttcgttgcaatataaggactttcctttttgctttgcatcttgattagcagccttttccttattagcccttttaatagctttaagaggcttcttgctattcttccaattcttctttttactgggttttgaagcaaaggcaaagtttgcctcagccttagccataccattagcagtgtaagaactaggagctttagttcctcctttctgtggtcctccaatcaaattttcaaatgtctgaaggttgttgattaactcgtggaagtctaaattcaacttgttcatgacataatttgatgtaaagggcagaaaagctggagtcaaactattcaagatcaaactcacttgagttgtctgatgataatagctccatgattctcagcctcttggaagtaactagtcatttggagcaggtgatcacgcaagttttgatgaggtttcatccgtgcattgatgaaattcttggtcgcctcaaaatgagcttgaattgacgccatcctaaacaattcagtcaactggttcatgatatctgcaactgtgagagtattggcaaacctt

SEQ ID NO: 396958 - DNA, 842 bp, Cannabis indica
agaatgttgtctaatgctcttcctgtagcttcctctcttttcaaaaagtgtgttgttgattctcaagtttgtcctctatgcaaactcggaccaaaaactactacgcatgccctgctagaatgctacagatcgagaaaagcttagcaatcatcaaagtttgctatatactataataattataagtatcttgatattaataaatttttcctaggtattattcaagaactagataaagactatattggtattttatactattttttgtgagcactttgaaaccaaagaaataatacttttcacaattagcatactctccctcccattgaagtgcatgattggagtgttaattttttcttcaagtacttggatgtccagcaggttcaagcaccaaataacaactctactgctgctcaacatgatgtagtggaagctgatgtcttgggcactttaaagatttttactaatgcatccattgatcctcattgcaaaaagcatagtgttggcgttgttctcttggataatttcaatcaagttaaagcaggattttccaaaccaattattgggcttgttccccctgttgtagcagaagctaggggtgttcgcggtgcgagtggtgcgatttttgaccattttttcaaaccaacccgcacatgcagttttttcaatttttcaaaccgcatccgcaccgcgaaactaaaagactgcaaaaaccgcaccgcaaaaaatagtgcggtgcggtgcggttttacaggttatgcggtttgaactatcagcaaataattaaactatcacaaatgcaacaaagcttgagcaacacttgtcaaaaataccataagacttga

SEQ ID NO: 396959 - DNA, 883 bp, Cannabis indica
aggcgactgcttcttcctttggctagaatgttgatgtaccggtcggggaggttattgacctttctaaggagctaactgatacgaacccctctactccaaaagttaccaagtccaaagattcttgaggaggaagcgcgtacaggcctgagcaatcaaagggtggatccgagaaggccaagagcggatttgagctgatgcgaactcttactccacccttgccagtgcatgcagaggccaagaaaggcaaggagatgctcgcccattacatgaaccggttggttgctgagataagtgagcagctggccggcgctgacaacgaatcttctctagagctgctgctgggaggagtcttgagggaattcacaagggtaagtctttgttgaccatttcctttagtccttctttacatggcttagactctaaagttttttctctgtgtaggctggtctgaagttggcttacacttattcccgagctaagtctgccgcctccaagaacgcttctatgtccaacaccatgagggcggaggtggacttggccaggatggacgctgatgatgctagggtggagctcggagctgctcggatggagctgcgtgagaagaaaatagtcgagttgacaaaggacctcgaggcttccgaccaacttgaggctaccatcgacaccctgtccgcaatattgaataaccttcaagaggaaaggggagttcttcagattgtcttctgtcagttggaagaggagaagaagaccaaggaggaggagcttacagctgagattgagaagtacaagttggaggtggcaaggcaggaagaaaaaggtaaatgccttagagacagctgggtctcgagatttttttatgacttttggaaggctaacccctagg

SEQ ID NO: 396960 - DNA, 730 bp, Cannabis indica
ttgtagtgggagtagtatacctctaacaagaccattgcttgaaggtgataggagggagttgtgcgtgaaaccaatttcaggcgccaaagttaaggtggatgctacaatttttcctttggaaggacagtttggaattggcttcattgttcatgatccgtctagtttgttggtggtggcaagagcacactgctatctaggtagtatcgagcctgatgtggctgagtgaggctctcgacattaaggaggcgcttagttggctaaattaaagatcaaacttactcgtttgtgatacttgaatcagatagtttggtgtctattgaagctatctgaagtcctttagtgttttgttctatgtttggtttagttatattgaagatagtaagtttgtgttaaggtcattttataatttgtttttactatttattaaaggctttgctaattgaaatgtgcatgttgttgtgagaaattttttattatggacttatcgtatttttacagtcttttgtttcacctgtgcatttttcttgtatcttgaacaaaacgagtgctctatttaatgaaaacttttgttttaaaaaaaaataataatattaaattgtaccaataataataaaatacttttttgtgatattgagcaccaataatattttttttacacaatagcacgaataatattgaagtaaacaaatagcataaaaaagttttcttttttgtttttttgagcataact

SEQ ID NO: 396961 - DNA, 541 bp, Cannabis indica
aggttttatccaattggttttgaaagaatactagaaattgtcgaaacttctcaaacatttctcatttcttatgcataaggcaaatatgaccatatctggattaattgtcaatgaaagtgacaaagtactcataaccacctctagctttgacattcaatggtccacagagatctgaatgcactattcgtagtggttctttggcacgttctccctttgtagagaaagaacttttgtcatttttccttctaggcaagattcacaaactggtacttcacctaaggtgacattttttaatgcaccacatttggttaacttgccaagtctatcatagcctatatgaccaagatgtaagtgccatagatttgtttcgtcttcattattgatcttttgctttttgtggtttctaggtttagctatctaaaacagtttgttattaagcgcaaatagttcatctggtcttagatcataaagcccttgttccatagtagcaacacaaatttgaatatcattacgagaaataattgaatcaaaattcaaaaaa

SEQ ID NO: 396962 - DNA, 817 bp, Cannabis indica
tatatatatataaaaaaaatagctatcttagtgataattttttagtcacaacattaaattttttgtgactaagtgtgaattttagtcaaaacaaaaagtgacaattgtgagttttgtgactaatacctttaccacagaccttttagtcacaacataagaatgatgatttataattagtcacaatttttttacttcagtcaaaagtaggagtgttcatcaaaccgcccacactgcataaaccgcccgcaccacaccccaccacacaaaaaatgtgatttaaaatcctttcactacaaaaaatatgtacctttagtgataattttttagccataatagaaattttttgtgactaaatgtaacttttagtcacaacaaaatgttgcttgtaactaaaacatagtatttagatacaagttgtcactaattttattttagtcacataaattgtaatttttgtgactaatacttttagccacgaacattttagtcacaacataagcataatgattcataattagtcacaattattttacttttagtcacaagttttgttgtaactaaaaataaaattttattttgtagtgttttgcagtgcagttgcagtttgtgttttcgccgaaccgcgttgtgtggtgcagtttatagttttgaatttaataatcgtagttcaaaccgcaccatacacattatatgttacaaaaatattattatttttatattatgatttatttttttattaaagaacatatgcttacaaaactcaagctatgtattaaatttaaaaaatattcgtataaattattctcatttttttatt

SEQ ID NO: 396963 - DNA, 854 bp, Cannabis indica
ttttttttttttggtgattctttgtagaaagaaacgttatatgttaatcttcattaatatttcttaagttataaaaaaaataattaattatcagtttcccaaaccctcttaattactattttatttttgaggaaagctaattaaaatcttattataattttttagttaatttttacgccaaaaaaacccatgatgaaatattttttaaaagtttttttgtaagggtcggttttcgttatagttacattatcatttttttaaatttttaaaaaattctgaataatttacaatatcaaaaatagagtttctgatattttaatttaccacgggtttaaaaaactttaaacgtatttttagcactgtaaactatttaaaaatttacgaatactgtcataaaaattgacaaaaaatattcctacatgtgtttttagagacgaatgttgattaagagattgtaatagaaggttgacagtagcactcttatttatttatttatttatttattttataattaatcatctattatattaatatttgcttgtaattgttttatttttttctgaatcatatgtctaaaaagtaatcatataatacttttctctcatatgaagtaattattgtgttgtttcttgctgaagctgtaataatttaattatgcagaaatatatatcctatatattatgttagaagttatatattcacaacgtattatttgtgaatacaaagaaaactcatacaaaaaaaaaaattgattattttactatttcctaccaaaatgaaaaataaaatttgattcttttagttttggacaaatggataaaatatttaatgtaataaaatatttttatatatat

SEQ ID NO: 396964 - DNA, 594 bp, Cannabis indica
aatcatataagctattattagctcttcattaatttgtgcaaacattaattcctatatttgcaagtatccactatatataacgagtttcaggaaccacatatcaattgaggttttaagcatctttttaattttaaaataataaattgaggttttaagcattttctttgcgaaaagtatgtaaatttactaccaaacgaatatataagcacaaaatataagaattgaatataatttgaattacattatattaaattcaaatttttatatataatttgggtaggtttattagctttagatagagaaaagtagagagaaattgaagaaaatgaactttgtagaatatggattgaactaacaaaaaaatcaataactcaatagagcttagagtagtaacaagttagtactgaaaaactaacttacactcttgacaattcatcaaaccactataaaaaatttattttaagtcataataaaaattgtgaataaaagtaaaaaaattgtgactaattatgaatcattattcatgttgtgactaaaaggtttgtgactaaatgtattagtaaaaaaaaattacaatttgttgtgactaaatgt

SEQ ID NO: 396965 - DNA, 514 bp, Cannabis indica
gctccttctactggaacatccgctcaactcccccattactcgaataatttgaactcaagtggtaagcgttccagcaacaaccacaagcaagagaatgggaggaaggaaaagtttgctagcaaatccgaacaagctccccggtagaatcaagtaaagtacgcaacatttactatcttgactaaagatgtagaaagtatttacatggaaactcagtcgctggccccatataagaaacccgggcccatgaagaaagatgtcagcaagagggacatgacaaagttttgtcgattccactgagactatggccatgacactaatgaatgcaacaacctaaagcgggaaattgaattcctgagaaggaaaaacaacccacacttgcagaaatatgtcaagaccgatcaatgtcaaaggaacgacaataaccaagagttactacctccaccggtagatgggcatctggaagtcatcattggaggcccgcatattgctggagattcgagcaaagctcgggaga

SEQ ID NO: 396966 - DNA, 715 bp, Cannabis indica
aattatcagaaaagactatcaataaataatttaaatccactgttaccaagaaagataagacatcagcacatgaaactaaataagacagttcccatgaaaaagaaagaaagaaaaaaaaaaaaaaaacactcctttacataagtcatggaatcaaaaaaataccatgttaaatcaaaaaaaaaaaatcgtttacaataatagagtaaatcggaggtggaatattatccaaccaaaagcaagcttcttccaaccctaaagcatatctagctaacccatcgacagccatgttagcaatacgcttaacatgagaaatagatacataagggagagaggaaaaaagacaagatatgtctacggattcactatcacttatagggcttttggaaaatattcaatttatggaagaaaaaaaaaattcacacaaacaagattcctaagatgccatcaaaaaatatagccactaaaatcaaatgttaaaaaaacgtaaatgaaaacacacaaaaactgttagacacatgatagggtaaatatcatttagttcttagaaagatgatcaacaagaaagaaccccaagtgaaactaccaattctcctctcctgctgagatggttgctggaaaatatagcctaaatgcagaaatatggttgaacgggataaattcgtaaaaccaatttttcaaactttatatacacatatatatattatatacatatttt

SEQ ID NO: 396967 - DNA, 521 bp, Cannabis indica
attccgggaggaggcccaataaagggaggcccaggcggaggcaaagcaccgggaggaggcccagcagagggaggctcaggcagaggcgaggcaccgggaggacctaaaggcaaagggtgaggctacagccaaggccaagcgcgagctacgggaagccagggaggctatggatgaaatggccgctaagttaagatccttggaggagctacatcaggcggacttgcagtcgacgaccaacctgactgtggaggtgaaggagctgagggattttaaggaccaagccttgaaaaaggccaaaagagatgagctcctgaccccagtctcctgcaagcactacatcaagcgttttgacgatggcgtctacatggcctggcagtcgaatggccagagcatcaagcttgacttttatcccaaacctgaggaagccctcactcgctttcgggagaagaaaaaggcttgacgctttgcttgaagaacgtcgagccctcgtcttcctccccgcatcgattaggccgaccagt

SEQ ID NO: 396968 - DNA, 988 bp, Cannabis indica
ctcaacatagacaaagtaaacttgaggcctatacaacagaaacataggctccttgaaaaagagcgctccaaagctctcaaggaagaagctgaaagactacgggagaacaacttcattagggaaaatttctaccgtgtttggtgcctaagatgaatgctaagtggagaacttgcattgatttcactgacctaaaaaaacatgcctaaagactatttccatctaccacgaattgatcaactggtggacacgacaaccgaccatgaactactcacattcatggatgcttattctagctacaaccaaatcaagagcatactagtttttaaactaacattgaactttattgctaaaaaataatgcccttcgaactcaaaaatgcaggtgctacatatctaaggctagtcaaccgtatgttctacaaccaaattaggaacaacatggaagtctacatcgatgatatgctagttaagtcgaagaattctgaagaccacatcaaggatttagaggaatgcttcaacatcctgtgggaatattgaatgaaacttaaccctctaaaatgtgccttcaacgttccattaggaaagtttcttggattaattgtcaactcaagaaggattgaagcgaatctagaaaagatcaaggctttgcaagacatgaagtcatcgtcacggataaaagacatgcacagtctaacaggatgaattgttgcacttagtaggtttgtctcaaagtcaactgacaaggcatcccccaatggaaaagctggcctgttgcttggtcttggcctctagaaagctaaggccttaattccaagatcatacagtaaaggtactcttggaatatgttttaccaggatctagatttactaccatgtatgttgtttaacatcctaaatatgaatctctaaaacaatgtaaataaacacatattaagtttgagaaaccttacagtgggtgcagcggaattataatgactccttccactcaga

SEQ ID NO: 396969 - DNA, 2260 bp, Cannabis indica
caggacggccttcccttttcccaacatgggagaagatggtcaagcaggtgaactgggctccctaatacaaattgcatgttcaacgggcctagactgtgctggaagtttcttcctccttttgagcggagtcacctagcctcacgcttcagttgaatcagctcattctccttatgagctccctcagcccgtccaacaccagatttcctcttcctccccttcactggcttaggaatgaaatccttcggatagagcccgtacttcacaaagttgtcctcggaggtcaactgaatgatattccggtcatcccccggcagctaagcaagctcttgagctctatctctaagagcaagagtgaagggagggcggtgatatgtggggatctggtggaaccgagtatgggtggtgcccatgccatccaccatgaagtaatcatcaacaaaacgcccaattttgttgatggccttatccccggtgcccgtcaaccagttgaagtccggttgagagaaatagaagtaccccgacctgccttgcttaggggtggacttcaaatcaaaaaactagctaatttcgttgggagaaggcatatcccacttctgggaggcgtaaaaaacgaagagggcggacagatatttaatgcccttgggagtaaattgggtcgggcaaaggcggaagaagtctaccacattcttaaagtatggatgcaaaggcaacaatgccccttgctgggcatgagcaccccaccatgcgcacattccgtttttagggtttgtggctcgattattgtgggtgggaatgtaatagtccaattcgcccaggtagccatcctagttgagatcctgcaggcgcgcctcagtaaccttggacggagggctcacccacctcacacccaaggtaccttgccttctatgaggaaccgcggcagtaacttcctcactggcgtagtccatgccctcaaccaggacgtcgccatcagcatcaactggctccccgacctcattgtatccccaatagtttgggggtgcaacctccttctcttcctccgcctcggagggacttctaggacggacatcatcctactctgcaatctcctggacctcggcatccccttcatgatcctcctcttcctggacggctggatcttgttcggcgctgggtaaggtggcgtgtcaagccacttgagggtcggatgcgtcgaccctacgcattgtctttttggtacgagccatcattctatggctggacgaaatatttaaagaagaatgtctgtcactcgaagaaattggactagagcgaagacgaggatgatcctcgtgcaagagttgaagcagatcctggtcaatttggtgttcgcttcctcaaaactcacctgggttcatctacaaaagacatcacacaagatgagtgtttggtcggaatatcgaacgttaaaataagcaaatatgccgaccaggagtactcaacagattgaagaatgagaatattaaacgaaaagtcaaaactcaggaagtttgaaattttcgcgggttagggcaagaaaatctcatgaagcttagaataagcaggatgaaagacaggcattatgcagtttaaaagataagcattacaaacgatgaaatctcatgaaccgtgacaaaggaaaatcgcagagttttaaaacttaaggtttcctacatatcttctacagcgaaatcgaaagtgcattcagaaagtaaatgtgcaaagtaaacataaaggaaatcgagaacttactcaaggaatcaagcgtctggtttcaagttgcgtcaagccaaacgagcagttttgatgaaagcacttcagcaagcttgaagccaaaaacctctcttttcgctctgaacttacttagcaaggaaggttggtgaaaatgagtttgtggacaaatgctcactggtatttataggaaaataacgaaaaatgtgtaatcatttcaaaagaacctcaaacgcctcggttaccccctaaaagtgaatatgggaaatcaaaagtaatcaagtgtagccgtcaaccgtggtgagagaaaattaaattttgaaatattaattgtcagagcatttattagccgaaaaccaaagggtcgcccagtcagcctcacatcgagtcgcgaacagacgcgctggacacgtgtcacccatccaaaggcaaaagcagctcagatgaagactacacgcaacttcggaagtcccgtacagacttgggggcaaatgttatcccaatttttgtactctgacgtggcatcacatga

SEQ ID NO: 396970 - DNA, 770 bp, Cannabis indica
actaaaaaagtccaattaagattaattcaaacctataattttttttttctcattaacatgtgaaaaattgtaaatacttttgaaccaataaaaatctcaaaaacattaagattaccgagtgagagagggctctctattttagacctcttcgccattaatacttaaatgtgtgagaaagtagaccggatataggtgggggcttgatacaactcgtagagactcaataatgaaaagtgctaattacaacttttgcattcgaaatcacatactgatttttttcttcaatttccaaagagatcgaccaaacatattgtttcatcacccttttacaaaactatttctcatcaggcattcaagaggagttaaaacattattagaagacatttaatagtcggtcaccaaactaaatttttagtgcatgtttggcatcataactaaaaaattattttttatttttaaaaacagaaaattgttttctgaaaataatttgacttgtttggccttattttttgaaaacaagttacaaaaaacaaaaattttgaaaggaaaatttgaaatatcatgcttaataaacctataaattattattctaaactaataatatttaacatttgtaaaatgggatgagtttttctaaaatccaattttacccccacattacattatccccctccccctctccctctctcttcttctcatctcatttcactccagccgatccaacccttcactacccaccataaattttttttctctcactcattctctac

SEQ ID NO: 396971 - DNA, 614 bp, Cannabis indica
attattacaaatcaaaaacaatcttgaattcttcttttgcctcttgaagctttgattttgtgtttaagcttaccaaatcttgaattctctttcttctaaccctatcaatacagaaccaaccccattaacacccatgaatagcatagagaagattagaagaagttttagataaagataatgggagaaatttcaacaaaataaagaaccacttacttgacaagaaaaactgtagcttggcgcttcacgaattgattgtcaagtatgaagctttatcttagcttgttaatggtgatattatgaaaaatttacccattaaggctaaaagttttggttcaaaatcagggtccctccctcaatcattttaaactagatgatggaggaatagcctagagataatggagtagtggattcgattcaatcgattcaaagagaaagagatagaattaccctctttaaatgcattcgtgggatcgcttaattaagtaattattacaaatgataaaatgaaatcatgggttggagaagaatcaagagggtcgggatttatattaaggctaagatgagcccctacccaaaaaaaaaccatcaaaagtcacattacatatgcctgataa

SEQ ID NO: 396972 - DNA, 1176 bp, Cannabis indica
tggctagaatgaagggagtgattatgggtgatggggataggagtattgatgtgattgatatgggaaaaaatagtaatgatgggctggttatttatgataataagaaaaggaaaatgacaatagataaccaagaggagaatgctgaggtggaaaaggaaatgagtaacctttcaaaaaactcatctttggcgggccttggtattggggctcgccagtcatcatgaaaattttatgctggaactgtcgtgggcttgggccgtcacgaaatgttcagttcctaaaagagatggttactactaagcggcccaatattgtgtttttatgtgaaactttgtgtaagaagatgaaggtggatcagttgagtagagctttgggctttgagggatgctttgttgtggaagcccaaggaagaagtgggggtttggctatgctttggaagaaccaagaagatgtttcggtggacactttttcaatgaaccatattgactgtaaagtctcttttgaaggacaacaagagtttagattcactggagtgtatggtgaacccaatagaagtcttagaaggaaaacatgggagcttttaacaactctccttactcggtcaactttgccttggtgtctcatgggagatttcaataatgtccttaatcaatctgaaaaaattggcggtcaaccttatccgatgtggcttatcgaaggatttcaagaggccatccgattgtgtggtttgagagatatggaaatgcatgggcatccttttacttgggaaaagagtagagactctcctaattggattgaagctagacttgatagagctttggtgaataatgattggttaagtttttttcctttggcaaaactcactaatctagagatatctccttcagatcattctccgttactcttggaacttcaagtgggttcggcttctacacatgagtaccggtttaagtttgagaattggtggacgacgcatcaagggtgtgaggaaattatttgtaattgctgggaaagaatgcatggccacgacattgatgaaaaaattgaagaatgtggccgtgagttacttcaatggggcaaagatgcttttgggagttttgcttctcgtattaagagctgtaatcatgagttgaagcggtataagagtagaagggatgaagagggaaagcaactttt

SEQ ID NO: 396973 - DNA, 749 bp, Cannabis indica
agagagagagagaagaaagaatagggcttttagacttaatgcaatttggaggctaagtgacctagatttctaggctagggttaaggcctttatttaggaggcctaaaccctagatcatagtttaaattcctagatatttacataggttgttagataattaccaaagactaaagtgcccttgaatctagatattattcaaccattatgttgggcttttagggcccaattgctgtccacgttttgggctatacatagagtcctgccaggttaatcgtggccacccatagacctacaggggaggtcttggcgcccaaggcctgcatgatctggcaggtcaaggcctgcaggacctagcaggccactatagctctaccaagaggagtccgacctttgggtgtggaggctagccttttgtaagttgaggacaactttgtacactgtttctttgtagaggacaggttcccttggtcgaacggaaactcccttggtctggaagttatttcttggtcggccagcttgtgcacagattcaggttggcctataggctcaccctggccggcctataggcttctcttggccggccagggattttggtacaactccttaagagcttgcttcactttattcagttgttgcttgatggattttctatatcttgcatggagactctgttctgctactggtagggttgtgctccacctgtactctagctttggcttacgtggatattccacgtcaggtggacaaaa

SEQ ID NO: 396974 - DNA, 816 bp, Cannabis indica
cagaagtatagcatttgtgtatcctgtatcttttaagggagtacagctcggtgttcgcatggaccaccattttttttttcaactttaaaagctaaacatcatggtcacgacaaataagttcgtaggtatgggggagatatccaccatctcatagtagttttaagcaaatacttatctaattatgaacaacaaaattataggttcttacaactttaattagaaaacaccctactcctagtgtagttatcaatctctcatctagctctcactccattgagggcatctctcactccattgagtgcatcgacgactacactagaatcactttctacaatgataaacaaacagcctttattagtcattgtctttgttatatggaatttaaatcaataaaacttgaacgaattactgaaagaagattcttgctgagtcacggacaatgtcgcgaacaatgtcgcggacaatgttgctttcttttagatgttttgtggctttgcccgaagtgtgcacgacagtctagcaaccacggtgttccgaggataaaacaactgttgtaaagtttaaattattacaagttttattttcgttttgtttattacaaaatcttaaattctgtgctattttgattagtaatcccgtttaggggattagggtttcgtaaataactcgggtagcatgcctaattatttagggcgttacactaataatatgaacaagagtttacaattactcaggattcagaccgatctactattgatcatctgtatgatatgaattagatctttattgtgaacgatatgtgttgggttttatgcc

SEQ ID NO: 396975 - DNA, 959 bp, Cannabis indica
ataaaaatatttaagtgaaacttcatttttcttttatctttttcatattcaaacaaataatgaatatagttttattttttttggaggtttcaaaatggatagaaaatttatcatttaataattttaatgttactaaatattaatttcttttctttaattttacaagatacgttcgacaaccctacacaaatgataagattactgttttacgtgataagtgggtagaatatgtgagagcaaatatgaaatgataagaaaattatgagtatatttcaattcatgtttatactttttattaagtaattagtttcatataacttaccatttatatatttttttatcaagttagttaaatatatttgtatattacaaatatttttaaattacaaacactgttagattaactattgttgctgttatataaaattgtaaaaatctcaaatgtacaagtaatgcattgaaaaaatggcctaaaatttatatttgttctctattctgtaacgcaacataaattaaagctcaaatttatacactttaaaaatttaattgtgtctataaaattaatttaattaattatttttatgaattataaaatttttataggtggaaatatttaatgtattttgattttatattatttcagatttagagtacaaatgatcaggctataagtgattaaaaaaagggaaatttacatggtatactaatttttgtcatttttttacaaaaatactgccaaacggtattttttacttttttactgtgttttttataactttcatactgcaatatactgtgttaagttttcactggtgttctagtggtgttttttaattgttctactgttgttttgacttgttctgctttgtgttttactggtgttttataaaaatacagtatttttgaaaactttttcgtgtgacaatatttttatcaaagttaacccaaattccagtatt

SEQ ID NO: 396976 - DNA, 614 bp, Cannabis indica
ctaatcaataaaaatataagatattcctactactaaaaacctattttttattaatattgtgtcggaaaattctttattgcaaaatgaatatataaaatatgagctcatttgttgattataagtttcatcacaactagccagccacgtggcatatggaacaagttccgctggtatgtgggcgtgaccgaatcgtcccctcataaataattcctaacaaaaaaaaataaaatgaataataaaaataattaaattgtaaaataaaataatatattatataattaaatatatatcataaatatataataaaataatttattatatcttttatttaataaataattaaaataataaaataaaaatatttgaacaatataaaattatttatgctaaataataatttaatcactaatttaatataaatattaattttttaaaatactgatataaattttctaatactttaagaagaatatataaaattatcatattgttttctaataaccaattaaattaattattctttaattaatattattttaaattttgaaaacttacgtatgataatttaaaattatatttttactaattttaatgaataaatttttgataaaaaa

SEQ ID NO: 396977 - DNA, 753 bp, Cannabis indica
gtgtgtactagtgtacacataggcagttaactgtgccacttaattgaatttttcagacagaagtgtaaagagcaaaacagaatgtgagtttcgtagattttgctcccaaaaaatcagtttatgtggtaaagtgttaaaaatataaagttcgggtggttttgccccgataaataaattatttaaaaatcttaaattttttttcttcctcgtcttcttcatctcctctcccaatcccgattcaaccccaccctctcgatctctccttttcactctcagggtacaaaaacctctgcctttaaattgattctctagctctctctccacaactctatacctctctcgtttctctctcttttattaaacatcatctctgatttttttttttcagatgataaaacgtgtggttgggaatcaacgatgtgggtggagatgaagatgacgaagaagaaaaaagaaatttaaaaaatcattacaaaaaatcttacttttagtcacaataaaatttatgactaaaagtaaaaaagttgtaactaattataaaacattattcttatgttgtgactaaaaggtccgtgactaaatgtattagtcacaaaaatcaatttattgtgactaaatgtatttttagtcacagtacttgttgtaactaaagctaaattagtgacaatttgtaattaaatattatattttagtcacaagtaatattttgttgtgactaaggctatgtttagtaggaaggagggagagttagat

SEQ ID NO: 396978 - DNA, 1117 bp, Cannabis indica
gtgactataccgcgccaacctgtcagaacacacctgaaaatacaacacaggcatactatataataatatagttctattaagcacgtaattaaattaatttcatcatattacccttcttgggtcataattaccaaaataccgctggctcaccaacggggtcttaacatgtcattaatcaaataaattctcatatattgaattatatagtaatataatttctcaactattcataattactaattaggattttgctaatccattcctaattctagggtattacagtggtgctctcccatcatttgaaaaatttgagattgctataaatttgagatatgagatatgtttatgtgaaactaaaaaaaattgtgtgaaagtgaaaaaattcgtgtggcatcgatctgtttataattacaaaatttttttttaattttttttttgctttagtttataactgaacccaaaaacaattagtgttggcgcactaattttttgcctcggttataaattgaagcaaaaacatctttttttgcttcggtataaaccgaagcaaataatcaattagcgtctgttcacaattgaagcaaaaaatatcattatttgcgtctacggttatagcgatagttacaccaactaaagcaaaatctttatatgatacttaaaaactgaagaaaaaagctcttttctggtagtgataaagagttcatagaatagtccaagtggatcctggtcacagaatacaagactcatattccacacataaacatacagtttggatccattgacagaaaatggatattaacaacttgtgaaagttatactgtattgttcaatgtattctggaaactaaaaatttataatttctatttggaatctaaaatttaaagtcaaagacttaaatttataccaaatgagtaattattctagcttggaccaccactactaatctaactctaagtttaggttgtctttagtaagcatatacaagtaggagattctataagattgagaatttatatcatttcgggatagaatatctagaatatagtcatttgtaccattcaatttcataaaagaaaataggatgacatcataaacaaatgatgtataaaccttctat

SEQ ID NO: 396979 - DNA, 813 bp, Cannabis indica
taattgtgcatgtcactaaaaaacactctcaactctttagtgacacacacttttctacgcgtcactatatagtgtcactaaaagggtaaattgtagtaatgtctcccagttcactattcttgaaaagcgatgcgactttttcactgtatacttgttgcccagctctaggattgtaacgccctaacacttaggcatgctacgctaatcaattaagaaaccctaattccctaatccgggattactaaaaaataagctcgggaaatttaaacttttatctaaaacagaatgaaaataaaacttgtaataactttaaactttacaatcataagtgacatattttgggatcccaaaaatcttttacaaaatattacaagtcttttcactagctgacctaagcggcaaaatcagagttacaaaagtacatcactggtagaccccaacctgcttggtctagtgtggcctgaacatgtacaagcatcgctcagctaacgcactcatggctgattagagacagatttaccctttcctgcacagtaaggcatccgtgagccagtctcagtaagacagtatataatatcggcaattataattagcatatcacatatacaataatgccatttttttttctatttaacatagactcgcgtgttacgctcacacgcccatttatgtctacgtggtgcagacccacgtgttacgctcacacgtctagatacaataagtccttagaatggttcatctcatttctggttaccgagtccgacctgattatgccttgaacacataacccttaatctcaatatatataacaca

SEQ ID NO: 396980 - DNA, 669 bp, Cannabis indica
cttttgctctgggaggcttggggatttgtagtcgtacttgctgcaagtgaagcagatgagcaaggtattgttccaaggcttgaatcaataagattattgttatctattacttgtttaattggttttaggttgtacaaatggatgtcaaatttacatttctcaattggatctttaatgaagaggtatatgttgtgttatctcaaaattcccactgatgacgtataacaccagtttgtactgatcgagccaactaatattgagaccttcgaagactactacaaattatacttgtggtgtcagttttaagctaacacttaagtcaattaattatttacttctatctgataaataagaattgttggatagaaagtaaataaaataagataatgatttataattttaaagaagtaataataataaagacaaagattactatgatccccaactatcttttattttactttctaatgcaattacctaatttctcttctttctattcaaatgacaagttgaattaagtagtttataatctggttaagacttacaaactcaatctatatgaaaacttcctatattcctatggtaaagtttaatcatacaaaaagcattaagcgaagcaactcataaaattataaaaataatctagatactttcgttctaaatcaattt

SEQ ID NO: 396981 - DNA, 1251 bp, Cannabis indica
aggaccttggtggggtcgaggtcccatatcgatacttcctcgacgttctccataggctctataattttttcggaccccacgcgaggagccagctcatcttcttccaccattcttggctcaataacttcgcagaccatcaaaatgggtaggtgggcagcgatgttataacagtgccttgcctctccttgattgcccctcaccgtccctattccagcctcttgagtagggaactttaggcacaaatgcctgcttgacatcaccccgttgaggtccaccagggccggccggctgaggattgcgttgtaagcagttgggcagtccaccaccacaaatgtgcagtacttaaaggtgctttggggtgtgtctgggcacaaggtgactgggagccttactttttccattggtatgagtgttgttccattgaaccccgtgagctgggaaccactcagcgagaggtctcgatccatgaggccgattgccgtgaaggcttctttgaataataaattcacagaactcccattgtgagttaagattctggccacaattttgttggcgatgggagtctctatgactagagggtcatgatggggaaaacgtaatgtcttcacatcttcttctatgaatgtgatgggttgatccattagccggggcctttgagctggaagctgagtaacttcccaaacctcattgtgcttttcggcccctgcgtagcgtttcagttcctttcgggtagtccctccgatatggggccctccagagatcatagctactcttccgttgggtcttggtggcaaaccaggaatttgctaaagttcccctgggggcgactggtgccaatgctccggttgcaccccttaatgctccttggggcaaaggtcctgctgcctgaaccgggttgagatgaggcaactggttcttaatccattcgtaaagatggcccaatcgaatcaagtttttgatctcgtccttgaggtttttgcattcattggtgatgtgtccaatgtcgttatggtactcacaccttttgttgggatccctccgagagctatccttgtacagagggggcggtctccggtagtgcgtattttgccgggtagtgaaatacacacgttccttggagtctgtcagttctgtgtactgagtgtattggggagtgtacccccttttttgccgcttatcctccgtccggttgctaccttttgaggacctcttgctccgagagccttgtgaaggacctgctaagcttgcggt

SEQ ID NO: 396982 - DNA, 855 bp, Cannabis indica
ttttacaaaaatgtgtgatttaataaacatatttaaaaacattgaatgtaataagaaaaaattctacaatgcaaacccttaaaatggatatattgatgcatccctatctattgtagcatccgaaataattttttagtcaaattttttctcatggtcatgtacgttatagttatttaagacatcctgcaaaattcaagaaatttggaaaagtttaacacgccgaaaactatgttcaaacattgtattgcacgagtgattattttattttatacgtgtgtaaaatcgactgtttgaacattgttttctatattgtaaattattccaaatttctcaaaattttgtaggatatcttaaatagctataacgtacatgaatatagaaaaaaaataaacttaatttttttttctctgaataccaaaataagttaagggtgcatcaatacatctcttttaagggggtgcattgtagaatcacccaatataatatatcgcaagataacattacacagtaattataataataaataaactaactttttttcttacaatttttggtattatattattgggaaattctataatgcaccctcttaaaagggatatatcgatacgtctctatttgttttagtatccgaaataattttttagtcaaaattttttcatggccatgtaaattatggttatttaagacatcctgcaaaattttaagaaattcggaaaagttttaacacgctaaaaattacgttcaagcagtgtgttgcacgcgtgactattttattttatacgcgtgtaaaatagactatttgaacattgttttctatactgtaaattattccaaatttctcaaaattttgta

SEQ ID NO: 396983 - DNA, 1222 bp, Cannabis indica
atgatgtgagattctactattggaatgagtcttacttgtacaggcagtgtgcggatcgaataatgtggggttgtgtcccggaagaggaagttgcaagcatcctagagtattgtcattcatctccctatggtggacactttggtggacaaagaacaacggaaaaagtgttccaatcggggtactattggccctcaattttcaaggatgttcatgattttgcaagaagttgtgatcgttgccaaagagttgataatatttcaacaaggaatgagatgccattgaattgcattcttgaagtggaactttttgacgtttggggaattgatttaatggggccatttataccatcttatgacaatctatacatcttgttggcggtggattatgtctctaaatgggttgaagcagtagcaagtcccactaatgattcaaaagtggtgatgaagttcatccaaaagaaagttttcactcgctttggaacaccacgggcattaataagcgacgcaaattaaaaactaaaatccaatctaaaaatgtatcttccatagttgctgcctgtttttacaatttaagaagttctcttttaattactaagtacaagcactaagaaaagagaaagaaaaagaacaatattaagataggtaaaagaaaattcaaacacaaaagcttggtcccccttccttcgtctgctgtacttcctgctgcagttacttcccttccaaaaattgcagctccttacgtgatagataagatgatggtgtacttgccttttttcttctttttgttgttgagtccttagggtacaaaaatcacaccctaaaaatagaagcccaatctttttttgccctttggcccactaggtttagtccttcctttacaaagcatccagctggtctaattttaagcaaccaacatgctcctgctgacgtggacaactcaatttcgtgttcccacgtcactgccagaatgctgaattcgtttcaacattgcttcagcaatctaccccaatttcagcttttgttcccacttcttccttgcttctttttctattcaatatcaatttaattctctctttttcaacaacaaacaagcataattaattagaaaaaacacacctaacaatatcaattcaaacaagacttaaaagttagcttactaaatataaaatgaaactaaaactaactaaaattaagcaaacgaatacattttcactactcttctc

SEQ ID NO: 396984 - DNA, 774 bp, Cannabis indica
aaaaaaaaatgaaagaatcgcatacatatatctaatattgtatttatatatactgatcatgatcattttggttggatcaactacttcatctatcatagtcatacacagctcttaatggcaaacaaaagtctcgaaacagttgagtccgtcaaattccagagccaagcgcggcgccggcgatgatgatccgatcttcttctgttgagcttcttgaggttgtgttcccctgtttttgtgatcttcttgttgctttatggatttgcaattgttagccgaagaagatggggaagcgtagaaggccttgacgttcttccccaaaagcatttcagcagagaaaatatcgaaggagctgaacagagagttcatggctgagtagctctgattaaaaatagttgatgaaagaaagagagagtgagaaagggttttgtgttggttggagattttgaattggaggatttgagttttggggtttggggtttatatagagagagagagagaaggagtaaggagtttatttgggtttgggattcgtgcgaaccaagaaaggagtcgggtgaatatatttgcaccccacaaaattataaatacaccccattattaaaaaaaatataaacttaaataatttttaaaaattactcttaatatatttttaaaattttttcttcacattattttatgttaatttcaatacttactttgatttcatttttataattttttctaactcatgtatatattttttatttttttctaagaaaatgtcatataattttt

SEQ ID NO: 396985 - DNA, 547 bp, Cannabis indica
aaaaaaataattaaatgcacattggaaagaaaagtgaatttaccctagtgttttgtgaaggcagaatgaaatgggtaggactccagtggcggaactacatacatctatggagtggctatggcgctccctaactttttagaaaaaaaaaataaacataatgtataaattaaattaggataattagattttacttattagaaaaatatgatatttcttttattattaagcctgataaaaaattgtgaagttgaaattgaaaaataagcccaaacccaatagcccatttaaattagttatctattttatggtaaaaagtaacaaaaaaatgattaatataatttattttttaagactacttttgtatgatatatatttatatgtgtcttaatatacgtatttttatggtatccaataccatattaatatggcactttacaagtggttaacagtttcttatattatttattaaatcaaaatatttaggacccgatattattttacaccaataacgataggtcacttttcactacaaaaaatcttattttta

SEQ ID NO: 396986 - DNA, 1073 bp, Cannabis indica
ttaggctattaccgaactgcttcaggttaaacctttataaaatacctgtgtgtttttattgctttatcatgttattgctattataaatcatttatcgcttataaaatagactttttgtcgttggctaaaagcgaggtcaacaaagttgaattttcaattgtatcccaacttacctccccagaaatttggattgcatattgatgaaaatgaaaggtctatgattagttactagtagctgcctgagtccctctagagaaatgctaagtatagattcatggatgccctaatcatgaacttaagaaatctagaactgttaacttaaatttgcatgtttgatagctattctaaagtgattaggggtggaccaccctatggtcattaagataagaaagtgttttgtttcaacaaatactactttttttaagaatatgactaaagttaaaacaaagtagcaaagtagaggagatatttttcttatttcaattccaaaagtgttctatcatcttattctacataagatggtcccactgcctccattgtattgatacattcattgagtttaataccattaatattccaagacaaaaagtcatggtacctcatcgtagtgggtttaaggaacccaccctattatgacttggaagatacttgtgattgaaattcattgttactttaaacaggcaatggatagtcagaataaggaactaagtatcaaagcaaagaaaactatggttaaaaccattcgtatggagtaactaaatgttatgtattacatgaacaagaaggcaaattttaataataagtctattcaatggacttaacaaaactttcgatcttagtatcataagttttagattatctaaacttatgccttgttgtatacctagtaatttatttactcaagtggaagaaaattactttattaagatgttggagcattttctaatggctaactctaaaggaagtcttttggctcctagttatatagcttatctaaggaacaatttcaaatattctagaaaagatgaaagtcatgaaaagaattccttaagcatcaatagtgagaggtctca

SEQ ID NO: 396987 - DNA, 762 bp, Cannabis indica
tatttttggagctctaaaaatcaagtatttcagctcttgataccaattgttaaacaatcacatagattatttaacatccaaacacacattaaacattattggtcataaacattaaatgaaataatcaatacttaatttagagcatcacaaatttatgaaaagacatacctctcatattggcattttccatttgagctatgataccaaaatcttcaatgtgaatgtgtctccaagatggtagaagaggaagtagaagaagaagtagaagaggagcttatgaaagcaagccattttcttatcaccacacccactttctcatcatcatactaacacatattaaccctttttatatctatccaacacctaaccctaaggggttttattaggcttattgggttaatgagtatattagtggtggactataatttaatgggccaattatagttttagggttctcatgtgcttctaatacatttattaattattaaccaccccattatggtagtgaataaatattaggcacatagttaatgattgtgtttatggtattaagctcatgattatattagtccacaataataattctaacatcatcctccaatatataattaggctcaaactaaatggcggaagaaaatttggtctctcatctctcaatcaaagttaaactaccttttttaaaaaaaaaaataaaaacgggagaggttataataaaaaagacaagatgagctctaaaggaggagaactctacaagagagttgt

SEQ ID NO: 396988 - DNA, 832 bp, Cannabis indica
ggtactacttttccgttatgtaagttcataatatttgatcggatctttgagagagtgaaatgagttcttcttttgtataaattgattactgtgtttttgaactttttttaatggatgattagagtttggagagaggaaatttcagatctgaaacctcatattaaaatacacaaataacaatacgtcactttgtgatgtttgtgatgtttggcagctcaagtgcctttacattttccatatctaaatatagcttaaaacattacgggtatatttgatattgttttttcttttttgttttcataaaaaatgtttttaaaaatgaaaacaaaaattaatttttaaaattttcaaaacataagtcacatttgattaatgttttctaaaagcaatattgaaaaagtgaattgtttaaaacaaaaaaacaacattttattattcctaaaattcttattttttgtaattttattttctaaaatatgttttcaaaaaacaagactaaaccatcctaattgtttaacaaaaaaataatttttgtttttaaaaactaaaaataatttttaattattatgtcaaacatgaaagcatttcactggattaaaaagaaaaagagaaagaaaaaaaaaaaaagtaactaccttagcaaagtagtagttaataactaaaagaattaaaagctggtaattaattccatggctctatgagtttagtcaacgcaacttgagacgacccgccatttgccatagcggctttggcttcattcttcattctcaccactctactccgcaccgactctcctctttctgagttcatcaactcattaactcgcttctcc

SEQ ID NO: 396989 - DNA, 844 bp, Cannabis indica
aggatcgactagttagtggatgctactgctagacacaagcttatgacgttcatggacgcatattctggatataattagattaaaatgaatgtccctgatcaagagcatacaagcttcgtaaccaacatgggactttattgttataaagtcatgccttttggtttgaaaaatgctgaagcaacgtatcagcgactagtaaataaaatgtttgcaagacagataggaagaaatatggaggtctacgtcgatgatatgttggtgaagtcgataaaaagtggagatcacacaaaaacctcgcaaagtgcttcgagatactgaaaaagtacaatatgaaactcaaccggaagaagtgttcctttggagtcgcctcaggaaaaatattgggattcatagtcaacgcgaggggcattgaggcaaatcttgaaaaaattaagactttgatagaaatgccatcaccaacaaagccaaatgaattataggccttaacaggaagaatggcagctcttagcagattcatctcgatatcaactgataattgcctaccattcttcaatgtattgcgaggaaacaaaatgttcgaatggaaaaatgagtgcaaggaagcctttaaaagcataaagaggcacttgtcaacaccttcaattttggctaaaccaataaatggagaaacttttttcctctacttggctgtctcagaaaatgcaattagtgcagaattagtgcgagaagagggaaagtaccagcaacctgtttactatgttagtaaaaggttactggggccagaatcaagatatccacctcttgaaaaacttaccctatgcctaattcatgcatctcgcaaatt

SEQ ID NO: 396990 - DNA, 1120 bp, Cannabis indica
ccgaccgatgctcagccctaaacagaactaagactgatgacctcaccgtacctgtttgcaatatgggggatcgacttgattggggaactccccacaggataaggaggagcaaagtacgtagatgtggctgtcgacttctttacatagtggacaaagggtgaacttttggtttccataacctacaaaaaatttcttgactttgttgtcaagaacataatttgcagatttggaatacccattaagatagtatctgataatggaactcagtttgatggtgaattatttattgagttctgccaaaggaacaagattattaagagctttttctcagtatcaaggcctcaagcgaatgggcaagtagaagctgttaataataccttgaaagatactatcaaaaagaagttggatactgcaaaaggtagatgggtaaacaaactaccacaagtgctttgggctcatagaacgactcagaaaatagcaacagggcatacttaattctcgctgacatttggctcagaggcaatgctgccagtggaagtcaatatcacgacccatagacgagatttctataatcaagaagaaaaccaagaactctttaaactgtccttggatctacttgaagaaaaacgtaccgagtcgcaaattactaaagcatcataccaacaccgagttacaagatatttcaataagaaagtgaagaaacgactctttaacgttagtgacttggtgttaagatgagtatttccaaacacacgagatgcatctgcatgagtattttactcaaattgggaaggtccttatgtgatcgaggcaataattggaaactggggtttataaattagctcggcttaacggctcgctaataaagaaccattggaatgtgcgaccctattcccagtaaacccatgttgttggtgtaaactctctttctgatgtaattattaaattcaattattaatgaagttgaagaattttccaagtaattacaaagttttttttctttaaaattacttgaggggcatatgtatatgtatgatcaactgaaatttatctagaaatacataatatattgcaaacccattgcattctaaattttttaaagtttttcaagtaattgatt

SEQ ID NO: 396991 - DNA, 1116 bp, Cannabis indica
caaatcatgtcccctgaaattttctggcagttataatacctcttgaactattgagattattagatttaagtacttttatctaatttcattcaattttactattttagtgattgtttatgtactaaatcatgctcctaagactttgatatctaccaaatcatgcatctcaaacttttacatgtactaaatcatgctcgctgaactttcatctatgttagtacatgtcaaagttcgagaggtaaaaatcctaattagccttcaaaataatgataaaaaatagaagatattctagaagcaccttctataagaagatctcaaggacaaaagaagtcaacaaggtatgatgataattttgttaaccttggagaagaagaatatgatattggtcattttctagatcctctcactaattgtgaagtacttaatagtctacattcttcaaaattgatagaagctacagataatgagattgagtccatggagaaaaatgatatatgagagttagtttgattacttgatggttttaaaccaataagttggaagtagattttaagagctaaaaaggataataatggacaaactgaaaggtataaatcaagtttaatggcaaaattcttcactcaaagagaaggtattgattatacgaacactttcttgactgtttctgctaaagaatcatttagaattattatggctttagttgtgcacattgatttagagttgcatcaaatggatgttaaaactacttttaagaatgaaaaattgtatgagcaagtctctatgtctcagcctgaaagctttaaggaaaatagaaatgacaaattggtttgtaaattgaaacgatccatttatagtctcaaacaagcatcttgccaatggcacttgaagtttgataaagttgtgacattatttggtatcatcaaacgatcctttatgtggacgatattttacttggcagcaataatttttccatactaaatgagaccaaatttttttaccaactttgtagatgatttaaaatcaacttattctggctatattttcattttggttgatattgctttaccttgaaaaagtgttaaatagactttagtcacatcatctactatgtatgct

SEQ ID NO: 396992 - DNA, 505 bp, Cannabis indica
cttatcttaatatataaatacatatgaattgattggtattaagcatagtaatttctagcaccagattagttagtaatatttttttaatggaaaatttatctttactaattattaatttcagttatcaaacaagatagtaaattagttggaacataattcaaactgaaacaataatcaatagcgactctaacaaagttatgaaccaccatattagctgaccattttacaaaaactacaaaaatatttctcaataaagcaagcaaatgcttacaatcatcaattacatgttcaaataaaaaaatcataaaaaaggtgccttacagaacttgcacaactaatagacaatcggtttcaagagaaactgacattgatggtctttgattcgagaaaatgcttctcgaaccctggtccattgcctcaataacctctgatcctacttgaccatccaaaaaagttgtatgagcctctattaaaaagccgtttgaatctcgagccaccatgccaa

SEQ ID NO: 396993 - DNA, 808 bp, Cannabis indica
ttatactgcaaattactttaaaataaaaaatctaatggtactttaattttatttatttattgaccaattttctaggaaaattaccccatatacatatacttattttttaacttttttttttttttttctaaatttacggtttgagtttctaaagtggttgtagcgctagttgcaataggagtttctatacgattttttgttgcaaattaggttgcagctctagttacaataggagtttctatatataattccgtaaaaatgaaaaaaaaaatattattttgaagtgtaaaaataaaaaagctccaattttctattttttttgttgttttggggtaagttgataattaccttttttttggttaattaaccaaaattaccctcaaaagttttttagttaatttctaccttcttttttaattaactttttttaaactacccttgcaacacaactcttttccttctttctcaaagtcttctatagtagtacaacacctctgcaagagtcaccggaatcccctctgctacaactaggggtgtgcagaaagtcatccgatccaattccaaccgaccgatccaatccaataaaatcagatatccaatcataattggatcggatcggatgtaaattttaaaaatccaattggatcggatcggatgttggatgagacatgcaacccaatggataaccgaaccgatctaatccaatatcatcccatgtccatccaataattaataatatttaatatttataattttatatatttaattattttattttaaaaaatatattaattatttataagtttta

SEQ ID NO: 396994 - DNA, 1076 bp, Cannabis indica
ccgccaaatctttagctcaaatagtactgttgcaagctctagatcgtgagtagggtacctccactcgtactcttttaattgtcgagaagcataagctattacctttctagttagcatcagtacacagcctagaccttgtcttgaggcatcacaataaatgacaaacttttccttatcagaaggaagagttaatactagagcagtaattaagcgttgctttaactcctaaaaacttttctcacaccgttctgtccaattaaacttcaaatcctttcgagtcaatttcgttaaaggtgtcgctatcttacgaaaaccctcaacgaaccgacgataataaccagctagacccaaaaagcttctaacctctgtagctaattttggtgttggccaattccgaacaactttgattttggccagatcaaccatgatcccatccttgtccactatgtgccctaagagagaggcacgtgataaccataactcacactttttgaatttagcatagagcttgtgatcccgtagtcgctagagtaccaatctgagatacaattcatgttcttcttccaattctgaatatatcaaaatgtcttcaatgaaaactatcacatgcttatctaaaaaatccttgaatacattcataagatccatgaatgtagtcggggcattggtgagtctaaaagacatcatcaccagaaactcataatgtccatacctaatacggaatgcagtctttgagatatcctcttctcaaattcttaaatgatggtaaccagaacgaaggtcaatctttgaaaagatcgtcttacccttcaactggtcaaacaagtcgtcaattctgggtagaggatatttgttcttgatagtgaacttattcagttccaggtaatcgatacacatgcgaagtgacccatctttccttttcacaaataatagtggagcaccccaaggagaaaaactcgatctggtaaatcctgaagttgaacctttaattcccttaactctactagagccattcgataaggggcctttgatactggttttgctcccgaaactaactctataacaaattcaatctc

SEQ ID NO: 396995 - DNA, 610 bp, Cannabis indica
taatgttactcaaatcattacctagtgaacaaaagtcttgtacttaagaactggcagggctatctctatagagaaaatttaaagtatcagaaatactagaatgcagattagaggcgatgattagaattagctcaacataaggactacataactttttattaccccaggatggctagtacggtggcagaagtcctaagtaggaagtgccccaggtgagttttcagtaccaccatgatttttcccctcagttagtagatgtcatggtcgaagttaattatggagtttgcgctaagtaaactcaatgagttaacacttcaacccgtttaatttgataaaaacagaagtgctcaattgatggatataaattcaggaaaaactcgttagaaagccttagtaggctagctcagagatagtttggtattaactcatggaatgttatgtcataaaattcaagtgtgtatttcaagcagtgttaagctcagaaatgatactctaatgaaagtttacaccactccttagttgttatactttggtactattaagatatgttaagacttaaaaattctacttatggtgtagaatgcaaaaaagatgtggtggacaaggtatt

SEQ ID NO: 396996 - DNA, 820 bp, Cannabis indica
ccaattcattaaaaaggaaaacaaaccagttcaaaggcaacaatagaaacagggaaacaaaaacaataacaacacaccatagccagcaacaacactaatacaaaataaagaactaagtataaccacaaaaggacccgactgtaagacgacaaggaagagacttcccattaacccaggttcgggaaccactccttgatgtccaaaagaacatcaccgtcaattgagaacagctcaacttcaccaaccacaaagtgaacatcgcctcgctgtctgtcatcttgattcaccaaactgtttatacttagtttgtataccatgtaatatacgctaagtgtttttatcgttatcgtttctcttccacgcgacgaggttaaagcctcgtcgtacacacttgcactcacatggtttctcgtcgatacataagttagcagttcgtacgattctgtctcgcagaagactgtttagtcaaatgagttataaacatactctataaattgtgtttctaacgagttgttcaatgccaagtgtacttacgattgcatgtttgagtctttcgttcttcccagctcgacacttgtcttcctctgatgtgctcaccgaattttaggtataacaatattagtttactaaaatatcatttataggtagctaagtcttttaaggataaaatacattgaagggtagaacagtaattttgttcttatttgatgtagattatctatagagaatctttgacgatttggattgtaacaatggataattcataacgtatctatatcttggtacatatagagcgttttatataattaagagtgcaatt

SEQ ID NO: 396997 - DNA, 609 bp, Cannabis indica
ataaattagaaaaataatattttaaataaaatacaatatcattttacttatcaaaaattttgaataataaatataaatttaaataatctacatattttgttgagatttaaaagtaaaatttgtcaaaatagacttttgacaaattgaaattagcaaaatagacttttcttttttcttttttttttattacttttattttacacttaacatttaaaaaattaatttaatattaaacaaaattaattaaaacctcataaaacaaaatactaaccctaactttttttttacagcctcctctttctttttgttcttcttctcctcttctcctcacccaagtcactccttcttcttgctaataagactaaaaagaccatgaatgctcacaagtgaaccattcttcttcttctcttcctcttctcatcctttttcttcttcttgctggtaagaccaaaaagaccacccattattcataaatggtggcaagtggtggcagccatagacaaaagaatttgaaattcattctaacaaaggtaaaccctaataatttccttgtctcttctcattttgtttcttttctttaattttttttttcagttgtagccattaata

SEQ ID NO: 396998 - DNA, 1572 bp, Cannabis indica
atcccaccagacgcgagcatgatttcgcaacatgaaagcagcacagtttacttcctctgctcccgtcaccgccatgttcacaaggatacgggtgattgtactcatccaccgctcaacttaaactatctgcatacatcccagaaaggaggttgcagcttcacaaactactcaaacgctgagtctatatgcggcaacataaacccctggttaccgaccaccagcacagttgctggtggtaacaattgttgaacaggggtaggcggtgccggttgccttaaccgacgcaattcctcctcttgatgaagtatgatactttgcatatcttaaaatatccgctgccatttagcaggtggattagcattgccaaccccagcattattcctcggattcagcggaagcggaggcagtgccggtcgattggtttggtctacaccaggctctactagctcgccttgtggtctagatgattatggagggtccattttacaaacagcccagtaatcaacaacccccagcgagtcaggcaccaatacacacttacgcacttattgccttagtagggtttatctttgttatagttaccgagtctaacctgattatgccatgctcgcataacctattcatatatattattatatatatacgtaatccatacattacgttcttttagtggtttatcctagtaatatgctaggtctaacccagttaagtcttatgcgcataactcttgacatacattcgtccattcaataaataccaaagcatatagaatcttaggataataaccctaacttgcatactaaataatcattcctacaacatattacggcatgctcgaaataacacttattgaggatattaaccctaacttatgccttcacttaattagcaatataaccatacatcattgctttcttacctttataatattctttggtaataaccctagaccgcttcaaaaattaaactcaaggtactactttaccgagtctagcttaattatgtcttagacgcataaccctttatccaaacatatttatcaaggcataacttccaacaccacatatatcactagggtaataaccctaggctactaaaccactcatgttagggtaataaccctaatcccggttactaattattcacatatatcatttccaatataagcgccaccgtgtataactctacgtgctaactactgtcttacctgatgtcccgcaatagtaatatatacttggcattcaaaacacaaatattcacatagatctcgaaacaagctttctaacggtataaagaactcccaaaacggagtccgaatcacaaagttatggctattcgaagtttgcattaggatatgcccagaaagaaaagggcgggccagggcatgcaaaagccatgccgcaacacctggattcaaaacccagaaaattcaacaaaaacttcaaatttcagccccaaaaccaccttcaaatcaacccaaatcaacgcagaactcaaattaatcttccacaagctagcaagtacaaaggtaggcattaaaatacataattttcatgcttaaatccagaaaaa

SEQ ID NO: 396999 - DNA, 1504 bp, Cannabis indica
ctaaattctaaactctttacactaacctctaaccctaagccctaagccctaaatactaaaccctatacccaaaccttgacatgggccaagacccatacccaaaccgagatcgtaacccaggaccaagacccagacccaaatccagacccaaacctagaccaaaactcaagacctaaacccggaccaaaacccagaccaaaacctcgtttgtgaccttggccttgactgggcctcagtttgggaccccgacatggacccaaatagggactttgactcattctggagccagacccaaacaaacacctgaacccgtattgggacctagactcgggacccaaacttgatgttcaaacccgaacctgaacttagacctagaccaggacctcagatctaaacctagaagggggacttgggccccaaacccgaacatggacacaaattttgagaaaggatccggatcttgattgaggacttggactagaaactaggcatcataacagggatgaagacccaaaactcgaccccaaactcgagagacgggacctgaaccttgactcggaaacaaggacttgactattgggacacaaccccgaactagaacaagaccaggacccgaaccaagacccagaccaaaaccagtcccaaacccaaactaggacccgaatccttgccctgtgaccaaaaatttgaaccgaaaccggaagtaaaccgggactcgggaatgggactggaaccgtaaccagaacttgggcttagatctagaaccataaccggacttaaacctagacccagaactgtaaccggaccaggtgccagactccaaccaagacctagacccgaatcgggacccaaaacttatatcccaactcatacctagactaagtgaccgaacctagacccaaacacagacccaaacatggaacaagactcgggacacaaaattggggccgggacctagaaccgcaccccagtactcggtccgaacccaaaagtcggacttgggacccaggacctaaaccggaactagaccgggacaggtgaccgggaccagatcagggactcaaaccaggacctgaacccgaacccagaccaggacccaaacgcagaccctgacccagactcgggagacggaactggaacctaaacaagaactgcaaaaccaggacccttgaacaagactaggactgtgaccaagacccacacccaaacataagaccaaactcagacctagccccaaacccaaagcgagaccaaaactcgagcccaaacacggtcgtgtacccagactgggagcgagagccgaaccttgacctagacctgggacacgatccaagacccaaactcggacctagataggcattcggatacgaacctagactcgaacccagacccagaccaaggtcaggatcgaaactcgggacctagatccattctgagaccctaacctaacccagtcccagacctggacctgcacctaagaccaaaactcggacctagacccgaa

SEQ ID NO: 397000 - DNA, 832 bp, Cannabis indica
tgctatgtttctaaagctcacacaagtgaataaaactttttatcaaaggtggggcaattaagggcagcccacttagcttttcgctaaagtatgcaagtggtgtcccatcctgcataagaacaacgccaatacctataccacaagcatcacattcaatttcaaatgtgttagaaaaattaggtaaagcaagtacatgagtgtgagtaagcttgtgtttaagtaattgaaatgtatcctcttgttctgaaccctatttaaatgaaacattcttttggctaacttctgtaagtggtgtggcgatggggcttgttgtctaaatttttgtaagcttgacatgtggttctttcttaattagggaaggctaagatataattggctggagaacccctattactattgttctggggagataagggcccccactcgcagaaagggcatccatgattaggaatcttgtaaagaccgcttagtttaatttggaaattagcagttaatcataattaattatgaaaattatttatagctatttaaataattattatactgttattattgaattcagagatgcattttcatgtcatgtagtagttttcataattttgcattccggtgcccggtattttggaactcggtgtttggctcataaaatcacactttgtatgttagtagtttgggacagtttattagacattgaaaatacccctttagtgtaatttatgtgatttcagtgtgaaggggcaaaatgaccattttgccccattgttagtttgtcttttgtgacttaataattgaaaaataaatgtttattttattatgttttggctgaagtaaa

SEQ ID NO: 397001 - DNA, 685 bp, Cannabis indica
cactgcttggatttactcaacattggtcctgaataatccaacaggatcactcccccaagtgtagtttattgaatatggttcagtttagaatggattaaggtggaatttgtggtaaataatccactctaaacaaaaccagattttacctccactgctacttgaaagttagttactttcagttatttctcttcaacttgtatcagttagttgttagttattgtgttagtcattaactaacttcagttgaactgttaagagctggacatgtcagcatctaacaggttatatataggctcgatctctttggtgaaagggagcagaaaagaaggagagaaaacaagatacagagagagagtttagagagatcaagcagatgaaacttaagtctagattggctaaattgctctagttttgagtgttctagagcctagaaagactaagagtgttcatgatgatcttgtacagaaattggtgtttgtaattacaatttcatagtggagaaatctccttgggggagagctggagtaggactcaagatttgagatccgaaccaggataatttcttgtgtttttctctgtttttatgttcaagttattctgtttatgtttctggttttgataacttaatagttgctcattatctaacaaattgattgatctgaattagtgttgtttgtttacaaca

SEQ ID NO: 397002 - DNA, 512 bp, Cannabis indica
tcacccaactactcgatctacatttagagatggatctctttgtcggatccaattgaatctcaagatccagtcatcaatggtgatgcactagcttccacagctcttctgccgacagctcctcaaagacctttcagctccaagaatgatcgatacactcacgaagaagtctacccggttcttcctcagtgccagagatcactctggccttgtgcttgttttctctgttctcacaagccaatactatcaatcatggaagcatgccatttcaatcgtgttggctgtgaaaaaacaagactggcttcatcaacgaatttctactaaattcaataaaatgattgattttttcattctctctgtctaatcaccactgctctatttgtcatcttgctagaagaaatgtaaccttttatttcaaataataacttttagggctcgtttagaacatcgtattaggtcgtattgtattgtattatgttgaattggattatatatcatatttttatataatacta

SEQ ID NO: 397003 - DNA, 525 bp, Cannabis indica
gagagagagaagaagaaagaaaaaaaaaaagtaagacaactgaaatgataaatataaatgtaatgtttagaaaaaaaaaaaagttagtatttagtgtaaattttccaaataaaaagaaaccctaaaatgtaaatataaaataaactaaaaaaaaataaaattaattaagttagaaacaaaaacatgaaatatgagtatggataataagtttacaaaaatataacatatcaaataccataaaaaatcttaaatgtgaaaaaatgtcatagaagagtggcaaacttataaatgccatatttttataactttttataaaatcccatatttgatgtaattttcacaataaaataaataaaaaaaagattcttatgtataattcaaccactctctcttaattggtgtaataatcaaaatattgactattattctatagtacatagttttactattctcgttggagagatagtggattgcttagaatttttctcattaaatagtattttactaaattctaagaaattatgt

SEQ ID NO: 397004 - DNA, 931 bp, Cannabis indica
atttttgatagctagagagtatagtctgatacggaccaactttaatgtaagctctaggaacttcgtcacgcttctcaggttgatactcccatattggcgggcgtattcctatatcacgctctaatgaattaatatcaaacccttctttaatgtcaagtcttaaagattttgttgcgcgattttttgaatttttatgatctacatatactgatggatttgacgagacttcagatgttgaaacttcaacattctttctttcaaagaatgtatcaattgtggttgactttttcatctacaattaaaaagaactatatatattaatcagattatttacaaaatcctatccataataattaataaataaaactataataataaaaaaagattataacatgtgtatatgtatgtatatatttttatattaatctatcattaactatcactccaaacaataaagattattagtagaattattatttttcaatataaggtacctacttaatttatatatataattataaataaaacataaatgtcaattaaagttatatcatctatttgtatatataatatttgagagaaagaacaaaattgaaatttgaattgaatatttaaaatgcatatatctttttctataagatacatttacttgttatttgatatctgtcacttctctttgatgtgtaatgctctttaattcattcctataaatttgctaccacaaattaaatatagatgttattctctatcttaatgataaataatatatctatagaaataatcaaaataaaacataatttaatcaccttatttgtaaaaatagtggctcatgtaataggtatgaaatgagagaagaagaaaataatagtaatacctaattatctatgagaaaggaagaagagaataataatacataattatctattttgaa

SEQ ID NO: 397005 - DNA, 697 bp, Cannabis indica
ctgaatgatacaggagtaataggtagcaggaggtccggaacccatctgggatcggcctagaaaatgacctaagttggaaaaataaaaggccttagcatgatcaccccaccgggtggggggcatcctaaatctaaggagacgctcatcaaattcaataggcctacaccgagaagtaatcataggcagaaaggacgtgatagaccgctaaaggagactttaccagatctagatttgctggcatcaggagccccagtattggaaaccaggaccagcaacttaggccaagaaggcgtccactctttacccgccgtccagtcgaagggtcccacggtggcggcctgagccttgatatatgctaactcttgttctctcctgaagagatacttataccggtcctctgccgaggctataatgtccgtccggagcacctttttagcgtccggggtacgaatgtttgggcaaaggaccttggagaggttgaattcgtccactgattgactccctgagatgagcttggccttcctgcagttctctattgtgatcctgacccactccgtgagaagctctgggcgatccacggcttggaagctgaaagaaaagaagaagcggtggcgatactccttaacattcttttgaaaattaaaagggatagggccctcgttagtaggatgggcccggagagtgaaaaaatcgtcct

SEQ ID NO: 397006 - DNA, 645 bp, Cannabis indica
tgaacactcactcaagaattcactaccattataattaccagtcattctccatcactctacggtgaaaatatttattttttatcttctttatttattcttcatttattttatttactgacttgatcatcgaagtacctttggctggcaccatctcggtgtcccaaggtctcaacgatccttttttctttgttctacaggttgtcagtgcccgcgatcctttcattccgatcattgtagattttggcctctacaatttgacgcccaccgtggggccctgacaaactgaatagctactcttgtatctaagatgagggaaaccaatgaaagcctcagagcggtacaagaagagaataaagtattctgataagagaatgctctgctgaaatcaaaggtggagatactggagtccgttcaacgtagtacgacggagtctcagtcaaggtttcgtgttccaatttcatccatgcaatcccttgattccactccgactacaaacgtaggccaacgtccagcggtcatgggaacaccacaaaaccaaacaacacaccaacattcaaccacaacgaccattggagcagatggatcggtaccaggggatctactctaacacatggaccctctttggtaggtgacgagactatgatc

SEQ ID NO: 397007 - DNA, 1206 bp, Cannabis indica
tagtgaccaaatagaccctctctcgtagctcgctgaaagaatgggcgtccctgcttgatcgacggggaggagcatctcaaagtatggggcaaaggatcaagcgctttgactttgtcccccggaatttacactctcgcataaacgggacactgtatcattttgttagaaaccttcgaaaataattaaatatgttttattttggtatttttacaaacatgtttacataaatgttattttctgaacttttgtatgaatttgagtgaaccaaatgatttatttctatttattgatatttgtagagtcaaaatagataacccacaccccgaacctttccttgaacatgcctttgcaaatgaactctacagtgtgaaaaagtatcctggtaaaagcattaattcacacctaatgatgatgaatctgaagttctagaaagcaaatttgctgggaaaggatttgtcaagagaacagtgggttcaattcattcttaatagtcttccacctgaatataatggttttgttgtatcttatatgatcaacaattttaactcatctgccatagataagcaggaagcagaattgcgtgcttacgagcggagtttgcctgcaagaaggccaccctccagttttgtagacttgagtaagaggaaaagaattaagtatgatacttctaacaatgctgcttcttcaagtttaaatattgaaacaatggacagtcgtactcttcaatgttcatatagtgataagaagggacatcaggaagaaagatgtcccagacttctagaaatttcgaacgaaggtaacgcttttgtttttgaatcatgtgttttaaagaatgacaaatccttttggattgttgattctggatctactaaccatgtttgttcttcattgcagttgcttgaaacttggaattatataaatctaggggagttaaagcttaaagttggaaatggcaaattagtatcggttcaagctaagggaaaaggtcacctgaagcttcaaaagaaatttttagttttagacaatgttttgtttattgcgaattttagtagaaacttgattagtgtttcatgtttacaaacacaattttatcaattgaattttcgagttctatttgcactatttgtcgtaatagatttcaattatgtgttgcttacatggaacaagtgctttatgttttgagaccggatatacaaattgtgctta

SEQ ID NO: 397008 - DNA, 655 bp, Cannabis indica
ccaccaccccctgcacaaagcctatcgctgtcctgcgcaaagcccgtcgccgtcccctgcgcaaagcccgtcgttgtcccctgtgcaaagcccgtcgccgtcccctgcataaagagccgtcgtctccttcgttgccccctgcgactgagagaaaaagagatgtttgagtctatgatatgcggctgtgttttagacttttgtctttagggttacacaatttattatatataccctatttgattttacccaaattaattattttatgattaaaaaaaattattttataaattatttatttatataaaataaagtaaaatgatacactttaattttatcccaattaattatttattatttatttatttaaaataaaataaaatctaatagtaaaagataaattttatttacactccaaaaatttctaaaaacaacctattttaatatttttttaatgtaaaatttatatctttaattgtaccaagtattttttacatttttttcttctaatttatattcttaaaaaatatacccataaaataaaaataaattatatatcaaacatgtgtgatttttatcatcgtgtcaaaaaaaaaaattatgtatcaaacattataacaaaaaatttaaaataaaaatagaaaaaataaataaaaaa

SEQ ID NO: 397009 - DNA, 517 bp, Cannabis indica
gtttcccattttgaattttctcccgaacaatgttgcccatatggatggctcttgcattcatagtatagggcagtaggtacttgatgagaaatagggaaatccttctgttgagcaatgagacaagtaacctcataagtagcgttagccatatcccagtattttgcctctgtagatgagcacgctataataggttgcttctttgatttctaggatatgagagagtctcctagaaagatacaatagcctgtgactgatctacgagtgtccacacatgtaccctaattagcatcagagaatactttgagtgaaatgttgttaccagataggctggaagcgacataggcagtgtgttggagtaaaagaataagccttgactaggagttccgttgatgtattggagaagtctatgagccgcaagaagatgttgttgggattattttaccaagatttagatttaaatatgaattttctaatacgatgaaattaaacacataagagttcagaaaaccttacattg

SEQ ID NO: 397010 - DNA, 629 bp, Cannabis indica
gcataaacaacggcaataacccagcgagtattatcaatccacctaacgcaccagctgcgactaccaaagtagtaatcccagcgaatatagttgcgattgccactgcatctgcgacgactcaaaacaacaccgccatgacggggggtgttgatcagagtatcttgctacaagcattaaaaataatcgagcagtagagaaagcccatttacaagctccatgggacttctcccttcactgcagaagtgcgacaagctcgactgcctaaggaattcagactatccgaatcgctaaaatataaaggtaccactaattctatagattacttagaacagtttaatacaattatgaaagtagaccaggtacctcagttagcaaaatgtcacatccttgcgacaaccttggaggataatgctcatgattggtctagccagttgcctgaggcgtctatattgacttggggaaacctttggttatttattcttaaacacatttccaagccacgatgacgtataaacagctttacatgactctggctaaacatcaaagcaggaggtcggtgagtccttaaccggatttatttaaaacgttttaatgctgaagtaactgaagtcaagaaggcccttgagtct

SEQ ID NO: 397011 - DNA, 879 bp, Cannabis indica
tggcgcatttccttacaattgaactactttccattatcggagataagtttgtaagggatgccaaatcggcagatgatggaattatacacaaactctcgtaatttgaaagttgtgatagttgcaagggctttcacctcagtccatttggtgaaataatcgactgcgactatagcgtatttgactctgcctttccctttgggtaattctccgattaagaaaatcccctagaccgcaaagggccaaggactcgttatggagtttaattagcttggaggttggttggcatatgtggttatccactgacatttgtcacattttttagcaaagtttgaagcatctattcccagggccagtaatacccttcattatttttaaagcaagggaactacccccggcgtggttaccacagatgccaccatgcacttcgcagagtatgtaatcgcattcggctccgtctatacatttgagcaacgattggctgaagcttctgtggtaaagtttgccatcataaatgacatattgagcagatcgataccgcagtttttgagcctctatcttgtctacaggtaggattcctttctctaagtaatccattattggagtcatccatgtgacttctttggcagtatttatctccattacttcagtccgactcactgttgggtgagtcaacacatcgacaggaattacattgagtaattcagcttctctcgttgaggcgaaacgggccaaagcgcctgcgaaagttatgagcacgtggtactcgagaaagaattactttcttgaacttttgtagcaacttgcaagttagggcgaggtatctagccagacgtccacctctggctagagattctccgttcacttggcatacaacgatct

SEQ ID NO: 397012 - DNA, 542 bp, Cannabis indica
taaaatgaaaaataaaacttggtattatctaagtatatcaagacaaaaatcagattaataattcaaataaaatctcactaaaggacaaaaaatcccaaaaggtaaaaagaccataatgcccttttctacaccaaaaatcataaaatcacttaggggtaatttactcaattctaaaatctcgacaaatcctgacattctcgatttctaactatattgccctgatacactaaaaatactaaaatgtgattctaatagtcaaacgtcgtgttttaatgttgtcaggcacaaaacatgtaaaaatatgaaatcctatatatgacatataaaatgcattttgaattcaactaaatctccgtaaaatgaaaattcataactgttatgcaagtttcataattaaaccttatttatcagctaatttttaaattaaagttaagcggtctttacacatttataggtagctaagtgtttgaaggataaaatacattaaagggtagaacggtaaacttgtcccttttcaatgtagatcatctatagagaatctt

SEQ ID NO: 397013 - DNA, 1151 bp, Cannabis indica
aagctttctacccagcttgggtaacaaatcacgtactagtacccaagaagaagaaaaaatggcgagtgtgtattgatttcacaaacttcaaaaaagcatgccccaaagactgttttccacttccaaaaatcgatcagctcgtggatggaacattagggcatgaaatatcaagcttcatggatgcttatttggggtacaatcagatcaaaatgtattcgccagaccaagaacatacaagtttctgaacatatatgggtctatattgttacaaagtaatgccgtttggtctaaaaaacagtggagcaacacaccaaagattggtaaacaaaatgtttaaagaccagattgggcaaaatatggaagtgtatgtggatgacatgctcgtcaaatccaggaaggcttgggggcacatagacgatctggacgaatgcttcaaggtcctcatgaagtacaacatgaaactaaatcccttaaagtgttcctttggagtcagctcaggaaagtttctaagcttcattgtcaagtcccgaggaattgatgcgaatccgaataagattcaagccctcctagatgtgaagtcgccaactaaaaccaaggaagtgcaaagtttgactggtcggatcgccacactcagcatatttgtttcaaaatcaacagacaagtgtgtcccattcttcaatatcctttgaggaaacaagatattcgagtggacggaggaatgtgaaaaagctttccaagagctaaaagcacaactcgcaaaacctcccgtactctcaaaacctctagacgaagaagaacttggagtacacttatctttcacagagcatgctattagtatcgtgctaatcagagaagaaaacaacagacaacacccggtctattacatcagtgaaagagtcattgaggtcgaaggccggtatccattgatagagaaacttgttgactgccttattctagaaacaagaacgttaaggctctattttcaagatcatcatgtttgagtgtacactgagcaaccattacgccaaatattgcaaaagctagaggcctctagacgacttctcaggtgggcagtggagttgggtcagtacgaaattactttcaaaccccaaacagcaatcaaagtcaaagccttagcagactttgtggta

SEQ ID NO: 397014 - DNA, 930 bp, Cannabis indica
ttgaaaaactcatccaagaaaccaggtgggctctgaatatcattactaccactgcttgaacccccatacctatcctcaaattgagagaaaatcaaagacaaaagcggcgaggaattcggtctattcaaattcaaattcccaccaccaaaaagctccggattcgctaaatgaatccgacaatacgataccgaaagcttcttcgcttgtttcactactaattccatctcagacctaagattcttattcttcatcgaaacgattttcgtactttcagtatgagcacgtcgataacaaccgactaagtactgaaaaggggtttcggtcgaagcaaaattacctgaaagccgatcgattaaaactctctccatcgaatcacgtgagagtctcaattccttgccttcactgagaatctcagctgctgtcatttccaagaaagcgattctgggatcggaatcggcggtttccgtaagcgagactagaaaaattttcctaaggattatatcttcaacctcttcaggtgatctttggggtttaggagttgccattgaacgagaaagacaaaaaaattctccttttttctgaatcagaagaagactactatagattttgaattaatatcaaaactttcccgagaaacaaacagaaagataaagtagaaaatttgggatcattacttaagagtttcaattagagtaactctcactcatatatgtcttatatataactaataaaaaaaaaatgtaatttgaaaacaattacacgtataactctatgtaagagtattttattaaggataatttctaatttattatgaaaaaataaaatgactaattatataattatgaaaaaactcttaatttaaattgtaattaattatatgctttttaaattttgtaataaaggtgcgtttagaaagtcacaatgtaattg

SEQ ID NO: 397015 - DNA, 1017 bp, Cannabis indica
ggctgttagggttaggttagtttttgaatcagtttctaagtttaatttgagcttggtttgagttcttgcagctggtttagagttgtggtgtggtggatgcacaagtttgagtttgaaaactcaagcttggatcatccatggtcctttttgattttgtatgtttttctggatcctattgcttggattatattgtttgaggtcaatataggtgttctggaaagtttggtaaggtttaggcacgttttgatcaggttttggattgcttggggaaacctggtgcaaactggttaaacagtttgccaggtcttgtaaaattggttaaccggttctggaacaggtttcccaagcgatccatttcatcaattcgtgttagttttagagctttggttgggtgatttcttgttgcttagggtattggggcattagttatcaataacaaaaccttaagttagaggattgagtttcccaaattagggttttggcgtgtcatttacccgattatgttatgtgattagggcacccatccagcacgagaatttctgttcaggtcggccaactcacttgaatttggaaacgaggtaagaatagcataaaacatattgtatatatgcgaatgtatgtatgtgtgattgcatgcttgatgtgattcatacactaccaatacttgtacggtagtggtacaaagtgtattagtatagcgtataatgtttaaagagtacgttatggtgttaccagcacaagtacggaaaagtaaaaggtgtgtgtggtacaacacttagtggtacgcaggatacaagataaaccctaccaacactcgtacaatgtcggtacgtagtgtatgtggtacagtggttgtaccctagtaaagaacgttcttgctcatttgttaagccttgtaaataggtgtatgggcgcctagatacaagtcgatattatattatttgttatatgcttgtcatactgagtctgtcgattcatagttctactttcatgtgtaggtaaaggaaaggcgaaggc

SEQ ID NO: 397016 - DNA, 685 bp, Cannabis indica
agccgaatgttggatttcattggggtgggagcagtaaaagctcctaaaaaacctttgtcagttaaaagttgaagggtgaaaggtcgttgagagacagatatttcggaggaagaacgaccaatctccaatcccaagaaaaaacgtaaaggacccaggtctttaagttgaaagacagagttaagttgctgtttaaaatctgaaacaacatcatcattattagaggtaattacaatgtcatcaacatagcttaatagggcgagaaaaatgcctttatcaatttttattaacagtgtgtgatctgaaagagactaggtgaaaccagtggatagaagataattactgagttttgtgtaccattgtatgtctagaggcttgtttcaagccataaagacttttggttaacttacaaacagcatttgggggaatttgtcccttgggtttatacccttttggaagtgtcatgtagacagtttcatttaaatcaccatgaagaaaggcattgttttatatcaacttggtacagagaccaattgttaatggctgcaatgtcgagcataagttttaaggtattaaactttgcaacaggggcaaaagtatgaagataatcaataccttgtttctggttgaaacctttggcaaccaatcgagctttacatcgatctacggagccatcagcattgtattt

SEQ ID NO: 397017 - DNA, 557 bp, Cannabis indica
caatatttgtgaaattttaatttattaacttttattgataattaggtgcctaagatggatgattctaacgaggagtttcaaatattatttggtgatacttcttcttcatcaagtgaggaagtagttggtcaagttctattggttaatcaattacatgaaatgcatcaatctcaacaaattagaagaccattgcgcacttcaaatatgtctggacgtgaatatttaattgagctactaaatggtcatcctgatagattattttacacaattagaatggataataacacttttagatctttatgtcgtcgattagtagaaatggaagtaatagaacatgataagttaattagtgttgaagaagttgttgtcatgtttttgtggattgtaacacataaccaacgagttagaactgtagctgaaagatatcaacattcagtagaaactgtttgtcgtcaatttagtagagtgctagacgcattgtgttatttaggaaatgaagttataaagcctattgactttaacactgtgcaaccagaaattcaaaataattcaaagta

SEQ ID NO: 397018 - DNA, 672 bp, Cannabis indica
ccttccctcctccaatccctcttgccaaacaaatagatttgttaatcttctcccatctttcctctccatccatccacttctccctcctacctaacatagtattaatgtttagttacctacgaaagttctaaaaatataactgaaatattattaccgtaaaaaattaaacttaaaaatttatctgcaattgaagttaaacttaggtatgtatgccacaaatttcataatactccattatatgatttaggcctttaagaatttgatttcgcactgtagtaatttgtgaatgatacttctaatatgatattattgatgaaaatgtggcctttatataagctgattacatagtagaattaggcaacaatcaaggaaattaggaaagaaaatacaacctaaactaagctgtcaaaaacaccctaaatataactgtacaaataactctagctatttacaaagatatttctacactccccctcaagctgagttgtatatgttatacaaacccagcttggatttgaattcttcaaaacttgttcttggtagggcctttgttagaatgtcagcgatttgtttctttgtagggatgtagttgagttcaatgatctttgaattcaccttttccgaaatgaagtgtctgtctatctcaacatgtttagttctgtcgtggtgaac

SEQ ID NO: 397019 - DNA, 741 bp, Cannabis indica
gcaagcgtaagatgcatacaagaccaattgagtttaggatgtttgtgtcctgtttaagtcgcttacacagacatctagtaataagttggcaacctaaggcatgcaagcgtttattgggttaccgagattattgggtcatctggaccagctcgcagagtaaagaatcgatctttacaactcgtaggaggatctcaagagtcctcgcatatatctcagtatacgcgagtcttaaaccgttccttggtcctattctatgcgagccatatgaatgcgactagactctgtcatggtcacatcatcttgctgagtctggttcaggcgaggttcatacttaagaggtctctcactgacatctcagctttcctcaaggagagtgggtacacgcatcattttcattggagtccggtctcgagtttctaggtgagaaaatctcactattgcacatgcccctagtttcgcgactgacagaccaggtcatgagggaaactataagcgagaggcaggcgaagggatgtcacgagatggtgacctttggttgtcaaatcgagggtttcaaaatgacagttgtaattatgatgtttaatccatttggggtgccacgtcacgagactcttcagaatccgtgtaggcgtggttatagataaccgttagattgggagaccttaggcattcttctgtcacgtgtctcaatcccaattaatgagggataatggtatttaagcctcctgatacgaaatgatt

SEQ ID NO: 397020 - DNA, 615 bp, Cannabis indica
aaaaagaagatggaaaatggtcggggcaatccgggccactttgaagccaatgagcgctctgcttctttcctgctgcctgagcaaggatgagaggcctttagcacaaagaaggaaaaggtagggagaaaggggatcgccttgacgaatgccccgagaggggatgacatggccagagaccttgcctttgacattaaattggaaagtggccgtggaaatgcaagcagaagttagttgaattatccgtggtgggaagttaaatttcctaagaatggccaagataaaagactactcaactctatcaaaagatttgcccatatccaacttaaccgccatccaacattttttccctttggatttaagcttaatggagtgagcgacttcctcggcaataatgatgttgtctgaaatgagcctaccaggaaggaaagcgctttgattgggggagatcaagtttttaagaacagatttaagcctgtttgcgattgctttcgaaataattttgtagattatgttgcacatgcttatgggtctaaaatctttgaccgaagtgggttgcttgtgttgggctttgtgccctaaataatgttgggttttatgccctaaataaaactcttt

SEQ ID NO: 397021 - DNA, 601 bp, Cannabis indica
tccagcatgtccagtagtttctgagaatacgttgggttgagttcttcgagaacgtgtggtccaagcactagggccatcctcaggttgagccctcctggaacgggtggtccttctggactgtggattggtagatcttcctgagcccatgggctcttttccagaacgatggttagtttcctcatgcagggtgttaatattctctggattttcagccataaagaagaaggtttttctttaaaagaagggaaggctttttctgagctttttcacagaggctctcaatgaaagcaccaaacggttaacgcagattttcgttaaccaaatttgagcctcaatatgataatttaacatagaaaaaataaaagctatagaaaaataaaatatgaacaccgggttttttatgtggttttgcaattaaaattctgcatagtccacgagtcaatcttattcagatttctgagtatttttttaaagcctctttcataagagttttttcgtctcctttttggaattgtttgccactatttaattgcatagtgacagttaattacaaagttgaccaaaatatgattacagtcattattcctaaaatcgtgggatc

SEQ ID NO: 397022 - DNA, 703 bp, Cannabis indica
ttttacacttcgaactcccctcctcatagatcgtattacacataggattgatagtggtatcccaggttccacgtcaaaattaactgtactgagtcgtaatacgggatagtcgagcagtatgggactattgcagataggcaagtcatttggacgcgagctgcgatttagaaccaattaatccatataatatattcaggatcacaggttgtagggattttagtggatattatagcccctctacctcgtcttctagtgattatggtaaattccttagacaggaaattatgccccaatctcccctttcacttggctttcaattaatatgcttaacacctttttttgtctcgtagaaatgaattttgagcgtctcgtccacaagaaaggaaaaaagaggctgaccatctcggaggtcccatcagacgcagaagtagagcccctaaagaggtccaagaagactacgactaacaagaggcgactaaccttgaggttcttgagactgagaattaagatccaatccccctccggcccctgcaaggaccgatgaccctattcctaatgcgacccaagcctctgcctccttgacccaagccctcgaaactttacctatcgaggctggaaaaactggcccggagtacactacagagtttggtgcaatatgctgccatcacttcaaatctttcctcccccatgaatgggatttaat

SEQ ID NO: 397023 - DNA, 501 bp, Cannabis indica
tttttttttttctattttttttagataagtgtcctttggccgagacaatagtttgccccttgtgactttatttattgtaaagaaaaatttgcattgttggatgactaacttttttttttcctttatatatctatctttacttcatcacctcgcatctttatgtttgaacttcatatgattatttatttgcgtttttaatcacaacctaaacaattatattttgatccaacttaagatactttaagagagcatttccattgatctcgcatttcttttaatttttcttaagtagttattaatctactatatatgtgtgcgagcagttatgttctgcctatgctttctggctcgcgagcagttatagtctgccttattatatgcgagtggtttattttttatccaatattatgtaagcagtttaaatctgccacatataatttaaaaagcaaacttcaacatactttgaataattcattttgtgaactattttgtacatttttt

SEQ ID NO: 397024 - DNA, 540 bp, Cannabis indica
tttttttagtttttcgtgtgtctttgttttgatttaatttgcttaatatgagtcaatttgaaagtaggtagatagcatgatttgaaaagtttatttattttttgagaaaaccgtgtgcttggtgatattacattctttattaatttcaattttgtgctttaaaagaacatggactcatattaggtaattttctagtaattgaatttgtttatgtatgctaattgtgaaatctggaaagttttttgaaaaactctagaacttgcttgcttgctctttgaggcgaaataataaataatgcacgactaggaaagtgatgtaggcatttttttgaacgattgtgtctttcaagccatccctataattttatttttgagccttaacctattctttgtttctacacaaattaagcctaaaaagataaacccatgaatatcgaaaaatttaaccataattataccataagtagatctttagtttggggaatttggatgggaagtttgctatgtgtgtgttgaataagtgtgaaaatttagagaatat

SEQ ID NO: 397025 - DNA, 559 bp, Cannabis indica
attgagaaattataactataatgtccatttctaatgggacccacaattaattaaattcacaaataactataaaaatatcaataattagtgctaattgtctttactaatccatattataaaatgcgatcattacaactttcttataatcaataaaattttcaagagtaggacacatatggcatctgcatccagaatcaagaatccagttatttgtgattctttgatctgataccatgtacaagtcaccattagaggagcaatgatttgagtcttctacatttgaagcagaatcatgcttcttttctctgtcttctttgagtttattcttaaactcaatgcagaacctcttgatgtggcgtactttcttacaaaaataacattttatgtccttctgatattttcccctggactttgatcttgactgcaatctgtgttggcttttgaaatgatcattcttgtagtgatctttacccatgttgttgtctcttcctctggctaggtaagcttcatccttgacattgtctttttctttggccatttcttgttctttggatttcaa

SEQ ID NO: 397026 - DNA, 1342 bp, Cannabis indica
gtcgatagtattgtcttatgaaccttctagactccgtaccgtgtgggacacggggattaggattatgatcaggtgtatgggcgctaggttataacctgggatagttgtatgtttatgttaagctttccttactgaagttgtcgactcacagtgctatttccatgtgtaggtaagggcaaagctaaagctaaggaatcgtgaggacgagcagatgaaggttgtacatgtctgggcggttaggcctggagcgtacgatcctcgagacatctgagctttagttgattagtcgttgggcgacacacttttaattataagtatagcaaacttttgtaaagtattttgtaaacgggatcccgaaatattatctatgtaatactttaagcttttaattaaataagaaaattttaattaatcccgagtttcaataacctcgttgattagcaacgagctgcacagtatgtttaaaatcacgttaacacgcctatgctagttagggtgttacaatttggtatctgagacgccaggttgtctttcgaagattgtgacgacatgtaaactcatcatcagcagttagctcgtttcatggtttattaagcttttattgcttagtagtttattttctatagtatgatttaataaaagcatgttgggaagcatgttagtagcttgatagtagaataggagcatgtttttaattttcaaataggcggcattagtaagtttctctttgatcacaatctgacaagactagctcttggttacgtaggctgttcagattagtatggacgccaggcaaaataccaggagccagggcaattcggttggatataatgctggtcaaggagctcagatccccctaaatgtccgtggccgaggtagaggtctcacaggcagggcacgtggctgtggtgatgttaacccaccacaggttgcccaagcttcccaagccgctcaagatgcccaaaattgggaaaataggtttgcagcaatgcaagccagaatcgaggaacaagataatgagattcaacggttatgacagtagggtgttcctgcaatgcctgctccagaaattccagtggcacctgcccctgctgtccaggccgaactagtgccggctgtgaatcggatggaacccctgtatgaaaggttccgcaagcaagcacctccagtttttctgggaggtccagatgtcatgaaagttgagcaatggctaacggtgattactagaatcttgaactttatgggcgtcaccggtaacgatagggtggcctgtgccacctttcaatttcaagaagacgcactggcctggtgggacgatggtgtccatgattcatgatgtcac

SEQ ID NO: 397027 - DNA, 522 bp, Cannabis indica
cgaatgggaatttaaacatgtgctttttatccatctttttagaccctcaatgcctgtataaagggaagaagagagttgatttcatcaagcaatttcagagagaaaaaaagagagaatacagatgcgaagtggagagatcaactacaatattggaggtattctttagagggttttcaacattctgctcttctctattttcatcttatttcttaaggttaatatgtgtgattgtgctctcataaacatgagtagctaaacatttaataagggttagatggagattgtttaacattgttctatggttattctaatatgatttattttccccctaaattctatgtattctatttcatttgtgcttaactacttttaattgcctgatcaccaattaattgtctatgattttgatgcgagatctgagaagtgagtgtcaattctgctatagtgaaatagaactgaatttcgatataggacgagagtacctatatggtttagatagcttatagggtttctgtgtttaat

SEQ ID NO: 397028 - DNA, 568 bp, Cannabis indica
ttcaacttgaatgggagtagcaacttcaaatcctattgtgtcaaagtcttgctcaacaacaatatctaccagatcatgaacaatagtacatgtgggattagaattttgttcaacatcaacatttacaagctcattagtattattggtttcaccaaaaaagtgaaattgatgtggagtgtcaacagtgttgatcagaaggagataatggggagttaaagtgagaggactcagatgactcagactgatggggtaaactaccaaagttggaagttggggtatgaggagtgtgtttggcacatgtgggaatcacaacagaaacaagaaaatctgaatggtaatttattggagaagagttgttggagagcgttgtagcataaggaaaggagttttcattcaaaattacatcatgagttatgtacaatctccctttagactccaaacacttatacccattatgattcaaatataccccctaaaaagtagcaaggagatgacatgaatttcagtttgtgttagttataaggtcttatattgggaaaacaagcacaaccaaaggttctaagagctt

SEQ ID NO: 397029 - DNA, 1224 bp, Cannabis indica
agacaccaggtcccagagtgttagagtttttcctctactttggactcacggagtgcgcacgctaccaaaagaaaatcacgtttttgtccaataccatattctatgacattctcgatatcgacgtggctgtgcacgacacttggaatcctcaaatggtcctcacttgtacggaaaatcttcacctcgtgaattaggcctcacctcagtggcccaaagtaaatatatattgtattttcacccatcagagggcttagttgacacgaaaaactctactggtctgggtatacccatactcggttctcctctataaatagaacattaccccttcattcaaagggttagaaattgaattcttaggacaagaactgagaattagggttcttcaactagggaaaaatacttgtcagaaatactttgaagcttttctagctcaataatattgactcgtggactagattttattaacactcgaaccacgtaaaaatcttggtctctccttctttaatttacttctttcttaaacttattattttggtaattttattgagagatgaggaaagaattaccaaagttttcatttagaacgatggttgcaacacaaaaggcaatggtcatgctgcctactcaagatggtaaaaatgataacgccaatgatggtgagaaccagctcccctaacaaacgcttaggtgggtgtgggggacagggaaacatcaaaagtaggtaatcatctgcacctagaagaccagtaccacgacaggcaagttattgatgatcccactaacaaggatgagcaggatggtaatggacatgaccctaaggatgaccaaaatgaaaactacaacaaagagtacgaagaagagtactatgagcaagatccagtagtggtaaggatggcacaggaactcacagatactcaaaaaagactggcaacattaggaagaattttcctaaaaattacaagaaactcttgtacaaatataagcaagagtcagcctcccaaaggaagacatccttgttccaatctcttcgtatcgctatcagggaggtctcttccacgggtcttgtcattcaaatggtttctgagatcatttccacgtgtccttttttttctcactttttgcctttttgtatttcgcttctaaatgccttcgaaggtccacgatggaccaattgtcatatgaacactgcctctctgctctcccatcctgttgggttttatgccc

SEQ ID NO: 397030 - DNA, 530 bp, Cannabis indica
aaactaaaaaacaacaaaaaatcaacttcacaaagactataaacaggggaggagccagagtcaaaattcaacgggagccaaactacattataaattaagtgaaaaataattcaaaatctattattaatattataattaaaattaaaatacaatacgtctctcttaaatatcatgaaagttatatataagttaatttatgctaatttttttagcaatttttttttcttttctatatacactaacaaataatcacttaaaaatatattttattttgttgcaaagtgtaatcttcactatagtcatagcatagcagaaaaagattgatatgtagtaactttagaaactagatgtgtagaataaaagttactattttatacataaatttaaatgtttttgctttttttaatttttactaactactcacataaataaataaaaaatagttgctaaaatagtaaaatcaacaagatttccactttttttaaacaatttttttgaaaaacattctgaagtggtaatggtctaactaa

SEQ ID NO: 397031 - DNA, 872 bp, Cannabis indica
agtacataacaggttagtaaggtttttttttaaaaaaaaaacctaaactaaaaataggtacaaaccaaaaattaaaaaaaaaaacaaaaacaaaacacttagaacaaaaataatataaaaaaaatgacataaaagattaaaaaataatattaactttttaaaaaaaattaaaataaaaataaaataaataaaagtgagattttttttacagatatatatatatatatatatatattgagattaaaagaaaggatagaaaataaaaatatatataattgagattaataaaaaaaggattaatattaaaaaaaaaatgacagtaataaaaaattagatttatatatatatcaatatatataattgagatttttttagaaaaacaaaaaaaaaaaaaagaattcagattaaaataataataaaaaaagaatttgtcaaatatagtacaatttttttatttctttcattagagatatcaagcaccacaaaagttattatactattatttggtcattttaataccagctctcaaaaattttaatttaataaataatttggagaattactaaccaattattaggcaccacatcgatatggagattgagcaccttaaggtgtcgcatagcaataatattacaaaaaaaaatatttatacaaagatcattcataacaaaaaaaaaagaaaaaaaaaatttgcatcatgttttgtaattgtgttttggagcataatgttaaaaattgatgtaaataaatctcacaaagttttctttttaccaaagtataatttttacatatctcattaaaaatattcttgcaaacttatatgtaataataaaaattaaaattctaattaaagttaataaagatatgtacac

SEQ ID NO: 397032 - DNA, 776 bp, Cannabis indica
ttcccttttaactttctatactttgctccacatgctgactttttccctttgtgtaggccggtttgaagttgccttacacttactctcgggctaaatctgctacttccaagagtgtggctctgttcgacaccttgagggcggaggcggacttggcaaaaaaggaagctaaggaggccaaggcagaaactggagctgttcggctgtagttgggcgaggccaacaagaagttttttgctgccgagaagaagatctccgtgctaacaaaggaccgcgaagttgctgatcgctttgaggagaccattgagatcttatctcctgaagttaacagtgttcaggatgagaggagttctctatgccaagttcttcttcggctgaaggaggagagggacgccaagatggctgaggcggaccagttgaaggagaaggtcaatgctttggagacagctggcctgaagctcttctttgatttctggaaggctaatcccaaggccaatttgactacttgggcgaggcaaaagacatgtaccttatgtactgcgcgacccaagttgcttatggtgggaaagaggcggctgcttaaacctccggccaagcccctggcccggttgctgatgcttctcctgttcgaacaacaaatcctccttctccagttggcttagaagaactgaaccaagagcctgggactccagctgtttaaacacttctctttttatctcctttatatatatattatatgtggcctcaaggccttttttaagacatcatgaccgactaag

SEQ ID NO: 397033 - DNA, 729 bp, Cannabis indica
gttattatttttattatcttttttgatttaaaaaaatagtagctactcttagctccaataccaaagatagtaataaaaataccacgactacttgtatatggatatcccaaggcgtgcacacacatgattgagtaatgatgcatggtatcacgatttgcatgaacatagagaagatgttttctttatctttttggtttggggtgaagggagctcttaatttttgacttgttgttgttgttgttgttgtttttattaaaagtatagttgacagctctcttggctccaacaccgaaagatagtaataaaaaaaccacgactgctagttcatggatacctgaaggtgtgcgcacacaagattgagtaatgttgcacggtctcagagtttcaatgcacttggagaagaggttttctttttctttttgtttcggatgaagggagctctcaattttcctcatctttttcttattatgattattattgttgttattatattttttgattaaaaaaggtgagagctctcttggctccaacactgaaagatagtaatgaaaagaccataactgttggttcatggataccctaaagcgtgcacaaataggatttagtaatgttgcacggtctcagggtttgcatgaacttagagacgaggttttctttactttgttagtttggggtgaagggagctctaaattttccttctctttttattattatataattcatctggtt

SEQ ID NO: 397034 - DNA, 1544 bp, Cannabis indica
ccagacctggacccggacccagagccgaaccacgtaccccaaaccccggatccctgagcttttaaattaaaaaaaaaatcattaaaaagtataacttaaacaacatatttttgtaaactactactaatactaaagaagctatttttttgttaattttttttaatgtttcaattgaaaatcaaatccatgacttaaactcactttcatttaaaaaaaaaaattaattgaatattttgaaaacacatctatgtttaattattatatatatccaaaattttttaaatcaacattttgaataaaattataattttaatgatgcttaacgatgatgtcatgaaaatttattttttaggcaaaaatgatacttaacgatacttttgcaatattacttaatgatgatgctatgatacttgatctttgacgcaaaaacaatgcttactgatggttttgcaatggtctgcgataaaatttgataaaaactcttgtgatatgtaaattttctctagaatatcagtttgagatgtgcttttttaaattatagtattttctttttcaagatttacatgtttaaaatgtgtaaaaccttaaactataaagtgtgtagttaacaagcttgaagttcaagaccataattaaaattgttgctatgtatactccaaatgaagattctacatatattctaaatgtcaagatttcgagaaagagaaaaaaatcaaaaaaaaaaaaacggaaaaaatcaacctcaaattaattaatattcgagtggaaagacatgtcttgcatgaatttttatcgcatatcctatattaagtttccatagcaccttcattacaaatctttgcctagatttaagtttcaccatttcatgacacaacagtacttaaacatcgttttgctctaaagtactttatatatttttagagtttaggtctttagaaaggtaaaaaaaactaaaaccatagatcatcatacagagaaaatgttgcgttttcgattaaaagcataaaaactgttcttttaatagcgtttcatgttgtcaataggctctttcctaattaagtaaataactttatctatttgttttttaaaatgcatagttttgcttatgattatacaaaagtttggcatatactctgttatgagcatatatagagcttcaagttttctatatcaagaggttttttaatggtaaaatatgaaaatatattaagaaaaacaatgggaaaatcaattaatttgaaaaatatggcaaatttttcgttatataattcaagaagataacaactttttagtgcaagccgtacgttgacatattattgtaagattcccatatttttcaataaaaattatctaaaatcataataaacacttgaccatcttctacgatgtaaagtgtgtgttaaattaaatctcaaaaaatatgttaatattatattagattggggtgtgttttgtaatattttttaatcagttttttattttttaattagaaaagtaaaaattttttaaaaaaatatcttttataaaactgttttattttttaa

SEQ ID NO: 397035 - DNA, 746 bp, Cannabis indica
ctaaagtttttcatctgtgcaggccagtctaaaattggcctacacttactcccaggctaagtctgctgcttccaagaacacggctctgtccgacaccttgaaggcggaggcggacttggccaagaaggaagctgaagaagccagggcagaagccggagctgttcggttggagttgggtgaagccaacaagaagctgtttgccgcagagaagaaaatcactgtgctgactaaggatctcgaggttgctgaccgttttgaggagaccatcgagatcttatctgctgaggtaaacagtcttcaagatgagaggacttctctgcgagcagttcttcatcggatgaaggaggaaaaggatgccaaggagggggagctttcggccgaggtggacaggttgaaggagaaggtcaatgccttggagacagccggtctcgagctcttctttgatttttggaaggctaatccccgggccaacttcgactacttaggcgatgctaaggacatgtaccttgagtactgcgcggcccaagtggcttatggtggaaccgaggcggctgcttcaacctccggtcagactgctgatgctcctcccgttcaaacaacagatcctcctgctccaattggcccagaagaaccgaaccaagagcctgggagtccagctgtttaaacactgctctttttatctcctttttatgtatatatatcttattcggcctcagggtcttttctaagacatcatgaccggccaa

SEQ ID NO: 397036 - DNA, 1396 bp, Cannabis indica
gggggtagtaaggcataccacacttgaaaatgtaaacagaccaaatttaacaaagttaaaaagcagaatatctattaaaacatgaatgtaaagtgttcaaatcttaaagaaaagctctaaaaaagataagggcctggggacaggccttaagtgtctcccctttcagaagaaaaatatatgtataaaaacataagtaaattgtcttaaagaggggagaagggttaatatatataaaaaaaagaaaaaaagagagataatgatgatggtaatggtgaaaacgactagcttaatcaattcaaggcggaagaggaggccccctgcgctcctccagcaaggcgtcaagtctcttcttcttctcccagaagcggacgagaacctcctcaggctttagatagatgtctagcttaaggttttgaccgttagtctgctaggccataaagacgccatcatcaaagcgtatggtgcagtgctgacaggtaacgggggccaggagctcatctcttttcgccttcttttgagcctgatccttgaaatcacgaaggtccttcacctcaacggttaggttggctttcgtcttcaagtcattctagtgcagctcctccaggaacttcagcttggcagtcagatcctcaacagcctccttggcctccctaagctcgcatctcgccttagacatggcctcatcccgggccttcatatctcttggcccggagttgggtcaggttggagacaaagtggctcgtcaactttgaggcaaatggagtgaggaaaggcccgacaaagcggttgaaccagtctgtcagagggtccattttcaggtcctaggcattccttaaagcctcgtcacgcaaggaattctcctgggcctcccttaaaaccttttttaaagcttcaacctcgtctttccccttcgtatattcagccataacatagttgtgcttggcgatctggagcagttgtctctccacatcggtgggaacgggagtcaagacaatgctgggaggcacagtgtattcttccgcttcaagtgggatccccgagtcggagctgacggccggagtatcaaccctcctgggctttttggaagactcagcctccaccattttgctcttctgttttcaatccaggggccaggatctcgccctactcttcttccgtgacctccctgtcttcatcgaacaagacaatctggcctaaggggatgctagaagaagacctccctggggtcaccatctggtcaggcgccggaggcagagcggagtcgggactataggtttgggcgagagttgccaaaagctcatccatcggcttggctgcttcaaaaaaaaaacacgaacaagtaagtgtcagaatggccacgagaaaatatgcacacaaaaacaaagcagtaaaacta

SEQ ID NO: 397037 - DNA, 559 bp, Cannabis indica
agatcaaagggtgaaagcatcacaggcaataagacagacttcaagcagtccttccatttcaggaaagagggttgaagacatgccataccacattgatctttcttggacgaaagacaacgtgcctgcgagagtcatgttgaatttttatgaagcaagctttggcatacgcaaaggaaggctaaagttgcttaaaaattcaagcaatgactttgcttgaaaagatcaaaggatcaaagcatcatggggaataaaacagactttaggcagtccttccatttcaggaaagagggttgaagacgtgccatacccccagtgatctttcttgcacaaaaaacaacgtgcatgcaagagtcatgttgaatttcggcttccacgaaggaaggctaaagttgcttaaaaattgaagcgatgactttgcttgaaaagatcaaagggttaaagcatcacagggaataagacagacttcaagttattcttccattttgggaaagagggttgaagacgtgacatacccctaatgatctttcttgcacaaaaaataacgtgcatgcgagagtca

SEQ ID NO: 397038 - DNA, 606 bp, Cannabis indica
agctcaagtggccataggtgggtgtgtgagtgttggaggtcctgggttcgagtcccaggtaaaacatgttgtaatatataaacgcttaaatcaaaaaaaaaaaataaaacacatatattgagaagtatttgaaatgtggatgaaatctcaattgcgagcgagagatatgagcttgaagattagtattaatgcccatgacttccagcgatcaagttattcaacatgaaatcgaataaagactttataagtgacccattaagcaattattattggaaacgttactctttagatagaatcagattgagcaagatgttgagacataaaatataggaacccaattgaaccaaatcggcgatggtagaaagttctattaagagttagtcccacattgctaatgtttagaaataaattatgatatataagatgaatgggccactcctcccataaccaattggttttgagatggaaccctatgattcttaacatggtatcagagtcacttgtgatccgttgtgagcccaaattgccaccggtcaaaaagccgtttgtgatccgttgtgagccaaagtgtcgccagtccaaacagatacttccactgtctcccct

SEQ ID NO: 397039 - DNA, 502 bp, Cannabis indica
tacatgtcaagacaacacgacctagagtgtttggtttcgagacgacttggcctgcattttttagtcactgtgtgataagttcgtaaaagtattttgataagattgtaaaagtttaaacacgagatcctgacttatgtaaatatatttatatatatgttcataaattttaatagtttaaattaaaaattcaatttggtacgattcttgaggaaaatcctttaattagcaaaggtggcacattaattagaaaatcactatagtgcgctcaagtatcagggcgttacatctctccttcccaaaaatgttcgatcctccttctccctaggttctgtccctaattataggagttctaaaaatgacagttattctctttttatcttatctaagtaatcattcatgaaacgtgaacaatcctcacgtttcatattcataacatgtggataaaactaaataactgctacttaccatttttttccttattcaggagtaataactgctggtc

SEQ ID NO: 397040 - DNA, 883 bp, Cannabis indica
cccacagcaaaggagctatgggataacggaattgaaatgtattttgaccttgaaaatcaatctcagattttcaggttaattatgaaacttagagaaataaagcaaggggaggacaacggcttactttacttctttgaaaagaatctggcaagacttagatcttttagatacttatgagtggaaatatgcagtagatggcaaacaccatggcaaaccagcaaactggaaaagtaaggcagagagagaaaaggtaggtcgaatcccttctgcacatgaagctgactccagccccttcattaaggagcagttggatcaccttcatgcattgctgaacactacctcgacctcatccagtattcctactgcttctattgcatatgcaggtaacaaagtatcagaaataaatgctctaaattgttattaaaaatcatccactacatggataatagattctggagctttagatcgtatgacaaatctttctaaattttttgaatcatatatatcttgttcaggagatcaaaaagttgaaatagctgatggtaatttctcatccattgctggaaaaggtttaattaagatttctaaggggatagatcttaaatctgtcctccatgttcctaaatttacttgcaatctcttatctgtcagcaaattatctaaagattctaatttttgtgtggttttctatgaatctcattgtgtttttaggaccaaagttcggggaagacgattggcagtgctaggatgattaatggactctattatttcgaagataaggcttctgaaaataaaattgctcaaggatttagtagcattagttctctttctgtttatgatcaaataatggtttggcattatagattaggccatcctagttttt

SEQ ID NO: 397041 - DNA, 547 bp, Cannabis indica
accaatttgcatcatttgagttgttgctagtagcaatgttggcctgtggtttctgagtttgatgcaagccactgctactggtgtttggacctgtctgtgaacttaaaaaattcttgtcaaaccggtaaaagcaatcagtagcagtatgaccatacctcaaacaaatttggcattgaactttgttatccagattggaaccaggtctgcctccacgattgggaaaaaaagtgcctctgccagaagcttgaccgcgatttggaaatgaattgccaaactggttgttaaagttcatgtttccattctgagattggaaatttccacggccaaattgctgtctaaaccttctccaggccagattggcttccatagttgagtcttgatcatcagtaacaagattagcactgagatctagttcttttccagctttttcaatccttgactcagatgcaagaagcagagcctcaatttcccctacagtgtattcttcaacccgagtatttgttgagatgacgaaggtgtcgtactcgctcggaagtcctttgaaaat

SEQ ID NO: 397042 - DNA, 562 bp, Cannabis indica
tgaatgaaaattataatttattaaacatataattctgctaatacaatagactgcagagcataaagaacattactcttagtaaaaagacagtcacaccaataacaagcaccacgtgtcataccgtgcacgactttattagcaaaccatttaacatgacaaataaaaatattatctaaaaaagaaatcataagctgacatttttgaacaatttactaatcttccgtccctattgcaagccacgaagctagtaccaacctggtttgtagcttcaaaaacagctccatcaacaataattttgagcttacctactgctggtttgatccaataatcgttgttgtcaacataatatgagacttgatacttaattgcactaatataaatatcataacgaaaaatatgttagacactattaatatcttttaacatttctcaattagttatattaaaaaaataaattagtaaaaattgaatttacaatgggaaatttgaattaatatgcttaaattacctaataatttttcccctaaatgcaaagttagtaaaattggtcatatatgaccac

SEQ ID NO: 397043 - DNA, 540 bp, Cannabis indica
aatccaagataagaagttagaaaattatcagctaaaattgttggaggtaatagcttatgaaggtatcttgaatactaagagataagcaaagcatcaacaaatcatagattaccaaaggagaagttgaaagtttcaaactataggtcatctaccttatggaggagacaacaaagtaaaatgtgcatggtttcgatttttttttttcaaagaatgaagataaagaaaggtttaggcacgactaacaatatggttacaacatcgatgagagacaactaagagggtgactactcgaaatagatcacaactacacaactaagagattgtggatgcagctttgtagtgggtgtacaacaaacaactacagagagtagatggtaaattcaaaacttgaggaagaggagaaattaacattcaagggtgacatccctagattccaaatactcactgatacaacaacaacagtgtggagtattgcttaacgagaaaaggttaggaaagcctcacttagagacaggagaaaagtgagacacaattaggacc

SEQ ID NO: 397044 - DNA, 711 bp, Cannabis indica
caaccagttcattaagcagaaaaatagatgggaatcacaggaggaagtccctccccttgatacaaaatgtgttgttcataggcgactctagcgcccttggccaccccatccgccacagtgtttaaactacggttaatataaaaaaacttgcacacaacaaagttctttaaaactttaacaattgaaaaatagatattagaggatttccactcaggaggtctatcttgagtagaaagagccttgacagctaccaaggaatctgagagaatgtggacttctttccagccttcctcaatcgcctagtttagcgccagaagaatagctcttaattctgcttttagaacagattgcgaatgagatctttgggctttaacaaaccacctgccagttgaccgctccactccaattgcagcaattcctgccactcctttaatccaggaagcatccgtaaagagaacatgtctggcctcctcaattggagagcacatatccatattatcatcttttaaagacatatggtttggatgtaattccatgattgtcccttctgaacaagcaagcgcattcttgatctctcgaactgcactaatgatgttaatgatagctgaagtgggattcgcaaccaagttcctagtccaagtggcatttctctgatgccaaatttcagagaaaacgcacccgatgaaattaagcaactcctttctgtcctga

SEQ ID NO: 397045 - DNA, 816 bp, Cannabis indica
tttttagctttgtctaatataaaagttattattaaaatacataaaaatattaaatatatgttattataataattgtttaaggtggtttaattgttaataaagattatatttatgatacaattttgtccatgaattaacatcaagtgtcaatgtgggatcataaaaactaaacaactcatatattataagaaatctgtaattagcacttttattttatttttaaataagtttaatgagtttttcttaatacttcagtatctaatcatattttagcagcaaaacaataaaagttcaatatgtatgttgtaacttgtgactctattcctatttagttacagcttaaataaaagttgaaaaattatacttaaattgaaataacattactcaataaacttgtgaatgaccaagttcatgcttttatcacataacatatctcaattaaatatactgtaattaacatctttacaaataaactgaactcaaatcatattacttctacatctctacacaagtatttttcagattagtaatcttatttctttgatgatgatactaacgtgacaatgtgactatcccctcggtgctagtgcccccagaatttcatcatgtagggcagtaaggaaccgagtaactaaattacaattgttatggtatgaagtaggagataattcttctgaaagtgttggttcgacagtagtggggctacaaattaagccccacagcccaaagccgcaaagaataaatagaaggaataattacataagacaccattttttgtaaaatatttacatttttacgttcaaagaatatattttt

SEQ ID NO: 397046 - DNA, 945 bp, Cannabis indica
gatcaggggaaggtactttaaccataatccttcaaagtgtaatacagatgcccgtagcatgtcttctaaaatttgaatggttctttcggattgtccatctatttgaggatggaatgttttactgaactttaattgtgtacccatagctcggcgtaggctctctcagaatcttgatgtgaacttcagatccctatcagatacggtggactttgggacaccatggagatgaaatatctctctaaaatatagttctgcatattgatcaatggacaagtttgtctgaacaggtagaaagtgcactgattttgtaaacctctcaactatgacccacacaaagccatactaccttgtagtcctaggtaattcaagtacaaagtccatgctaatgtcttgccatttccattttgaaagattcacttgctgcgcaaacctacgagcctttggtgttcagcttttacttgctgacatgttaaacactttgcaacatattttgctatatcattcttcattccaggccaccagtacatagacttgaggtcttgacacattttagttgtccctaggtgaatagagtaaggagtcgtatgagactcattctgaatttccctcttgatatcataatccataggaacacaaatacggttcataaaccgtaacataccattgttatccactgtaaaatcattggtcttcccatctcaaatgttatcttgaggcttcactaagtcaaggtcttgaagtgtccttctttaattctttccaagaggtagactgcaaagtaatgttagctaactttcccatgataaactcgatgttagctcaggtcatatcatctgcgagttgtttggagatttacttcattgtattcatatggctttgacccttcctacttagggaataaactacaacattgggctccctaggatgataaaggatttcacagtc

SEQ ID NO: 397047 - DNA, 553 bp, Cannabis indica
atgttaccttttttaattacctacttgccaatcattaattgaaaaatatttttatatatagaagttattaaaataatataaataaagttaattgtttgtatatttttaagtattaagggtattattgacttttatagctaatttacactttgtgtattggagcataaatataaaaaacggattaaatatagttttgtaatatattttaggctgaatttaactcaaaatatagatcattcattagagataatcttaggctacaaattttgccaccgacgtcatatgcccgaaaaaatcccatctaaagccttttttttttatagtattgttggtaatttaattttggcaaatgtttcttatttattataggtttccattcgcagttgagggaattggttcgagctatactaaatttgatatagtgaattattttttaatctattctatttgtgtcaaaagctgttagttagtttttagttagttggtagtttgttgtagctgttatagcagttagagtttgttattgccagctgtaattgttagttgtactctc

SEQ ID NO: 397048 - DNA, 528 bp, Cannabis indica
aaaacaacattagaaaaaccatggcagccctaatattaacgattttaatgtttctgctacaggatttaatggttgttttttgtttgttctgatgttattgtggtggttctgtctgtctgatgttattttcggtgtttacagtataaaaaaaaaaagtcccaaggtagtataaaagttatttttgccgtgtggcagtatttttgtaaaaattgggtcaaaatctagtatttttgtaagttttcctttaaaatatttaagatattatttctaaaaaaaatatatatattgaaagagaaaaaaatatatgtaaccttttagaggctcaccatgctaggctgctattgcttaatatcaaccaacactacaaaaaattttacttttagtcacaacaaaatttgtgactaaagaagaaaaaaattgtggctaattgtaaattatcattattatattgtgactaaaaggtgtgtggctaaaagtattagtcacaaaaattaccattgttatgactaaatgtatttttagtcacaa

SEQ ID NO: 397049 - DNA, 653 bp, Cannabis indica
tttggtttaagtattgggtacaatcgactgcgatactaacggagatttgggatatcggaggaggaattaaatcttctaccagaaactaagaggttagtgtttttaattttctgttggtattttattttttgtgtttcgaaaatttttgtaattggtatatgaatttatatatatgtgtatggttgattgtgtaaattataagtgtataattttgtttatatatataaaatgtatatatatatgtgttgtatgtttatatagaatgtatataatatatatatatataatatttataccgtatataatatttagaaatatggagttttgttttaaatttttatttacagtatattgtatatacagtatattattgtatatacaatatatatagtgtattattatatatattatgtaatagtaaatgtattttatagagtttattatttaattttgttaagaaatgcatgggagtatcgacctattagtctttgtagtgtgatgtataagattgtggcgaaggctgtggctctaagattgaagggtaccttatctccgctaatttcttcatttcaaagtgcgtttgtgccgggtcgctctattcatgataatgtgatggtggggttcgaattgttacattctctctttaagaagaa

SEQ ID NO: 397050 - DNA, 438 bp, Cannabis indica
ttattctccattctcgtgccgcgaactcatcatggatattacgagacttcttgccttttggtcgactagaaacgataaatgaggaagaaccaccatcatcaataggttgagcttgagcatgtaattgagtgattgaaggatcaattgatgctgaatcattatattgattaaacatactctgaatcatttattccacccctttcaccatctttttgtcattctaactccgtatgagtaaagactaaaacaaatgatagagataatcaagtttgtatctagggtcaagaaccaaggcaattagaagtgcctcattacaattatcaagctttccccaatacttgtcatacttgactttcatgttatgtgccatgttcctcaacaactcatcctcatcataatcaactgaagaatcggccaactcttgctgaatattgcata

SEQ ID NO: 397051 - DNA, 543 bp, Cannabis indica
tttaaatttaataataactaacagaaacattaatataatttaataaaaaaattagttaaaagagacaaaaaaaaaaaaacaaaataattaatatctattcaaaatatctataacaaatattttgcagtggcataaactaaatgaggattggggtgtcggttgttcattttgatactacaaataccaacaaacaaatataaattccttagttcaagtaaattcatacacaaaatttaaaaattaacaagtacagaaaatatgtttgcaaaaataccaaaaatttaatatattaattattttctaaggtttccaacataatgaaacacagcgtcccggtaggcgagagtcaaagataacattagttgaatagagtagttagctcatctaaaatggactccattctagcaaccttttattttatcaaaataagaatatccaacgttgtgttggtggatgagagtcaaggttattcttattttaagagcttctaccattgtttcatattgtgtaaatttatttctaagtagtcaccataggggagag

SEQ ID NO: 397052 - DNA, 864 bp, Cannabis indica
tgacttaattaattatgtatatcgtaccacattatcctttccgtttggtttgttaatgtactcttacttactcaattattacgttcttaaactaaaaaaaaaaaaaaaaaaattagtcatttttatttttatttatttatttggcaagtttagctatcatcatcaccatgagaggtgattttaggtgatcatgagatgatattatatatatatcttttgcaaagtgatatgatcacccaccttttcttttaataaaaaaataataaatttaatatatatataagactaattaatagtactcacaaaaatatctaatgaagtagaatatataaaaataacatatataatgggtctttattctttaacatcaatttttaattgagaatttaagtaatcataaatctaaatattaacatatgattgaaaaagaaaaaagaaaaaaaacatataaagacaagttcatataccatccaataataccacaaaatcaatctaaacttaaaaattaataaaaatgaaattaaccattttaatttgaaaatttatatatatatatatataaatgattgaaatttgttaggtttagcttcttaatttcaattcaagtgatgttaagttgaatggactgcaaaaaataaattaatatatataagagtaaggattgggcaatttggttaaaaaaatatttttcttttaaaaaatatgtatttgtttatggtctactcaatctcaaatcggtcttgataggagtaaataaatttattgtattgtaaccctaaataaattaataaataaaaatcaggctagggaggcatattaaatattattattaaagacataatatagattttttttttaaaaaaa

SEQ ID NO: 397053 - DNA, 784 bp, Cannabis indica
ttctttggcagtggtacaatggccccagacatggctgaagctttaacaattaaagaggggttaagttggatcaaggatcatgaatggcataatgttgaactcgagtctgattgtctctcaattgatgaagctattcgaagtaacatcaccatggtttcgcctcttggggagtggtgatggactgtcaaaagcttctatctattttaaacaatgtttctttgtttttttattaaacgatctgctaatatgactgcgcacagcattgctagagcgtcatattcttttccagatggagttttcagtgggagggacgttcctactaaattacagtcttctcttttggctgatttagcaaattaataaaatttcaattgccattacaaaaaaaaaaaaaaataagaaactacaaagtcactttaaaaatttgtaaacaattatttttttttctttattatagtttatttgtgtcgtaaacacgggcgtaagtaatgactaaacgatcttttatgacagttcatggagaatttgattgaactcctttgccaatgattcaaaataaaatataatattcaaaaacaagtaattaattatttcttttatatagtaaaattactagggtgtgtaagagaattctttttttttttttacgattgtaactcaacagatatgaatgaagatcaagttacaatgtttacgtttggacaaaaatctttccaaactaattcctcatcaagccctaaagcttcctttgccatatgatgtgcatgggtattgttatctcttg

SEQ ID NO: 397054 - DNA, 1886 bp, Cannabis indica
ggattgggggttaagacaatgccaggcggcactgtatactcctctacctcagatggaatccctgagcgggagctgggggcaggagtgtccatgcgccgtggcttcttaactgcctctgtctccaccatcttgcctttacgctttcagtccaggggaggaaggattttgcattcttcttcttctacttcctcttcctcgtcgattaaaatgactcggtccaggggtatgctggaataagtcctcccgggagtcaccacagggtcttgtgtctgaggcagaactggttcaggactgtaggtctgggcaagagcgtccaggagatcatccattggcttcgctgcttaaagaaatagacaaataaaggtattagaacattatcgaggaatcatgcatgcaagaacaaagtaatgaaactaatcttaccctgacgatctaattctgccctagcaaaagcatgtagtaaaaggctggtgtcgtcgtcccctagaaagctgtccgaggggagaaaccatgtaaagaccgcttacctttaatttagaaataagcagataattagggcttgattatgaaaattatttataagtattgaattatttatttatgttgatttatttgaattcataaagcatttttatgtcatatataaaaattttatatttttgcatgttttgtgtccggcaacattggaacgccgtgttcagctattagaatcacatcctagtatttttagtataacaggacaatatagttagacattgggaatgtcaggaatagtcagaatttttgaatttcccaaaatacccctaagtgccatttttccccattattttgttgtcttttgtggtatgtttttcaataattaaatctgatttttagttatttaatggctaagacttatattaataaaacaaagttttatctcattttacaaaaataaggaaattggaaaaagttagaaaacactctctccttctactctctctcgaacattcctagagaagctagggtttgatattttcttcaatatttcaagtaaaatttagcaagttttaagtgatttcaagctctaggtaagctcccaacactttgccttttagtttcttgaatttcaagttagtgaaattgcatgattttgggtatttgtgttctgttgttgctgttattgtttgatgttattttcagaggtttatttatgttagattatgttgatttaagcttgaattggtggctattagtatatttaaccaagttttgagttttagaactcaaacttggagctttaatggtattttagattctgagcttgggttgttgttttattgcttggaaatggtttattagggtatgatatgcaggtctggaaggtttggttaagtttggaatcgttttggttagggtttgaaattgtttgggttttctgggtaaaaccggttaactgattttataggtacctgtaaaaccgagtaaccaatttctgcagcagggttcccaaaaatttcagcattgcgatttgcgttagttttaggtttctggttggttaactccctgccagtttagggtatttccatattaagttgctgtaaataaggttttggtttaaaacctaagtcccagttgtgatttagcgagtcacttattcgtgttgttatcgatgtgatttaggagcttataatttgccgagcagttgttctactcaggttgaccagcacacctgaattcaaaattgaggtaagattagtataatgtcatgcatatgctattacatgtttagcgtacatgttgtttatgcctgttagattacattgagtaatagtatacctagagttgtatgattactgaataaatgtatgttggctaaaatactgatcgatgttgtcacatcaata

SEQ ID NO: 397055 - DNA, 559 bp, Cannabis indica
tgggatattacttttaaaggagatccctttgaacgacacgtgtgcatgtcctcatgtgataacctgcatcaattaagtacctcacgatggaaaggctacctaccaaatgaacggtcaaatggtctcgtagtattgcacagcctcatttgtctgttgagtaagaaaacctagtggggtaagagggtatgccctggcccacctacgggcctataaatacctcccatttttatgtatagagggagaacaatttttatgctaaaattcctaaagagctttatttttagagagaaacaaaaggaatccagatattgttattgtaaacacttgtaatactcaaacatttaccaaagaaggctaatactactgactcgtggactagggatcattaacgtccgaaccacgtaaaaatctgtttatctattatttaagattttgcattccttaggctcttattaatctgtttttgaaaatctcagtaaatagtatcaaaggaacttatggatccataatcataaagtacttgatattgaaggttgttatcccaaaattggcactctga

SEQ ID NO: 397056 - DNA, 1383 bp, Cannabis indica
ttttaacctgagggagaggaccccttcgtatttgggggtaaggtagagagatcccggattcctctaatcttagcgcttaaagcaagagattttttatgtgaggggtgtatcggtttcctagcaaatgtagtggatactacaaaggaaccaccagtgggaccggagcatgttccagtggttcgataatttctggatgtctttctagaggagttaccaaggttgccactgaagcgcgaaattgattttaagattgatttaatagcaggggcagagcctatatcaagagctccttacaggatggcacctaaagaactgaaggagctgaaagtccaattatagggaatgatggatttaaaatttacaagaccaagtacctcaccttggggtgcactgattttgtttgtgaaaaagaaggagcggaactttacggatgtgtattgattatcgagagttaaacaagttgacagtaaagaacaagtatcctctgcaaggatagatgacctattcgatcagctacggggaaagaccttcttctcctagatcgatcttcgatcttgttatcactagttgagaattcaagaaaaggatgttcccaatacagcttttcggacccgatatggacactataaatttctagtaatgtcctttggattgacaaatgccccgacacatttatggatttgatgaaccgagtgttcaaggactttctagatgattttgttattatctttattgatgatattataatttatttagacactgaaaagacatacgaaagacatctttggatggtgttgcaacgcctcagggagcataagttgtatgccaagttcaagaaatgcaaattctagttgccttacgtgagtttcttggggcatgtggtgaataaagatggcattttggtggatccagtgaagattgaggcagtacgggactggcctcgacctaagttagtaactgaggttagaagtttcctgagattagcagggtattatagaagatttgttgagggattcgctaagatttctatgcccttaacagaatttactcgaaagaacagcaagtttctgtggactgataggtgtgagagtagtttttaggaattaaagcaaagattaattactgctcatgtgctaaatttacccgtcagtgatgaaaagtttgtgatttattgtgatgcatacaaacaagggctaggctgtgttcttatgcaatttggaaaagtaattgcttacgcatccagaccactgaaagagtatgagcagcggtatcctactcatgacattgaactggcagcagttgtctttgcactgaaagtttggcgtcattatttatatggcaaaaagtgtgagatctatattgatcacaagagcctcaagtact

SEQ ID NO: 397057 - DNA, 610 bp, Cannabis indica
ttacaagttaaaagttctatgtacacgcgtccacatcgaatttgatattctttcttcttctatttaattatattttcccctttctttttctgttacatttatataaatatacatattttaaaaaggtattgtcggagtatactctgctttatatggttgcactaaacatattaattatgataatagtgttttttatttttcttttaatttatttcttttagaaaaagagtttaaatttagtaataatatcttcatgcgtctcataattatattgagcatttcttgacattctttccctttatttataattaaagtgtactatataaatattattaattaatatcatcatatatgtattgtgtgagttcgtattgcgtatatgaattcaatatataacacgtgatattataacgttttaaaatacaaaacccatcttttaaaaaatatacttacctatatatgttacatacatacatacatataagatgtagtggtgtaaatgtatattgcataagtgatcacgcacaaatttaataatatagtattatgtttggtttttccttttttttttttttttttatttttttttttttaagtttttttaaacact

SEQ ID NO: 397058 - DNA, 1105 bp, Cannabis indica
aaaaaatctttttcttttaagttttgttaatttaaagaaacaatatgaagtttgcaaaaataaaaagaaatatgtagtattgaaaattatagtgaaagaattctagaaagataaaataactaaaaaaactaaaagaaaccattattgaatttctattccacttatagtaaccatacgtttctctgaacatcgtggcgtagagaatccttttttttcacagtttgaattccacattcaattcttcattgtgattatatatgacattagacaattttcttataaaatgctgcacatggataataaaatgattggatgaggtcaattatattgatttttgcttcaagtatgctttctaaaaaaaataggaattttattttagataatttgaaattatataatgttaaatttaataatattatttacttgtgcggagcacactttgaacagaaactgttttactcttaattcttattttatttgtcaaattccctattctcaatagattggaagaggattgggggtgtagatagaatagaagatttttaggtggttgcttcattcaataagccccatgaccaaaaaagaaaaataatgaagaacaaaattttagaagatcttgcattttgttagaaatttatttgggtcacaattgttgtgttgagtcatcaaataaataataaataatctcctctttattatcaacatctcctaagacatttgcccgaaaaatggcaccataacctctaacatggtgaacagcgttatcatcatcatcggaagaatggtatcttaagtctcctgaactgacattcttgatcttaaaaagagaaataggatcttggtggctattagacgcctgaacctctgtcaatgacatagagcgaggctaatgcgacccaatattgacctctttcccaaattcatcaggagctctctgagagcctagagccccaaacgtagacatgctgcaaaaaaaaatcagtatgtttaaaaaaataaataaataatttctcaagcaagatatgtttacataaatgacacacacttgcttgagagggcatctgttgaacgaaaaaaaaaattaataatgataattattattatt

SEQ ID NO: 397059 - DNA, 462 bp, Cannabis indica
tgagcaaagataaatctatgattgaaagcatcaaacccaagctcaaaagagaatttgagatgaaagagcttagacttgagatacttggtatcgaagtctcacggaactggaaagaagggactagtcaatttgtcctgccaaaagaacaatgtcctaacagtacaaaaaagaaagaagagatgaaggatgtaccttatgtagtggttcttagatgcttaatgtacatgatagtgagcacaagactggatatagctcatgctttaagcatcctaagccagttcatgtccaatttgggtatgaaacattgaaaattccttaaatagttattgagatattttaagggcacttgggatgatggtctgacctacaagaaagcaaaaggagaattagagttaaaagggttcgtagactcagactacgcctcgaatagagatactagaaaatcaaccacttcttacgttt

SEQ ID NO: 397060 - DNA, 834 bp, Cannabis indica
caagtccaagcagtgcttgaactcgttcattgttaagatcccaacattagcaagattatcatttgttatgaccttttctaattcaaccagccattctttatattttcttaattcagtatagtcttatgtcaatgtgtttgctcttttcatgataaattaggttcttgcaaagatggataaatgactggttgtttgagtacatagtcacccttcttttagttgtttcaatttatatagaattctccgaattcataaagcttccttgaacgcttccgtagtaaccataaattctgcttggtggaaaaagcagccatagactgtaattgggcctttcagcatatacagttgtaatttgtcatgaacacgcaagaagtggctgatttttttggtatctttattcgaagcatagtcagcattcacgaatcctttcaactccagttctccttttactttttcgaaggtcagaccataattccaagtgtccttcaagtaccttaataactatttgacgaccttccaatgttcaatgcccgaattggacatgaactggcttaggatgcttagagcatgagctatgtccggtctggtgctcaccattacatacataaggcatcataaaaccactgcatggggtacatctttcattttctctttctcctcctcactattcaaacactgttcatttgataagacaaactgtctgcccaacgatactgtaatatccagattaaaatagtatttaattttttttttggatattaattgagcgaggataattatcttgtttctttgtgttgttagtgagttgatattattgcttagagtagttgtacc

SEQ ID NO: 397061 - DNA, 601 bp, Cannabis indica
cttctggtgtttggaacttcaaggatacgtgcttgatcgaactgactgcccctagtctgatcaatgaggatgacccaacaatacgttgtgagacgatggcaggtcgacaactaggaagtcttgcataactgtggcggataggggttcctcgcccaaggtgaatgcgagctcgattatgccctggctggcaatactatcgccgctgaagccacaaagatttaccacgcaaggcttcaatttggcttttttgagccccatcttcctcagcatttccttataaaggatgtttaccaagctcctactatctattaacaccgtctttatcctttattggcgagttaaatagtgaccactaatggatcgacgtgaggatatctcacgttcttctcatcctcctctaaaattatgattggaggttcttcgatttttaccttcttggaaggttttggggcaaatgccgactacccgttctttatctctttcacatatctcttttcagcgttattgctctcccctgcgatatgtggccctctcgaaataaccaggttgtcttctccttcagtcggacgagttgtaacccctggtttttgggttagttggg

SEQ ID NO: 397062 - DNA, 779 bp, Cannabis indica
ataaacattgtgcctcaaataagataaatcataatataattcatcattattaaggctttattagataaattactaccttaaaataatgtagaaaatatattttttttaggtaaataccctacgttaaagtaaggtaaacgacatgttttaaataagttaaaggacacaccttatttagataaacactgtgcctcaaataaggtaaataaaaatataatttatcattaaaaacttaaactacaaccttaaaataagataaatgacacgccttatttatgtaaacacccagccttaaaataaggtaaacgacccactttatttatgtaaacatccaaccttaaaataagataaataacatgcattattatgcaatcttcattcttaaataaggtaaatgagacaccatatttaggtaaacttcctgctttaaataaagtaaatgactcgccttattttgtaagaaccatgtctcaaataaggtaaaataacacataatttatctttaaaaaggtaagctgctaccttaaaataagataaataacatgtcttatttaggaaaactccctgcttaaataaggtaaacgacccaccatattgaacaaacaccgtgcctcaaataagataaactaaaacataatttatcattaaaaaagtaaattattaccgtaaaataaagtaaacgacatgtcttatttacgtaaactacgcgacttaaataaggtaaactaaaataatcattaaatataaaaatcactaccataaaataaggtaaatgactc

SEQ ID NO: 397063 - DNA, 531 bp, Cannabis indica
aaccaacaaccatcggcgactttgcgagcatgaacgacctagtccccttctctctatcacagtcatcgatgtcggtagtctagcccaacccattgttagcttttatggtccatatcgaagttataaaagtagaagcacaattcggtaaaaatgaattttatctaatgtgaaccataagcccaatgatcttaacatgatgtatatagattaaatctaaactactgaaaagaaaacaataccttttaagcctatcagggtatccttgattcttttagtacaattaacgatcatccaatccaagaacctttgttgaagaatccacaccttgatcttccaagccagcctcaactctcagaaatgaagtgggctattaaatcttatttggatgaattaatttaagtgttacagtttgtattgaactcatgagacactgtaattgagacaggattgtttaatctcacacacacctgttatggtgtaggcgtgtgagacctagagagagagatataataggtgtgtgtgtgtgtgtgt

SEQ ID NO: 397064 - DNA, 835 bp, Cannabis indica
  modified_base (87)..(87): a, c, t, g, unknown or other
taaaaagagatacctaagcttgctgaaagagctgcaatggtggccattaaagaatgggggcaaaaccatatccaacttaactcacanaattttttcattcatcacaggtgcagctgatatgcctggagcctgattaccagctcgtcaagtctctcggcctcaacagatccatcaagcgaatcatgctctacaacctaggttgctttgctggtggcactgtcctccgcgtagccaaggacctcgtggaaaacaatctcggggcttctgttctcgttgtttgcgctgaaataacatcagcggacgcgacctttggtcgcctgtctgaggacgacaagggacggcttgtgggccatgcaatattcggggatggtgcagctgctcttgttattggtaatgctgatgatcctgaaaacaaagggttgtttcaaatcgtttcaacgtctcaaactattcttcctaattcagaaggttgtattgagggacatataagagaagatggtgttacttttacattatctccgcgagttccgaaattgattggtgacaacattgagacgtgtttgatggaggcttttactccatttaagattagtgattggaactcgttgttctgggtggtgcatcctggtggcgcggccattctcagagaggtcgagtcgagagtggggctagaacaggagaagcttagggcttcatggcatgtgttgagggagtatgggaatatctcaagtgcatcagtgctttttatattggacgagatgaggaacaagtctttggaggagggaaggaaaaccactggtgaagggaagaattggggtgttttgtttgggtttgg

SEQ ID NO: 397065 - DNA, 508 bp, Cannabis indica
tcatattacaataacataaatatgacattagtagagaacaattacattcatgacgaaataaattacattaaattaaatcaaacttaaaacacacacttgaaattaattaaattatattaattttgtaagttaccatattcgtcccacaagtgttcgattaatgcatttctaagcttaatgtgagcttcattatccttaatttttctacctggcaagaaattcttgaaaccgagcattatcttctaccatctcaacttcttaacttggcacttcgacttgcttttcaattgatgcatttagatcacgttcatcttctatattatgcataataatacctagtcattatatcatgtaaaaatgttttattccaaatacatgtcgatctagcaataattgcaaatctagactgcaataatcctaatgcacgttcaacatctttctacatgcttcttgtttcattgcaaataattttttttttggaccatatggatcatggatagtttgaaca

SEQ ID NO: 397066 - DNA, 741 bp, Cannabis indica
aaattgggcttaggcttttcaaaagtaaataacaaagttaactgtagtcaaatagagaaaagaagatcaccgaaaaccgtattcaaaagtctatatatattaacaaagacaccacaaacgacggagaattccattatgaatgatcgcatattatgatatatcaaacatatacacagattcaaaatattatatcatatatgtaattagatatatgggattgaatctaaagcccccaaataaaaatacagtggcagaattatttaaacaaaaatcaaaaccctaatttttaaaatccccaaatttcataaacaaaatcatcagatcttcaattaattcaacaaaggtggctctggtaccacttgttagggtttataaaacacttaaaaaatatataaatcacagatctaaacatattcctaaagtgctttaatatagaaaaccctaaatcataaatctataaagcctttgctaaattaaagaagaagatgataaaagatcagcggaagcactaacctgaagccattgttggagattgcagagaaggttttgatcttccaagaatacactattttctagagtattttctctgatggggaaggagagaatacagaaaccctagtgtttcttggggaccactacctatttatagagtcatcttagaataactcttgggtatttataatttggcccctcaacaaattataaattaacttatggtatctacacattaattccatgaca

SEQ ID NO: 397067 - DNA, 536 bp, Cannabis indica
tttttctcatcgtgtattagaataatcattccttctatttcaaaatggaattttcattctaccaaaatggtggaaaggccattccattggaatgacattctaacactttaatatgcaaccaaacaaaggattgaaatggagattgtttcctttcatttccattccattttataattacctccaaacaaacgccacttattatattcttgaaaatgtggcagcaagcacctggatttaagactttacttcagaattcttggcagcaaaagatgactgggactgaaatgcttagtctgttactaagcttaagcggcaaaaatggaattaaaagagctcaacacaaaaaaagggtgatgagaacacaactatgtatcatgtaagtacaagatctaaaaagtgaaaattatcattaattaaggtggcgtttggtaacacttttttaatcagttttctgtttttaaaagtagaaaaatgaaaatatttttcaaaaacatgttctataaaactgtttttacttttcaattttataattagaa

SEQ ID NO: 397068 - DNA, 688 bp, Cannabis indica
tatttgttaccgtagtaacttatgtaacaccctaattggcctaggcgtgttacgtgatttttaaacatactgtgcagctcgttgctaatcaacgaggtttataaaaatcgtgattaattaaaatttttctttttaattaaaacttataatatttcatacaaaatactcgggctcacgattacaaaatactttacaaaagttaactaattctttacaaaatatttgtcgcccagcgactaactacaaaaacgttgttgtcccgaggatcgtacgctctaggcctaaccgccccgacatgtacaatcttcatcagctcgttctcacggctcctcagctttggccttgcccttacctacatataaacatagcactgggagtctacagactcagtaagaaaaacatagatcataaaacatacataaatcctgggttatgatcagacgctcatacccctgaccacaaccctaatccccgtgttccacacggtactgagtgtcgaacgttcgtacgacggtacttttgacagagtaacaacctatactaagtacactggtcatactccagctgctagtcatactctacccttactgatgtgctacagtatcaacctatactcaggacactagtcatactctagctgctagtcatactctagccttaccaatgtgatacagccaaacagtacagt

SEQ ID NO: 397069 - DNA, 549 bp, Cannabis indica
agtgctaggaagatgtgaataattttccattggaaattactttcaaaataacaacaactatgggtttaatcaaggaggaaatccaaggaatagtgggttctatcaacagagaaatcaaattcagtcacagaaccaaaaacagactcagcaacaaagctctagtggaaattctggtcttcaaacagatttattattgcaatttatgtcagagactagatcttccattaaagatttacaaactcggatggggcaattggaaactcatatagcaactcgtcctcagggaaagaaatatgatgggcctgatatggtacaaccagtggatgaagaaataaaagatcaatcggcaccaactccaacatcaacagagaagaaggctactgatagtcctgcaccacaacaacagactccgccaatcagtatagatcatcatgtgaagataccctatccgcagagacttcgaaagacctatctagacaagcagttctcaaaatttctagaggtctttaaaagattacacatcaacattccttttgctgaagccttgga

SEQ ID NO: 397070 - DNA, 793 bp, Cannabis indica
agagagtttcagcacttgctgaatcaccacaaatcatggctgataacgctaatgttgcgaataatggaggcaacaatggtaataatggaggtgtcgttgaagatcaagcaaatggccgcagcttgagagattatatcctcccaactcttacgggggttcattcatggatcagaccaccagcagtggatgctaacaactttgaaattaagcctcccatacttcaaatggtgcagtcttcagtccagtttggtggactcccttccgaagatcccaatttgcacttgcaaacttcatgaaattctgtgagacttttaaagtcaatggagttagtgatgatgccatccgtttgagactgtttccattctcgttgagagaacgagccaagagttggttgaactccatgcctccaaactccatagctacatggaatgacttggcaacaaaatttttgtctaagttctttcctccagcaaagtttgccaagttgcgaggagaaatcaacaatttttgtcagcaggataatgaatctctccatgagtcttgggagaggttaaaggatctcatcagaaagtgccctcatcatggtattgagaagtggatgctggttcacaacttctacaacgggctggtaggtaacacaagaacccttatatatgcagcaactagtgaagcatttatgaggaaaagtgcaaatgaggcctatgatttgctggaagagatggccctgaataatcaacagtggccaactgaaagtagccaaacaaagaaggtggctgggatgcttgaggtggat

SEQ ID NO: 397071 - DNA, 699 bp, Cannabis indica
cgaaaaatagggatgggggcttttgtttccaattgtttggggcatgtcctattctcaagtgcggctccttgcgcgggtttgttggaacctcacgttaccgaagccaaagctttgctctattggctttcttactgcgtgtagatggggtatatggtgattactgctttctctgattgtcaggccgcttgtttcaatgagtttggtattgttcttattgatattaatcatattaggaattgtttcagtggcatattcctgtagcattgtaatcggtcaaagaccatgctgctcattctttggcaaaacgagcgttagatttagatgaggcttgagtgtggtggtcgggcttgcccacttatttagctgtttaaatttgcctatgtaacaccctaactagcataggcgtgttaacgtgattttgaacgtactgtgcagctcgttgctaatcaacgaggttaatgaaaattttgctatttaattaaacttataatattacatacaaaatatttcgggatcccgttcacaaaatacttaataaaagtttactagtcatttaccaaaatatttgtcgcccagcgactaacaacaaaagccctgatgtcccgaggatcttacgctccaggcctaatcgccccgacatatacaatcttcatttgctcgttctcacgattcctcagctttggccttgcccttacctac

SEQ ID NO: 397072 - DNA, 928 bp, Cannabis indica
acacgatttttcttcacacaaaaacctttaaccaaaaactaaaaatacagaattaagattatgtagacaattataaacagagatgtcttgatgtatcttccaatatgctcatgtagatgtcttagttggtttagttatttgattttaattattctcatgagattctccattagcaatcattaatcaacctttctaactcaacttccttgccaacgatattttgctaacagtacgtaattcattacttgaacgtactgaaggaagaggacctttctaatttgcttttgaagggagcaaattacttgtttagtggctacatgaatgaaatgaagtcattttaaataaaatttgggatcacaaatcaacataactaaatttaattaacaactctgaagaggacctaaactcacaaaacaaaaccaaacataaactgaaaagaagggaaggagatgaaaaataaataagaagcaagaactaaaatatcaattccaattgagaacgttaaagatcgacgtttcgaagagataccagatttgtcttggtgtgtatatttaataaattaattttcatattattaattaatcagttataaattatatttgtttgcaatcttttgaaaaggtatgacatcgggaagagtcaccacttaacttttaacgatttaattaatcagttctgttaaaactaacagtttaacacaacaaaatctgttaagtgcgcaacaaattctattagatacacattttatataataggtaagataaatagattaaataaagagaatcaaagaaaatgaaactccctttaaataatgagctttattattaagatattcgatctccattgtgggttttacaccgcgtttcttttagtgagtaatcctccctaatggaggaacgttcattagcaattttgcaccgtttaatct

SEQ ID NO: 397073 - DNA, 654 bp, Cannabis indica
caaattactctattattatttcggctaaaccctcaattatcattcttgtattttactctctaaatttaaattttagtagtaaaatttttcaaaaaattgaattatcaataaatttaaagtgatgatatctatttttataggtaattaccaacatgaatttatatatatattatatatttacattagtatacctaatattattatttaatttttttatctttataattttatttaattttgaaataattttcaaatagtaatattaggtgtacccactaacactaatgtgggggctatagctcccactaacaaaaatatcaccttttaaaaaattaaatataatttttatttaattagataattatagattaaaataatagaaaaaccctatctaataattacccaattacttccaaattacacaccctaagtttttttttctcaataaataaatacataaaacaataagtttgctattctttattaaaaaatattaagttttctaatgtaccttgtattggattgatattttatttattatttatttaaattaaaaggggtcttatgtaattcctcagttgaaaatgaaagatgtaatccctcattcatttttagccatccaaataaaactaatagttatctgaccattgatca

SEQ ID NO: 397074 - DNA, 1105 bp, Cannabis indica
gggtacattgtagaatttccctacaattttttagcctacataatattgaaaaattctataatatatccattaaaaatgagtgtatggatgcacccttatctatttttgtatttaaaaacttattttgtccaattttttttttttatgatcttatactttatacttatttaagatatctgacaaaattttgaaaaattacgaaaaaatttaacacgtcgaaaacagtgttcaaagagtctgttgcacgcgtgacttttttatttatacgagtgtgaaatagacgatttaaacattaatttttatattgtaaattattcaaaatttctcaaaattttgcaggatgtcataaataactataatgtacacgactatgaaaaaatttaggttaaaaaattcttatagataccgaaacagttgcgaggttgtatcagtacaaccagttttgaatggggtgtattgtagaagcaccattactattttaaatacaatacacctacaagttacaagttgatttatttttcaattttaaattttgctaattaaaaaataaacattagaaatttaaatatataatgtggatatttatattttgattataaataatatgtttatttaaaataaagtaaaataaaaatattatagaagtttctacagtgacctacaataggatattatttctttatttatttcttatttgtaatattggtcttatttagaggattgtctggagttatcaaagtatcttggcctttcttttgttattggcagaaagaaaaaagttaacctctaacacaccaaagacaaagtgtggaagaggcttcaaacttggaagatggggaggaaagtgttgattaaagcagttgcgccgtaggattagtagcacaagccatcgctatactatatgcactcagtactccaaaagtactaatgttggtaggattcgttcgtacttcctgatagcacaaccaaccattataccatatgcactcagtaccccaaaagtactcgtgttgctaggattggttcatactacctgaaacatgcatgccaaatatgtatatatgtgcatcctttatacttatcttacatcacttccgtaatcagg

SEQ ID NO: 397075 - DNA, 648 bp, Cannabis indica
aattggttctaaataccagctcgaatctgtatgacctgacctatccagtatggtcccgtactggtcggctatcccataatatgagttagtacaactaatttgaacgtggaattcggggtaccaactatcaaacctatgtgcaatgcaatctatgaggaatggattccatgtatagaaattatactggctatctcaaaaagacactaatgtggtacgctcggtcctaagcactgtgggtgaccaaccacattgattaccttggaacgctccttctttgccttcccaaggaactatgttctgaagatagtgcacccgagccatgtagtcccgagtatcctcgtcagttgggaccgaaatctgctgccacgatgcatacttgggatatttataatcactagtatactcgttctcagcgaggaggcccacggacctcaggttgacctcgttcaaaaggaactcagctgatcggagaccgtatggaagacccagcaggagcctacgtcgctcggccatctcgggggtaggagttggtcttttcgtaactgctgtcaaaataataagattataagtcagcgaggctaaaactgaagacatggaataatttaaaaccaagtttaaggcaaatagtcacttacgtattatgcggaa

SEQ ID NO: 397076 - DNA, 500 bp, Cannabis indica
attgtttggcatgaccagttaggtcgtcctagttcaatcatgatgcgtagaatagtaaaaaactcacatgctcagctagccaacttgaatttttgagtgaaaatcgagtttatagtgttggggtgaaaaatagccgttggacacaaaaaatgagattgccactgggcaaaccggttcaccgattgccaaccgataaatttgtttcaagtgaaccagttattaattgaattcttgacagtggcaaaaagttcaatttttcgcactaaaatggccataactctctactcgatcgattattcgatttcagaaattccaatttcattctcttagttaaatgatatgtgatttaaaaagtcaattaatttttttttgaactatattgggtgagaaaacttgtcgcacagattattgagtgggccaaaatttgaacttataaaccctagtgtaatatgcaaattactttaacaagactaaagtaaacttatactatttgagtgtgt

SEQ ID NO: 397077 - DNA, 517 bp, Cannabis indica
tcatgaaatatggacttaaaacatttttttgattaatttggatgtttcatgttgtgtttatgtgatttgatgattgattgtgttattacgaaattttctatgtaaaataatttgatttttgatctgaaattattttatttaaaaatttggttaaaaattaagcaaattagccttttacataactaaatttggatttaaattgaaaaagatatgatttttttgaagatttgaattttagttgccacacatgctagggttgaaaccctagcatgcgtctgtggataggacatgaggctgcttttcgtggggctgatgctcacacaaacatgccattcagacaaggcgtatccgagaaaccccagtcatgcaccctgctaggtgcctctcgtgcacccagaagaccttacaagcagcctctaacctcagtctaggtccttccatgtgcgcgcacagacagtgtgcaatgcagactgtccgatttttccattttttcaatttttcaagttttaaaaatcac

SEQ ID NO: 397078 - DNA, 819 bp, Cannabis indica
attcgcattgcaatttaattagcgtttaagaaaataagaattaatattttagattgaatttttttttcttaatctcatgtgttaaatatattaaataaattaatatattttttaaataaaatatattaaatatataaaattatagatatattttaaaaatatataaatataattagatgaccactggataataatttgatcggttcggttatctattggatcggatgtctcatccaataaccgatccgatccgattcgattgattttttaaaatttacattcggtcctatccaattatgattggatatccgattttattggatcagtcgattataattggattggatgactttctaaacacccctaatagatattttctacccccgaaatctagatacccaccccatgtgtaaccttaataaaaatgttttttattcctatcaaaactcctctaatacccgtatcaaaaaaaaaaaaccttgaaaatgagtcctagttgttgcgctaggatatgtttctcactttgtttataaaaattataatttttttatttctaacatttgtatattgtaattattaaaattttacataattttttataattctaaacaatttgatatgtcaaaaataaattattaaatagaaaaaggaataaataaatcaattttttctttattttattatgaaatagaaaagaaataaataaataaaaatgcctggatacattttaaaggaatcttaatttaaagaaaaaggtagagattcattttttttaatataaaaatagtagagatcttgatgagcaataaagtagggtta

SEQ ID NO: 397079 - DNA, 747 bp, Cannabis indica
ttaaaatatgaaatttggagccagtttagtatagctgtgcaaaactggctttaaatcgactcactagaaaaatgttcaatagttttttctgttagaaatttattggggtcacaattgtatatataaaatgtgtgttgggtcatcaaataataagtcaaatttatgtggtctattttggaataaagtttatgacttaagggcatgattgtcatgattttaatatgtggataccaattagacaatttctattttgatgaggggccaaatagaaatagtcaataaatattaccaacaggtttgtctgttggtaatataacgggtaatggtccccatttgcatcgtatcttttcactcttgtatccccatcaccaagagaaaaactacagagaaaggttttgatgcaaattggaagatcataccaattaaaggtcattacaaaatcgattctatggactccggtacgcttccgctattccttaatcttattgtttaattctcatgaattaattagggctatatacagatttacagtattctaacatggggtatcaagagcatccctaaattagttcttgagaatatatggtagtattggtcttctattaaattattatttttgcactggaatatttggttaattattataccgcatatgtatatgtgctactactggaaatttattcttgtttgaatcgttcgtatatatagcatgcgattgaagtttttcaatttaatgtaatatatata

SEQ ID NO: 397080 - DNA, 1568 bp, Cannabis indica
gaagatgagtggattgggggatcttcattgagggatccatttcataatttagctgtgatatctagggccaagaatgcaagtattcaggagatgattggcgatgagggcgaggttggagattgtgtggcaagctgggaccttaatttcagaaggaacattatggataaagagattctgagcttgacacaattgatacaaaagttggaacacgtcagagtacttaacattcttgatgatagccgtatatggttaccagattcttgtgggattttctcttctaaatcagcattctgttggattacctcaaccgagaattctgatgagttgttctggactaagatcctttggaaaagtagaggtccttccaaagtcaaagtatttggatggttggtggctctagataaattgaacctacacgccaaattgcaaaaaaagcgcccattcctctgtacatcacctggatggtgtgtttgttgcaagttaagtggggaagacaacacacatttgttcttaaggtgccgcctcgcaaaatctttatggataatgctgataaacgaatttgagattcaatgggctatgcctgttttggttccttacatgttagtaagtaaggttggaggcagtaaacggagcacaagcctatggagaacgacggtattgtctgttctttgggttgtttggttagaatgaaacaagagaatctttgaagattcggaaagctctacagaggtcctatgggaaaaaatcaaattctggacagctacatgggtgtacaagactaagcatttcgaaaaattttcattcttagacctaattagagattggagaactttgttgtaagtttgcactggtgcagcctcataggtaattattctgtgagggagtcaattttgcgttttgtccctagggagtcagaagttttatttgattagacaaggcagcgagtttttgttttagtgtccctagctttggttatagctgtggaacctgctttatttttgtaaccacggtattcctccgccacaagccgggatttatatccgtatcggggatggggctagtctaagacaatggcctcgttctcttttttcaaaaaaaaaatattttgtacaatactaatctattaacttctcattttttgaaaaatacccttattatttatttattttcaaacctaaataaactaaaaataattgctctctccagctgcccctcatcctccttctttgcctccccaagtcgacccagccgtcccccagcccccagccgacccccaaccgcatccccacctcccccagtcgcgtttcctctctcgcaacaagctttcggagcctttgctttcggagcctttcgaagcgtgcttcttcgccggtgcaaaagcggatttggaagataacatcgtgaaggagcccttgaccttcaagatcctttcagcacaagaaggtattgttaataaaaactttgtttttagtatttttttatggttaattcaaagagattatatattgtttatgttaaaataaattttattttaatgaatttttcttaatttatggtcggttttatat

SEQ ID NO: 397081 - DNA, 766 bp, Cannabis indica
caggttgcgcatgtgcattgattatacaaaattaaatgtcgccacccgtaaagaccatttcccacttccattcatcgatcaaatcttggaacgtgtggcaggtcatcctttctacagctttctcgatggttattcagggtactaccaaattgagattgctttagaagatcaggaaaagaccacattcacttgtccttttggtacctatgcctttcggcgtatgccatttggcctgtgtaatgccccagccaccttccagcgctgcatgatgagtatctttagtgatatgatcgagaattgtatggaagtatatatggatgatttgacagtcttgggtgattcatttgaatcaagccttctcaatttggaatctgtgcttaaacgatgcaaagagaaaggcttagtactcaactgggagaagtgtcatttcatggtgccatctggcatagtcttggggcatattgtttcacaacgaggaattgaggttgatcaatccaagattgaactcatatcaaagctgcccgcccccaagactgttaaggatgttcgatcctttcttgggcatgctggattctataggaggttcctccagaattttttcgacgatagctcgacccttgtcaaacctcctggcaaaagacgtggtgttcaactagacacccgagtgtgaggaatccttccaaatatttgtcactaaactcactttcgcccctatcattcaaccaccggagtagaacttgccattcgaaatcatgtgtgatgctag

SEQ ID NO: 397082 - DNA, 827 bp, Cannabis indica
cgaagttcggggcataacgaggccgtgaggatcctagtgggacttgtctggaccaaaaggcgggcgttccaggaggaggctcaacaaagggaggcccttgctgaggcaaagtgccgggaggaggccaagtaaagggaggctgaggcggatgcgaggcaccaggaggcactgaaggtggagggcgaggctgcagccagggcccaactcgagctacgggaagccagggaggctatggacaagatggctgccaagttgaagtccttagaggagttacatcaggcgaacttgcagtcgacggccaacctgaccgtggaagtgaaggagctaagggatttcagagatcaggccttgaaaaaggccaaaagagatgagctcctgacccccgtcgtctgcaagcattgcgtcaagcgcttcgatgatggcgtctatatggcctggcagtcgaatggccagagtatcaaacttgacttctatcccaagcctgaggaggctcttgctaagttccgggagaagaagaaaaggcttgatgctttgcttgaagagcgtcggggccctcgtcttcctcctcgtattgaataggtcgcggagtccaaccaatttcaccattacaactatttttttcttttatttacagtctcttttctttcctttcagacaattttaattattatcttctaaggggagacaattattatggcccgtccccaggcccttagtatattttttttttactttgatatatactctgtttgattttgtttttacttttggcctgttttacatttgttcgtgtggtatgccttagtacccccctgagtgacatgaaa

SEQ ID NO: 397083 - DNA, 813 bp, Cannabis indica
attttgaaaaaatctcaattataaacccacatataacactcacgtgttaaccaaacacaaaatgcgcttaattgctaaaaccttttaagttatattttagaaaacaatgataaaataagatacaaaatttgaaaataatttcagctaacataaatatgattagattagttagaatataatgttacgtcactgatataaattctttgatacaaaacatatcacctataaggcgcgtgaattttgcggacataaaggacgcgtgggattgagagaggtcggcaaaatgattagtcaaagactgtgtcgatggaaggaaccaacggcctctgtgttagtgctataaaaaaacaacggcggtgattgaggcctcaaacatggagcaggagtaacggaaactcatatgactgcgcgcgttgagaacgtgatctaatcgtcccttaacgtaatacccttactgcgcccacgtgtgccagatgtgcactatgaggtttttttttagggaaactttgctattctttttagaaagagaaaagagaaatgctaagtgttacgtgcagtctatgatggcacgttacaagctaagtgatgcccacaagttggccaagtggtggtcaagtggtggggcatgttgtggtgcatgcaggtggcatgctgatgcttagtttgtatgcagtggcattttcgtaaatatcttcaatattgtccggatcgggacgggacttggtattcaccatttatttgggtctacaaatagaatggtgcaatcggtttggcgaagctaggtgatttggtatatggtgcttcccatatgtc

SEQ ID NO: 397084 - DNA, 527 bp, Cannabis indica
aaataatattttattttgatattggggtttggaaattagaaaaaatcgaattttggggaaaaatcccaaaaaaatcgcagaatgggtgttggctgccagtaggctggaagtgcagccttgagaggctgcaaaagtggccttacgcgcgtggacaggagcaacctgacgaggaatctcgacatcgtgcagggttcgtgtgggcggacaacagggtcagattggggcgcttcagtcaggatttgtcttagcacacgcgcgcttggcctccttgtccgagggtctggtgcgcatgagcacctccctcgacaccatatgcacccgatttttcaaaccttcataacttattcgtttttcattggaattgagttccgtaaaaacgaaaattgcttaagttttcacaagggatccaaataaaatattttcagaaagaaaaaaaaatcatggtaaaaattcgtacaacacatacattcatcaaagaagcacataaaccaacatgaaaccatccaaatcaacacaaatcatcgttt

SEQ ID NO: 397085 - DNA, 573 bp, Cannabis indica
tgtcccaatgcatcggaccaatctaatttttggggggtccgatagtccgattgatagtgtgcatcgggccaatgcatcggacccctaagtcggaccatcggaccatacaatcggaccatcggacccctaagtcggaccatcagaccttcaccatcttcttccctagatccgaaatgcctcttctccattcacggacagatccgaatcccattttcgcttcgggtcgcctcgaagtggtcgccggttgagcgttgacgatcggggttgagcgtcgacggtcctggatctaccgtggacggccgtgggttgagcaacgacgtctgctgcgggttggggatttcgtgggttggttgccgtgagtgtaggtaagttgagagagaggaagagagaggctgaaatgggatttgaaatgtgaggggtagttttgggaaattagtaaagtggtcatatatgaccaattttaataactatgcatttagggaaaatattatagggtattttaagtatggaaattcaaatttcccaaaataaatttcatatattttaaaagttaattatgttgttaattcaatt

SEQ ID NO: 397086 - DNA, 678 bp, Cannabis indica
gcagggtaatattagctaattactctacaaccaagttaatcttagctcgagtcatctcatttgctagctgctgggagattcgcttcaccgtattaactgactctgaccctttctacttaaggcatcaacaaccacgttggccttaccagggtgataaaggatctcacaatcataatccttcaccaactctagtcaacgcctctgtcttatattcaggtctttttgggtaaagaagtattttagactcttgtgataagtgtatctctcacatttctcgccatataggtaatgccgccaaatctttagcgcaaaaaccactgctgcgagttctacatcgtgagtagggtacctctgctcgtactcctttaactgtcgcgaagcatacgctattaccctcccagcctacataagcacacagccaagaccctgtctcaaggcatcacaatataccacaaacttttccttatctaaaggaagagttagtacatgagcagtaatcaagtgttgctttaactccaggaaacttttctcacaccgatcagtccaaacaaacttctgattctttcgggtcagctccgttaagtgtacaacaatctttgaaaaaccctctatgaaccggcgataataaccaagccaaatccagaaaacttctgacctctgtagctgacttcggtactg

SEQ ID NO: 397087 - DNA, 804 bp, Cannabis indica
atatatatatattatattaggtcttttcttatttatatatatatatatagagagagagagagaggggattagttaagctaataaccttgatgattagtaatatatatgtatagtacttcttgaccagaatatataatagcatatatatatattaagcgtttatatatttgtagtgaaagtcaggtatgtatgtatttatattctggttgatatttagtaagtttcagtgtttcagcaaagttataataagtaacaaatttcaagatttgtggcttttttttttattggaatgttatatgttaattcaagcaatggtttccatcttatgattaaaagaattattggtagttaaccacttgaggctagctcaagtgaccataggtgagtgtgtgtcttggaggtcttgggttcgagtggtaaaatatggttgtaatatataaacgcttaaataaaaaaaaagaattatttatagttacacttacttatctaccctgctagttgttaagttttgttaattttgtaatttatttaaattaattatatatattttatagggatttttttagataaaattagtctcattaaaacctcttgagtgaacctagtaagaaaaatctcaagaaaaaaaagagtgctaaacaatgcagtaatcaataatatccttcttcaaaaaaaaaaaaaatagcaatacaaaatcaaaatagtaaaaccattatacataggaggcgtttggttggaaggaatgaaaatataggaatgggaatgggaatgggaatgggaatgagaataagaatggaatggaat

SEQ ID NO: 397088 - DNA, 566 bp, Cannabis indica
tttttttttttttttgatttttcctttatatcttaatgatatattcagccaccacaataatcacatcctaagtcatattcagccaaaaatatcaactcttttaaagtcaaatattcaccttagtaaaagaccatattacctttccaataaaacattccacaacataaagcttaggggtatctaggtaaattttctaactaatccactacacccacaacttaaaattccaaactagcacggtataattccaattccaaataatttatcttataccgtcgtgacacctttgagcaccccgtcaagttccagtgttgccaagccaaaaaatattttattcaaattatagaatctacgatacctacatcttccaatataatctccgtaattaataaattacgctttatttagtcttttttccctaatcaactcgtttttagtttaagtaggattataatcctactctaatgcccacataatcacatatttaataaaatatgtccaattaaaatatcaatatattctccgggatattacaatttctcttctcattttttttccttaataat

SEQ ID NO: 397089 - DNA, 1093 bp, Cannabis indica
  modified_base (996)..(996): a, c, t, g, unknown or other
ttctattaaacttccttccattttatattgtgataacaatgctgccatccacattgcttaaaaacccagtatatcatgaaagaacaaagcatgtggaaatcgattgccatatagttcgagagaagatcacaaatggaactctacaaatgaaccatgtctcttctcagaataacatagttaatgtgttaagtaacctctcttccccactcaatttaataccattatatccaagatgggtgctaataatttttacacagcaccttaaaggggcctattaaagttagttaagttagttattagtttagtcagttaatctgtctaaccgacacttgtattcaatgctatatggatacagctccttaccattcaattcattcaataaaaagttttcttgctttgctctgtttttcgatttaatcttcctaatagcaatagagactttacaaataaattataactattacattaaaatagaaattttcatatttttattatttgtcttatttgatactcatctactttttcttttgtagatatgttagtgggagaaaatattttttttttttttttaaataaaattttattgtctaactttttgggagtattttttcttatgtatattacaacattaatgttgcggtgtgtgaattagtaagaatttaaatattccttaatttttatgatcatctacaatagaaggcccctttacccttcttgatttacgatagatcataagttttttgagtattgctattgggcaccagtggtgcccagcacctttcataggtggcgccctacaattagttagcgatattttctaaaagttattttcttaagttatatgggacccaatacttaattacaccaataacagtatgataacgagaaaagtgttagacaccaatgataatttttagcaattctcaagtttttggatggaagattttctttaaaacaaataaagataatattctataaaaaaaaaaaaaaaaaaanaaaaaaaaaatagcacatgcaaacacaatccaatgtatacatttatataatcttcaaaactcgaaatgatagaaagatcacgaagaagatgatgatg

SEQ ID NO: 397090 - DNA, 683 bp, Cannabis indica
actttttagtcttaaattttaatggtaaaatatttcaaactaacgaatttttagcaaatttaaaatgtcatttattcttaattaaatgccaacatgaatcagctacctgtacaatcatatacatatcacacatttatattagttcgtaattatttaaaattatataaatcattttaaaattaaaataatactttaaatttataaatcattaataaataaatatttttttcttttattcattctccaaattttctctctcatcgatttgtctttcccactctctcccccgagtccatctctttcttccttcccaaatttgaaaaaaatcacaaatgcaaaactaaccctgaaccccaaattgtatctgtctattagaattcttgaaacaaacttaaaagaagctttacttactttgtgaattcatctctcatgtactaagaccaacatttgatatgttttttatatatataaaacaattgagagtcagtttagcatagttgtgctgtgagaagaaataattatagttgtgctgtgagaaaaaacaattgtagcagaactataaaaaaaaaaaaaaaaacaaaaaaaattgagctgagtgttaggtaaattataaatttaagtgttgtgagttgttaagattctattataataatggtaatgttataatctaattcattataatc

SEQ ID NO: 397091 - DNA, 618 bp, Cannabis indica
ggaattgacaaccaagtccttcaaaatatccaaaatcaagaaaaccatggtagcataataattttataaaattacaatattcactttaacaaaatttaacagctaattggaatacagcgtgtaatcctttagccgccattctatggtatgaggaacgaaccaaaaaattacaaaatactcggaatcccaaattctcattttgttgtatgaaaggacgcgtacaaataccattattgacagaaccacccccattacttaaatatctcctaggagagaactctggacaaaaaggcattaaattccgcaaaaatataagggtatacaactccatgtttgcattcacatcaatgggaggccgaattgacggatcaattaatcaatcaaaaggtccttatatttttcgaatgagcggtcaaaattatcaccacattggttcgttatagccagaagatgggaaacgtccacaatttgctcagttctatatatatgacacggaaaatgagattgataatagaataaacacgttgctaaacccagaaaaaaagacagaaattgacaacgaaatagttgtcgagttatctaaaatgttagaccaacacaatactttggtcaaatctt

SEQ ID NO: 397092 - DNA, 1499 bp, Cannabis indica
aatactaagttctttcataagcatgaaacatctaggcgtaaaactaatcatattaaataccttaaaattgacactggtgaggttgttaattctttggaggggattatgggtttaattactggttttttctctgatctttttacctcccagggaagtgatattgaggctgctccctctatttttgattgtttaggctctgggctttctgatcagagtgtagagagtctttctcagccttttgttgctgaggaggttaagagagctgtgtttcagctttctggggacaaggttgtagggttagatggtcttaatgcttttttttatcagaaaaattggtccgttttgggtaatgattttacagctgctgttttggattgtctcaataagggggttgatttttctgaaatcaactctactttaattgttttaatcccaaaaaggcccgtgctaatatgcttaaggattttaggcccattagtttgtgtactactttttataaagttatctaaaaaaatttggccaatcgtttaaaacgtgttcttgacagtgtaatttccccttttcagagtgcttttgtgtctggtcgtattatttatgataatattattctagctaatgagttagtccataatataactaataggaaagtagggaaaaggggttgggctgcacttaagcttgatatggttaaggcttttgacagggttgaatgggattttctaaggaatgttatgtttcatcttaacttccctatccattttgtttctcttatctttaagtgtttatcttctgctgctatttctttttctgtcaatggtgttattagtgagcctatcaagcccattaagggtttacgtcaaggggatcctttgtcaccttatttgttcattctctgttctgagggtctttctgctattcttagcaattatcagcgtcgaggcctcctcagaggccttgcaattgctaggaatgccccttctatttctcatcttttgtttgcagatgatagcatacttttttgttctgctgatcccacttcttgtgctgcccttaaccaagcccttactctttactctaaagcttctgggcaaatgataaattttggcaagtcttctattttattttcccccaatactcattctgagattaaagatctcttttttcgtacatttcatttggaggataggccgtttatcaccaaatacttaggtttgcctcagtgtctgtctaggtctaaatatcctgcttttgcctttcttaaagatcgaatctccaacattgttcattcctggcatcacaaatggttttcgagggcaggaaaggaaacactcattaaagctgttctccaagccattcctacctatgccatgtcctgttttagattaccaactaaacttagtaaggaaattgagtccctaatttcaaaattctggtggggttcctcgggggataattcgaaacttcattggaaaaattggggagctgtttgtcaatctaag

SEQ ID NO: 397093 - DNA, 567 bp, Cannabis indica
ttttgatgaagaaaaggccttggtctggaacaagttgacttcaatctacatgaagaaatctcttgcaaataagttatatgtcaagaagaggttatacacactttgaacggatgagtcaaaagaattgagaaagcacctagatgattataacaaaatcattcttaatctgaataatcttggggtgaaaattgatgatgaagaccaggctataatccagttgagttaacttcccaagatgtatgagcactttgttgatacaatcttgtatggcaaggaaactctgaacatgataaaggttaaggctgcattgaactcttaagaaattcaaaataagggagatgagaaagaagagaccaatgggaaacgattactcattgttaagggaaaatttcccaagagggaatacaagggatattagaactcaaatggctacaaaggtaaccattcaagatccaattctagaaatttcacaggagggccgagctcaaatggagttgcaggaaagcaatgcaattacttcaagaaggagggccactttagatatgattgtttggctttaaaggctaa

SEQ ID NO: 397094 - DNA, 989 bp, Cannabis indica
tgtcaaaatatcttaaattaagcattatacaaatttctacaaaaatatctaggttatttaaatatttaaaataccatttataaatttctaataagtaaaattatataaaataacataaatgtcattgttctaacttaaaatttataaacaattaaatatttaacaaaaaaaattgaatttaaaaatattacggttagaatatctataaaaaatatctaggttaatttaaaatttattaattatttaatttatcatataagataattttaatataatatttcaaattaaaaagataaatatatcttttaatttaaaatatgatcaatattaaaatatatgatcttataattaaataatatataaatattaaagaaattaacaaattttaaaaatctaaacataatttaaaaataaaataatcaatttttaaatttaaacctcaaaatatcaaaaattaataataatctattaaaaataaatattattaatttaaattgatattaagtttaatatattaaaataatattttattttgtaaattagggtttgaaaattgaaaaaaaaacgaaattttaagaaaaaacccacaaaaataaaaatttaggtgtgttgcccaggaaggggtgcacatgcagccaaaagacgttgcaagcagctaagactcgcgcgcaaaaggggagtttgcagggtgtcacgccgagctttcttggcgcctgtagggttggatgcacgcgtatcatgtctgaagacacgggcgtgacacgttcagactagaatctgtctaatgcttccactcgcgtgtgcctgtcttgtccgagtgcctaatgcactcgatgcacccactcgacaaccatggcatccaaaacttccaaaattcatggaaaaatttcgtaaatcacattaaatcttcaaataatcacataaactaacatgaagacatccaaatcaacacacaaaccatattcatcattttaaatccatatttcatg

SEQ ID NO: 397095 - DNA, 545 bp, Cannabis indica
tcttctctccttaattctctaaaaaaaaataaattacttgtacgtgatgcttgaaataatattttaattgcccaacacctttcataggtgacagtgacaccctacaattggttagcaatattctctaaatcttatttttttaaagttatataggacctgctacttaattacaccaacaatggtatgataccaaggagggttgccttttagtatttctcatagctaattaaatatcacatttttttttatatatatttttttctttttcttttaattaagatatttaaaaaataataatcactttttttttaaacatattaattaataataacagaacaaactaatgaattttctccaatatcttaaaaatattaaaaaattgtttaaaattcgagaagaaattaagattaagatataaatttggaaaatacaatagtgacgactacaagtaaactatggtaacgataagagatgagatacaatgatgacaacgggtgggatacagtaataaaaataagtgagatacaatgagacaacaagtgaga

SEQ ID NO: 397096 - DNA, 793 bp, Cannabis indica
ccgtactttaagaatgtggcataattcttcctcctctgtctaacccagtttacccgcaagggcattaaatatctgtccgccctcttcgtcctctatgcttccctgaagtgggatatgcctcctccccgcgaggttaactagtgtttttgattagaagtccaccgctaagaaaggcaggtcggggtacttctatttctctcaaccagacttcaagtggttaacgggcaccgaggattcgcccatcaacaaaattgggcattttgttgatgagtacttcatggtggatggcatgggcaccacccacactcgatttcagtagatccccacatatcaccgccctcccctcactcttgctcttagggatagagctcaggagcttgctcagctgccgggggatgactggaatatcatttagtagacctctgaggaaaactttatgaagtacgggttctatctgaaggatttcattcctaagctagtgaaggggaggaagaggaaatctggcgctggccgggctgagggagctgataaggagaatgagctgattcaagtgaagcgtgaggcttagttgaagggaggtgcaagggccaagcagtatgctcaggagcccttgaatccggaagataaagctgaggaagagtacgtgactccgctcaaaaggaggaagaaacattcggcccaacccaggcccattgaacatgcaattcgcattagggagcctagttcacctgctcggccaccttctcccgtgctaggaaaagggaaagctattatggctgagataagagacttg

SEQ ID NO: 397097 - DNA, 1173 bp, Cannabis indica
gcataaaacccaacacttttttgtcctctctaaagtcgtagcaatagaggaggtcttcttggcgagtgataacgatgtattataacacacgtgggttgttccttgattgccaaggagacaaccgataccggaagtcattgggaacttgacggacaagtggtacactaaggagatggctcaaaggttgtaaaaggtaggtctttcgagcatcatgttgtacggagacttcacgtccaccactatgaacgtggccatgattgtggtatgcttcaaagaattgccaacaataattggcgacttgatcttgccacatggagggatgttgactccactaaaagcatacatgaattgtttgcatggttccatgtcttttaaagttaaacccatactacgtagggtgggattgaattgaatgtttgatgatgctctatcgtcgatcgttaccctagccaccatcatattagctatttggacctcaacaacaacaggattgtgaggagggtagttgacatgataagagtttgattctccgaaagtgataggttcacattcgtagcactgagactttagataatgttctactacctccacgactttggctcttggttcatgtcaaagtgatcttgcattcttttctaagtccatccttgaatttctagctaggtaaagacctccaatcacgatctccaacttgcctgcaactggcataggctagaagtgtgctttgcccttgtttctagagatttttagaaacagaataaaaataataataactaaagaaataacacctgaaagagaaagtataaaaagagacaaccagttttttacgtgattggggccttaactagctttagtccacgagtcagtattattcagtaagatgtttgcttgtaaacacattaagagatacacaagatgtatgtttgtaaattttcctgagcaaagtacataagagagttcaacccctaatccatgagattagtagggtatttatagtagttggagaatgactttagggtttccccatttgttggaatttattttactaggatcttagatctactcacaagtatgttgtttaacaccctaaatataaactttctaaaacgataattaaacacatataaagttaagaaaaccttacattggctgcagcggaataatgtctccttc

SEQ ID NO: 397098 - DNA, 1072 bp, Cannabis indica
ttctttattagagaagcatctcatgtgtatactgaagccaaacgagtgcatgctttacaaggacacggtatattcaaatttaaggtatatcatactattttctattaagcaaatactattaatgtaacatatataccagccattgagaagtagtgtatgaatttttagttaccattttttcaattaacatttctttctatggaaattgctgtttcagtgaagaagacatactgaaagaacttggagatcttatgaacgacagccaccatagctgcagtgttcaatacgagtgcaggtactaatatagtactactagttgtctagaggcaaaagtctggaaaatcaaatcaaaacagtgtttgttgctattattattatcaattaacttttctttttcttcgtaattatagttgcccagagttggaagaacttgttggcatttgccgtaaatatggtgctcttggggcaaggcttacaggagctggatggggaggttgtgcagttgctttggtgaaggagaatattgtcccacaattcattctcaacttaaaggttagtactaaagttttcaaatagttcttttgtgttttatgtaaatatatatgtattgaagaagaaaaaaattaacttttgtatgtatgtatgtatgtatcaggaacatttctaccaatctaggattgaaaaaggagtgatcaataataatgatcttggtctctatgtttttgcctccaagccttcaagtggtgctgctattttcaagttttaatcattgttttagtatcaactaaatttatttatctttgtgtgattctcttttaacttaataaataaattatatctcttgtttatatcagatatttatgaaatgtctacattttgaattgcctagacacaaacacaacgaacaggggaataaataatgtattataaaatattataatttagagaaatgaggagaaattttcttagtatcttatttcaaaacggtgatcacttatttatatacatacgagagttaaaaaattaaaaaaattaaagaaaaaaaataattgattataattaatagtaataa

SEQ ID NO: 397099 - DNA, 737 bp, Cannabis indica
taaaagttgtaacatatgaggagatacaaatctgaaaatagatttaaggatgccatgtaattaagtgagttattacatatggaagttatgaaatcaatgggataagtttcttgctgtaattagaaactgttacaatactcaattatatcatttaaatgattattgggacgttcaggaaagatttaacgcggagaggagttataaaaattcaatattgagttttctggaaacagttgtttaatggttgttaatatgttgttttatggttattttttgaacacctggagcaagtttttgaaaacgtccataaacgtacatgagttgattgagcatgtttccagctctcttgtccaacgttattctcccgttaaataccaattaaagtgctggtaacaactatgtggtgaagagaatttgattttcatatgtgatcctcaaaacattataaatacaggtcttgggttcactttgtcggataactagtttctatcaagagagcacattgctagaaacactttaggcttgataaatccagaaagttatttccattcttttcttttccttaagtgtttgtggtaggggaaataagcttttggacaaaggtgtaagaccttgttcaagtttaatgattcccctattatacacttgtggtgtatgtggtgttgagattgatctcacatctcttatatatatgctatttatatattgtgttttatgtgtagcttattgctttgagt

SEQ ID NO: 397100 - DNA, 785 bp, Cannabis indica
aaacattatggactgtgaaatcgtacaaaccatgacaaaggaaaatcgcagagtttctaaacttagggtttcctacatatcttctacagcaaattcgaaggttcattaaaaaagtaaatatgcaaagtaaacataaagcaaatctagaaattactcaaggatcagatgtctggattcaggtaacgccaagccaaacgagcagttttgatgaaggtacttcagcaaacttaaagccaaaaacctctcttttcgctctgctcttgcttagcaaagaaggatggtaaaaatgagtttatgtacaaacgcccaccgatatttataggcaaacaacaaaaaggggtaattatatcaaaagaatctcagacgcctcggttcccccttaaagcgaatatgggaaattaaaaataatcaagcatagccgtcaaccgtggtaagagaaaattagattttgaaatattaattgtcagagcgtttattagataaaaaactgaagggatgcccagtcagcctcacattgagtcgcgaacaaacgcgcttgacatgtcaatgcaaaggcagctcggatgaagtctacacacaacttcagaagtcccgtacagacttggggtgcaaatgttatcccaatttttgcactcagacgtggcatcacatgatggtgacatgtggactcaacttcgagtatctgcttgtagaatatagtccgaataggatatcgcatatgcatgcttgaagcaaagcaatcagaaatctgcctagcgcaaccaacacttagcaaattcaacttt

SEQ ID NO: 397101 - DNA, 906 bp, Cannabis indica
tatatccactttgttgatgcatattcgaggtttacatggatttatatgcttaaaaccaaagatgaggcactcaaaacctttcaccatttcaaagccgaatctgaattgcaacttggcaccaaaataaaagttcttcaaacggattggggaggggaatataggtcctttactagtactctacaagcggctggtatagttcatagacatccatgtcccaccacccatgagcaaaatggcttagctgaacgaaaacatagacatatagttgagaatggcctcaccttacttgcccaagcttccatgcctttgcaatattgggatgaagcttttcgaacagctgtgtacattcataataggctgcctacacctgttcttaattacaaatcacctatagaaactctctttcacatcccacctgattatactcaactcaaaacctttggttgctcttgctatcccaatataagaccttacaataggcacaaactacaatttagatcctctccttgtacttttattgggtatagtctcaatcacaaagggtataaatgtctagaccaatcgggtagggtgtacatttcaagggatgttatttttgatgagtgtcattttcctcatgctttacacaaacatcctccaattactactgaggttatggcttcattttatccctctgcaataattcccactgctcatacacaacatcacaactcacttatttctaactctcacaacttgtgtagttcatttcccactgtgcaggaaccaactccaatgtctgatactcaatctttaccatccaccacagctgctacagaccctgcacctcaaacaacacactcaacaccaggttccagtgatcgggttgctgctactgatcaacctactgctgtgcctagtattgcg

SEQ ID NO: 397102 - DNA, 660 bp, Cannabis indica
gagaaagagcaaggaagagacagggagcgccttcgaagtgttcttcattctacttctttttttctccttctactcttattaattattatgatttttattataatgtctagttctgagtagttttcttttagttaagcgttatttcaaaacccgagacatgaattcttaattttattattgaatattaatttctagtttccattatatcaaatttcttctgttcttctatgttcaatgttatgattattgttttaatcatatttagatggctactagattagggtttactttaatctaccgtcatcttaggattactattcacctaatagtctaggattctaagtgtttgtgacaaattgtcatttttatttgtgatgaagaatagaacctaagttaaatgaattatatgcttcattgatttgctacctagattagtctatctccataaatctcaaagctttatctaagttaaataaattgcatgcttcgtggatttactgctttaggtaaaagagttaattattgagtgcttcgccttgattacatataataggaagattgagatagttgactactttagagttatctgcaggattaatagtttgattggaaactgaaattatattcattaataggaattaggaataattgttgagggtg

SEQ ID NO: 397103 - DNA, 753 bp, Cannabis indica
tgtttatgcttttgggttgatttaaaagtgtttggcagctgaaattcgtgaaaatgcatgctggtttctgggtttggaacccaagtgtcggggcatggtctgagcatcccgcagcccacccctttggtggaacctgggatttgtcctaggtgtcgcggcatggcttttgcatgctgcggcccgccctcgaatttgtgggcagtttgagtgcaaactttgaaaatccacaacttttgattccgaacttcgatttgggagttctttatatcattagaaagctcctttcgagctctatgtgattatctgaattttaaatgccatgaatatattttataagtatggaactaggggttaaccttatttgtgaaaatccaggattgtgtgactaggattaccgacacctggtcaggagcacccagggatttggaatctctactattattggaaaacaggtaagagaatggtttgcacgtagggtatgcgcgatggtgcttatgttgaatatgatatatgtgactaattgtaaccgggattagggttactaccctaatatgagcgattaatagcctagggttattaccctagtgatataagttgagtaaatgctatgccatgctaagtgtatgattatattacaattttagggttatgcattcaaggcataatccggttagactcgataaccataacagagatgaaccattctaaggccttattgtatttagacgtgtgagagcaacacgtaggtctacg

SEQ ID NO: 397104 - DNA, 510 bp, Cannabis indica
ataccaaacatgctcttagatttctttttttgctttcaaacgcatcttgaatcaactcatttggagtttttatgtgaaagttatgcacattttactgaaagatgctgaagctgtcaaattttgctccagtagtcgcgaccaccactttccctggtcgcgaccctttttcatggtcgagaccatggtcgcgactaggaaccagggagcaagcataatttttgtattttgcctatggtcgcgactagactttatgtagtcgctactaggggcgaaaaacgagatttttggccagtttttgactttttcaaaggtagcaaccctaatttctatttaaggggctcatgttttagaaggaagggaggtataaattggatccaaaagtgaaagaaggaggcagaggaaacaatggtggcgatccgaaatgcaatcaccaactagttctttcttaaactcttgatttctgttaatttctgttttagatttgattatggatgttattatggattttat

SEQ ID NO: 397105 - DNA, 726 bp, Cannabis indica
gtaaaatttatttcatgttcattatttaattttatttaagtctggtttaggtccggttcggattcgggttcgggtcagaggccgggttcagcgctagggctgtaagggggggatttggcactacaagaattatgggtaataccaacgccactattaccaacgccaaaaagtcctcattaaaaatgagggtatcaataacgacacttgtcgttgggaaatatattcaatttttttttaaaaaaatagtaaatcaataacgacatttttttcaataacgacaatgtcgttattgaaaaaagcttcaataacgacattgtcgttaggaaatattttaatattttttgaaaagtacccgttgtgttggcggcaaattttcccccttttttaacccccaacgacaatgtcattggtggctgactgaccactacaaagtggtcagtcagccgccaatgacattgtcgttgggggatgtcattggggactgctgcattaaaaaaaaaaatgctgaaaaacccatttcattcccgtccgcctctcccttcagctcttaaacgaaaaccctaaggaaaacccatatcccgtctgcctctcccttcaaaatccaaaaaccatttcatcctcaccagcccgatgtgccgacgtcgtctgctgccactgccgccggctctcctcccctcttcttcgcctgaaatagcgtcggcccaccaccagcggcgagttgtgagg

SEQ ID NO: 397106 - DNA, 1061 bp, Cannabis indica
caacctccatcaccaccgcctagagaaaaaaaaaaaaaaaaccccattcggccagaccttccccaaccctcaaccttcgaaccccctctcttcaacctccacctccattgcaccgttcgacccccagcaactcgcacccacctcagaaatctctttcagccaccatcgcatctctgcgaaacccagcaaacccgaaccaaacctccaccattcgacctcctccccaatccgacgaactcctcgcccgcactcagaaaaaaccagacagccgccccacctccgtcctccatttttccagacgaacccatctccagccgagtcaaacctgactccactccagtcgcaccccccttttcctccatttgctcggacccgaaccccaccatcaatttccccatctcagcaacccaatctcgcgcgccattggtcgttgaaatctctgtaagttttgtaaatttttcttgcaatataatgaacttgatgagatgcatgctaaatcggaaaattattgtgtaatatgctatgctatcttgattcttgttcgtaatcggagctgtcatttgccatgtttactgagatttctattacagatatggtttgtggtgttgttcgggtaaatctttttctcaaatgttgtgaagatactcttgtcattgctgcccatttttgattaatgatgataattttagtgttgggtgattgcattttaagaatctataatgtttagaggattgcatattctagggctcattgtgctgaattcttattttgcgtctattggtggatattcaagctgaaagattgttattgtcactgaaatgtgttgataggatgctgaacttgatgtgattaattttggttactaatattctgttgagttgtgacttgtttagcagatattttcgagcttattattgtgagattgagccatggcaaccaccaaatccaaatctcgtaagcgtaaagctccggccaacaccttgcccaaacctccaccacaacaaccaacccacccaaacccaccaacccttgccttgccttcctccaccacacactcacca

SEQ ID NO: 397107 - DNA, 767 bp, Cannabis indica
gatttttagttcttaagctgttaccgctgaggctacacttgggaggatgtgcttgattgtgtcactccaacagttcgtgaggagcataatgtaatgttgcttcggccaattactgatgaggaggtcaaagaagcagtgttccagatgcacccagacaagtcaccagggcctgatggtatgaatcctaaattttttcaaaaatattggcctattgttggtaatgatgtgatcaatacagttcgagctttcttttgtaatgaatacatgccgaatgggatgaatgatactaatattgttctcattcctaaaaagaagaaacctgataggatgagtgagctgcgtcctatatccctttgtaatgttattgctaaaatcataactaaagttttggctaatagaatgaagggattattatctgaggttatatctttgaatcaaagcgctttcattcctggaagattaatcacagataatatcatggtaagctttgaagtcttgcactatttgaaaagaaagcaagttggcaaggatggctatatggcactgaaactagatttaagcaaggcgtatgacagagttgattggcatttcttatgtgctatgttgagacgaatggggtttgctgataaatgggtccgtcttatgtttggttgcttatcttcagtgcagtatcagattgttacaactggtcatactttgggaccgattattccaagtagagggcttcgtcagggtgatcccatttctccttatttgttccttgtgtg

SEQ ID NO: 397108 - DNA, 838 bp, Cannabis indica
aaattttttgtgcagtctttcaatgacgtgcaccaaaaggctttctactaatattatgattcatttttactttttttggaaaaaaattatactctcattattgtctcattgttgactctttattaatttccacaaattaataaattgttatgaaaagtgaaaccacataaaaattaaaataaataaaaaatcaaaatttgggaatcaacacaactaattatactctgaattaatatagactcttgcatcatttagtcaagctatttaaaatttttatccccgaactatgatatatattattgtatcctctgaactttttagctagttacaaatatatagtctttgaattattcaaagtattataaattaatcattttgtcaatttttgtaatacgtgacaaataaaataataatataattacttagctcattgccacatcagctccgtatacaatttaacatttaaaaaataaaaattatgtatttttaaaaaattattaaactaaaaatcaattaatgattaagaaaattacctacataaacctaaattttaaaaaaaaattaattacatacgtgacgttaacatagtactgatatagcaattggctaagcaatcatgtcattattttatttgttacgtgtaacaaaacttaacaaaatgactaatttataacattgtgaatagttcagagatcatttttaacagtctgaaaagttcaaaggtacaataatgcataaatcataattcggggagtaaaaatcttaaatagtcatttttttaatagtgacacttaggttgcgtttggttggaggtaatggaatggaaaggaaacaattt

SEQ ID NO: 397109 - DNA, 539 bp, Cannabis indica
gtaaaaaaaataataaaaattatgtggactaataaaatattgtcacgtaccaaaccttaaaattcaagtagtttagccgctaattaccttaacctttttatatttaaacacttgtatgaaaataagataaaaataattattaaaattaaaaaaacaaattgtaaaagaagaatttcatcgggagattgaaaaatactttttttttattattattataataactaaatttacttctaaataaaatttaattaaatatatctttttttataagtattgtacccaaattattctcacacacccacataattaagacataatttcaaataaaatagttttgtattctttgtagatggatgtgtaggtttatgggtaagttggagtaaaattttgattaaaaaaaatactatcatgaaatgataagagtaaaattagtaaaatgattaaaaaaaaaggtaaacataatacattttaaaaaggaaaactcacaaaaatattggaatttgggttaacttttacaaaaatactgtcacacgattttt

SEQ ID NO: 397110 - DNA, 620 bp, Cannabis indica
ctctctctctctctctttattgtgcacggtggtcgagtgatctagtcgtggtccgatcgtggtgggtggtgatctgttggtgtggttgccaagtttaagaaaagggaaggaatgggagaggggcttctatgtgctctaccgctgtcactgtgggtgggtgggtgggtgggattggcctgggtagtttatgtctgagagaggggaagaaaggagagagaatgattgagatggaggctagggttgttttttttttttttgatatgagaatagctcgttttttttttcttgaacaaggatatgagaatagttaagttagtataaatatatatagaggttcgggtataaacgggtgggtctgggtggcacccaaactcgaatttacaccaaagtgtgcactcggaccaggactcgaatatttataggtgggacttgaaccaggatgcttcttaatcgtaaaatacttgcacaaatagctatattaaataggaattgtctttatatgatttccaatgagatcttaaaagaaggaaattgaacggaatccattggaatgttttaaacggagttccctggcgaatgaactccgggaaggtagagtagaaattagtatgataaaaaaa

SEQ ID NO: 397111 - DNA, 992 bp, Cannabis indica
caaatcaggttttccaacagtattgtgccccatttgtctcctaggtttcgtgacctgatgccctctgaacttattctccaactcactcattcataaatggaatgaatccttttgccttgaagcgagtcgttgacgaaggtcaagcttattctcgtagagcactcttgtcatgattgtggtcggattttgcccttcctctcaaggtttgactcaccttttccttcctacaagggtttgaatgagtgggttggtgattttcgtctgatattccacgtatttcaggttgtgtctttaggttttccttagttccctcacgttgcattttttgaggattttgagtatatctttgggttatcctctgccccttggtctgcgagccgtgaggtttgccttgtgaatctctttttcccaaggtcaggttgattttgggtagcatcttcccgcgcggcctttactgtagctatttcacactccaactcggtattacgccagtttacttcctccaatcgacgcctaaggtggcagttttctaattccacgactggtatgtatctggttgggttgtaagctccatcctcatcaacctggttatggagggaccgattgttgctcatccaaggtgcgtcaagccaggggccccaatactgcgtcttcctggggcttgcattatgttcatgcaatgactcgatagatccatgaggactcaatagttcttttccaggatgatgattgattccttcttgacgattattatctttggtatcatccatcacttttatgtcatggggctatttcagagctttttcacagaggctctcaatgaaagcatgaaactgttaacgtagattttcattaaccaaatttgagcttcacgatgataaattcaacacagaaaaaataaaagctatagaaaaataaaatatgaacaccgagttttttacgtggttttgaagttaaaattctacatagtccacaagtcaatcttattcaga

SEQ ID NO: 397112 - DNA, 551 bp, Cannabis indica
aaaaccttaaacgatactatcaataagaagctaaatgctgccaaaggcagatgggttgacgagctacctcaggtactcttggcccacagaactaccgagaagacagctacgggacacagtcctttctcgctagcatttggctcgaaagtaatgctgcctgttgaagtgaacatattgactcacagaagagagttttataatcaagaaaaaaaccgcgaacttttaaaattgtcctttgatctacttgaggaaaaaacgaactgagtcgcaaatcaccaacgcagcataccaacaccgagttacaagatacttcaacaaaaaagtaaagaaaagactattcaatgtgggagacttggtgctaagatgagtctttgcaaatacgagagatgcatctgcaggagtgttcaacccgaattgggagggtccatatatcatcgaagaatagttggagttgttgggctttgtgccctaaataaaactctatttcaatgtaatcttttccattcaattatcaacaaagaaaaaaaattattttcattatttatttagta

SEQ ID NO: 397113 - DNA, 571 bp, Cannabis indica
tgggacagctggttgtattttgtctaatcgctagacgacaacttttgtagtacatactttgtaacagttgaaaatattttctaatgggatcccggttatatatatatatgttattttgataattataagtatttaaataaagttttaattaatcacgattttcaataaactcgttgattagcaacgagctgtacagttagtctaaaatcactataacacgcctaaactagtagggtgttacacaatcgcaaggcgacatgtctagaggtgctaaacactactggtgtccaatagcaatgctctaaaaaaattatttatattctttgaataattctatttatgtgacttttcatcttcatcaaaactcttaatattcttaccatactatatgtatatatatatatatatcctactattactcaatgttagaaatattaatgacagaaaactgagtttttgtaaatgtcaataatatatatgagaataataaaactgtatacgtcaacagaagcagaatgtaattctgttactgcagaaccagttttgcagcgacaaacagaacagacagaat

SEQ ID NO: 397114 - DNA, 558 bp, Cannabis indica
tttcaaatgagctgtctcaaaggacttattaatagcaatgtaaaccataataagtaatagtctatataatcaacattaattataaatattcattactaattatgttttatattatataaggaaaacctatagtatctactctaattggaatatacattggcgaattaatcgtaatttactttaattgtaattcatgtttgaattgctactaatatttcaatgagatgtgtgtcagagggttcattaatagcagtgtatatcatatcagataatagtgaatataatcaacattaattataaatatttattactaattatatctatattatattaggaaagtctctagtatctacattaattgtaattcacatagcaaattaatgctaattccactaatgattcaaatgagctgtgttttaaaagctttatggttggtgtgttagtttataatagaaagtgtttgcttgatattttaaaatatagaactcttcctttatttctcaattattttttactttctaaatcaaaatggagcctcattatgatgacttttctgaa

SEQ ID NO: 397115 - DNA, 1062 bp, Cannabis indica
tcgccctggctgcggttgcctctatctctaactcagcgtttgttggttagcctctgtcagttgttgccggagttggcgattttccagttcaaccaatggtacgtacctagtgggatcatggcatcctcactcttaggaacataaccaccaacttcagtattggtttcctcatttccagtttctaggttttgatcattatcacattgacttcttcttgaacgtgttgatcgtgttgaacgcgtagttcttgaagtgggtggcctccgcgagcccattggctctttaccaggacaacgattagtctcttcaggacgactgttgttgttttcctcatgaccagccatggagaaaaattatttcttctttgattaggaaggatttttctgagcttttatcacgtaggctctcaatgaaagcaccaaactgttaacacaaatttttgttaatgattatgagccaattttgtcataaatcaaacatgaatataaaggaatcaacaagtaaaatactagcaattacaccaaaatttttacgtggttttacagttaactctgcatagtccacgagtctatcttattcatatatttttggatacaaaattagggttttacaatcaataaacttctatcctctcaaatatttttctgccctttttttgcataatctgcctctatttatagtaatataagtttggcagttaattacgtttgaatttaaattacataaccatattcctcgaaattatgggctttaattacgtcccatttaaatacgtataactaatattagaaaatcacataactgtgatttgaactatctttaaggcagtcaacgctgacataaataggaacacgttgccaaaggtatctcgctagaggcgtctcgcctagtacatagatgagtgacttagtttatatgtattccagcaatggcatgagcaccagtgtactaagcaaacttaagaattgctctttaaacataggccttgcagactggacaatcatgttctccaaactatttcacttagtcattataacgtgaattatacgctaagtgtttcaa

SEQ ID NO: 397116 - DNA, 550 bp, Cannabis indica
tagccgaatatagttcaattaaaataagctcacataaatattcataattaaacaataaatttaaaaattagttaatctcatctcaagataccaaacacatattaatattaagccattagacagtaatattaattgtaagcggtactctcgatttagcaatcaaacattgataataaaatcgtgcctaacaatatgtcaatctttggacaaacgaattgctcatacaaaataccttataattttcacatatttatcaccacacgtgtttgaaatttagtgaaatatttacttgcatttgggtcagttattaacatatgcatcacttacaaatacacaccaaaaagtccgtggctaaaagtattagtcccaaaaattacaatttgttgtgactaaatgtgtttttagtcacaataattagggttactaatccatttataatctggggatatatatatatggaacacttcttaatggatattacccatgaatggttactaaacaaatttaactataaatattaattttaaaaatatcaaaccatcgaattttg

SEQ ID NO: 397117 - DNA, 2006 bp, Cannabis indica
tcattgtctcttgatggcggtctgcaaggattacatcgctcagggtcttcatcaacctgcgtttcctggttaggatacctcaaagattggtctctcgaggttggctggtttaggtccagaccctcaggatgggttcttcgttccctgcaaacacgattattacgacgtctagagtttgttacctgtgggttgtctgtgcgagtagtaggggcttgagggggcgtcgagccctgttttgtcaatccacttcggcttgtagtgcacgcagttgatcctggatcgcagtatattggtcgctggtgagttggatgaatccctcagataccaccaccggagtgacaggtggaaagtgcattgttgctggtggtgtggacgtttccccgacttgaggaccagctgtttcagggaatagattgagaggtctaatgttacctctccctactccgccattaacgacatccacaggtggtgtcctagctccagataatggcacgttcatcattccgatgttgatggactcgttgttagcacctccgtttgtttggtttccagccacgatggtattcttacttgaactgaatgaaactttaattctcgtttcccacagacggcgccaaatgttgtcgagcaaaattcgcaacaccaaatgtatatgatattgttaatgacaagaagaaaattatatgaagaacaattgcgagtattcaacctagagtggcgagtactcgaactgggaatgggaaattcttaacagaaaactggaaattacaataagacagaggattatagtggttcagtcatatcacggtctgcttagtccactgtagcaagagttccgtaggtctcatttcacggtggatcacccctttatatacaaagcaggtgtcgaattagttatacaaggattgcattcattgtcaatttgtttttacacattgagttacaataactaaactaaataacgttaacgtcaataaatgaatagcagttactaaattcgtcaacgtatgcgcccttttaacatgcgagttgactgttcatattctaatgttaaactcccaggcgtaacacttaattacgtttaggatgtctgcgttcttaggtagtcgcctttgtggacatcgcatgacgggatgatagaacctagacgtgcgaatctacatcagtttatcaaggatgtagggtcattgggaccaactcgcattatagagagtcagtctttatgtttatgcaagaacatggagaggatacttgcacatagttcaatacatgcgaattaccgtcttgtcctgcataatacgagttataattatgcgatcagactttggtcatactcgctgtgtctcgctaattttatcttgagcgagttttaaaacttcgaggagtctctcatggacgtctcatctttcattggaaaactgagtacacgtgtcctttaaataggagtctggtcttgagtctctaggtgagagaaatctcactataacatggccgaatcacttgatgaaatcgaagagagacgagtcactgcaaacttgaagttgatggcccatcaacaaaaagtagctcgatatttcaacaaacaagtgaaggctcgaaaattctttgtgggagatatggtactaagaagaatatttttaaacaccaaagacagtacgacagctgtactcggacctaactcggagggacaatatcgcgtggtcgaagttcttgaattcggagcatacaaattaggtaagtatgatgaaaaaatgcaactcattctagtacaacaatattggaatggggaacatttaagaaaatactaccaataaagtatcaggtcagacgaccacactaagtactgaatgaacatttacttttaagtgaataacctattgggcggacaacactcaaagtttttgacaaaagaaaaaaagtactcaggtcggatgaccaccatttaaagtacaatttcttatttttgcaatttgttttatttcatgttaagctaaaagatcatatta

SEQ ID NO: 397118 - DNA, 606 bp, Cannabis indica
aatttaataccatgttctacctacacttgcttatttaataaataatataagaaatatctaatcactcacaacacaacatgttacatcatagtatcaagtgtctaatatcaatactcaataaaaaaaattaatagtggtaaaaataaaaatgaaatagtagtggtgcctcaatctaaatttgtttgcactatgtcatatgtttaaaaaattaattatagtaacatctccaatggatgatgtatactttaagttaaaattaccttaaaatataccataaaattatatttcatctaaattttgtatttgtactctaataagcaatgtgcaaattaatcataaactcaatactactattgaaaatataaaagataattagtttcatttatattattggaatatcttgtaaatataaaaattatattcattaatgaataatattaatgagtgataaaaaaataattaaaaaatgtagtatttattgtgggctaaaatttatcttatactattttttgtgctaaatttaacacaatttttagcttgggctaaatttggcacacattttatatcactattggagttaagctttagcaaaatattttaaaaaat

SEQ ID NO: 397119 - DNA, 828 bp, Cannabis indica
ctttgcctacctatgcgatgtctgtgttacttcttctggttaagactgtttcacacctggagagcttaatgtcaaagtattgatgggggtcctctaataatagaacaaaaggtgtcagctggtatagttggcgacgactttgtagaaccaataattcatgagggcttagttttcgtaatttgcaggataacaatctttccttgttaggaaagcagggatggcgtcttcttctgtatgaggactctcttgtgggtcgtatttacaaggcccgctactttccaaacggtaatttccttgcggctgagataggtcctaacccaagttttatttggcggagtgtgtttgaatcacaacaactggttcgagatggtgctagaaggagaatcgggtctgtgtgtctacccctgtgcttaatgtcccttggctgatttctgatgagaacccttgtgtcatttctagacatcttgtgttggctcatagtacggtctcgcagttgatgcacattgatcgtaagcaatgggatcttgaggtcttacatgatttgtttgaggcaagggatgttgatttgataatgcaggttcctctaagtgataatgttaatgttgattcttggttttggggtaaagagccgaatgggttttactcggttaagaggtcctaccgctatctccaaaaactgaaaggagaatggggcattcaattggagtctgaattgtggagggttctctggaaagttaaagtccctcccaaggttcttcactttgcttggaaagctatttcggggtgtctcccaactcgtacccaattgcgtacaaaacatgttcctgt

SEQ ID NO: 397120 - DNA, 1136 bp, Cannabis indica
acaacagcaaagaatttacaaattaacactaaagccaaaatcaaaatagcacacccaaagaaatgaaaacaaaaactaatcatcatattccctaccgcactaatgaaaaatgcggccaacgatccaaatcccacaagagaattcatatttggagatcccttccataatgcccttagaccatcaaaaagcaggtctgaaatgaaatttaaactacttaaatcacaatgcatattaagcttggttttaagatcatctaatcattgtgctggaaagcatttatcaaatagctaaaaataaccatttaaaaatctattcaaataaaatatataaggatacaaatacatttaaacaaagataaagcataacgtatccaaacggattcacaaaccactcaatgatcatattcatatattccattaaaagcatgttactaatcaaatcggcattgaaatctgagtaagaccaacataagaaaaggcatccaactaacctcgtccaggtcccaacaaagcacccaaagccaaaccacccttcagatatgaattgtgaagtagctcaaaaaatgatcctgaaccaccaaagaaaacgtaaaagagattagtaattgaacatatggaaagtagtaaacttctgaatcatttacttgcccccaaattcttctgatgaaatactaaacaaacaaatgggtattcaaatttagtaagcaactataactttaacttgcaaagtatagctatttaccagtcttaacttcaatttgcaaaataacattcactcatggtccttcaacccagaataaatttacattggactgtttagtgtgatgtaatattttcatgggaatggttatctttcacattcccatgtttagtacggggaattttatttgaagtctgagaaaattatcaccgtgataataagattactccataagggaataatcgtaaatcctttcaaaaagatggatttccaagcattagcttcaatcttaatacaaatagattcaatatattaataattttatacatttcccaacaattcaacaattcatcaattcatgtaattcaattaagtaatctaaaaacacagttataagtttccaaacaactatattccaattcatatcatatattttc

SEQ ID NO: 397121 - DNA, 481 bp, Cannabis indica
gatgttgttgtgagcctctaattctactagagaagaacattattgtaccgccctacttgttgaggaccactacattgattttcttaaaatcgcatatcaaatttaaacttttaattaaactttaaactttttataaatatataaccgtacataaaagtcgggatcctatcgtaaaagtttacaataatattcaagatacattttataaaagtgtcgctccgcgactacaaattaaaggcccaagtcatcctgagactggacactccaggcctaaccatcttgatatgtacaatcatcctcaagctctggactaactattgctcagccttcgcctttcatttacctacacatgtaaacaacatctgtgagtcgacagactcaataagaaaagtacaaaacatataacatattaccgacttgtatctaagcgcacatacacctatttataaggctttagatgaatcaagaacgttcttacaga

SEQ ID NO: 397122 - DNA, 504 bp, Cannabis indica
ttctaccaagataactgggaaattattgttgatgacatttctaatgatgtgacatcattcttggagccaggtaaaattctcaaagaaattaactcaacaataattactttggttccaaagattaagtgtcctaacacagttaaggattttggacgaattgcttgttgcaatgttatctataagattgcaagcaagcttttgagctctagaatcaggaaaatcttacttgagagaatatctcactcacaaggtggatttatcaaagggtagacttattggtcacaacaaaatgatttgtcaagacttggtgagacattatggaaggaaatctaacaaacctagttgcatgattaaattaaatcttcaaaaatcttatgatactattgagtgggacttcattgaaaagattctgataggtttaaagttccctaatgccttcattaagctcattatgaattgtatcaaaacctctaaattctctctcatgttcaattgaaacttgca

SEQ ID NO: 397123 - DNA, 955 bp, Cannabis indica
tttttttttttttttcagatcggatttgatctagtttcaatatattaataaaaaaaacttaattcaagacttagactccgaacccggacccagactccttgggacccaggacccagaccggaccagctaggactcggactcgggaccggacggggacccaaacccgagaccaggacccatgcccgtgttgggatttattttactaggatttagatttactaaaaagtatgttgattaacatcctaaatatgaatatctctaatacgataaaattaaacacataagagtttagaaaaccttatcttggttgcagtagaataatatgactccttccgctcagatctctaaccctggttcctttctatcgtagagtattatcaagatctgagcctgagtctctttctctccttcgggttggttactaccgtcttccgcactatgattgagtacttgacttgctatgtgtggccatggcactctatcactaagggtcgattatcaagaacaatgaagaaggctcgaaatcactatagaatgtgtctctcatttactagttgtctgacagagttaggaactatatttggcatgttgaaagtgttggatgagaatgacagcatcatgttccttttttatagtatttcaactagggtttatgatttaattatatgggttaaaaaagaataaaataatcggtaaaaatacactaagtggccgacaaaactaaggtggacctcactagttacaattttgccactttatttcaaccatttatccttctttcaataataccatatttttcaatttcaatcctattaatatcaaaattatttatttaataattataattaatcatcaaataaaattatcatttatattatttattaattagacttaagaaagtctcttaattaacaaataaacctcaaaacttttttcttcacaattaagctatctt

SEQ ID NO: 397124 - DNA, 696 bp, Cannabis indica
cccactaggtatgtaccgttggtagaaatggaaaattgcccactctggcaatgtttggccgagtctaaccaataaaactctgagttggaaagagaggcagtcgcagccagggcgacttaaggaaacgctacacaaaaccaacctgattcttgagtcagaaggcgacgaggtagacctcaaggttcgagaacaaggatgtaggagatgaattaggaaaatccctagaatacccaggaggagcaacatgggggaactagggatgttcctgaagataaacaaccgaacaattaagctccttattgaggggtacctcaaagacccgagggatttgcggattaggggaatgaaaacaatgacatgccagaaacttctcatagggatgagaacaaggcaacccagaactaggaaacaagagatccctcgtaataacgagagaaatcctgagacacaacctaggacaagtgtccttctcaaactgaaagggaggaggcgtacacataccctagcggaggatgtgtacctaacccttcctgaaagagaaggcctatgtaggacgaggcaagttctagctcgggacattcaagatcctgcgaggatagtcgttcagaaaggcgtatgcgagggggagataaaccttgtcgtattaatgatcgagagagtaggattaatacgaggagctatcaatctgagagttac

SEQ ID NO: 397125 - DNA, 558 bp, Cannabis indica
aaactttataatttattaataatcataataaaataagatatagattttttaattataaataagttaaaataataataaaactttaatataatacagaatattataattctaaacgtgccttaaaaccccatgtatttgtaaaagggaattgccgacagttgaaaactgttagctatactataggcgatggttttaaatcgatggcaattctcatgcttcaaattttacgcgtttcaaatctgaaatgtcattttcagcattttaaatttcaaatttttactttccctatcttaaattttatttctctccttttaagatacaacccaaaaaaaaaaatgatatctcatttttcaaagtcatttgtaaatttcatttatttttccgctctctctcatttgcgaccacgagccacgtcgtccctctcctccactctccctcactctgtccctttcctatgctctctcgtggtagcataaaagtaagcacaacattctcttatttgttgtttaaatttctatcagtcatgatttggtttgttgatattgatctgtgtgtgtg

SEQ ID NO: 397126 - DNA, 1215 bp, Cannabis indica
taagtattattgtaagtcttttagtctaacgtccatcctaatagtagctcctaagagtagggcttacaaagtataaaacaatggaagaagctcatgaaataggaataaccttgactctagcccaaacgggacattgtatcagtttgttagaaatcttggaaaataattgaatatgttttattatggtattttggcaaacatgtttccttacttgttattttctgaatttatttgaaccaagtgatttgttttggtttattgatatttttagtgtcaaaaatgaagaatccacactccaatcctcgttattacatgcctttgcaaatgaagaactctatagtgtgaagatgtctcttggtcagagcatcaactcacacttgcttatgatgaacttaaagttctagaaagaaaatttgttggcaattgttctatcaagagagcaatgggttcaattcattctcaacagccttccacctgagtataacgaatttgttgtatcttacatgatcaacaattttgactcgtgtgacatggataagcttgacgttgaactgcgtgcttatgaaaagactttgtcacttgcaaggagttctacctccagagttgcggataacggcaaaaggaaagttgaagatattgaggatgatacgtccgacaatgttgcttcttcaagttcaattttgagagctaaaatcgagattgaaccggcaatatagataattaaagaacaactaaacagacatattcttctatgttctcactgtggagagaatgaacacttcaaaactaagtgtcccaaacttctaaaccataagaacgtagctacttttgtttttgaatcgtctgttttagagaatgacaaatctatttggattgttgattctggatccactaatcatgtttgctcttcattgcagttgcttaaaactagggattacttcaatctaggggagttgaagctcaaggttggcaatggtgaattagtatcagtccaagctaacggaaaagctcgcctcaagtttcagaataaatttttgtttttatacaatgttttgtttattccaaattttagtagaaacatgattagtgtttcatgtttataaacacaatgttcaattgaatttttcaagtttatttctactatttctagtaatggcattcaattattgttggattttatgccctaaataaaaccccatttcaatgtaatccaga

SEQ ID NO: 397127 - DNA, 1305 bp, Cannabis indica
tgttgtgtatggtctaaataacacgtctggaaagttaggcttgaattggggttgaattggtgaagatatgaaaattttgatctttcctgcactgaattggaattccggttcagaggggcctgtaggaaccagaattccgtgtggctcccaagaatttttcctagaaccggaattctggttggggaaccggtctaccggttggggggaaattttgggaaccctagtttttcccatttttgtattgtttagggtatttccatgttatttatcgatagagaaacttttagtttcaagtttaagaccctgaaaagtgatttagcgtatcactcacctatgttctgattgatgtgatttaggagcctgtaattcgccgagcagttgttccactcaggttggtcggcacacctgaatttggaatcaaggtaagattagtataatgtcatgcatatgtttatacatgtttagcgtacatgttagttgctgatagaataacatattagatatatgttaggcaaatttatatagccatcagattagcatatcagggcaacagtgaggtgtacatagagttgcaccgagatgccatcagatatatgctaggctatcagatagtatggattaacttctacctcatcagtgcgattagagtactgagtataggctggatttgcggttagtcatactttgtcaagatcgatcctgattcagtaaaggttatggttaggtgtatgagcgccttattataacccaggatattagtatgtttattatattatgcttttcttactaagtctgtcgactcacagtgctattgctatgtgtaggtaaaggcaaagctaaagttaagcagccgtgagagcgagcagatgaagattgtacatgtcgggacggttaggcctggagcatacgatcctcgggacactaaggcttttgtattttgtcgctaggcgacaagtattttgtcattatgtagtaaacttttgtcacagtattttgtaaacgggatcccggaagtttatataagttatttgttatatattaattaaataagcaaaattttaattattcacgttttcgaataacctcgttgattagcaacgagctacatagtatgttaaaaatcacgctaacttgcctatgctagttagggtgttacaatttggtatcagagccaccaggttgttttccgaagatcgtcacgacatgtacaatcatcatcagcagttagctcgttccacggttcagtaagcttttattgctttagtagtttatttatttatttatgaataagaaaagcctgatagg

SEQ ID NO: 397128 - DNA, 746 bp, Cannabis indica
aaacgaaaagaacgaaaagaaaccagagaagtgttacctttaaagattaacaacaaagggcaatggtcacttgttgagaactccaagttgagcaatgatgattgtggaaacgttgatagccaagaattggtgacgagagctttgtcaagtctttcttcaatccactcgatactatttctccctttctcccaagtgaacgggtagccaagaagaggcatgtcgatcagattacaatcgtctaaggccttaagaaatccctcaataagtcgatcgggatacttccttcctcctttcttctctaagtgcgaccccaaattattcatatcgcccaaaaggcaccatgggagaaggctatcatttttgagtgaccgaaaaagatcccaagtttgagaccgaagttctctttttggctccccgtaaatgccagtgaaacgccaaggaggcagccccacaatatgaaccgtggcatctatatgatgaaaagagaaaccttgaatgacaacttcactagcttctttccaaagaagagcaagcccaccactgtgaccacgggcttccaccacaaaacaactttcaaagcccagttgggctcttaaactttccaaactagacttattacataacgtttcacaaagaaaaagtaaattgggcttcttttgagacacaaggtctcttaagaattgtgaggcccgcaggttcccaagcccgcggcaattccaacttaagaatttaagctcttagtagtg

SEQ ID NO: 397129 - DNA, 520 bp, Cannabis indica
aaaataaaaaataaaaaattctatctcaatcttcttcgttaattggttgcgattgtgaaatgatggctataactttaaactaagtgattatataaagaattattcttttaaaaaaagtgattatataaagaagtttctaattcctcttacacgtgttaaacacaataattacaatgctaattttcatttatcttttagaattgctaagatggcatccatatatttttaatattttttaattaatatttactattagaatgaaaaataatgtaataaaaaaatattataccacagcatttattatattttttttaattattattttattataagtaagaaaattggtttatttaatatatattaaataataaaagaattatctcatatactattttttgagtttctaaagtggttgcagctagttgcaataagagtttctatacaattttttgttacaatttaggttgcaaggctagttgcaataggaatttctatgtaaaatttcgtaaaaatgtaaaaa

SEQ ID NO: 397130 - DNA, 896 bp, Cannabis indica
aatatactttatgtagttattttttctaatagacaagagattcaaatttcgaactaccttaatttaattaagagtagtgataaatattaatgtatatttttgtgtaatcaataaaaatattatgtccctttaaaaaataaaataatttacagctaaaccctctgaattcttaattcacttataattaactctctaaaattaaattttagtggtttaatcctccaaaagactaaattgttagcaaatctaaggtgacatccatttgccacaattaagtaccaacataaattacttatatatacactattatacacatgacacatttatattagtacacataatattattatttaaaaattatcaaaaaaatattgcaaaatttattttaaaattaaaaaaataatttaaaactataaaataaataaataaataaattatttttattttcttttcttttattctttatttgctaatgattctctctctttccacgctctcttccttcaccatcaccatcaccaccacctccatcaccattgccaccactccaccaccattaccactaccatccacaactaacgcaaccataatatttgcaataataatcacttcaaatcaacactaaaatatgacacaaatccaaacttagatttgaaaaaaaaaggggtcgaacaatatttgaaaaataataattgaacttagatctaagagaacccaatatatatcatcttgtttaatctctcgcaaattagtatacttaatcttattgaaaacttaaaatttaattttctctattgtacacttagggctcatttggaacgccgtattagatcgtattgtattatattgaattttattttatgcaatatttttatgtaaaactatatgtggtatta

SEQ ID NO: 397131 - DNA, 385 bp, Cannabis indica
atgtctacatccggttccaaatcgtccaagaagggaggaaagcgcttggccaccatggaagaagtgatggtgggtcccgtcgcccaggaggggtatagacctcgtgctacgggatgggaagcggccgagcttcactctactttgacttgccctcaccaactggagaacattgtggaggtggccggcatcaaacctgcgacgtccgggacgtaccaccggacgccgcgtgatgcggagacgcccaatcacaattacggaggcttcggagcttggagccagacgcatttgatgaccggggctatgcttccccttcaacattatttcattaatttccttgtatttgtcggccttgcgccataccaacttattccacaagcttaccgcc

SEQ ID NO: 397132 - DNA, 633 bp, Cannabis indica
atctattttgctcgctaaaaccaagatcctataccttttctaagtgactctatagactaatcgtcacattccactattaccgggcataaaaatatgaaaaacataaaattcatatacatcatgattaatacacatagaattcaaatatatccccataatcataaaaataataattaaaagtctatttctaaaattaaactctaattatctactaattctcatattaaagttaagcagccattacaattattcccaagttaaaaggatttcatccccgaaatataacctaaataattccagatattgagccctcatatgagactccaactcctaggtggcttcctccaccttaatatttttccagagtacctagaccaatgctatggtcttatttcgaaggactttatcttttctatcaaggatttacactggttgctcctcatatgacaaatctggttggagatctaggttttcataactcaacacatgagcaggatccgagatgtacttccataacatagaaacatgaatacattatgaactgctgatagtgctggaggcaaggctaaacgatatgaaaacaatccaaccttcttaagaatctcaaaaggccctataaatctagggcataac

SEQ ID NO: 397133 - DNA, 554 bp, Cannabis indica
atacctaagtttaactctttattaattggagataaatatctaagtttaattttttacagtaataatacctaagttgtatttttagaactttccaagttacctggcctttaagtgtcaagttattatccacgtgttatttttttattggtatatttaaattatcttttaaataaaaaataaaatttaatgatctagactaattagggtctgtcatgtggccattaacttaatacttaattgccatgtaccaagggaagttctagaattttagcttatgtattattactgtcaaaaattaaacttgaatatttatctgcaatcaaaagttaaacttacatatttataccgcaaattactcatttattttaatatgagttacttgattatatgcttatttgaatatacgttgatgtatacatattaatttatattttattatgaattattgtacttattaattttttttaagaaaccagaaagttgtattactcaaaaactaattttataaagaaaacaaatctaagaaagacataaaatataatctttagaaaata

SEQ ID NO: 397134 - DNA, 700 bp, Cannabis indica
ggtttgcttcctctaatcgactcctgggatgacggttttctaattcaacgattggtatgtactttgttggatcataggcgccatcctcatcaactagattaggaagagaccagccattgctcatcttaggccgttcaagtctggttcccaaattctgggttttctcggagcttgtggtccattcaaatgataagtcgaaatatccttggggactcattggctcttttccaggacgatgagtggtttcttcataaggattattttctttgttgtcagccataagaggaatattattttttatatgaggatttttttttcgagctttttcaaggaggctctcaatgaaagcaccaaactgttaacgcagattttcgttaaccagatatgagcctaaatgataaacttgcacaaaaaaataaaaacagtaaagaaaagaaaatgaacacaaaggttttttacgtggttttgcagtgaaaattctgcatagtccacgagtcaatcttattagatttctgatggtttttcagggccttttttccttatgaatctttttgtctccttttcaggataacttaactctatttataattacataatcaggcagttaattacagagttgactatgatctttacaacgtttatcccctgaaatcgtggggtttgattacatatcacgtagaataaatgtggttattatttg

SEQ ID NO: 397135 - DNA, 651 bp, Cannabis indica
aaaaaaaaaaaaaatcttagataacaataaaaatttggtagaggaccaatcttgaaatggatcttagaaaaataaaaattaaacttttattataagaataattgatatttttaaatattttttttttagtttggactaggggtgttcattggatcacatccaatagatttggacccatccgatccaatccaattatttattggatattggatttttccatccgatccaatccaattgaattgagtcatccgatccgatccgatccaatggatgtattggattggaacggttccatccattggatgctttaactgggtttttattggagtagattggatccattggatccaatggatgaatctaatctattttagccactatttagtctgatttcattaaaaaaatatatatatatgaaaaaacataatttatacctaataatccaacatagataataaaataatatataaaatattaaataaaataattaaatatataaaattataaatattaaatatgattggatgtacattatatgatattggattggatcggtttggttatccattggatcggattcggatgtctcatccaacatccgatccaatccaattcgatttttaaaatttacattcgatctgatccaattat

SEQ ID NO: 397136 - DNA, 560 bp, Cannabis indica
aaaaaataaaccagcctacgaaacccaaacagacattttgtcttggtacgctcctctagaagagtggaaaaaaatactctgggatgaatgagaaaaggtttgcaacaatcgacacgtctttgtttatccatcaagaccacatgtagccaacatgatggatcactatactgtcttccttatcagtctaaatgcaaaattggacgagaacaagaaaatagtttgcaatcccacttttgaactatacggatcccaagaagcacctttcagagagcaaaatgcagagtacaaagatctccaaaagattatctttgagaaaatcagactattccaccagaaatttggccaagaatagaagataatgccccatgggaaatattcccctcagattattcacaacgcatagtgtcacgggctcaccttttcaggcagcggaacacccgtgcggcaccttgacttctctaagccaaggtcagccttccaaccatccgagtaacaatgggctcatttttcgcgcgaccgtgtgtctcgggcacactcccgtctctcgaacaactcccgcc

SEQ ID NO: 397137 - DNA, 764 bp, Cannabis indica
caatttatatttaaaatttattagtaattgaagctcctcattcatgtattctcacttttttaagtttcattattggaaaaaagtattccttttcttgaaaaaaatatacattaaatttgtactgtgttcatgacgttacaaattaatcatccaagaggagtgatttaatcaagtacgagtttgtggttgagcacaaaaagacaaatgtgaaattaaaagagtgctggaccagcataggaccacgtcttagctctaataatggtccagctcgtactcgattatttattacatttatttgttttcagcgtcgtcggtggttaatagttattagtcattactaatgacaccacataacataatcactccctcaattaccgggtctttatattggtttaggatttgaaaactattttatgtttttgaaaattaaaatggtgggggtccacctaagaattcttgattggttgagtgttttcaaaaacaaaatttgaatactattttgagttttaggctaaaaaatgaaaacaccatttttatgttttttgtgttttcaaatcattgaatccaaaaactctccaattattctcttacttttttattttgagattcccaaccaatcacatattcaattttttaaaactcaaaaacattaaatcacactacaaccaatcacatatttaaaaacaaattttcacttacaaaatttaaatttttgtttccaaaacacatttttaaaaaacacaatttttgaatcacaaaccaat

SEQ ID NO: 397138 - DNA, 874 bp, Cannabis indica
tctctaaaggaaaaaaaaaaaaactttttggcgcgcaatcttctcagagtgtttggttacagcggcacggtaaatgaagatttatttgtcaaactaaatatttggttatataaaatttaatgtaatgttacattttgcgtggagggatttccatgaaatcttacttactatgggttggaaaaaaaaaatatagtctctaacaattcatgtgatctatgtggttttagaggagagtctaatactcatgctattttctggtgttcctttgcacaagaaatttagaaactcctggattttaaatttctacatgaagtgagagaggtaattgacgtccaactttccacgcgacagcttgatatggcaaccatagtgatccaatatctatccaggtcgcaattcttttgcaaatttgttttaccggagtaactgccccttgtattcttgtgaattgctcccttttgagataactgaggtgtcccttcctcttacagaggagggttataatcctgggttgcttgagttattgggtagatcgagctgatcatggacatcgtcctacccctttatatatcgtgtccttgtgatatgagaccttttatctcatctttcagctggcgacattcttccgtggtatgaccaatatctccatgatattcacaccatttagttggatcccttttacgcctcgcatttttcataggttttggctcactaaaaatgacttcctgtacatgtgtgaggtagatattttcccgagtttccttaagctcggtatgttcagcataaagggggatatacttgttgggtttcttatccttgggcagccttttggaatcgtcttttttctttgatcctgaggcttccgaatcaagtt

SEQ ID NO: 397139 - DNA, 1080 bp, Cannabis indica
taatagcagctatgagtgaaaaacagatgaagaggagaagcagaacagagtaaaatactctgtaataattttattatcttctgaactaactttacaaatacaagagagggaccttttatagagtgacttgagttagttgggaataactaactcagcagaacataaccgaaaaaacagatcaagaccaagaattggttaacagatatgtaaatgagggtaatcttataatagcccccctcaagctgtagtgtagatgttcgaaatgctcagcttggagacaatattgttgaaaggtgttggtagcagagcctaggtaaaaatgttagcgaggttgtgttgggattgaacatgaagtaacttgaggacgtcttgttaaacctttcctcgaatgaagtgctagtcgatctcaacatgtttagtgcgctcatggtagacagggttttcactgatgtgaatggcagtcgtgttgtcgcaataaagagaggtagatttgttgagtgagattctaaagtctttgagtaaagctaggatccatgttacttcggaagtggcattggccatggctctatattcggcttcagctgaagagcgagaaaaaacctgttgtttttttgatttccaagatactaatgttggaaatattttacgaggatcttactaacaagtatgttgtttaacatcctaatatgaacttctaaaatgatattaaataaacacatataaaatgtgagaaaccttacagtgattgcagcagaatataatgtctccttccactaagatctctaacccttgtatcctttctgtcgcagagtatcaccaagatctgagcccgaatgtccttctgttcaattggattcttcatgatcttccacactatgattgaggtaccacttgatgtgtgtgggcactcactctatcactcaagggtttggtttcagaagtgaagaagaggaagagatagtggcggctaggttaagggagaaggcactcagtttttctctgaaggaataagatgcatcatctttttcctgaagccatcactacctatttataggatgccacctagggttaggttagaat

SEQ ID NO: 397140 - DNA, 893 bp, Cannabis indica
ggtctaggtcccccatctatgtcaggttcctatgtcttgctcttggtctaggttcaggtttgggtcccgagtcttggttcgagttcgggtcccaattcgggttcgagtcaaagtttcgttcccagtcttggttcgggtccgggtccgacttcgggtcccagttccactgtgggtctgatttttgggtcccatgtctaagtcatgttgttagttcttgggtgtggtcccattttttggtctaggtctgggtcagggtctgggacccggtctgggtccaggtcctagtcttggtttaggtcccaagtcacaggtcccagtcctggtggtctgaatttgggtttatgtccgagtcttgatctagggtcgggtcccgtgtctcgagtttagggcactattttttgtcaaagtcccccatctaagtcctgatccttggtccaggtcttggtcaaggttcaggtttggggccaagtcccctatctaggtccggatcctatgtcccgacctaggtccaagttcaggtttggggcccaagtcccatatctaggtccggatcctatgtcccagttcggtttccattctcggtctaggtcaggatctgggtttgagtcctggtccaagttttagtctgagtcctgtgttcggatctgggtctgggttctgaggcccaggtcatggtcatggtccgcgtcctaggtcccgatctgggtccatgttcgggtttgggtcctagtcccagttttgatttcgattcagtgtctgagttcgagtttgggtccgggcctggttggggtttgagtcttggtttgagtctaggtccgagtctgggtgtaggtttggatctgggttcgggtctaggtccgagttttggtcttaggtgcaggtccaggtctggg

SEQ ID NO: 397141 - DNA, 901 bp, Cannabis indica
aaaaaatgctgcaatatggccgaagggtttgaagttggggtgcccataatggtgccaatcttattgccttggctgatgataaagcccaagcaataagagcatatgctgcccccatgttcacaagcttaatttgggcattgtgagacccaaaattcaagcacctcattttgagctcaagcccttcatatttcaaatgctccaaacaattggtcaatttagtgggttgcaaacggaagatcctcatctccatgttcactcattcttggaggtgactgattttttcaagctacaaggagtatgtgaagaggctgtaaggctgaagttgttcccattttctttgaaggatcgagctagagtatggctcaatacccttcctcccgattcggtgataaattggaatgacttagctaaatttttttgagaaagtattttcctccaacaagaaaacaaagtttcgaagcgaaatcatgtcctttcatcaattagaagatgagaccactagtgaagcatgggaaagattcaaggagttattgaggaagtgtccacaccatggtatttctcattgtattcaactagagacattttacaatagtctcaatgccgcctctcggatggtgttgtatgcttcagccaatggagccattctttccaagtcttacaatgaagcctttgagattttggaaatgatagctagcaacagctatcattggtcaaccaatagagctcctacaagccgaaaagtagcgggtgttcttaaagtagatgctttggccgctctaaccgcttaaatgacctcaatgaccaatatttgaagaacatgaatgtaataccccggaattaagaaatggattagcaaaaccctaactagataattatgtataattgaggaattatattatta

SEQ ID NO: 397142 - DNA, 652 bp, Cannabis indica
atctccaaggtcaggttgattttaggaactattctcctgtgccgctctgactgcggctatttcatgctctagttcgacattacgccggtttgcttcctccaatcagcatctaagatggcagttttctaactcaatgataggtatgtacctggttgggtcataggcgccatcctcatcaacctaaataggaagagacagggcgttgtttatcctaggcccttcaagcttgagtccccaatactgggttttcccggagctagtggcctgttcatcaaaagatccttgaggactcagtggctcttttccaggacgatgattgatttattcatgaggattatcttctttgttgtcatccattacttttatgttaggaggcttttttgtgagcttttttcacgaaggctctcaatgaaagcaccaaactgttaacgcagattttcgttaactaaatttgagcctgaaagtgacaatctcacacagaaaaaataaaagctgtaaaataaaaaatatgaacacaaaggattttttatgtggtttcgcagttaaaattctgcatagtccacaagtcaatcttattagatttctgatagtttttcagggccttttttgtatgattttttttcgtccctctttttttgatccaacctgccac

SEQ ID NO: 397143 - DNA, 996 bp, Cannabis indica
aaaaaacttaatgaaaagtataattaaactaatttacaacgaaaaccccaatattaaggtaaaaattatatttgtaaactaaaaaaagcgaaacttgaaacttgaagctaatttcattaccaccgaaaaaaaagttaaaaggtgaaatatattaaagattattaaaataaaatttagtaaaatgtatttctagtttagtttgtttaggtagaaaattaaattagacaatattatatcacattagtaaaataattaaaaaaattgagagaatgtaatataaaattaattgttaataattatttaaataaaaaaggtatatttaaattatgacaatgattattcattcatgtatgtaatctaaaattatgacaatgattagtgaaattattggaatagtttactttggataatacaaatggcaattaataaaaacattattaaactctacttttccctcttattcattgtcatcttcttacccatgacttcttaattatacataatttgatttttctacttctcaaaatgtagagccacctcaccagtttaattgaattgctcagtaaaagattaacagactttgtattctcccccaagaatattaattgctaacattttttctatccaaaaatattaaaagtctttattaattaacttctaatttaagtatataaacctaaaattttataattataatttattaaaaaaaatagacaataaactaaaaatttataaacgttaacatgaaataatttatttttattctttaaactattttatttataaaaaaacatcttcagtaaaaataataatattatttttagttgttttatagtttatttatagtagtattatagttgtcatgagattacttttctggttatttttggttattttataatttatttatggttggtttatagttgtcgtgagattgatttctcgttgtgttttagttgtttttttttagttttttttatttttactttttacttc

SEQ ID NO: 397144 - DNA, 808 bp, Cannabis indica
taaaaccactacatagggtacattcttcatctctttcaactatttagcattggttggacactattcttttgacaggacaaactgtcctcccaagggtacgtatgtactctttgcatcttccatgttgaacttctaaataactttcttgatgtatctagattgctataagctcagtgttccttctttcttgtttcttgaaacatcaataccaacgatctttcaccttgagaatctatttgcactccacaatcttcttgttctccgatttcggtacaactacccaattcttgtttttttggagagaatccaattccttatccatggtctggagacttgtttcaacataaaacttacctctttgtagcttcaggactcttcaattttagtcttttctaccactgctagtgcaaacaatatcaagtctgcttctataaaccttgctagaggatgaatctctctctcttgtctctatcctgggtcaaatgataaccttccagacctacctgtctgaatctttttgcaacatatgtttgttctacgttattgtaacgtttctgcttcaagcctccattgtgtccttacacccacagaatgaatggctcttatacacgagtacgccactctggctgctacctagattgatgactaaccctacagaccaacacgagtgtttctagcgtgctttgtcctcactcgcacacttcttgggaaaacttcccaggaggtcacccatcctaaaattgctccaagccaagaacgcttaactgtggagttctttcgcgatgggctaccgaaaataagatgcacc

SEQ ID NO: 397145 - DNA, 530 bp, Cannabis indica
aaaatattttgacaactaatttgtcaaaaaaagactttacgatctctccttttgacactttagataattaaaatatttttaattaacaaacacttgcaaaataaagttagcaaacaagcatataagctctccctgagaagcgtaacattaaactaaaataaaaggctaactttgaccaaagttgaatagtatggcctaaaaatttaaaaaataaaattatagtttcaaacttaactaatcaaataagtaaccaaatgtgtatgagaaaaaaaatttatctgaaagtattttaattaataaaaaataactaattgatatattatttacataaaagtaacttttttaaaacttgcaaggtactgaaatttcaagaagcgattttttctattttcggtatttattttagatttcggtatttatgctgatgtggcacatcattttttgaaaatatttaaattaaacctattttaggtataatattaaaaaaaacctcctactactactgctattattattattattttaatttt

SEQ ID NO: 397146 - DNA, 707 bp, Cannabis indica
aactgatcaacaagaaacgagtgccagctgtccaaattctgttataactaattctagtttgttaagtcagttatatgttggttgtatgatccctttgtgatgacatgtctataattaagattctgcctcaacaagattagttaagcagctttttcatccatccaattcttccttttctctctcgttatttcactctgttataatctgcacctagtttctttcatagtattagagctatggcttcaaattgaccacaagctctagaaaatgttcaactagctgctctagtacaagttcaagaagttgccttaccaaacaataacttactcccgctcaatatccgactcggtcgaacaaattatactgtggagatcacttgtgctttctgttgttcctgcctacaatctcgatggatatcttcttggcacaattccacaacctccacaaaattttgcaggtaacaatcctaatcctgcttttcaacaatgacttctacttgatcagttcatcatgcatggctaatgaattcgataactgaaccatgcttggttatgtgataaattgccaaacctctgttgagacctagacgatcttcactcaaatattcgccaccagatcgagagcagggccggcccaagcattgggcagcttgggccattgcacaaggcccccatttttttaaggctcattttttttttaaaaaaaaa

SEQ ID NO: 397147 - DNA, 524 bp, Cannabis indica
gatttaccaatggatgggactggtaggattttgtcttgctcatagacaactggagaacctcgtttaaccactctgttgatcaagctgggataaggcagggtatgcttgatactcttggcagaggcagaactcataatccgatcatacatgagtgttggaagatcaatgcttacaccagtgcctaaggcatacagaaatcgagctgtattgtagttgatcgtggaaatatgtaaatttgcccaccagttggacatagcaattttatggaggatcctggaaaactctgagagaaccgtgacaggtaactccttcccattccaaacaaagttaggattgccagtaatctcagcacctacatccttaaactctggtttatactcatcattaaatgtgggatgggtgatggttttgattttcaggacacaactgatggtggagggggaaaactgaaacctattacctctaatataagcaagataaaggaactgactcttcctatttagaatgctttcatctaggttggc

SEQ ID NO: 397148 - DNA, 858 bp, Cannabis indica
attgatataaatgaatctttttcgttttgagtgaaactattttaaaagatggaaacagaaaatgttatttctcctcacgatgaaaaaggttgcttatgttctgacgactgacgaacctgttgtttgtaatactgctaaggatgatgaaaaacagaatttgtaatactgttaaggatgatgaaaaacagaaggaaactactgatttagcaagctaggttgagaataattttctgtgcaaaaattatattcccaatggtttatttgacgatttgtataactactataattctgacaaaattgccaaggaaatttgagacgcacttcaaaagaaatacgacgacactgaggaggctggaactaagaagtatgttgtcaactgatacctcaaattccagatgactggcgataagtcagtggaggctcagtctcatgaactttagaaaattgctcacaaaataatttttgaaggtatgtctttagatgaataattctaaattgctgttattattgacaaattgtctccttgtttgaaagattttaaaaatattctaaggcacaaaacaaaagaattttctttggaaagtctgatcactcgtcttcgtattgaggaggaggctcataaataggaccaaaaagaagaagtgcttgttgtgtcagacaacaacactaagaaatccagtgcaattctgaaacccactgagaaaaatttcaagaagtacaatcgtaagcatgctccaaacagtaacaataattctcagaataacaagaagaattggttcccaaggaacctaaacaaacaacagaaaccccctaataagaaagacccaacaccatttttgtgctttctttgtaacaaac

SEQ ID NO: 397149 - DNA, 680 bp, Cannabis indica
caatttttttttctaaaaaataaaaaaacataagtaaaaaaacctataaaaaaacataatttgtaaaaatattaaaaaaaaagataatttcacaaatacacaaaaacaataaaaaaaaaattatgaaaatacagttttacgaagttttaaatatttttatgatttttttgattttatttatagaaaatatgctcattttatgttttacttatgttaatttgttgttgttattagatgttatttttattttacttttatgtagttttttttgttattttttgtgttatttccaatggaaaaccgtaaaaatgtaaaaaaaaaaaaaaaaatactctaaacaaaaaatagtgctttatgtaattatcccaaaaaaaatataattttaagtagtttgggtaaagtagaatatgacacaatacatgagaaaattataacagtttacttttttaaggtataaataaataatattatggggttatgggattttttttattttttttatttttttacatttgtatgggcttttttatgtcatatttttgtaaaaaaatgaaaatttcatatttataaaacaataataagtttggcccgaaaagtcaccggcgccgaaaaagtcgtcggtgttggaaaagtcaccggaaaagttattgtcgccgaaaaatttactgataaagtcactg

SEQ ID NO: 397150 - DNA, 972 bp, Cannabis indica
agagagagagagagtttggttttgatttcttgattttttggataagttttaattaatattcagcttataccttcctaataatacctaggaattaacttactagaaaatccaaaatcccactaaaaacaaaaagggcaaatgactcatttacccttacttcactaagaagtaatctaaccaactaggggtaaaatgatccaaaaccatatccccaaataaactcgatattctaaatgtctaactatcttgccccgctaattcttagatactctaccgtatctatgtgactcaaattggccaaattgtcacattccactgttgccaggcataaaatatgaaaagcataatatttcacatataacatacataatacacctagaactcaaatatatctccataaaaatcctatttctaagagtaagtcctaattatctgctaattcccataataaaattatgtggtcattacaattatcctccgttaaaaggattttgtcctcgaaatctaacctaaataactccagatactgagccctcatatcggaatctaaatcccaggtggcttcctccactttactatttctccagagtaatttaatcaatgctatagtcttatttcgaagaactttatccttccgatcaaggatctgtactggttgcttatgacatattttgttggagctctagggtttcataactcagaatatgtgttggatccgagacatatttccttaacatggaaacatgaaatacgtttgctgacaaagatagtggtaaggctagacggtaagctaccaatccaaccttttccagaatctcaaaaggccctgtaaagctagggcatagcttgaccatttttcccaaacacttaacccctttcattggagatacccgtaggaagacatgatcttctacttgaaattctatatgtttgtgtttcagatctgcataacttttctgcctgctttgagaa

SEQ ID NO: 397151 - DNA, 814 bp, Cannabis indica
ggttaacagcttatctacctcttactttaaggcgtccgcttttaccggatcaagaggacgtcgcttttgctatacaggcagcatgtctgggttaacattaaagacatgggtaatcacgtgggggctcatgccagtcatatccccctggcaccacgcaaaaacatctgtggctgcctttaatgctttgataatcttacttctttcctccggctctaggtttttccatagatggaggaccttggtggagttgaggtcgcacacatttacttcctcagtgtcctccataggttctacaattgtttttgatcccacgcggggatccaactcatcttcttccatcaatcttgcttcattacccctgcacaccaccagcactgacaagttcgttgcgacgttgtagcaatgccttgcctctcactggtttcccctcactgtccccaccccgacttcctgagtagggaatttgaggcataagtgtcagatggaggtgattgcttcgaaatcgaccaaggcaggccggccaagaatggcattgtacgttgtggggcaatccactactacaaaggtgcagtatttgaaagtactatgtggggcatttgggcacagggtgataggaagcctcactttccccattaggataagagttgtcccgttaaatcctgtgagctgggagccgcagggcgatagatccttatccgtgaggcctgataactctatggtatagagttattttttatgcttttaaactaaaattattgtgagaagagtagtgaaaatgtgtttgtttgcttaattttagttagttttagtgtta

SEQ ID NO: 397152 - DNA, 534 bp, Cannabis indica
ctattataagaagctatttttttataagattgaagttcattttttcaaagttcactctatttttagtttaaaagtgtatttagagaatatggttagaaatgttcttagtaaacataacatgagtgtcttgttttagaaaaaattaaaacattagtttttcgaacaacacttctattttctttttctcttttaaaacaaggattgatgttgtaatttttttcttaaaaaaaaaaaccctcaatggtaagtttattttcttctaattataggtatatttggaaaaaaaaaatactacatattttgaggtcaaagcccaattgaaagacaagagatagtagaagagcccatatatgaatagtcctattatttttttgaggaaattacactctataaccattttattgtacccattttaatttttacctcccttttaatattctttaatttatacccactttttaaaattttgttcccgttatagccttaggtataaaaaaattcaattacatctctaattaaaaccataacctctgc

SEQ ID NO: 397153 - DNA, 730 bp, Cannabis indica
aatcaatcaaaagcaatcagacagaactggtgatggggaagacgaacatgaaagaattcaaaaaacagaggaaggcgggagtagttatggtatagttaagaaagaagataatgggaagaacagttaaaaagaaaaaaacggaataaactgccacagagcgacataaagggcagacaacgctcaatattagtttgattctttcagtttactcccgtaaatacaagtaagatttatatttgttatcataatcactttatattaaaaaaaattaattaaaccattaaattaaattgaattatatatggttatttattatatcattcataattaatatagaacataatattacattgaattttagaattgaatttggttaaacagattaatttaatcgatatactaaataaattatgtagtactcataattctcctaactctctttctcccaccatctcagtagttggaaatcctcttagcaaacctctcttcttcgaaaaaatctccttcaatatttttttctttgtgttatatatatatgcaaaaaattctttgcaaatactgctacatttaccatgctaatactgattattgaagggatttattcttattttgtttctaagagaattattttctaaatttctatgattttaatttaattataaaacatctaatataaaattaagtatacgtgccttgcacgtaactttcttctagtatatatatatctgct

SEQ ID NO: 397154 - DNA, 1162 bp, Cannabis indica
cctcatgaaaatgaggaagatctcagcctgctaggaatcaccagccttgttcccaaacccatagagcaaggactcgtacgtaccctgatggggaaaatacgaaaaaccgctcttgggaggaacgaacagagcgtgaagaggcaagtgtgactttgaggcgatccagaactcatagccgatcaactcgaagaggagaaagtactcaacaagccaatgatcggtagagtatgggaacaagtaaatctgcaagccacttaaaaacaaagtctataagtcggacgcaatcaatgagtaaaatgagattcgccagcaattactcccaaccaaatctgcgagagcacttgaattagaagaaacctgatctttgccaacaacttggtccaaagcaagaggatccaattcaattgcggataaacgagcaggaggacaagttcaggagatatcaagtgggggaaataggaaatcatctggatacggctctgatgaggagcttaagctgtataacccagatattatgaataccccttttccttcggtatttaaaaacccgcatgtctcgttctatgatgggaccacaaatctggtatcgcatttgaataactttaacatgataatgcgagcaagtaacatgacgaacaatttacgctgtattttgttctccacctcgcttgttggagcagtgagtagttggtttaacaagttcactcgtcattcaataatttcctgggagcagctgtccagggattttaagaaccaattccaagtcgctagggataagcgacccgaagcggcctcgctaaccaatataaagcagtagcctgacgacttaaggtgtattgaagtcgttttagcacggctgccgctagggttagaaacttggatgacagcacgcaacttatagcccttcgggtgggaatctccactgatccactaaccaccgggggcgagttgtgggatgacctacaaggacgtctggtacgaaacatcactaacttcaatgagagagctcaagtgtttgtcgagaaggaagaagcccaaaaggaaatgaacttgttgaaaacaagcttgggcggtaaagccagtaatgtttcaacagggactgtttccacgagaattgataactcggggtttctggtccaaaaagaaaggacggaggtaggga

SEQ ID NO: 397155 - DNA, 582 bp, Cannabis indica
ctacaatagtccgctgccaccctacacacattcaaacaatcctaattcaaataagaagatgacatctcatcaactggataatagagtaagatcaatttgttgataaaacacatattatatggctctcctaggaattggaaggtttatgttaatttgtgtagttgttatctgtattctcgaatgctggtacctcacaatcgcaagtagtctaatatttaaaataaaaaaaaaaaaaaaaaaaaagagagagagaggtttttgggtaaatattattatcaaatggtttaatggttaaaaaaattacaatcgagacttaaatattaaaacaatgttatttataaatattaattactaaaaatatctattaaatattttaattagtttcttaaatatataattaatttaattttagggaaaaaaaaatttacctattagtaacctgttaaaaaaatataggattattttcagttttaaccaaaaaaagtaacaatattataaaaaatacgttcagctagccaaataaacaaatatacaactcaaataaaaaaaattacacaaataccacatacacacaccttcaac

SEQ ID NO: 397156 - DNA, 912 bp, Cannabis indica
aagaggctagtagctttaaaaagagcatattaaatcactatatgatcttacaaggttttcaggcacaggtatataatattgcagcagtgtacaagttgatttgccctcgtcgaaatatggttatattggagtcatgaagtatgggaaagattgaatattctaaagcatagtgttatactatggttggcaatgcttaacagttaaaaactaaggatcgaccggttaagtttggcttgcaactgactgagaattgcagcctctgtacagtgcaaaaggagaatagtcaacatctattctttgattgtaattttgctgatcaatgtcttcaggaggttaagaagtggttgtcttggaatgcaaggtccaataagctccctcagcttgtaaggtggataggtaaagcaaagattagtaagtttaggaagcaagtgcttgctacagcagtggcttctctagtttacagcatttgggaggctcgaaataatatcttttggaatggagggcagttagctgccaccagattacttgaagatctcaaatggaagctcaaagtcagaatctccttgtttttaccaaagaaaattgcatgtgtagatagagattggtttcttgcattataagaatatacatacttagttagaaaagaagaggaaaagaaaatgtatagattaacttgaggctccgattttggagtacttttagtgtgtaaaaatttgatttgagcaatacaacttcttgatttatcaaaaaaaaactctatcaaaagcgttactaatatcaagtttaagagctgcataacacattctaccattagttaataaaattacattaagcacattatatttcatttgaatccagaaaatgaataaatatgttaattccatttttggcatatttaattgacaaaaatat

SEQ ID NO: 397157 - DNA, 898 bp, Cannabis indica
ccttgagacaaataccttcacacctagaagaccttattgaaataatacaaagacaaggcaaaccattgaaagactacattcaaaggttcatggtcgaggacaataaggtcaaatgacaataaaaggaggtggttatgaggccatacttggaggtatcttaccgttgagtaaaatctaaaaagattttagaaggatctcaacaaacaacatgaaaaagttccttgaataagcagatggtttcacaaagttgaaaaaagctgactgacaagcctagataggaaggcaggttagtattggacataataaaagtggtgtatagcccccaattctgtctaacatgccagctagtgtgggaaataccgtccacccctctaaaaagaagaataatggaggaaatataataataacgacactagccaaaataatggaaaaaaggggaaattcaataattcccatacatcacaggactcaaaggagaaggaggagaagtacacatgcttccctctactaatagaaactcctaaaataatatacatcgctacccaagttgatgtcccatacaagaagcctctttctatcatgaaggacatctgttgggttttgtgccttaaataaaactcatttcaatataatcagatttataaattaataaagatcagaaattacactttatgttgcatggttcacatgatttatttcatgattttattattaaattctaagtgcaaaacatatgtatttgttcatgattatagtgttgtcaacacattggaatataatcatggttatatgatcaaaagtttaatccctgatttgtcagttcactagatttagactggcatgatattcagcgataggtatgtcttacaccttgcataaatgttatgtcctttccagg

SEQ ID NO: 397158 - DNA, 902 bp, Cannabis indica
acctttaatcttgggcagcacctagggttagcttaatccaatctaaacttagttgattgaagaagaaaaactcaacttcagatggcttcctaggattttcgagagagagaaagagagagcaacatatattatttttttcttggcttttatctgacattttctatcctttaatttaaataaaaaagaaaacctaaattataattctcattcagccaaccaaaattcaaaatccacataagacaaaactaaattaatacttggtaaaatgactattttacccctcctctaaagcttgagttataacttaacctaagggtattttggtcattttctaactttcccgatttaatctacttctcaatattttaacctagtccgataaaattccaatatagcacaatttcaaccatcgtgaaaattctgaccattctgttgagttccacgattgccaggcccaaaaatattttattcgaattatggtatctacgatacccacatattcccaatacaatctccgtaattaataaattacactttattattcatttactcatatttccctaattaactcgtaattagtttaagtaggattataatcctactctaatacctacttaatcatatatttaataaaatatgtcaaattcaaataccaatatattattattttttttgggaaattacaagcgatcagctcgtctcacagttcagtaagcctttactgctttagtagtttattttaatagtatgatttagaaaaagcgtgataggaagcatgttagtagcctgatagctgaatagatgcatgttttaaatttccaaaacaagcagtaattagtaagttattcttgatcgcgatctgactagactagctcttgttggaagttattttaccaggaact

SEQ ID NO: 397159 - DNA, 623 bp, Cannabis indica
tgcttgaaaagatcaaggggaaaagaatcatgaggggtaggacagacttcaagcactccttccaagcagggaaggagggttgaagatgtattgtaccccagtgatcttttctgcacgaacaataacgtgcatgcaagagtaacattgatttttatgtagtaagcttcgactctgaagttgtataaaattaaatcttagacttctcttgaaaagattaaaggagaagcatcacgaggggtaggacagacttgaagcagtccttccaagccaggcaggagggttgaagacgtattgtacccccagtgatctttccagcatgaaagacaacgtgcatgcgagagtcacgttgaattttatgtaacaagttttggctccaagtaaagaaggctgaagttggataaaaatttaagcttagacttcgcttgaaaaagatcaaaggagaagcatcacgaggggtaggatagacttcaagcagtccttccaagttaggaaaggagggttgaagatgtatcgtaccctcagtgatatttcatgcacgaaaaacaacgtgcatgtgagattcatgttgaatttttatgtaacaagttttggctttcagaaggaaggctgaagttgtataaaaa

SEQ ID NO: 397160 - DNA, 716 bp, Cannabis indica
aacctaaattacaacaaaaaaatagtatagctagaaatccctattacaactagcgctgcaaccactttagaaactcatgctgtaaatttagaaaaaaaaaattaaaaaaacagtatatggagtattccaaaaaaaaaaaatagtttaatttttatttttaagttaaatataataattttgcttatatattattttatttaccttttttgcttttgaacaattacctaggggtgttcataaaaaccgaaaaaccgaaagaccagaccgtaaccgaattttcggttccacgtcatcaccgaattcggcggtcggtttcggtttcggttttttttgacatggtggtcggtttcggtttttgaaataaaaaaatagtttaaccaaaaaaccgtcaaaatcgcccaaaactgccaaaaaccgcctaaaaccgaaaaccgccaaaaatcgtacggtcggttttatacggttataatttctaaacggtcaattacggttttcgtaaaataaaaaccgtaaccgtgcggtcagttataaaattgtaaaaattgaccataaccgaccgattttcacccctacaattaccctttgtattgttaaatacaaatttataatatttatatatttttttagtttcaacaaccacattgagctcaatttaagttacaattaattttaacaagatactattttttgcctaacataattttttttttaaaaaa

SEQ ID NO: 397161 - DNA, 1375 bp, Cannabis indica
taaaggtacctctaatcccataggttatttagaaacgttcaatactataatggaagtggatcaggtacctcagcttgcgaaatgtcgcattctcgcgatgacgctagaggaaaacgcccacgattggttcagccaattgcctgaggcctcaatctcgacatgggaaacctttgtcgccttattcctcacgcattttcaggccacgatgacttataggccaccctatactactctggctaacatcaacaagaaccaggtgagtctttgcaagactattttaaacgttttaatgctgaagtaacaaaagtcgagaaggctcccgagtcttcgcttgtttgtatgctaataacaggtgtctggccaagaactgatttttggaaggaattacaagcccgaagaccagaatcactagttgagttctttgccatggccgaacctcatatgagaattgagaattctctagcagaatttgagaaaggcaaggacaagcgtaagtcccagtgccgcggtcacgatctcgcagtcctcgagggaaaaattccagaggtcgaagcccgagaagacgcagcccacaaagacaacgaagcccgaagttggccaagtctcctccaaagaaggtgtcctcgccgaaaaggaagggtggaccgcgcttcgtgaattataccgaactcgcggtgccacgagaccacatctacgcaattgaggaaaagaacggggtcttcaagaagccgcccccgatcagaggaaaccgcgacaagagggaccccaagaaattctataagtaccataaagatattggttacactactctggaatgttgggtcttgcaggatgagatcgaagagctgatccggaggggaaaattcaacaagtataaaagaaatgaggaaggtcatccccgagcggatgacaaagaagaaaaccagaacgcgagtggttcgagaatacctcgcaatatattaacaatcattggagggccccatatcgcaggagactctcggaagtcacaagagcgatatgccaaggaagctaaagagaagccgctcaccaatgtaaacaatcttagtgagcggctagagaaattatttaaaagagaatgcaacgacatcacatttatggacagtgatgcgagatgggtccatcacccgcattctgacgcactggtcattgtcgccaatattggcggagacaacatccatcgtatactagtggacaacggaagttcagtaaatcttttgaacttccaagcctttaagcaaatggggttgcatgagaaggatctgcgacctgtaacgttgagtatatactgttttactggcgacgtcattgcactgaaagggatgattaaactcttgattaccttgggaactgcccc

SEQ ID NO: 397162 - DNA, 618 bp, Cannabis indica
ccccagttatcatcaaactagacgcagtttgatccactaggaccgaattagaggacaaaataaatggattagaatcattgggtaacaaaggatcaagtaaaatgctaaccgtgtttccattagcaatagctcgtcgagctccttgttttacaagatcttgagccgcccaaatacttcgccaaataaaacttgggttttgtcctagttcgacatttaggaaagaaccatgagggaagtatcttgctttgtaaattctcgccacaagagagtcctccatagtaagcaatcgccaaccttgtttgcccaagaatgagaggttatagtcacgaaggtcacgaaagccaagaccaccaacatctttatgttgacaaagcttcttccaactaatccaactcactcccccactagaagaattcgactgggacttccaccaaaactttgccatcattccttcaaggctcgaacaaatttcttgggtcaaaagaaagacactcattgcataacttggtaaggcttgcgctactgacttaatcaagacttctttgccagcttttgataaaaacctagtctcccaactaaaaatcttcttcttcatcttatccttcaaaaagcccagaa

SEQ ID NO: 397163 - DNA, 2018 bp, Cannabis indica
taaaatggtcaatcgagttgggaaactttgttgtaacctaccactcgagaacatcaatcaaaggccaagttttggctgattttctaattgaaaagatccactcgtcaagcacgatactaaaacttggaaattatatgttgatggagcttcgaatgagaatggctcaggggcaggagtgataaggatgtagcccgataacttcaaattccactatgcattaagatttcaatttgatacttcaaacaacgaagcagaatatgaggctctgttggctggcttgagaatagctaaagcttaaaaggttaaaaatattatatgctatagtgactggcaattgattgttaatcaagtcctaggtgaatacaaggcaaaatgattaaagatggcaaaatatttagaaaaggttcagaagaacttggaaaattttgattattttaaaattgaacaaattctaagagaacataactcaaatgtcgatgcactagcaaaattggcctcacaatgaactcgataagttaaatcttgtaccggtcgaagtcttgagtgacccaagtatatgtgaaaaggaagaggttgagatgatagacgccttgccaacatggatgacacccatagtcaaatatctacttaacagggaacttcctacagacaaaactgaggcacgcaaactcttgtattcaatacctcgctatacaatagtcgagggaaaattatacaggagaggatattcaatgcctctcttacgatgtgtgttaccggcagaagctactgaaataatcaaataaatccacgagggcttttgcgaagatcatgcaggttggaaaagtttatcaaagaagattatccgtcaaggataatattggccaacgataaacaaagacacacatgaatttgtcaagaaatgcgacaagtgccagaggttttcacatatacctcgcataccaccattaaaaatgagaatgatctcgccatacccattttcaatatggggaattgatctgattggggcattactcacagggcgaggaggagcaaagtacgctgtagtagcagttgacttctttacaaagtggacataggctgaacctctagtttccataacttgcaaaaaagttctcgattttgttgtcaagaaaattatttgcagatttggaataccaatcaaaatagtatctgataacaggactcagtttgacggcgaagtgtttactgaattctgtgaaaggaataaaattatcaaaagcttctcgtcagtatcaagaccccaagcaattagacaagtagaagcagttaataaaaccgtaaaagatactattaagaaaaagttggatgctgcaaaaggaagatgggtagatgaactaccacaagtactttgggctcacagaacaatagagaaaacagcaacaggacacactccattctcgctagcatttggctcggaggcaatgctaccagtaaaagctaatactgagacccataggcgtgaattctataatcaagtagaaaaccaagagcttctgagcctatccttggacttacttgaagaaagatgtaatgagtcacaaataactaatgtagcctatcaacatcgaatcacgagatactttaacaaaagagttaagaaaagactctttaatgttggagatttggtgttaagataagtatttgtaaacacatgagatccatttgctggagtgtttaaaccaaactgggaaggaccctacattattgaagcagtagtgggaatcggggtttataaattaactcagcttaacggcttgctaattaagaactactagaatagtgaacatttgtggccttattaccagtcgctgcaaaatataaatattgtatttatctctgtaagatgtaaattcttattattaatagagttaaagtttgttcaagtaattacaaagtttatattcttcaaaattacttgaggggcatgtatatgtgtatattaactggagttcatctagaaatacatattatgttgcaaacctagaaaattaaaa

SEQ ID NO: 397164 - DNA, 843 bp, Cannabis indica
tgcgacagaaaggatacaagggaagaggttgtaacccttgtttgtttgggttattgggcagactgggttggttgtatccatggccttatcttttcacatattgtttaaaatggcctcgagcgatgagactttctatctcatctttcaattggcgacattcgtcggtcgtatgcccaatatccctatggattttacaatacttgttatatctattttcctcctcgaattcctcatgggctcgggcttgccgaaggtaaccttctgctcacgtgcaaggtaaatattctcacgagtttcattaagctcgatataagatagtatatactagcacgtacttgtcatgcttcttctgtttctttttatccttcgacggttccttagtaccgtcctttcttttcgaaccagaagccccgagttatcagttctcgtggaaatagtacttgctgaaacattgctgggtttgcatcctgagcttgttttcaacaagttcatttcctttcgggcttcttcctttcgaacaaatacctaagacctttcgttgaactcagtgatgcttcttaccggacgaccttgtaagtcatgccacaactcgccccctgcggtcaatggatcagtagagatccccgctgaagggttgtaagttatgtgttgtcatccaaattcctaaccctagctacagcttgctaaaacgacttaagtatgccttaagtgtctcacctggctactgctttatattggttagcgaggccatttcgggtcgtctatccctagcagcctggaactatttccagaaatccctggacagttgctcccaggaggttattgatgttggaaattatttta

SEQ ID NO: 397165 - DNA, 546 bp, Cannabis indica
taaatcccaacaattctaaagtgaaaggctaaatagtcaaaaaaagatttcacttcaaatagttcaaccgatcaattcttctatgttttggcatctttagaaataatgctctagacacctcgctctcaaacttctcaatagccttcgcgtatacttctccactaattccgtcaatttgattgagagcttcaatacactcatccaataagtgatgtttttgtcaatgtcattgaattctcatacatttctatctttcgctttgcagtttcattatataccgtcaatgttctgccaatgcaagtgagaactttgctttttttgccgatcgagaactcgtagtgccagttgatttatctcttcttttgctaccatcctcatcaaaactactctcttgattcctaacagatggactctttgacatagcatcatcatcatcatcatcatcattattatcgagatctatagaaaaggatgagcattggaaccagttacagtggtatcaccaaaaatggtgcatgattttttataaagtacacaacccttttt

SEQ ID NO: 397166 - DNA, 1255 bp, Cannabis indica
cacagttgcatatttgagctatcaacgtagtataagttttttttttttttttctgggttttttttttatacagtttaatgcatttcttgttttgtactcatggctcaaaagagtgcaaacaacaataatggtcttccaaagaaaaaaagaagtaagacagcatccattgctaaagctgaagacagattatctaagctacctaatataactcttgtacatattctgtcatttctcccaactacaaacgatgtggttcggacttgcatcctttcaaagcgttggaaattgatatggtattcacttcctaaactctctttctgtgatactactactactgttcccgaatttcaaaagttggaaaattatgttgacaattgtttggaacaccgcaagaaaggtatgtattttattgctgattcagctctaattagtttcaagcttcatatacaatcctgtctaagaagcaagactcgcagcctagataaatgattaagctttgcagttgacaataaagtcaaggaatatttgagtgttgacttagaaccaggaaaatgtgagaatgatggttattactactactactgcttacctaaaacagtgttgaacttaagaggtttgaccattttggagttgaggggaattgagttgggttactcatatggttttccatccttgaaatcattatcattggaaaattttcggctttcaaataatgtaactactgatgtgctaaccaagtctttcacggattgcccttcccttgagaaactgtcattaagttcgtattatattcataatccgctccgagtacaaagttcaagcctcaagttcgtgacacttgaattacaaaatgtatctcttcaagttgaagccataaatcttgaatctttggttctttgtagggctttcttcgggaaaataaatctgtctgcatataaggcaattaaaaatctctcactatcaagttgtacatggggtatgacagatcagtcatcatttgaagagctcattacaagcctcccactccttgaggatttgacaattgataattcttatcataagtcggggttggagcatcttacaatctcaaatcaacacttgaaaagcctcaaattgagaaatatgaacgaggagagtgatatgatcaaggttgtcacaattaaatcggtgccaaacttagtttcgttttgttataaaggtaatattaattgcaacatatcaatagagtcaaccaatttgttgaatggagaattcg

SEQ ID NO: 397167 - DNA, 672 bp, Cannabis indica
aagtgtgccatgttaatgttagtgcccatatcatcaaaatgccaccaacaatttcttattactctcaatttacatcaaccattctagtttgattacattgaatcataccatttgatttgggttataaattgttgagaatgaagattacgttaaagtagtttggccgcttacattacaagggttgaaattgttaagaatggttaccttagttgattagtaataaaagaggattgctatttagtggttatcaaattaaaatgtgtgctatccgatattaaaatatagagaattactaaaagtattattttattggtgcttagtattattcttggtgtcatgctattaaaaaaatactactaatcaatcatgtaacgtcacttataaaaagtgtaggcaccactggtgcccaataataatgctctaaagtatattatagccatatgtcatttctcgtggtacttcatactttaaagtgtcgtttaacatttctcttactttaattttttggagcacttctattctattactttttctacttcgtcttttaaaatatctcattaaaatactattttttttttatttaccttaaattttcacataatatcgtacatattttttttagaaagtacataatatgcatttaatttagtttatgtatttattaatatagat

SEQ ID NO: 397168 - DNA, 669 bp, Cannabis indica
ataagcaccatgttagtccctttaccaatgtcctctaaagagccgaaactgaggaaattctgaaccatccgaaccacttcgtccccaacaatagaccaacttttctgaaaaaaggctggtgtcattccatccggacccggactcttatccgggtgcatttgaaaaaccgcacacttcacctcttcccttgtaaccggcaacatgaggtcttcattttgttgagccgaaatagatggcagaatgcaatctatgacttccggacatgatgaatttgaagcagtaaacagagaagcgtagtattcccctattaaatcagataagccatgatcccaatctacccactcatcactatcattacgcagcttcaaaatctggttcttcttctttcgtgtactagccgagacatggaaatacttgctatttttgtcgccctcttttagccaaaattgttttgacctttgcttccagaaaatttctctttggtctaagattgcaaacaaagtcttcttcacctctttaaacctctgcaccgaaatctcatcttttttattcttcaaacatttcaactcttgcttacactctttcaatcttttgccaaagttcccagtaatcgatttaccccattccgcaagagacatagcacaattttgtaatttttgtggcaaatca

SEQ ID NO: 397169 - DNA, 1012 bp, Cannabis indica
agagcaaaataaaaactttaatttacttacgaaatgagaacctaacttgttataatttaaactttacaaaccattccaaaatattacacatgtttcggtatcgtgtaaaaattttcacaaaacattacaagttacttttacatgtgacctagacggctaaattcgggcatacaaaatacatccactggtagacccaacccgcatggtctagtatgtcccaaacatgtactacccacctccaactcctcgaactcatggctgatcacaaacagatttaccctttcctgcatagtagagcacccgtgagccaagcccaacaagatagtataaataacaatatacacaatattcaaatgtcacataattattgatgccacttcatctattgtctatatagcatagacccacgtgttacactcacacgtctatttatgtctatatagcatagacccacgtgttgcgctcacacgtctatttacaataaggccttagaatagtttatttcagttctaattaccgagtctaacctaattatgctttgaatgcataattctttatttcaacaaataaaacatggtattgtattcaaaatcatttaatcactagagtactaaccctaggcaatataaccgcacattttagggcaataaccttaatccaagtccctcatttaatcacaatcataatatcaaatatgagcgtcaccacgcttaactctacgtggtaactactgtcttacctggtatcccaagtatgtagagattccaaatccccggatgctcctgaacaagtgctagtaatcctagtaacaaattcttgggatttcaccaataagggttaatcccaaatttattttcacacatacacataatttatattccatttacagattaacatatagagcctgaaacaagattacaacggtaccaagaaagtctaaaacggagtttagagtcaaaagttatgaccaaaataagttttaacacattctgtcctgaaaacctcgagcggg

SEQ ID NO: 397170 - DNA, 554 bp, Cannabis indica
cagccacgacatcactattttttactcattatataatgctgttggaagatctctatatatatatagttttggaaatttgtgtgtatgtttttttttcttaagaaaaagaaattcagaatcttacgtttttaatttatggattaattacttttttactctcctaaggccaattctaatgggcctgcaaaatatcatttatggtgtgatattacaccaaaattatctccaaccaaacggcaattgcattattatttttgggtttatctacagtgtcccaccatatttaggtgggcactgtagacaaacccaaattaatttttttttaattttttaataattatataatatttaaaaaacctaaataattataaataaatattaatcaaaacttttataaatgtattagtttgtatttttatatttttaagtatgctaaaaaaataatttagggtgttcgcagagcaggtattgctagctgatggtatatatccaaaatggtctactctggttgataactctatgttatagtagttaatttttatgcttttaaacta

SEQ ID NO: 397171 - DNA, 737 bp, Cannabis indica
tcagtggtagtaatcaccaaatccggcctaatctttgcgctcaactcggccagatacttttctttctttaaaatcagttggcgcgattcccacagcgagcttggccagacggtcaaacttagtagtatactccgtaaccgacatccccttggtttgaaccaaatcagtgaactctttccgcttagcactgcggacggctttgttataatatttagagttaaacaactccttgaattcttcccaggtcatcactgtgacatcccgagtgagggttatcaactcccaccacacgagagcgtcctcttgaaactggaaagtggtgaaagtcacccaatcattaccaaccactcccataaagttaaggataccctcaatcactgggagccactacacatcaggacctcccacaaacactggaggtgcttgttttcgaaacctttcgtacaacggctccatacggttgccaacaataggttcttctgctggcaccgctggaactgcaatggcctgagaaacttgttgaggaggctcagcaggaggaccctgctacctcaacctctgaatctcttcatcctgttggcagatctgatcttccatttccgcaaatctttgctcccattccggaggagcttatggtggatttacagggtgtccaccctgagctctgccacagccatggccgcgaccatgagaattttggggattcctctgactacctccggtctcaaccatgtcac

SEQ ID NO: 397172 - DNA, 526 bp, Cannabis indica
aaataactaacactcaaccgtctcgcgttctacacgacgtagtggtcatctcacatcatcactacaaatagaagagtactgcgagatgaagcatatctacacttagcatttttttctattaagacggataagaaggataactcatattcgacgagatgcaatctacttagtcatcgtaatcgtttaaaggataaagacaaggagtagttgagtagttattagatattatcccatgtgaaaataagtgaaacgtggggaatgtccatgcttcatcagcagttgtaaatgaatcgatcctaataaaaataattgtcaaccgatatacctataaatagagatagaatccatgagaaaaaggacggcaaaaaaaaagagagagaattctattatttactattattgaaattcatactatgtattcaaataaatatccctaataatggactcgtggagtatgcatgagaaaaaggatggcaaaaaaaaaagagagagaattctattatttactattattgaaattcatact

SEQ ID NO: 397173 - DNA, 319 bp, Cannabis indica
tgattaattaaaattttacttaattaattccaaacactaaaacaatatacttatattaaatcgagatcccgtttacaaaagtatttacaaaagtttcaccgtacatgtataaatttttatcgcctagcgactatacaaaataagccttgatgtcccaaagattgtacgctccaggcgtaactgccttgacatgtacaatctgttggaaattatcttaccaggatcttagatctactcacaagtatgttgattaacaccgtaaatatgaactttctaaacgatcttccccactatgattgaggtatcacttgctgtgtgt

SEQ ID NO: 397174 - DNA, 863 bp, Cannabis indica
ccctctttcaagaaaatcataagtcctacccaaaacattaattactcttgataccacctataagtgtatagtcccaaagttaaatagtacattaaaatgggagttgttgataagaaactgacctgtcaccatagaaggactggctgcaacatcagtttgggtgataacaattatctgagcaagtataggctttgcttccagcttctgcttatctttctttgcttaagggaaatttttcttaaagtgcccaaccatgccacacaggaagcatgccttccggttgcactctccgggatgatgtttcttgcatcgtgagcactcagggtaagaataacccgggcgtccacatctacctcgataccttcgaagccgcttgtttcgtcttaaacccaccactactgatgtaggttttctcttctgctcaaccacggagcccctgccaattctgccatatataggaatatggcaagtggtatcctaacctcctatcataacctcttgaggtcttaaaataaattctttagggcttttagtccaaaaaccattcttcatatctgaatctccctgaaagactgtaggttcatgcatccaaattttctcatgcaatgattcctcttggttaccagcgatactatgctctactggtaataccgaatcgagaatgattggcatatgaggtatagatactactggagacctttgttgtttcaacctctgaatctcctcatcgtgtcgttgaatcatagcttccatttctgtgaacctttgctccaaatccaacggagcctgtgacggataaccatcacttcccaggagctcacccatccttccagaacacctaaatagggtatacacaatatatt

SEQ ID NO: 397175 - DNA, 717 bp, Cannabis indica
gtcctaaaagtcatttcctcccttatatggacacttagggaaactgtcgaaatgctcttaaggatttatcaagcctcatatgctcagcctagtgtctaaggatgagcatatcctcacaaggttctaaccacaacaaaatggtttaaactacttctcatataagtgaacaatataacctctatttatagagtttttcactcccatatgaacatgaatgaccaccataaagcccttggatgttaccaattataaattgggcatttatagtattaaatgagtgtttttgaggagttttgtaatgttagaaagactcataaacgtttgtgcttgtagctgaaaaaacagtaactggttaccagttaccatttttttcagctttagcaaattcttctccaaagtgccaaatcacttccacttgattttgaaccatttatacatcttataaatgaataaatcaagtctccaacagctatatttttaatagctatcattcattaacattcataaattagtaacatcttttactaatttaagagtgaaaaagagatgagagttacatattcaagtgatcatcaatttaaaggatttgcaactcctattttgtgatcattctacacattttgtaactccataatgtatgttacaatttgacaaaattaatactttgtcacacttaattatgtataacttaattatttaatctaaatattatattat

SEQ ID NO: 397176 - DNA, 1026 bp, Cannabis indica
acaaaacactactaagtacccccccaaagctctttaaagggggtcgagaattctaagttagataagaactagaagagtaaaaactcaccaagaacattctctgtattaaatactatcataaatacacagactcgtggacaaaagctcattaacgcccaaaccacgtaaaaaatctccctcttaatttcttacagctctctaaattattattattttattggttgccgaaaacctcggtcaacattttggtgctttcattgagagctgaggaaagcgcctgtaaacacacactgcgttacaacaacacaacaatagtggagactcgaagcacacgtcaaactcgccctcttcaagatgctcaagatccaagtgacgaggacgtggcctcaagagcaaccgtgggttccgaggaagaagaaggaatccctgatgacgactacgagggaaacctcaatgagtacgcctacgacgaaggcagctactcagaatttctactcttaaggcaaaaggctgtcgatcatgaagctgaaatcgcagcccaaaaagcgcaaaaccaaaagatgcaagaggtgctgatggccatgcaaaaagccatggaggcagcagaaatccacgtacatcctaaagccatctctgctgggcttggaaaggaaccaaaggaatcctcgccaagtacccaaaagcagaaatctagagaaccaagccctataaggtatcccactgaagggaaccaaaagaaaaaccctacttctacccctgagaaaaagaaaaaggtgcaggatccgcaaaaggtccgctcagatttcccgaaagggaaaggtccgcagaggggcaaactccaaaaagggagtcttggccctcaggatcgagaggaccgaaaaagcgtttccgtgcaccaagagcccggagggagaggaagaaggggacagaaatgtcctcccattgatctgaggaatcagattaacgggaaccaaggtgacctccgggatcaccttgaccaaaacgaaatacggaccgcgatctcca

SEQ ID NO: 397177 - DNA, 540 bp, Cannabis indica
aaaaaggtacatttttttaaaaaaaaaaaaaccaattattatttttcattgttgtgtttgttgtggatttagtgatctctccggtgatagattgaagtgttggattttgtacctataaatgatattccagtgaactaatataatcactgaaatgagtactcaactatttatctctgttaagccaagctcgaaggaaatcatcgtttgacttctatatccggatagaagctatacattctatatctatgattaacgctcccactcaattgaactaccatgtccttaacctatatgtcacgagaagaaccatttggtcgactttaacgaacagatttaagaacacaaataatgcaactaaactagaacctaaccatctcaaaattgagatcatttgatatagaatcaactaggtgatattgaattgaataaatattacggtaaatttatcatatctagttcaaattcaatatcggttccttacaatgcatactccatgcatccaactcaagcttactttaaccaatgccctgaaaatgacac

SEQ ID NO: 397178 - DNA, 1009 bp, Cannabis indica
cacacacacacacacacaccatctgcctacacaagacactaagtctatttctcatttcattcattcaagatttaccttacattattcttactattatcatattcatagagagcaacactaaaaattacaaggtaaaagcctttaatctgagtagtattatctctcgaatcaatacaactaaaaagagagtagatcattacccgttaaccaaggcagtcgaacctctataaattactttgttattttctttactcgcttttattgtttagatgtggtgatctcaatcataaataaggctccgctgtcagttgaccaaatttgaggtcaacatttagtcatactcgaaagttagatcaaccaaagccaaagatagggtaccaagtgtgcagaatttgtaaataaagagtatcaagtaattatttttaaaaacataagatactaaacttatatcttggtaaaatacaagataccaaatatgtatttattatttgtaaataaataaattaaaaatattaaaacaataaaaaaaaattagttaattaaaaaacaaataaatataaatattaaaacaataaaaaaatatttttcatttgaatttttttaaaaaaagaataagatcaagactttttcaacttaaaataaataacaaattcaatatttatatttgtaaggaccgtcagacactaactatttctccattggtatgatattgtccattttgggccaagtcctcacggatttgtttttgggtcaccttcctaaaaggcctcattccaatagagatagtgttcatccttatatacccaagattcttcccatttgtagccaatgtgggactttggatgtacacccaacaatcctcccctcaaactaaggaccaatttacctcccctcagatgattacagatctaaacatgaatccctcaattccaacactcaagatatccttgagtaagctagatgaatcccttcaccagctagattcgaaatcccttcgaatacaagaatc

SEQ ID NO: 397179 - DNA, 584 bp, Cannabis indica
aaaatgcaaaatttgttaactaccgaaaggacaagacgggaagaaaaaaggtgaaaaatcgtgttgaaattttgaaggttcaccgtggtgaggcctttggtggtcgcgactaattatcgtcgtggggaggattatttgtggtcgcgacgaggagcgaagataaaatcaaatgcttttgactctatacaattgccgcagcggggctatttgtagttgcggtgatatctctgtacgggacgtggggtgatttcatctttttgctattttgagttgttaaaactgatttatttataagagggttttgaatttttagaagaattatctagaaaagaaccctagaaacaaaagaagaagactcttggagtgatcgtgtcgatccgattgagttctccacctagtttctttctcttccctttaatttaatatgttttattttgtttttaaacatgggcttgaatgttgagattatgaactaattttccaatttaggaaaacgatgaatgttggatgacttaattctaaaagtaaatatgatttgttattgttgggttgtgtgccctaaataaaacccattacaatctgat

SEQ ID NO: 397180 - DNA, 995 bp, Cannabis indica
ttaaaatatcagccatgacatcttccatttcttcttcttcgttgtttaatatttcaacagtcggttgcgtgaacgactccccatgcaaataccaagtcatgtataatcgttggatgccatgcacaaatagatgtaccctaatattatcgggagtctcaaagttcacattcagacatctcatgcaagggcatcgggtaacttcggcggaatttatttacgttcgagcaactccaacaaactcatccacacccctacgaaactctacagatcgtctgtttaaagtcatccagcttctgtcgctcaccatattgctacataatataaaaacagaaaatttaaattaaagttgaaaaagtgtctactctaccttgtcactccatttctaaaagggtaaagaacacatcccattgaggttctttttctcaaaatttcggcagtacctccccacagttctcataagtaagcaaactactaacaagtatgccaacttacaataatatgcatggagatgatgtaccgaaatctttaacaaagaaacaataaaatgagcagtagatcacactataggtataaaataagcccaagctatccatgtggacataagaagtccaggataattttgagaagcgtatttaagagtcttcactaactcagcctctccaaataggtctaaggagaaatgtacgtgtgaaataaattatcgctatgtgataatacaaataaaattattctatcctatctttggataataaccaaagaaatcaattttggataagaatttcattttatgctatattcaaatatcttatggtatcttataatgtctcatgctattttatgtaccacctatatacttttattgttaatttaatattttgcaaatagttttcaagaataatttcatttcacttaaattttaattcatattttatcaaaattaacatatattttttaatttcaaagtttccactctattaaaagttgaatgttatttt

SEQ ID NO: 397181 - DNA, 800 bp, Cannabis indica
agtgcggaattaattgaacatatgtccattatgaacaatgaatcgaaataccgtttgttattgattctttgagcttcaatcctacacgagctttgaatctgcaaaagaaaaagaaactaattagtatggataattgagcttctaaactctctctactctctttatataaatttatatgtttcacagaatgagtagtgagaccctatattatataggtgagtccttctatcaaggcctctcccacaattaattgttagaatattttgacaattaatttagaaaattaaattagaaaattaaatatttagtaaatcgtaatctgaccatatagagaatatcaactaattacttatgaccaaatttaatgaataaaaaaaatattcattatattatatacacggataaaatctttaattaattttatacttaatatataaaatattctaatattttgtcacttagttagcatttagatttatcttttaaacctaatgttcatcattacataataaacatatgaatcatagccataaatcctcattatttggccagtattatcttttatgtattacgatatatttattacataactatgtgtgacaatgtacttaagcgaataagccaaaaaccttatgttgattctggtcctcttacgataattttgtcagatgaaatcaaggtgcacataaatatgagaaaatatcgaaattagagtttcattggataattttagttgtacaaatataaaaaaactgcatataggttaactgaatcccatatttactttgtgatccttgaat

SEQ ID NO: 397182 - DNA, 508 bp, Cannabis indica
tttaacctagtagcatacaacaaaaaaaaataagatacatgtgtgtgtgtgtgtgtgtgtgtgtgtgtgtgtgtaatatagtagtttaaaaatactaaagtggtagtggtatcattgcgtgagtagcaaagttaaaaatagtgattgattctcacattctgcttgttggtagaagtagaagggtaactatagactacgtgttagtaatgtgttttggttaatttactttctaaggtgatcgcaatataatttatttatgtatggaaatgtaaaatatacatttgtatttattttgtgaatgtaaaatatattttatgttctaaataaaacttatttcaatataattagatttactaattaataaaagatcagaaattattttatgttgtatggttcacgtgattcttttcatgagtatatatttaatgtatgaattctattaaatttagaatatatagttattcatgattatagtattgtcaacacagtgaaatataatcatgattat

SEQ ID NO: 397183 - DNA, 462 bp, Cannabis indica
tctgatagacctcggcttttttcttacgttctgactaacagccccaatttgggcgttactttgttgacgtcacttcacgctctcggcactgtcacaacaacactccttgctgaagtagctctagtatatggtcagatgaatgaaccaccgggagctctttcgagactagaaatatcatcctgttcggttctcactatgtgttccctaaccctagcatcgtttagctctaatttggaggtgggttttgaagggttttgtttatatggaatggctgattctgtagggaactcaaactctaaaacttctatacgataaattcctgaaccagtagtgttgggttttgtgccctaaataaaacccattttaaaataatgagatttactaattaataaagatcagaaactgcattttatgttgcatggttcacataatttatttcatgattgtttaatgtataaattc

SEQ ID NO: 397184 - DNA, 539 bp, Cannabis indica
aagtttcatcactaattattaattaatctcactcatatacatatacatatatatatatatcgtagaagatggcgattaatagggggctgaatttgatcaagtctgagttgaaaaaacgtcacaaatcatcaatctcaaaggtaatatataatcttctttaatcatcttaattaaatatattaattagggtacatgtttgtttttttatgtattaaatataaatgcattttctaatagtttatttctatacataggtagagaaacaatccggtgctaaagaatctattcagagaagatcactgaataaattgaaatgaaaaaatttactaacggaaaatctcaaatttctgaaacatcaactcaacatcataaatcgatagtttctgctagtgagactataattctatcttcgtcatttggaaaaggtaattggttaatttaatttatttaattaatattaatttataatatatgtagagttaatgataaattattaacctatatgttttttttttaaataaagaaacaaaatgtcatct

SEQ ID NO: 397185 - DNA, 860 bp, Cannabis indica
tatttcttttattactattatttgggtgccaattaatcacaaaataggctttaatggtgctttcattgagagccttcgtgaaaaaagctaagaaaaaaccctcttcataaaaaaaaaccttttctccatgtctgataacagagaaaatgttgatactcatcctgaagagaccactcaccgtcctggaaaagagccaataggctcccgaaggcctcccaactcaagatctatacgaaccactcgttccaggaggactcaacctgaaggtggcccaaatacaaggcccactcgttccaggaggactcaacctgaaggtggccccagtacacagatcgcacgttcaaggaggactcaacaaaaaaaatggccaaaatccagaaacatcgaatgaagaactcgaaatgagtgttggtggtgctcaacccaggccgtgtgatgaggatggcacctatgatcctacaagatacgtgccaatcgttgagttggaaaaccgccatctcagatgctgcttggaggaggcaaaccgacggaatgctgagttggaatgagaggcagccgcggccagggcagcacaggagaacaacacacaaaatcaacttgatcttggggtgagaagaccacgaggcagacctcatggctcgcgagccaggagacatgagacatcttaggagaatcctcagaacgctcaagaagaacaacctggggaaactaagggtccccctgagaatgaacaaccaaatgatcaaccagagccttctcataaaaatgagaacagaaggcgaccagaaagtagggaactggaaatccctcgtggaaacgagggaaatcctgggactcaacctgggacacgtgggtcacca

SEQ ID NO: 397186 - DNA, 850 bp, Cannabis indica
catagagagaatcttcataaatatcaatataggtacaacaacattcagccatgcccttatacttgctaaggaaaggtagctgatgtaattatgttaagcaaaaattttcacatttaacatattaaaataaatgcaaaacacaatttcacctatgctgaattatagcataagagtttattaatttaagttcgacccatccaagattataagaataatctcttaattacaatccttttatttaaaggaaataccctttgattccaattacaatgacattaaataattaaaataaatttgggaaatttggggtaaatttggaattgcagctgaactcagtcaatttaattaaccgagctgcctacataccttctttgtgaaggatcaagccacttgtagttcagaatacggtattttagaatttgaataaagaattccggtagatgaccactttcaggaattctttgctatttgaaaatttagaaaaattcctaggtgtatgacctttaagggaattttaggatttgtattttgataccatttttgcggtatcggcgactgcacttagtcttagcaactaagttgcctacgtatccttttataggaatcaagtcaaacgtagttccgaactttaattttttatgaggtgaatgacctctttttctttggaatgccatttaatttgttatggctttgaattttagtgcacttttttaatttttaggtaaaattaccacttttgagatttttgtgaggtaaagacctctttgaaatttggtgaggtgaatgacctctttaatattccaagattaattttagtgagctcatttggaatttcgtgccattttgtatg

SEQ ID NO: 397187 - DNA, 973 bp, Cannabis indica
tctctctctctctctctttttgatatgtgtaattaaaatttatcacaatcgggctctaagagtgtgagttggatgagttggaaacgattgagtagacataagaatgatggaggtatgggctttcgggaccttcgggattataatcttgctttctttgataaacaagggtggcggcttctgactaatgaagactccttagtaagcaagatatataaagctaggtattatctttcgggtagttttcttactgccactttgggacaaaacccaagctttatttggaaaagcattttggaagcacaaggattagttcaagctggtgtaaggaagtctattggcaatggaactaatgtaagtattctcttagatccttggcttcctgatccttcaaacccctatgttttatctgatcatcctagattaatgaatcaaaatgtctcaagtttattctctgtgcaatctaaaagttgggaccttgatattgtaaatgatctgttagaagaacgggataagaaccttgtgttatccatacaactgagtgagaatgccactgcagatgagtggtattggagcaaagaagctaatgacttttatactgtgaaaagtacatagcggttgttacaacaagcttctggtgttgatattgctgtcaatgatcagacattgttcaagttcttgtggcagttggacatacctccgaaagttcaccactttctgtggcgtgttttagttgggtgcctatcaaccaaggtccaatttagcaccaaaaatgtcaatgttgatctgtattgtcccttctgcaacttggcattggaaactatcagtcacgtattgctcaagtgtcgatttgcaagattctgctggtgtgtttctattgtgtagaaagtgttgatttcaacagctggttttttgctctaaccgtgacacagtctgctgctatcactactagaaaaatggattttagtgacacaca

SEQ ID NO: 397188 - DNA, 1521 bp, Cannabis indica
acgctcaatctgtgcttgttcgggcagacgctcctgccagcgtgcagagtacttcaacttgcacttatttttcttgattctttttcctttatatattttatgccttcttctgactgtattgttttttctatgcataaatgtctcaaaagatgatcgaggctctgaagaagagagtagggggagctcgggcttgtcccctccggccaagaagtctaaaggcggtgagactccgtccaaggagaaggcaccaattgaagaggtcattgatctctctgaggagcaacctgttgtggacccttccaccttgaaggtcgccaagtccaaaggttcctgaggagggagttcagatggacctgaggaggccaagaatggatccgagctggtcgaaaggcggatctgaacaagttagggcccctgccccacctttggtattgtgcacagagaccaagagagggaaacacatgcttaaccactatgtgacccagtcactcccagaggtgaacaaacagttggctggggcggataatgatttttctttggagctagccttgggaggagtcttgaatgagctttcacgagtacgtcctttctaacactttttcttttatttctctttggctagtttagattttaatgattttttctttcgcacagactggtttgaagatggcctatgcatattcccaagctaaatcggttgttgtcaagaaccttgccacttccaacacaatgcgaagggaagtggacttgaccaaaaaggacaccgaagatgcacgggcccagcttgagactgtgtggacggaacttggagaggtcaataaggaacttcttggtactgaaaccaaagttgccgagctgaccagggaactacaggagatgccgtcaaccaagcaactcgaggcagacaatgcttttttgtctcaggaaattgccagtcttaaagacgagagagagggtcttcaaactctcctttgcaggttggacgatgaggccaagggcaagaagactagggaggaggaacttgacgctgagattaagagccagaaatttgaggtggagaagctcgagaagaaagtggatgccttagagacagctggtctcgagattttttatgacttttggaaggctaatcccaaggtaaattttgaataccttggggcttccaaagacatgtttcttgactactgcacggcttaggcggccaatgagaatcctaaggcgaccacttccacctcttcaaccgagcataatgttgaggctgcatctgcccagactgatgatcctccggcctcttcagacgtagctgattctccagctcctttagatctagttgacccgtataaagagcctgggactcccgctgtttaattgccttctttttactatcttttttatatgtctgtacggccaataggctttcttttaagacaaagtgaccggctgattaaggctcaaatttatacatttcatgtctttaattatgcacatatgattaatgcaaattgaatatttatagtttta

SEQ ID NO: 397189 - DNA, 872 bp, Cannabis indica
tttgaacaaaaatcaattcgggtcttattgtactatttagaaatacaaggtctattttgtcatttaacaaaacacaaggtccaattggtaacttttgtaaaaaaagagggtccaaaatggtatttaccctaattttactcaaaaaaaaattaatcaaataattaagggttattatttttattaaggaaggtaacggcaaaagaaccttaacttgtgtcatctcaactgacaactcactcttccaaaactgttaagtggtgactcaacatatacatagcgaaatataattggtttacctcataaattggttaaaaaattagatttttttttttaaaatgctttttcttttataatgaaatagcaacttcattgtaatattagtatatagagtacataagagattcaagatcaggccatacattatactcaaaaatactacgatcagagagaaatcgaaagtgtcttgaaacaatatgggcaactcgatttgctaatcgtctattaaaatgtaaactcacagaagacaaagaagagagtaagatctggcagtcatgtaaaattaacctgaagagagagcttattgattggtttccacgaatgccttgaacagagatcatgttgtcggactcaatctcgacattttgccagttcatacttttaatccaactgagagcctctttgatgcttaatgcttcaacagtcgaagcatcaagattaccttcataataaccggttttagcttctatgaggtgaccagagctgtcacgggcaacaataccaaagccataagaattttcttgcagaaaaagagcagcatcgacattaatcttgatgtgattatttttgggttttagtccaaagctcagcgccgt

SEQ ID NO: 397190 - DNA, 1044 bp, Cannabis indica
agtcgccgtcctccacgcctctcatccattgaagagtcaatctgcttaaagcctctcgttgattgagagtgactgttcattgtttgtgttaaataagttattttgatggatttttttgagtgtttgatcgaatttaaatggtggttatggtgttttttgattcggattgatgttggttgagaaaaataaaaatgatgtctgttctcgattaattatcgacggatcgtcgataagttatcgataaaatttagctattattgttagtcattatctttagctactatcgattggttatcgatatgttctcgataggttctcgatgcaagtgagaattcttcttgttgttgctatgttggttatcattgcaagattattgataaattatcgacaaaatatagataggctcttgacaggttatcgtgttgtcaagttttgcaaaaaaattggaattttggttattatcaatagattattgtcaggttatcaataggttatcgatatgaatatatatgctcatccaacaaatacaacttttttttggtgttgttgtttttgtaagtatactttaattgatatttggtgattgaagaacccaaatcaattttattgaattagctaggtattattataaaattttaaaattatttatttaatatattatcaatatttgaagagtttgagtatcttagatattcattagtagtgaagtaggttgtgtgattatttatactgtagttggatggtggtttttttttttttattattattatatattttttttgttgtttataataagtttaaaaattttgggaatgttaaattataattgttatgctgccgaaattttggtaggataacaactatacctttttttttgttatgttagtttttgttacttgattatcgacatattatcgacaagttctcgataagattaagaattagttttttagttatcatatttggtctcgataggattagtatttcatttttgttgtcatgtttgcttttacgtggttatcgatgggttttggactagttctt

SEQ ID NO: 397191 - DNA, 602 bp, Cannabis indica
taaaccctaaaccctaaatcacaaaccctaaaccataaagcctaaaccctaacccctaaacactaaaccctaaatgcaaatcccgaaaccctaaaagctaaaccataaaccctaaaccccacccctaaaccctatgccacctatatcgtaaacactaaaccctaaaggccaaacccctaaacttttaaccataaaccttaagccctaaatcctaaaccctaaaccgcccaaaccctaaacccataaccctaaaccacaaactcgataccctaaacctaacccctcaacccttagccctatatcctaaacattaaaccgtaaaccctaaaccataaatcctaaatcctaaaccctaaacctaaacacgaaaccctaaaccttataccctaaaccctaacccctataccctaaaccctaaaccctaaatcctgatccaaaaacctaaactgtaaaccgtaagtcctaaactctaaaccctaaacattaaaccttgaaaccttataccctaaaccctaaactataaaccccaaaactctaaatactaaacccttaaaccctataccataaacccaaaaaacctaaacccaaaaacataaacccta

SEQ ID NO: 397192 - DNA, 500 bp, Cannabis indica
tttttcctctttgcaggaggacacgtgggaggcgctgaatgggagaggagctgacgggtggcaatgcgctgattagctgaagatgctgatggggcgcttgcgtggcagaaggagaagaggggaccatctctgcacaagtcccacgcgtgcaggctgagagaaaaagaaatggagctcatgctcctgctgtcagatttgagcaccacgcgcggatgggagcccttcgatcagtcaacgaacggtccatatggggtcaaagagctgaccgagagtgggatttgcttgaggccagatcagattttcttttggaaattctacttttaactccatttgtccaatatttcttcaatttaatcccaatctttttctaccaaatacacctaaaaatacataatattaattagaaaactaaaataaaattaaaaataaatactcaataacatattatcacaaattaattataaaaacacacaaaaatatataaaattacaataaagcta

SEQ ID NO: 397193 - DNA, 891 bp, Cannabis indica
attcccattccccgacccactcccattcccaatccctgaccctttcccattacattcccattcctatttgcattcgcattcccattcccggcccattcccattcctattcctattcccattcccattcctatttccattctcattctgattccccagccgattcccattcccattcccatttccattctcgttcccattcccattccttggcccattcccattcctattcccactcccaatccccattcccattcccattccccaacccatgcccattgccattctaaatcccattcctattcccattcctaatccccattcccattccccgacccatgcccattgccattaaatttcccattcctattcccataacgattcccaaaaccctaaaaccccaaacgccaaaactgcaaaaccccaaaccccaaacccctaaccccaaaacctaaaacccaaatcccataccccaacccataaaccccaaaacccctaaaccgtaaaacctcaaaaccccaaacatcaaaccctaaaccccaaaccctaatcccaaaaatagctaacctaaaatcccaaaacccaaaccctaaaaccccaaaaaccccaaacttaaaacctcaaaccgcaaatactaggtccaagatcctaaactctaaaccctagtcataaaaccccaaaccctaaacctcaaacccaaaaaccccaaaagccaaagaccctaaacaccaaaccccgaacccctatcccaaaccccatacctcaaaccccaaaaccctaaatcccaaacctgaaaacccaaaaccccaaactcaaaacccaaaacccaaaccccaaacacctaatgtaaaacaacttaaccccaaacccccaaacccaaaaacccccaaacc

SEQ ID NO: 397194 - DNA, 550 bp, Cannabis indica
aaaattagagacaggtgatttttttccgtttccaggattaaatttaaagaaccatggctcctcgaccctgcacccaaaattgacttaatcatctactgtaaaagcataataaacagaaaaaatatggtgagcaaaaacattgtagaatctgttcgtggccgaggttgtagacttctcttaattattgcagtctgctactaatagcgagttcttcaattttgtttgacaatctgtaatcagatatttatttgtctaatttggatttttattccatgaattttaaatcatgtccctgaatttttaaagtcgttaaaaatattttttgaactattaaagttcaaggggcgatttagtaaatgttaaaatttaaggagtatgatttagtagatatcaaagttcggagagcatggtttagtacataaataattactgaaatagtaaaattaaatgaaattagacaaaagtccttaaatctaacaatctcattagctcaaagggaatttttaacggacaaaaaagttacaaaaaaacataatttagtatatgtcaa

SEQ ID NO: 397195 - DNA, 2012 bp, Cannabis indica
ctttgaataagcaagatgaaaggcagccattgtgcagttcaaaaagcaagcattatgaatggtgaagtcacatgaatcgttgcaaaggaaaataacagagtttctaaacctggggttttctacatatcttctacagcaaagttaagatcgcattcagaaagtaaatgtgcaaagtaaaagacattgagaacttactcaggggttgacgtctggattcagtttacgcaacgctgaacgaatagtttttttgaaagtttttcaacagacttgaagctaaaaatctctccttttgatctgaacttgtttaacaaagaaggttggtgaaagtgagtttgtgaacaacgctcagtgatatttataagtaaaacagcaaaaaggggtaatcatttgagaaaccgcagaagcctcggttcccccaaaagtgaatattggaaatcaaaagcaatcaagtgtagccatcaaacgtggtgagagaaaatcagatttcgaaccattaattgcgtcagagcatttattagccgaaaattgaaaagacgcctagtcagcctcacatcgagtcgtgaacagatgcacctgacacatgtcacccatccaaatgcaaagatagcttggatgaggtctacacgcaacttcgaaagtcccgtacagacttgggggcaaatgttatccaaatttttgcactctgacgtggcatcacactatggtgacacgtggaatgaactctgggtacctgctcgcaagacacaggctgaacagggcacctcatacatttgttcgaatgaagtcccctagaccgagcaatataaaatggtggctaagcttgccatattccacaaacttttggttttttggtgagatccatcttgagattggattgtcattctcttgctaagatgtcccatctgagttcagaaatttacccctccaaattcataacaccggaatgcaccaaccacttttcttctctatacgttcccaaaaaacttcaaacctcaatttaaattagaaacaaaagattccatggctgaggagcttctgatcaatccaaactaaaggtaccctgttgatcgttattggcaatcctcacaagtgattcttcagggtaagtattatcccttgtgaatggtggtttgaacttgattatacatattattattttttattgctccattgatcttttatctttgtctccacaggaatggacatagattttgcgagtgatcaggtcttccttaggctgagaaggaatccaggaggaaagttggcgtggtttcagattctactaaagaacccaaccaacccaagacccaagcttgcacaagaagaccgttgtgccaacctctctctggtttgagaaatttcttgaggctaggaatgaggttttggctgtaggaaatgggatcttctaatatggagaatgaggcctatgtagaggtcgatcttctacgtgtagacggtctttctcaagctatgtgtagccggtctttcttcaagctatgtatagacggtctttctccgagctatatgtagacggtctttctcgagttaatcaaccccctagtattctttgtttaggaagatgacttagtggtttgcccctagtggcattttttgtgaagataagtttataaaccaacttgggttttcttttatcttaaatgccttgtactcttttcattcgaacttaatataattgtgttcacttgcatttttatccacaatgtaaacaactatattttaatcaaatgtaaattacttttggatttttccattgctcgtaatctttatgtttaagtagtcagttatctaccaaattttttgattttcgagcagttgtcaattctacctggctatggcagttataatctaccttaagcaaacttgaatatacttttaatgattttatcactttgtacattttagatttgctcgtatgaatagttaggttatctatccattttctagattcaaggacttttatcaagacgtcttgatgtctcgtttaacacttt

SEQ ID NO: 397196 - DNA, 662 bp, Cannabis indica
gtagctgatgttagggtttcatgttgcattctggaggttaaatatgttgtttaatgttcatttgaacatgttttagtggcttatagaagatttaaccacgttttgagttttagaactcaaacttggagctttaatggtgaaacttatttctgagcttgtagtagtgttttattgccttgaatatgttctttaggttgtataaagcaggtctggaaagtttggtttgaattggggttgtttggagtgagttatgagtttttgttggcttcctgcactgaattggaattcctgttcagagggacttgtaggaatcggaattccggttggtccccaggaaaccccgcacaaccggaattccagttcggaaccagcctactgattggggcaattttggaaaccctagtttttcccatttttgtgatgtttagggtattgccatgttgttgatcgatagggaaacttttagtttaaagttaagtccccaaaaagttatttagcgtgtcacttacctatgttatgattcatgtgatttaggagcctgtaagccgagcagttgttccactcaggttggcctgcacacctgaatttgaaatcgaggtaagattagtataatgttatgcatatgttattacatgtttagcgtacatgttgtttatgcctgt

SEQ ID NO: 397197 - DNA, 893 bp, Cannabis indica
ggcaagggctgattgttcagatctaccgtgatttttgtgtcaccctggccagttgtagtggccagattcgtggtgcttgccgagatagtaggattgaccacatctgtagtgttcatgaaaattccaatcgtggttagaacatgaacatcaagatctacaatcaaaggatctcaatggagacccaatgatgtagagggggtagccagagttcttctcgtgttaactatggcatttgatcagatatgataccaatttgctcttaatgaacgcaccaaactgttgaccttagattttgccaattgatagcagagtcgtattaatgttgatgcttgccatgtgttacacaataagaacaagaaagtaaatgaacacaaaattttatagagattcggctcttttagttagcgggtaatgatctactccccttttagttgtattgatactgaaagataatactatctagatcactataggtggaatctgatatagctttcttaagattacaatgtaagaattaaagatggcaaatctcaagtgtagagagaagcaatgggcgtcagagagagagagacagaagatgagctatcaaacatagagcttaaggattaggtttttgaacttagcacttaatgacttagggctttagggtttagttaaggctctttatataggagagcttaaacccttgaattaaataaaataagcagatatttacaaattaaattagtaaaatacaaatgactaaaatgccccttaaaatagatatttttcttctatttttgtggactattaaggcccaattcgctagtctagcttagatgaccacgtatgaaagttgtgcaccaaagtcctgccaacttaatgtctggttggccatgcatctgcaggatgca

SEQ ID NO: 397198 - DNA, 746 bp, Cannabis indica
ttttttgcttaattggttattttgttttaaaatttaattattttgtcttatttttaaatttaaggttagatattttatattttcattatttaaatgattcctataaatgaccttatttgaaattttaaaaaaaatgtatgatatattttaataaaataatctagataatttttaaaaataactagacattttatcaactttcaaaagtttgttattttattcaaattaaattataataaattagattaatgatatttatttatcattttattttattagatatttaatttaattttattattttaaaataacataaatttaaaaagttagctgataatttttgaaaagatatttaaatttgttataaatcttatttttaaattgtaagtttattttaaaataattatttagtaatttttgaaattaaatatatcttttttaaagattttcaaaatttaatttaattgataatttagtttaaattaagtcaatcctatatctaactatccaatgttgtaacatgtgtgtcttatttattgtttaattcaaacttgttatataaaacctattattatttgatttaaattgctatggttaacttgttgacagatccaatgatcttgattttaaccatagttcaattgtcaataggtcaaataaaaaaattgtaataggtaaattttgtaatcttctttcatttgtgtatgaacctagtaaacatgataggatccatccaaatcagtgtg

SEQ ID NO: 397199 - DNA, 623 bp, Cannabis indica
ccagaaaaactaaaaggaaaagactaaaaaatcatgtcaaaagacaagacgaaagaaccatgtcaaaagacaagactaaagaactatgtcaaaaaataagactaatggaaaaactaaattagtttcaacacataaacacgatcataacattaaaattaattaaggaatgaactccttataattttaaccccataaaaacattaattggaattaaactaataatagtaaattaaaattaccacttgcaactttttttaataataattaaactaataattttttatttaattattaaaattatattatagggctaagactaggtgttatattttgtagagtttttcaattcttattttattttatttttaataattttgtacttaatttattaccacttgcaacttttttttttcaattataaataattttcaattacaaaaataagacttttttatttggattttattttgggtaattaccattttagattttgtattttgtaaaagttattaatttgactctctattttgttaaatgataaaatagatcctatattttttaaaattatacaaataggatcctaaactgattttttttttttttttttgtttaaaataaaactt

SEQ ID NO: 397200 - DNA, 643 bp, Cannabis indica
gcacccccaccaagttgggatgagttatacgctgcaatgcaagagagtattcggcagcagggtgagcaaattagagaattgagggagcagcgagctcagcctgctctaaaccctaatcctgatactccggcacctctggtagtgccagcggatgcagggaatcatttggaaccattgtatgagcggttcaggaagcagaactcgccagtatttgagggtggtgctgatccactcaaggcggagtaatggatgagtatgataacattgattttttattttatacgggttgaggataatgaccgagtcaggtgtgctacttatatgctgtgagatgatgcccgtatttggtgggagattgggtctcagggtcatgacctgaatgacatgaccttggatgcctttcgagccttgttttatgaaaagtattataatgagtctattcgggcggcaaaggctgaagagtttatatgattgactcagggcagcatgactgtgacagagtatgccactaagtttgatcgactgtcaaagtttgcttcagatgaggtggctactgaagctgctaggaaagcaaagttcattcgagggttggatgaacatatcgcacgggatgtgattgctgcttctaaacaaccgggggttg

SEQ ID NO: 397201 - DNA, 931 bp, Cannabis indica
attggagattctagaaaacctacttactttctaaaccctaacaattacccagatacagttcggccctaaaaattgctaaaaccaaatgagataacagcgatgctgaccaagaagatagtaattaaacccagaaatacaacataataatcatgtgagataataaggagaaaagccacttactcattgaagttgggttttgggacgatgaatggctctgcaatctgcaaatccccgaacgtcttgaagatctcttcgatggcttgaagtcgaaaattaaatcggatgaaactcgtaggaaaaatgccaatgacaaagatggcatggaaggtttcgaaataatctgggtacgattttttgcagaaaaactcgaaaaattttcagaagtttttaaaatggcaaaagtaatgcaaaggtgtttcctttttcctttatacactcttgggttaatctccgttagatcagaaagatgattaatcctacgggtagaattaaaaagaggagtggaaaagatggtcattaaatgttgatgtacctcgaaaccacaaaaccgccaaaatcagaggacatgcgttttttctaaagggattatgacaaatataccctctgtaatcattaaaaagcactttttcttaaaaagaactttttgaggggcaattgttagactcgaaattcagctagcacttcaaaggaggatacgtgtcaaactgggagaatacgaatcaataaatataatgataattatatttgaaaatggaataattcattaaatgcggaactgacagagtatatttacaacttgctgactgtaagatcttaagcgaggtaaagatatacgaactgctgtctcctgcgttaataagaaaccatacaacataagtagtgcaagacgaggcatcaacctcgctacgcatgaagagacatagacgagaca

SEQ ID NO: 397202 - DNA, 1120 bp, Cannabis indica
tacaaatacaataatataaatatctataaatattaactgaataataaaaaaaaaattaaaaaaaaaaacgcaacctccttggaagatataaactgtagattaaactataaaatactgcaacaaatgcagcttccttggaagatatatacactgcatacaagttttttgcagtctctttggagctgctcttaattagttaaaccatcttttgtcattttttgtttcagggatattttagatgattaatttttaaaaatatatattttttttatatacatataatataggggaattattctttatattttttttatttatttattttttaaatttacagtttggatttttaaattggttgcagcgctagttacaataaaaaattttatacgatttagttacaattggaatttatatatagaattttataaaaatatataaaaaaaaattgtaaaaaaaattgttttgaatgtaaaaataaaaaatgccttataatatatatggagattttttttttgaaatggatatatatgtatatattatatatatcaattacatattttttgagtagtttttatggcactaaaagtggcttacagaatctgaatgtagttggctgtacaacgtggaaaatgtcattttcaactttggctgtggcatttattgtcattcaaagtcaaaaatagaggctgatatgtataacttatactatttattaatccacttctagaatcacattactctacctacactaaatggagctacaccagctaattctggcttcgtatggatgaggatgacattatagataatcataaggatagtgtcaataagaagtgttcataacttcagtagattgacagccattcataacaatgttagaaatattgtttcagcccaaggtgattcgtaggcccattacacatgcctctctgcctcgatgttggaaaagctcatcatagctaataattagtcatataaattgggaaatttgattttctatactttgaaaatcaaattattttttccctaaaccaaaaatttaaaacctaaaaaaactattccttttttttcaaaactccaaaaatacccccctcacaatattctctctctctgcatcatc

SEQ ID NO: 397203 - DNA, 911 bp, Cannabis indica
ttgaagtggcggcgcaaggcgcaacacttcttgagccacattccatgagtacttcatcttttgcaagtcatcccaattcaacatttcttccttctttcttttgatttttgcaacttccatttgctctgttcattaattatcataattagcatcataatcacgtcaagtaataataacatatttttgtttaatttcacacgtaaaaattaaacactacttaatttgtatgcattaaattaataacttactatctaagttttagtactatgtgtctacccaccaacaaacttatacacttaacttttttagaaaataatataaataaatcttacaaatcacatataccatatcccatcctaaatcaatgggtcttgagaaaataatagtaataataataataacctttttagaaaacaaattgggccatttaaaaaataataatagtattattatgataaataatgataaaaatcttaacatggtatctttttttttgtttttttgtctttttttttctgataaaagtatctttcttttactttttcctgaaaaaaagttttctggccggcataaggcacacataattttttatttttttcctaataaattaaatcacactaaatataatatttccttaattattaaaaattatgatgctaagtcacatacaaataaaattttcaaattatttattaaatcaaaatgacaagcttaatattaaaatgcatcaataagagttggaaccattacacaaatttctcttttaataaaaaaacactttacgtggttttataagagaaatgctaaagggtaccaatagtgcttagcaccctcctatgtgttaatatcgctattaattcaattaagtatcgggtcccatataatttaatataatagtttttaagaaatat

SEQ ID NO: 397204 - DNA, 1620 bp, Cannabis indica
tactaggaaaggggaaagtcatcctggcagagataagagacttgtcaagtgatgatgagccttcaagtcttgctcgggaaaatgctttgcaaaatactccgtcttgtttttaatcttctgtattattatgctttcatacttttagtacttttctcttaaccatgttgcttttatctcgtgcagacatgtctcagaagatgctcgaagctctgaagaaaagagttgggggaagctcaagctcgtctcctccagccaagaaagctagaggcagtgagtcaacaccgtcaagagagaagacaccggttgaagctgttatcgatctattcgaggagctaaccgtggtagacccttctgctccaaaaactactaagtccaagctctcttgaggaggaagctcggatagaccctagcagtcgaagggtggatctaagcagattcgggctcctacccaacctccatcactgcattgagaccaaaagaggcaaggagatactcacccactatatgaatcggtcagcccctgaagtgaatgagcagctggcaggagctcacaacgagccttctctggagctgttgattggcggaatcctgaaggagtttacgaaggtgagtctttactgacaatttcctttaatccttccttacttggctcagattcttacattttttctcttacagactggtttgaggatggcttacacttattctcgagctaagtctgctgcctccaagaatgctgccatgtccaacaccatgagggtgaaagtggacttggccaggaaggacgctgatgcagttagggtacaactcgaagccgtctaaatggaactaggtgaagtcaacaaaagcttcttgctgccgagaataaagtggtcgagctagccaaagatctgaaggcttctaatcaacttgaggctaccatgacctccttgtccaaagaagtaaccgacctccaggaagagagggaggttcttcgaactgttttccgcaggttggaagcagagaagaagtccaaggaggaggagcttagcgctgaggtagagaggctcaaagggacggtaaacactttagagacagccggtctcgagattttttacgacttttggaaggctaaccctcaggcgaatttcgattacttgggcgaggccaaagacatgtatcttttagtactgtgcttcctaagtggcctataaagattccgagggaaccacatttacctccggtctgaacattgacgtgccccccgtccagacaacagatcctccagctcctactagcccaaaagacccgtacaaggagcctgggactccagccttctgaacacttatctgcttatctttcttcttcttttttatctatccggccataagaccttttttttaagacgtcgtgactggccaagcgttctttaaacttggaattatttctcatttttcagacaacaggctgaccgggcagcttttaatctcgggtttacgtgctttagttatctataatgaatttaattctctgcttataatctatcgtgcaattgtttttgttttatctttagcaaatgctttgtacaggtataggtgcccccccaagtgaccgagcggacttatgactctttgtcacttg

SEQ ID NO: 397205 - DNA, 495 bp, Cannabis indica
aacacttcttgggtgccagaagcaaggctcaatgcccaggttgacacctagggctggcccagcgcccaggttgacattttttcaacttggaccgattctgatgatgatttctaagaagtctttcaagaatcttctctgttttagtaaagattaacactcaactatttctcgagaccaaataaaacttctaaagggccataaaggggaccagggtccaggttaacacctggcactgggctagcgtctaggttgacatattgccaacttgagttgtttccaatcaagttctcaaaattttttaggcatcttttacatcatcagaaataatgaagattcaagcaaactcgggaagaaaactacaaacccgaaggcctgactatcacaagttgttaatatttattttttgtcaatagatctaaattgtatgttaaatgtatggattatgagttttatattctgtgactagaatccacttcaaatattctaagaactctt

SEQ ID NO: 397206 - DNA, 636 bp, Cannabis indica
aataaaaactgtgaaaagaatttgaaaattatgataatcgcaaatagcagcacaatatcgcgacatgtcgataacatgtcgcgacatatgtcacgataagcaaaacagcgagtgctttcacgacatcgcataatgtcgcgagcatgtcgcgaacaatatcgcgaatgtacattttcaataaattcaactataaaactagctctctttaggaaaaaaatacagaacagtaaagaaacatacccgactgttgaacaatagtgcaatgtcggttaccttgacatcttgtttccgctggccctccggtgttttccagctcaacattctggggaacttggtcccgttgcagtgagcatacttcttccccaacttctcaattgcttcgtatgcccagtactgaaaggcaggtacatatccactaacagtgtactttgcctcttgagcaatcttcttccccttcttcttgtcaacattatccttgtaatgttgcatattcttacctaatgtctccatcagcttacgaaaagcgcgctcgcccacggatacttgaagaagaattcgagatcgttaacaaacttcaacatctcaggccaaacttggacattgccctcctttgatactaatacaccttcaatgaaa

SEQ ID NO: 397207 - DNA, 589 bp, Cannabis indica
attaataaatttgaaattaaactagatattttttatagattgttatacccgaaattcggctggatgatacgtgtcaagataaagggaatgtgaatcggtgcaatagctttttatggaataactcattaattatataagagtcagagtatatttgtaacccgccgactgtaaggtcttaggcgaggaatcaatgtacaaactaaaactgagtgtattagcgagaaaccatacatcaccaaatgcgaatagcgaggcaccggagaaagtgacacataccaactttaaaagtccttaacttgcaataagaaaactaagtgtaaaagtcggatcagctcaaagaataagtacgcgagatgaccatctcgctatgggaagacttcctatagcttcatccaactaacaggagcgaggctcacaaccctggcgagtcataagatttctttataaatcaccgcgatcgatgcaagacatacattgtcgacctaggaaagaagaatggccccaactcgctattggaatcattataatcaagtttctgtagagatatctcgagattcaacaattaaagacgtgtttaatacacaatagt

SEQ ID NO: 397208 - DNA, 534 bp, Cannabis indica
gatataaatatacaaacacacacttctgcacacatgtaccccaaatataattttaaactaacaacaaattttaagtacaatttgttatttagctccctgatactgaagtgaaaaaggacttcaaacacagctagctaatcttttgtatcatattgcagtgtggcccaaccacaagcaaaataagattcctattgttcccaggtaaaattcttgtggacaaagttaagtatatctaagcagttcctgcctttaaatgtggcttttaccaatatcttgtaatagttagtaataatgataataatagtaatacttaatatgacttaattgatgacaaccacatttccatgccccctaaattttaagcattatccttttggtttctgactatgttctttaaagtcaaatgtgttgattattttcttatttatgaatgttgctgtgatttgaacttttcatttgttcaatgagtgaaatatgtttggtactgccaccaaacgaacagaggataaatagagttctctctaacttttgatg

SEQ ID NO: 397209 - DNA, 745 bp, Cannabis indica
gcaccctcgctgcaatagttgccaagccttcattgctgagataataggggtgtagggtttttttcctaccccctgaactcgaatgtctctccctcttctggtgtgaaaacaactttcttttgcttgcagtcaattgatggtccatatatggtaagaaaatccatgcccaagattacatcaaaatcaaataaatctaatacaatcaggtctacaaataattccctaccatttatccttacaggtatacccctaagccaatttctagagattacaacctcccaaactggtaacatggtcccaaatcctacaataaataattaacttggtgcatttatatgattaacaaatgtgctagcaataaaagaatgagatgcaccagaatcaaacaaaactttacaagtggtgttggccataggaatctgactcgatacaaccgaaggactggcctcagcttctgcttgagtgatggcaaaaactctagctgaaacatacttgtcatctttcttgggttctgctttgttcccagtctgtccccacaatgggcaactgcgtttgatatgtcctttctttccacatttgtagcatgcttttgtgcgacactcgctgagatgacgtttggtacatttagagcattctggaatgtttcgcccactgttaccattagatcattggtcgttatcagttttgtacctcttttcttgacttgactgaccggactgatattgtccatttttcttgtggtcat

SEQ ID NO: 397210 - DNA, 2085 bp, Cannabis indica
caaactcggactcagacccaaaccaggttccagacctggacatgtacaccgtaacccgaaattggaagcggaactggaagcggaccaagacttgggaacaagaccaagggactaggacccagacccacactcggaccgagacacagactcgaattaaaactaggatcgggactcgagacacgaacccaaacctagacatgaacttggatctagacccggaccgggattggagactcagacctggacccaggtctagacctggattggggacccaaacctgaaattagaaccagaatcgggacccaagatttagaatgtgacccaagacccgacctgaacccagacacggacttggacacgggctgggacccaggatctgagttagaacgagatcgggacccaagattggcaaccggatcttgacccatgtaccggggcttggacccaacttgtagtgggtgtgtggatcttggaatcttaccaagacccaaacttggaaccatttcaaagctaggacccaaacccagactcagactaaggacctgaaatcggaacaagaactggaattaggaccttggaacaggaattggacctggacccagaactagatcttgatgcagaaccgaacacggaccttgattgggatcgatacccgaacccagacccaaacctggacccagacttgtgccaacacttgtgacccaaaacctggaacccagcacccgtgacccgggacctggaccatatttcagagccgtaccagaacttggacccagacccagaccaagacccggacccagacccggaccaaaacccaaacccagatctagacccagaccaacaccacaacccagacccaaactcgtacaagaactcagacacgaacccgagactcaaactcgaacctgagactaagacctggattgagccttgaacctgtactgggactagaacccgaatttggaccgggaccggcacttgggacccgagactcggacctgggacctcagaaacaaaccgtgacttagattggggacttgggccccaaactcgaacctggaccaagacctagaccaaggatccggacctagatgggggacttggaccaaaaacagggcctgaccgggaccgagacccaaaacttcaccccaaactcgagacacaggactcaacctaggagctgaaacctaggaactgactaccaggacaaaactttgaacccaaaaccaaaccaagaccgagatatgaatctagacctaaggctttgtcctgacccatagtcagtatttgaattttggacccgaacccagatccgtaccaagactcgaacccaaaccgaactgcgatccagacttgatctcagactcggaattggaatcggaccaggaataggatgagaacccagacctgggactataataggaccaaaacctaaaccaaaacttagaccaaaacacatataagtacttgaaccaagaccgggacctggacccagatcaagacccaaacctaaaaattggggccaaacccaagacccaagaaccaaactcaaacttgggacccaaaacataaactcagactaggatgggaccccaacccaattcgagacctggacttggagaggaacctgagacatgaatccgaaccgaaacacaaacttggacctggagtgagacctaggagccaaacatagatgggacctagacctaggaattggtcccccaaaccgggactcgaacttgggcctcagaacttggattgtgattcggggctcgaccctagacccaaacctggacgtaggacccacctcgagacttgggatctgggactcgatacttggactcgacccgtacctcgtgacttaaaactagaactgaaacaagaagcggatcgggacccaagaataggacgaggacctagacccaaaattgtaatcagactaggacccagactcaaacacagacccacacttggattctgtgtctgagttcgggttcgggtctgggtctggattggggtctgagtcctggtccgagtttgggtccgggtttgggtccaggtttggatcctgatctgggtctgggt

SEQ ID NO: 397211 - DNA, 540 bp, Cannabis indica
taaattgcaactctctaaaggcccgacgtcattttccacagcttccgaacacaacctcagaattaacgaaattacataaatagcataataagcatatattaacttaaataaatttcaaccatatgcatgttataaataatatttaaatctcataaataaaccctaatcatttaataatccaaaatattaatcgtatgctgtcattacaatcattcccccgttaatagaatttcgtcctcaaaatctgacatgaacagctctagacgttgaatcctcatattagactctaattcccaagtgacttcttccactttactatttctccagattactttaaccaatgctatggttttggttcaaaggactttctctttcctatctaaaatttgaattggttgttcatcataagacaagtccggttgtaactccaatgcctcataactcacgatatgcattggatctgacacgtacttcctcaacatggaaacatggaatacattatgcacagctgacaatgatggaggtaaggctaaccggtaa

SEQ ID NO: 397212 - DNA, 1237 bp, Cannabis indica
ttatcgacctgttacaggatgtctgtgtatgcaactcgaataagacgcagacatcctacactcgattagtcttgtacgcatcttgagcttgcaagcttatgcgagaatatgaacagacaactcgtatcatgaaagttgcatacgttgctgtagttagtgaattgggccgaaactgttcttcatttattgtatttacgttttaaatggtttaaatgtttatattcaatgtacaaataaattgataattaaatcaaatctctgtgtaatcaaaatacacttgctttgtatataaatgagtgatctaacatgaaatggacaagagagaaaacccttgcaacagtggactaagcagaccgtgatctgactgaaccactatactctctttgtgttatttgtatttccagtacgtctgtgtgtccatggtttgaatactcgccattctgggtagagtaatcgcataatcatgttcatattttaaatttattgttttacttggtgttctaaattcctccaacaacatttggcgccgtctatgggaaagaatttttctgttgatttcgaaggaaaatcataatggctggaaaccaaacgaatggagataacaacacgggatcttttaatgtcagaacaataaatgttccactcccaggtaatggaacaacacctgtcaataccatcgatggaggcgtggggcgtaccaccattaccccctcaacttatttcctgaccggtcatgttggagaaacatcgacaccggcagccactgtgggacaattcctgcctatcacaccaactatggtgtttgagggaatcattcagctgaccacgacccaatatacggccccacaagagcaaatgcaagctctgcaggctaaggtcaacagaagggtcaggacccaacgtcctcctcgagtaccaaacatgcgttcagataaccctcaagtaataaatactacgcgacgaactaataatcgctcttgtagagaacaccagactggacaagagggactcgacttgaaccagcctacgcaaaggaaacaattcgcacgaaatgctaactgcgaggtgccacaagaggaagatcccgagtgacgcaaccctcgaaggagagcccagccgcaaaatgagataaacaatgttgaatcttattcttcatcctcacaaagtcgttctcccagtgtttatactaggtctggctccgtggagacacctcaaggagggagataccatgttcaca

SEQ ID NO: 397213 - DNA, 784 bp, Cannabis indica
acgatatcgtgaaaccccaaattgcgacacccccaaaacaaaacccagatccgaacaataaaaaaaggtattcggctaaactttttgttgtttgattagtttttaattgtttgtgcttcattgtaaagtaatgtatttagtttatgttcaatttttttgatttcgtttgaatttcattattttggtatgttttctggttttttgcaaaatttgcgacgtatcgtgactatgttcacgacataacgcgacatcgtctagaaaagatgaggattttatgataactgtggttttcacgacgtgttagcgatatattggcgacataattcgcgatatattgtatttagtacgtaggttccatgattttatcgacgtgtatgtgtgtttggcgacatgtttgcgattatatgcgatatgattagcgatatataacagtcgtacataggattcttgtttttcatcctcctttttgtgtttagcgatgaattagcgatatattagcgacatatttggcgatatgatcagcagtaacttaggattacgtttcacgatgtatagcgacatactgcgatatctttcacgacatacttctaacaaatttgttgacaattttgcagatggctcctgaacttaaacttccagtttcccagcatttcacgggacgtcttacctatcggggtacagataggtttagatatatcaaggccaagtttactgagatggatttggttgacacagtaaaggctagtcctttcggacacttttgggaagctggagagttgacttt

SEQ ID NO: 397214 - DNA, 787 bp, Cannabis indica
gttttttttttatttgtccttttgtaaaattattataacaagaatccttaacaaagttttagtgttgttatactatctgttactagggttttattttggtgaaatttttattattatcacagattttaataaagggtaattaagcatttcgccccctaaacttttaaggtctttaaaaatcctcctaaactattgagattgctcgatttaaggacttttgtctaattttattaaggaaagtctaacatggatgaaagttcaggatgcatgattaggtacatgtcaaaatttgagaggcatgatttggtagatatcatagtctagggagcctaatttagtacataaacaaacaaaaaattagtaaaattgagtgaaattggacaaaagtccttaaatccaataatctaaatagttcaggggaaatttttaacggttagaaaagttcaaggggcatgatttggtacatgttaaagtttagggggcaaatatcctaattagcctttaataaataattaatcaattagtactaaactagtttataaaatcacacacgtggcgttcttatagattagggtgttaccactactacaaaaaggagtattttcgtcggtttttaggtgacatttaaagaatttgcgtcggtttaaaaaattgacatatatgccgtagtcacagatagttttttattagcgtcgttttttaaatgactcaaaaaactattctcttcatttaaaaaccgtcacaatatatacacttttcttttttatcttctgcgtcggtttagaaa

SEQ ID NO: 397215 - DNA, 625 bp, Cannabis indica
gagttggcataccatgatcgtaggtaatatttggacgaagatgaagcttgataatatgattggttaagttatggcatctgattcctctccatgaacaacaatctttgttattgttattccaagatgataagacattatcatgaacatcaaggccttgtttgaaggtgagaagagcttgtctctcactttctatacaagagtaaactccatgatcactagtactagtagttgtggctaccaaaaacagaattgctacaagtaccattttgtaatatctaaaattcttcttattataaccaatatgcaatattgatctaattatatatagatcgatatttatgtgtttaataaaataaatattaaattttggaggaatattaattacaacctcttattacaatatctaaaattacatgccgaaatactttttatcaatttttttcatagcagtattcgttatagttacaatatcatttttgtaaatttttgaaaaattatagtaccgaaaacagagttcctaatatttcagtttaccacgcgcgtttaaaaaacttcaaacgtattttcgacactgtaaactattcgaaaattttaaaaaatttacagggatgatgttgcaagcaaa

SEQ ID NO: 397216 - DNA, 604 bp, Cannabis indica
ctagcaatgtctttgcgtagtatcgctaactttgccagaattccttcatttagcgtgcccgcggaaactcccggtgcgtgtttctttttgtctagatgttctcgtaagtcaccatgtttttcgttgattttttctcttaggtcaactggagggtacctccggtttttcctccctctctctccgggttcctggtgcacgaatacgctttttcgatcctcttggtcctgagggccaagactcgctcgagggagcttgcccctctgcagacatttccctttcaagaaatccgcgcagactttctgcggatcctgcaccttttctttcccagggattgaagttggatttttccaggattttcctcggaagggtaccgtatagggcttggttccctggtattgggtttctaagtactcggtgaggactcttccggtatttcctcaagtcctactgcgatggccttaaggtgtatgtgtattcctataatctccatggctttttgcatgtcaaccatcacctcgtacatccccctattctgttctttttgagctgcaagctcgacttcatgatcaaccgtcttttgcctcaagaccagtagttctgtata

SEQ ID NO: 397217 - DNA, 915 bp, Cannabis indica
tgcttggaaaatgatttaggcaactttctttggactgattgagcctttcaagcttacctgtaaaattttgtccttagtataccaaaagttgagctttagcccgtttcaaaattttaaccacttaattgagcctaatgtgttgtctttaattactttcgttctcaatgtaccttattatgccataaacttttagttatgtttgggaggaatgaagtgtgttgagtgggtaatattttggaagtaagagattgaaaaaaaaattatgggaagtgtcttaccatctatagaaaagaaaaaagaaaaagaagaagaaaaaaaaaacaaagtaataaatttgataattcttcttgaaaaaaaaaacaaaacaaaacaaagaaaagggaaaatggtggtaggcacacacacatatatatatatataaaaagaggaagtttgcaatctcttaccgatttctttgggataaaaaaaaatatggataattgagggtatttgattggtatgttctgcttatggtatagtgtagcctaaataactttttatctaccctttttacctaagccgtcacatttcaaccgaaaaagaccttttgattctcagcaagggttgttgacattagtggagagaggtgtgtcatacaagcatattgaacattggttggcggaatgttggacaaagtagattggttgtgatatgagtttctaaagaggtgttttgtatctatatgaattgattgcttctaacttgtgcatccaagttaattcttagagtgattgagttgaaattctggttattcaattgattgaagttgcacaggtggtagtggtagttaaactatttggaggctcagttatttgttgcgtcattttgctgttatttcatttttagttttagttttactcaagggcgagtaaagat

SEQ ID NO: 397218 - DNA, 657 bp, Cannabis indica
agatggagaataattctccatccattgaggagtcatacatcttctacaactgcaactgaatccttcatgtggtgatgatgatgggtgtccttcttatccacattgtgagatttgttaaagcctttttgctcctggtactttttgcaaagtctttgcatgtgtccggaccatacaatatattttttgaaaaaaatatcaaatactcacataaggtaacacttatacaagtgttgtcttataccctatcttttggcaaagaattttcttaagtttaaaaaaaagtgttaccaaaagttatttctctagtagtgcatcactatcttctgaaaatgcaactgaatccttcatgtggtgatgatactggttgtccttcttatccaaattgtgagatttgcgaaagcctttatgctccttgtacttcttgcaaagtctttgctagtgtttggaccttccacaaaagtaacactttcaagtttctttatctctggacttcgatcttgattgagagtgatggtgtttactctttgatcttactttcttacacgatcttcctcttgccaaatgcacttcctccttctaggattccttttccaattgtaattcaaaatcctttgatttaagtgttgtaagaacatcttccaatgcaatcacatctct

SEQ ID NO: 397219 - DNA, 590 bp, Cannabis indica
ggtttttatgttgatttatgcttaaattggaggttgttgaagggttagtcaagttttgagtttttgaagtcaatcttgaagctttaatggagaaattcgtttctgtgaatggatgactgtttaatcacttggaatatcttctttgtggtctatatagcaggtctggagagtttggtttgatttggggttgatttgcatgagatatgaatttttgaaaaattcctgcactgaatcagaattccgattcagggaggcctgtaggaactggaattccagttcgcttccaggaatttttcccagaactggaattccggttggggaaccagtctaccggtttgggcagtttttggaactctagtttttccatttttgtgatatttagggtattgccatgttattcatcgatagggaaacttttagtttcaagtttaagtccccgggaagtgatttagcgtatcgcttattagtgttgtgattgatgtgatttaggagcctgtaattcgccgagcagattgttccactcaggttgatcggcacacctgaattcggaatcgaggtaagattagcgtaacagtatgcatatgtattta

SEQ ID NO: 397220 - DNA, 977 bp, Cannabis indica
aatttaattaattttccaatattgaaaataattaaattatgtagaccaataaaaagttgccacgtgtacaagtgtgtacatgtgggtagtccgttgtgccatttaactgtaatttttaaatggaggagtacagagcaaaacggaatgagagtttaggtagtttttcccccaaaaaatcaattgatttttttggttaagtgttaaaaaatttaaagttcatgtagtttagccgccaatatcccttcaaattattcttcttagcaactatcaagtaatatccttgaagaagctatatataaaagaaaattatttggtgacaacatcattttaaaatttttttaattttttttattagttggatgagttttttgtgtagtttttttaagataaaatatccatttagactttatattttgtaaaagttacagatttaattctttgttttattatataacaattcataccatttatgttttttaaaatgatttaaaatagactttgaacttaattttatcaaattaaaacttaataataaactaatatagaggtgatggcattattttatggtagtgttgttttctggtgcttttcctttgactggtacttttaaccctcatgttaaggaggcgattgcattgtatcatggtttttccctttgtgttcgatggggtttcaaaaataatttaattttctttgatttcctttgtttgatcttgtcggtcaatggtcaggatgtttgtcctaatgaatttgatataatatataatgatatatctcatgtttaaaaatctttccttagtttatgtaatgaccactctagtaatgtggattagtaaggcaattagcactaatgtttattattttattattttattattatttgtgaatttatttaattctggaccccaatatttagaaataaatattagagttataatttctcaattccagagattttattaaactctaggggtatt

SEQ ID NO: 397221 - DNA, 805 bp, Cannabis indica
agaaaaaataactaaatttgaaataaccgcactacacatatacgagtatagtgcgagtacaatatttggaccatctcaatatatacatattttgaattcttttaatgattatatacatttaatttattatatttatatattatcatatcatattttttaatttacttcttaaaatttatcaaatttatggttattgtagtttttttttaatgttttcatgtgtctacttagtatttttttaataataaatatacagacgcgattgattttgagtttaaaatgcatttagaatgatatttaattagattttgaaattaaattattataattattttttatgatcgtgtatgttgtactaatctaagaccacatgtaaattttaataaattctgaatactttacagtgttgaaaataaagttcaaacaattacttactacgtgtataagaaaaaatagttagacgtgcaaaaaatatataaaccttatttttgtcatagttaattattcaaaaatttctaaaaatttaccggcaaccataaataattaaaatgtaaatgttaatgaaaaaaaaataaacttaaaaactctcttagatgccaaaaattaggggtgtgcataaatcaatccaatccaatgacaaccgaccgatccaatcacaaccgaccgccaaatattggatatccaattgtgatcggatcggattgaatgttatttttgaatatccaattggatcggatcggatgttggatggagtatctaaaaatccaatacatccaattaaactaattagtattttcatttaatt

SEQ ID NO: 397222 - DNA, 574 bp, Cannabis indica
tttctttctattgcagagtattaccaatcaccaaacctaaatcttcttagaacttgatattaccaccaattttttttacaatcttcctcagtaatctaggtattgtaatagaactgtgtgagaaagtgttacaacactagaatttcaaaatttagagagagaatctaaggagagagtggcaactaggttaggaagtattgactgagatttttggcaactaattgatgagagctatttaatgatcaaaagagatataatgcgaatatttttacgtagttggggtattaatgagccttagttcatgagtcactgctattaatatagtagtttttcttacagaagatgttttacactattttttatgaccctttgatctttagaaaatagttggagtatttatagcttcttaaagagagaaaaaaggtttcactatcgtcgttagtgttaaagcatggtttgcacaagtttccaaattcgaataataatgtatgtatggcaagttgcataggttttagctaggtgtctggtaagataagcccttaacctttcttgattgatgtgatagttcattatg

SEQ ID NO: 397223 - DNA, 570 bp, Cannabis indica
atccctagacttttaggggttttaaggacgtagtcctttattcttcttgactgatgtgatttctcataaaatagccgtcactaggcttactaatcatagcgtggtagctacagagagggggttacaccatcacactttaagacatatggcagtttcaatacgccttctcccatgcggcattaaatgcgaggtgactgcttagataggatttgacacctcctggagatgctttgttgtagctttgctctccaggagtatgtgaaacttacaggccttctctgggaggcatgttagatgctgatccctttgactaaagagacttagctgaattatcccaacgttaaaccccttcagtctacgtgtctcgatccggttggtccacgtattttggacaaaatcaggggcaacataacataattacagaaatgagtactccaccatttgatctcgtttagctaagcttgaacaaaatcatcgtttcacttttatgcatttatagaaactatgatttcatatctatgattagcgctcccactcaattgtactaccatgttcccaggatgtaagtat

SEQ ID NO: 397224 - DNA, 634 bp, Cannabis indica
aagaaagttctcactttatcttttcgcccaatagttgcctggtccactaagttcacttgcatattagggtttagagagatattagcatcaacctctcgatatatgtttggactagaagaaggaaatttcacagaagcctttttgattgccagaggagcctttcccttgttagagccacaattagaaaaaactttcccaaaactctcattcacaggtctcaaagctttaagtctccattctgggcgtgtcacttggcatcttaaactttctcctcccttctattagcaattttcgaaatatagggaagtatgctcttttgaccccagaatggtcatctctactattattgtcattctcttgtgtgttactattgatgtgcaaagcttgaatatcggctagtgtaacaattaggacagggggaagcgcctggttaacaaccaacctatcccaatgtatgacaattagtagtcctatgatccgtaaggggaaagaccgggagttgtaaaatcccacattgcttggggaaggtcatgtgtgatgattctaagactatgtaggtatgggactacatagctgaaaagggcttaaatggattgattggtactaccaatatcaacaaggtgcatcttgtttt

SEQ ID NO: 397225 - DNA, 953 bp, Cannabis indica
tactgcattattggcgtcatccacttgtcttgttcatcagactttgacatcttcgttgggtttccatgccgctggccattgcattatcaccacaggaatggtgactccatctttaatttgaatagatgagccgagattagcaagagtgtcggcgtggttgttctctagtcttgacacttggttaatggtgaattttgtgaatcttgaaatcttgtcttgaacaatctggaggtaggatgccatttttgaatctttggcctggtatgacccgttgagttggtttacggtaagttgagaatctgacatgacttcaatggttttggcattcaactcaatggataggtctagcccatcgattaacgcctcgtattcagcctcattgttggtaagtttgaagtcacatttgattgcccgttggataacatctccttaaggggaggtaaggacgattcctaggccattccccttgctattgcttgatccatctaccgctagcatccatgtcgagtttgtttgctcatttaagcataataattccttttctacttgtacctgtccaacacaagaaaagtcagcaataaaatctaccaatactgtgacttgatggctgtcctcggttgatatgttatgtcgtattcactgagctcaacaacccacttggtcatgcgtccagaaagttctggtttgtgtagaatgctacggagtgggtattgggtcagcaccactataggatgacacttgaaatagggcctgagcttgcgccctgctgtgacaagtgctaaggccaatttttccagctgagtgtatcttgtttcagcatctagcaatgtcttcaaaacatagtaatttggttgttgctttccttcatcttctcgaactagtgcagtgctgaccgctggtttgaaactgccagatacatgtacactgtttctcatgttaggaatattttacca

SEQ ID NO: 397226 - DNA, 645 bp, Cannabis indica
aggtcccgtgtttcaatccctgtttaggtttgggtcgctatttgggtctgggtatgggttcgtgtccatatctaggtccgaattccactttaggtcaggggcttggtcttggtctgggatcgagtcccgagttcgtgttcaggttctggttcaagtcttagtcctagtctaggtctaggactgggtctgagcccgagttccggttcaaggttcggtctagttctgggtccggatcgaggtccaggtcacactcccgctcatgttccagggtcctgatcacgttcttgttcaagtttcagttttgggtcccacgtttgggcctgggtctaggtccttgtccaacttcgctttctccgagtccccgatcaagacatcgactatgggtcttgtccaagccccggttctctgatcacgggacaagatttgcatcccaatcacgggtcccagtcttgtttcattcatgtcccaggtcagggtctaggtttaagtctaggtcaaggatcaagactggggtccagttctgggtctcgatcccagttcttggtcctgagtcatgttcaattttctggtctgaattcaggtttgggacccaatcatagggtgggtctatgtccgagtccatgtcctggtctggttgcagttttg

SEQ ID NO: 397227 - DNA, 505 bp, Cannabis indica
tgggtccaagtccgtgtctgggacttgggccaagtctgagtctccaatcccggtccgggttgtgtgtctgggtttgggtccaagtccgtgtctgggttcgggttcttgtcctgagtcccgatcttagttttaattcggctctgtgtcctggtccgggtctgggtcttggtcctagtcagattctagttctgggagtgagactcggtctcattccctcggtcttgttcccaggtcccggtacgcttagaattccgcttccagtttcgggtcacgaggtaccggtttaggttcgagtccgggtctgggttcaggtttaggtctaagtctgggtctgggtcccggtttaggttcgagtctgggtctaggttttactccgtgtatgggtcccagatccaaacatcgactatgggttaggtttaagccccgggtctaaatcaggatcctggtctcatgtcccacactagtttcacttcgggtcctaggtcttggtcctagtccgggttta

SEQ ID NO: 397228 - DNA, 1979 bp, Cannabis indica
aaaaatctccagttcgacaatcttataagattaaagaaatagtaagtattgaattcattgtatggaaaacgagagatttataattttattgcttaatttttgtattgtaaacaattttgcagttgcgcaatctagatttggcaatggcgaaccagattaaaaaaagaccgtcaacttttagcttcgctagtttttgcatcaatcgtgctcaaaacgttccaagacaaccaaatttctttgattgtggagtgtttgttgcattgtttatgatacataggtgtagacttgataaaagatcttttgacgtagttcatatttttaattaatagtgtaaatttaattatattttattacatatcatattgaccaaattcctttcaacagtttaattcaaaagaataacgttgtcacttagcacagtggattgcatgttccaactacaataaacatataagcaaattgatgaataacgttgtagaatatttttataattaattttttttattttatatattttctttaattaagtagctaaataaaggatagaaattcaaatttctcgctatcgaactaaaatttaatggtttaatatttttaaaattaatatttatagttaaatttatttattatatatgaactagtaaacaacccgcgctaactcatcatatgattttaaaaccgttctcattaccgtatcttacttctagtcaacatatagtgttattatatatcgtcatatctaacttgtagttaattattcttcccaacatatttttctgtatacaaaacaaatcaaacaataaattaactactcatttttatacttaaatgaatttaaaatgttattatagaagaaatataccaaataaaatccataaattaataatgagaaaaagaaagaattgtaactaattagatattaagttattcattaaaggttacagtgaagaaaatattagaaattaaagaatcatcatacaaaatagagatctatattaaaaaaaattgataaatttagaaaattatatgattcaaaaccgctatcatcaccgtatctcacttatagtcgtcagttgatcatattcaaagatgttctcatcatcctatttcacttgtagtcatcaatatcccttccaataggttttctctctaaataaaacaaaccaaattactttattatagaagaaacataccaaataaaatccattaattaataatgagaacaaagaaagaattgtaactaattagatattaagttatttattaaaggttatagtgaagaaaatattagaaattgaagaataatcacacaaaatagagatccatacaaaaaaaaaattgagaaatttagaaaattatatgattcaaaactactatcatcaccgtatgtcacatatagtcgtcacttaatcatattcaaagacatcatcatcctatttcacttgtagtcatcactatcccttccaataggttttctctctaaataaaacaaactaaattactgccataacaacatacaataatgaaaaatatgatgaatttataattatttaatatgacatgatactaagtactgcaataacaacaataataatttgtaaataatatgatagaaccggttatatagacataatgaatgattatttttgaggtagatatggtatgagtgtaattatttggtgggttggagcatgttgaatgtgtttttgtttaagctattttatttaaatggtttgtgtgtgtgggtttttattttagttgctttacggaaccagtttttttgtcttaaatttttaactagttgataaatataaatagtttctttgtattatattgagttattgtgtgttattatttgtgtttatttattttgttatggaactggttattttcatatttatgcctcaatattttttgaaattgatctcaatttttttgaaaaaaaattataatcggttttatgaggttttttattgtag

SEQ ID NO: 397229 - DNA, 1041 bp, Cannabis indica
ttatctattgatgaacgattttatagtttaaaagttttgaattaataattttttttaaaaaaaaaaaatgtaacaaacaatatcagtttttttttttagtagtggagtaaaaataattattttggttattttactaaagttaaatatgtaaattatattattaaggtgtagttattattattagaaaattatatttgcatcccaataaattataaatacacccaaatttaaataaaaatcttaattaaatttttatccttgtacaaaattacgaaaatatacaattttaaatgatgagtctattttaacttttattttaataattacatgacctcatttgcttataaaactaaaattatatccttcaagtcttaaaaaagaatcattaatagaggaaaataattgagctttcatcaataaagaaaatttaatgtaagcataaaaaatgtttaattatttaattaaatttataatctctaaagtttttatatttattttcgtatgaatctcacttatatatatacactaatatatgaaagatttcattcatttacttcatttttttcgatcatagaatcttgatatgtatatgaaaaaaattgattgattgttaattataattataaaaagagagatgtatatgtaagtatgcatattttgatatctaaaaggtaatgattatttaagaatgaaaatgatgaagaagagataataaagattcagaactgaaaaaaaaatccaaatggaagtagcttgaatatttattgtatggagtgtatttctctttttttttttaagagaaacctaatttagtaaataaaaaggagtgtgcttatcaaaaaataatatttaaataaataaagtggggtgtatttagattaggggtgcacttatataatgtattggggtgtaaatataagcacccattattattttagggacatgattttgtcccgtgattgcactttcacggaatgtattctgtgatgtacgacaaccgttagatgagagtagttatttgatctgagggctgagattgat

SEQ ID NO: 397230 - DNA, 565 bp, Cannabis indica
gcaaggctaaggctcaaggaggattgggatttcgtaatttcattcacgttaaccaagcactcttggcaaagcaagcatggcgtatcattgagtttcctaactcacttttaagcaagcttctcagacacagatacttctccaatggtagttttctctcatctggtctaggatccaatccatctctaacatggagaagcctgtttggggtaaagaattgcttttgaagggccttcgatggagagttggttcgggtctctccataaattgtgcaacagatgcatggatgcctggcactacaacctttaaaccttatttcttcaagggagctgacccaaatttaatggttgctgatctaatttctgagcagaggcagtgggatttgatatcattgcaagccaattttagccaacctgatgttgatcgaatactctccataccactcagcttgtttccccatgatgatgtcttgatttggagccactctttcacgggtatttacaatgttaaatctggatatcaactagcagtttcacttgctgaacaagaagtgttggaaattatttta

SEQ ID NO: 397231 - DNA, 469 bp, Cannabis indica
tgagattctcttggcacaaataggtgtaccaagatatctaaaaggtgttgtatgcctgctaaatcatgacatctccagtactcttttgatctcactttcttgcattccactacaataaataacaaatttggatacatttggctgcaaaccatatgtattaaaaaatagcttcagcatatagtagatcctcttaaaatctcccttacaaaatagtaagacatcatcagcaaagctgagataattaagttacagttcatcacatctttcatggaagtagaagtcttttttcagtccaactttcttcgtgattttacttagatactccattcccaacacaaataatagggggacatggggtctccttatcgcaaatccctttttgagtcaaagaatccatgagtagatccattgaacataagggaataatttgggtttgtaatacagttcataattgttggaaattatttta

SEQ ID NO: 397232 - DNA, 492 bp, Cannabis indica
caaacaacataatctaagcaacagaatctagaaaaacacataaaaaccaaacaaccattattgagctaagtttgagttcttagaactcaaacttgctcaacccaagaattaaggtccaaactagtaaaatcagacctagaataactccattaatcactagaaaacaatcaagtataaaccctatctcaaacagttgcaaattctccatttcaacatgcttgaactaactaacaagttaaaaactctaaaaagagaaactagagttcttgccttaggatttctatacttgatttcagccaaaacccctccaaactcactgttaaaaattgaagttcttgctggtacaagggatgctcgaagagatagagaaggaggtgtaggaaaattaggtttttgtttctttttcctttaattttttattttacaaataattggataaacctaggctgaattgaagtagaaaaatccaactgtctgttgggttttatgccc

SEQ ID NO: 397233 - DNA, 845 bp, Cannabis indica
aatcaattattgttgtttagttgattcacatatattggtggttttagttcatagattttagttatttttcggtcacttttctaaaaatactgggatgaaaaccagtgaattaaagtttctgaagtataatgagaataatgagtgtgttttaaaatttcaaaataaaattatgttgttttaacgttgttgttaattgttttttttttttttttttttttgtttccatgatcctgaaataaaagatgtacaaaacatacaataataacacaaaattaatgagaaattgatataactttattattcagaacaataaataatgaaataaagaaataattgtgttcaatacaagagaaaaaatattgtaccataacatcttgactcatcctatctaaaaatgattaaattattattcagtaggattaatctttccataattattaacattaagatgaaagtataaacataaatttcaaaatataaaaaagaataaaaaaattattttcatgttgttgtgaagcttcgtttgctgttttgtaacatcttatcttcaacttgaaaatattatgataaaccaagttattttcaacttttagtaaaatatgttatgaattgtttacactatactatcaaaaaatagaaggtaccaatactttaaatattttccttcataactaggttgttatttaatgtttctaaagtagatcaaagcaaattcatactgaaaagtagttgatttgaataaattggtgcaaataattcatatttggaaaaatagtgatacatttaaggttatttattgattagtgtcatgaatagttatttatacgttgttctcatgtattaaa

SEQ ID NO: 397234 - DNA, 514 bp, Cannabis indica
acagttagaaaacttgcatgattagtatatacaagtgatgtcaattgtgttttacaactagaatggatagagagacatttcaagagttatgtaacatacttagcactagggaaaatttaagaaaaataaaaatgtctctatcgaggagatggtagcaatgtttctacacattctagcacaccaccataagaatcgagttgttgtttcaaaagatcaggaaaagttgttagcaaatattttcatgaatgtttaaatgcaatgattcgttgccaaaaagaattttggaaaacacttgagccaatattagagacctcaatcgattcaaggtggaagtggtttaaggtaagaattatagattcaaaattttagttgttgattgttaaatttaataatttttaattagtgcaataaatgtaatgtagaattgcttgggagcattagatgaaacctatgtaagagttcgggtacccgaagctgataagccaaggtatagaacaagaaaaggagagattgc

SEQ ID NO: 397235 - DNA, 923 bp, Cannabis indica
catattaaatcataaagagacattgtagatagagttatacatacgtagaaacactattctgatttttaatgtttcacaatagttgcattacagttgcataaacattttgctaacagttatttcgtagctgattgaaactttcgtttgatgcaaccttcgaccaaccacccagcaaccactcagaaactttagtctgattgaaaccttcggccaactacctagcaactaccctggaactatcgtctgattgaaaccttcgtctgatgcaaccactgcgcaaccacgcagcaactaccctgcaaccatcgtctgattgtgtaattgatagtgtaagtggtattttagtaattaaaatcatataaaaagtataaatgttgtctttaccttatggaggtatttttataaataaagtgtcaatttatattttttatgtaataacttctaaaataaatcaatttttttaattaaaatatttaataaaattcttttagaaattaatatttataatatatatttttttattttaagaaaataaataaaatcaagttaatatcaagttataagtaatttattaattacttttaataaatttttaaatttattacaactgtctaataattatatatctaacggctaaaataaatataactatcattacatatttgcttaactattaaaacttctcaatatatataaataaaaagttataatcatctggatcttttttcaagcgttgttatttgtcccctcatattattcttgatagttatttgttaaagtgttgctttcctccctcatcgtgaagggatcactcaaattttattaatttttttatttttacattttaaaataatatttttttagaaaattactttatattttttaaatttttttttcaaatttacggtttgagtttctaaagt

SEQ ID NO: 397236 - DNA, 590 bp, Cannabis indica
caatcagggagaatgggtttttgagaagggcattaggttcggtaacagtgggaagggagataatatgtcgttcttcatctgtgagggaaagtgtggaatgtaaagaatccgaaaatggatccatatcagaacagggctgcacaacggataacaccagtggagaaggaggaagacggcaaagaacaggggaagtgtggcggaaaggggaggagagacaaggcgggaacggttgtagtcaggtatattcaaaaatcgaaggatggatttgaagaaaaaacagttaaaatgcacaagagatagttaaaaaatataacagacacagacccaaaacagggcactaaattgtggtatatactacgattgtaatcattaaatatattagttacattatattgctagatagattaattttatttgttttaacattataaaacatagaaaatcatttggttgggaaacaaagtatggtctatgagtatttcacgattttttgtgaaattttaaataattaatagtaacaaataatttattgtatacttacatgttttttctttagtaaaatatatgtaaaatagactatttgaatacca

SEQ ID NO: 397237 - DNA, 1105 bp, Cannabis indica
ccaagttagagggtggtacaacaaattagtgggagaccttatccaggacaatggaaactgatgggatgacttggcaagattttgagaaagttttcagggagcaatattttagtccatctcacaggagggctctgattggagcatttgatggtttaagacaaggggatatgactgtgaatgagttttgcatgaagtttgtagagctatcttcttatccatatcctggtgttgttgaccaaccctttgtgattgaacagttcatgcgtcgtttgaggcctgcgatacgtggtccaatagcccctttgacctttaacaacctaactgagtgtgtgacagtagccttgcgaactgaggctcatgtagaagggaatgagaagaagaacccaagcaaaggaaaaggaaatgacagaaagatgatcaagaagaatcaagggccgcgatcccaaggacaccaatttagtgggagtagcactagtagtggttcatttggaaagactcgtaagggaccatacgggtgtttcagttgtggttaacaaggtcataagaagaaagattgcccacaacgacaacaaagatttcaagcatctcacggaggacccataaataactatgtagagtctactccttttcctaaatagctcaggaccaaccagtttcagttttcctcctacgatttcacaccccaatcgggccaacaatctcagtatcaacatcagtttaggccacaaggttcagggttcaacatggggtactcacaaggtttccaaaatcctgctcctaggggtagtcaaagaaggtaaaatcaaggtggagggtctggtgcaagtacaagccatcctagtcatggaaagggaaaggcaaaaacaaagtcgtccgctcaagcctatgctctaggggttcatgatgtacagggcagtgctgaccagggagttgttgatggtatggttcttatctcacactcttgggctcatgtgttatttgatactggtgcatcacattcctttatatcattgatgtttgttagtatgttaggtttgagttgggaaagttttagtcctgtgttacatttgagtgtacctatgggaggacacggtgaggtatccac

SEQ ID NO: 397238 - DNA, 658 bp, Cannabis indica
aaagaagaggctgcatggctcctgtctaaagtacatgaaggattctatggtaatcatgcgacagggcaaagtttttcaaagaaaatactaaggcaaggatatttctggctgaccatgatggaagattcaaaggcccacgtaaagaaatgcgataagtgcgagagattttcaaaggtcccccgtgcaccccctaatgagctaattcagatgcaaagtccatggcccttttccatatggggaatagacctgatcggacagttgcccaaggcaagggcgacgtacaatatgtagtggtcgcagttatttcaccaaatggacagaagatgagcccctagcaaccataacatctaagaaagtactggattttatagaaaaaaatatcatgtcagtttggacttccacacgagattgtctcaagcaatggcaaacagttctatagcaacatgttcacagatttctgtacagcacatggaatcattaagagtttttctgcagtggcacaccttcaaacaaatgggcaggtcgaggtagtcaacaagacacttaaagacaccatgaaaaaggggcttgaaaaagctaaagggaattggtcagaggaattacaagaagtattgtggtcgtaccaaacaatagaaaggacaacaactagacagacacc

SEQ ID NO: 397239 - DNA, 1157 bp, Cannabis indica
gtggctcgaccattgatcagaaacgaaagacagtgactgcacccggtggctcaggtcagaacaagaggttccgagggaaccacggtcgaggcaaccgtcagggtggttccgaaacacgatacacttatccagaatgcccaagttgtaaaaagcatcatctgggcgaggaacagaagattactgcaaaacctgctccaacaagggtgtttgctctaactcaggcagatgcagaggctagcccctcaattgtcataggtcaggtctcggtcaacaactcttacttttctgtattgttcgactctgtggccactcattcttatgtggcagccagaatttttattaagttggatatgccgcgtgatagttatgataaagggttttgaaccctacttccaagtggagaattaaacatctccaaaaggttgattaggtctatgctgatcagaactgcggatagggagttgagtgttgacttaatagaaatgggtttagcggattttgatattatacttttaatggatcttttatccaagtgctcagccggtattgactgtaaacgaaagatggtgatcttccaacccgagggcgacaaatcatttatttttgtgggatcggttcagggatcccaggttctagtgatttcagtattaacagctagagaattattataagatggatgtctagggtttttggccgtggtattagataccacacggctgaacttctgggtttaccaccacaaagagaaattgatttcatcatcgatctagcccctagagcagagctaatttctaaagcaccttacagaattgctccaacaaaacttaaagaattaaaaattcagcttcaggggttgcttgacctaaggtttacacgacctagtgtgtcaccctggtgagtcccgtattatttgttaagaagaaagctagatctttacgaatgtgcattgactaccgggatttaaataaactgactgtcaagaataagtatcctctacctaggatcaatgatctttttgatcagcttttggggaagacggtcttctcaaagattgatctctgaccgagttatcatcagttcagaatccgagaggaggacattctaaagactgctttctgcactaggtatgggcattatgaatttttggttatgtcttt

SEQ ID NO: 397240 - DNA, 530 bp, Cannabis indica
ctgagtggaaggagcactagcgcgagccgattaacaactggatggttggccatggttctgagaagcagtagagggtgtgcagtgagtggcaacacattgaatcaaaaccaaatcaatgatgatccactcgttcatatctgagtagcattacctgctaggcatatctgagtgataagagccgagaaaaatagcttgccgtcctttttcttaaaccacttctctatttcatcttaaatgatcttgcgcatattcatattcttgcccgccaagatacaatgcaataagaaaatatgtgtttgactcaccgtggtatcatgggtcatgcgcatcaaagagcagttaataaaagaagctaaacaatagcttcaagtcgtaaagacaagtgtaacaaagtttggtggtcggaaggagagatagaccatgcaaaacccggatgagcaatagtacgaagcatgacgtcaaatgggatataggttgggttaatcctcaaaatatgaaactaatcctctagtgaattttagtgctaaatt

SEQ ID NO: 397241 - DNA, 609 bp, Cannabis indica
gtggtaatatcattgagagtggttacttgagagttgtcgtccagagttagagacttaatgaaattggtacgttttcgcgcagaggcacggttatggaaatatttagtgttcttatcacccgctttaagccaatttactcgggagcgttgcttccaaaagatttcctcttttaccaaaaggctatctaaatttttctggagatcattggcttttttgacatcagaaggggagacagtaggacccaccatgagacgctccatgtctcaattggatacttttgatgcgatttgaaaattgatttttatttcgaccccaagaggacaaagaaacagaacaattattctgtttggaaaggaaagtgagaatggggttattggaaacggaagaatttgactccgtactccaactatctctaagaatcatagggaaatcaggctcaagtaaccaatggttatcaaaacgaaaggtagggttgcgagcgaacataacagggttgccttccagcaacacttttagcgctctgtggtcagaaccaaaaaaacctaagtggtggagagaggccattggaaaaagatcagcccatttctgattaacaatggcccaatccaa

SEQ ID NO: 397242 - DNA, 504 bp, Cannabis indica
tttgaatgttacaatgctgagaacaatattaggcaaatcaagaactaatgagttcttgtgaaagactaaagaagatatgacttagtgtctaggtggcatgtatgagatatgagacttaagagagggagagagaggtgcaagtggcctttgtagcatatggaatgacttagaatgacttagcctagtgctctttatataggagagagcttacagaagatctaagctaaagtaggttgatctcctttaaaatgagaagatatcacctatttgttacatattaaatatataaaaaaataacctattaattatttctaaaaaatacgtaaatatgaagttgaatttttattttcgtgggttgttgaagccaactcgtagctgagagtgtctgtctaggttgaaagctgcagagacaccaaaagtgtctgccagaagagaagctggctggccgaccactttggctgcctcctagaacgatgattgaccctacaaactaacacgagtatt

SEQ ID NO: 397243 - DNA, 649 bp, Cannabis indica
agagagagagagagagaaaaagaaagagaagatttctatcaatgaaaaaaaaaatagagagaaaataaaataatttgtatgcaaaaaaaaaaagtagattacacgagcttggggtacgaaacaaccaatgcttttgttcgtttacaagaaggctcttttaaacactaaccaacttgattcttcgctgcctagtgtttttgttttattttgcaggaatttgagtatgtgtttcccgaggaggtaccacatggtgtgccacctattcgaggaaaaaagatcaaattgattttattccaggtgcttcaatcccaaaccacccagcatgtaaaaccaaagaaatacaacgacaagttgaaggattgatgaccatagggcatgtgagagaaagcatgagcccttatgttgttccagtaattctggttcctaagaacgatggaacatggaggatgtatgttgactgtcgagccatcaacaacataacggtaatatattgacatcccattcctcgtttagatgatatgttagatgagttgcatgattcttgtgtgttttctaagattgatcttaagagtgggtatcatcaaatacgtatgaaagaaggagatgagtggaaaactgcatttaaaactaaacatggattgtatgaatg

SEQ ID NO: 397244 - DNA, 638 bp, Cannabis indica
ggaaaaaaacatgggatcttatgagtgagctgaatactagaatgaacttaccttggtgtatcataggtgatctcaacaatgtgacttctcaagatgacaagagaggtggcaacccgtacccgaattggctcgtggatggttttaatgaagctctcgctgaatgtaatctccatgatttggaattgtgtggttacccttatacatgggagagaagccgtggtactgctgattgggtagaagttcggatagatcgcgccttggttaatcaagcatggttagattttttcccttatgctaaactttataatcttgaagtttctacatccgatcattgtcctatccatttagctactgccaacaatattgtgattgctaataatcggagttttcgatttgaaaattactggttgaaagagccgctgtgtttaaagattattcaagaatgttggagtaatgatcccatgaagtccattattgaaaaaataattagttgtggggaggtgttaatggattggggtaaggactactcaggaaactttggaaaaagaataaaagattgtaaaatggagatgaggagatggaagaaaggaagggatgcgatttctgttgagaactttaaagtggcatcgggaagcttg

SEQ ID NO: 397245 - DNA, 619 bp, Cannabis indica
tttatttttttttgttgatttttcgcgtcggtttggaaatgacgctgcatggcgtctttttaaaaccgacacagaaacccaatatgcaatttttttaaccgacgtaatgctgtgtcaattccaaaatgacaaaaatctcaatgtaatctttttgcatcagttttaggcgttgaccgacgtattgaccgatgcaaaaagaccattttgtagtagtgttctctcttagctcaagttttatcccaattggttttcttaagaattattttaatgagacaactttaaatcatgctaacacacttgcacttcatgaagcaagtagataattgtgactaaaatcattgacataacatagtttagaaacatatggatttcattcaataaagcagtatcaacattagtgattctcgatgaagataacgtgaaatgcattgctcaactaaagcaataacaaatgagatagaacaaaatacattttcaccaagttcttcttaacaaatgaacttcaagaaaattgttatattggtgtccaataaattcaatcaagtgtcaatcttgtcaaggccggcccaagcattgggcagcttgggccgttgcacaaggcccccatttttctaaggcc

SEQ ID NO: 397246 - DNA, 660 bp, Cannabis indica
ttttttttataactcgatcaagagaaataaacagcaacctcagccaaaaagaagaacaacccagataaaatcagaccgaaaaattgaaacccaatgaacgggaagagatttggtggaagaaaacgagggaaatccaaatgccggagagttatttctgaaagattttccgggagaattatatatagtgagaaagagggtgataccgatgactggtttggccggttgtaataggcattcggtgtgttttaggtgctgacgtgtaaagtgatgatggtattagtcagtttaatatcttacgtggacaaattttattggaggatactcgtcattacttgtgtgcttgtccactagactagtcgtctatttagaaaccggttaactttttttcaaaaaaaaaaaaaaataaaaaacaatatattttcgagtaaataccattttgcaccctttgttttgcaaaagttaccaattagaccctgtgttttattaaatgacaaaatagaccttgtattttctaaaatagtacaaataggaccttgaattgattttttgtcaaaataaaatttaattataatccgatctaaaagtgctatgacaaaactgtttatattttttgtatctgttcgtattaagcattgtctttaagttggttgtattaaaaaa

SEQ ID NO: 397247 - DNA, 533 bp, Cannabis indica
accggttaaccggtttgccagtatctgtaaaaccaattaacccgttttggcagattccccaaacaacccattttctcaattcttgcccatttcagtgccttatttgggtgtttctctatttcctaggatattgtagtccctattagtaatagcagaaccttaagttataggttcaggtttcctggattagggttttaacgtgtgatttacccggttgtgttacgtgattagggcatccatccagcacaagactttccgttcaggtcggccaactcacttgaatctggaaaggaggtaagaactgtgtataatatgtaatatgaatatgcgaatgtatgtatatgttaagtgtatatgcatgcttatatgtttgttacactaccaacacttgtacggatatggtatagagtgcattggtatagtgtatattgttaagagtacattacggtgttaccaacacaagtacgggaaagtacatggtgtgtgtggtatatcacgtagtggtactcagggtacgaaacaaaacctaccaa

SEQ ID NO: 397248 - DNA, 586 bp, Cannabis indica
tcaaagaacaaaccagcaagattgaaaacaaaaaaattagaatgtcaattagttgataaaaaagaatttagaaattaaagtccccgacaatggcgccaaaaacttgttgtgaaaattatattgatttataattgcgcaagtatacacaatcacaaacaagtaatacaatgataagtaagcaaagttcgtattcacagggacttttacactaaatattgcaaatcaactaaaatcaatttaaaattttcaaagaaaaagaaagcaaaataactaatcaattcaagagaaaatttttttaaccttaattctagagttgagaaataatattttaagctaaataaactgaaattaagaagccaaaagtgattaaagtggtgataatttcaaatttagaaaatagacttgggtggttaattacccactagtatgttccagttgatacaacaatgactcagcaatggcttagcaatcctggcagagttcacagatttcaagaaaaaccaggacgcttttttcaaaacttgcaatataccattcataacctcaacaatgcattcctacaccagatcaggtcacaaatagtcca

SEQ ID NO: 397249 - DNA, 783 bp, Cannabis indica
tgcaaaaatgcatgtcatcccaagaaaatactcacggccaataaaagtagctgcattttttgatacgggagcatcatacacaatcataaattcggacattctacccccgaactatggaagaaaaagaagcaatacttccatgtcgcaaataatcaagtcctccacacagaactaattagcaagccgataaagctgcaattcttccccggatgttccgttgtccatagggtgattggatcaaaacttccaagaaaggacctcataatgggattcgacctttacacaaaaaagaaaggactttgaatactcccacaaggattggcctacaagaatttcttcatccaatgggagcaaattctgaattattttcacctggcaccagacgtattctcaccaatcaaagaaaggctaattcaaaattcatgtgcaaactctcactcagaattctcaacgaaatgcaatcacccattatcaaaaaatgaagaattctacatctccatcccattcaaacaaaatgaagatgtcaatttgacaaaagcacgccaccccagaatgaatccagaacatcagaaaatggcaagcgaagaatgctagcaattgaaatcacaaggactgatcgaggacactaactcgccatgggcatgccatgccttttacgtcaacaaaagggcagagcaaattgaggaaaacaaaggctggtaatcaattatcaaccattgaaccattttttggcagatgataaatttcctctcccaaatagaaattcccttttctctagcatct

SEQ ID NO: 397250 - DNA, 742 bp, Cannabis indica
tgggggaaggatcctcatcaggtacccattgcatatatatttcttaaaaaaaaaaagtgatatctcaaatagaattaaaaaaacatcataaaaactcattaaaaaaaacaaacatatgtagaatagtgtgtataataaatctatttagtaattataaaattggcaataaaaaataagcggttaagtgtcatgtttttaaagaattttcatgaaaactgaaatgtctcattaatgtaatcaataaaaaacttaaagcatgaagttaatttaattgtagtagttaagattttaaaacttttttttgagagacccaacctgaacctacacctagactcggacccagacccagaccccgaccccaacagggatgtaaaaagacaggacgggatcggggattgctcccccgcccccatacccgcttcctaaacttcaccccactacacatttaaattaaagacggggacgggacgagaattactcggtgggggaaggattctcatcgggcacccattgcatatatatatttttaaaaagtgatctctcaaatagaattaaaaaaaaaaaccttcataagaactcattaaaaaataaacatatgtagaatagtgcatataataaatagatttagtaaatataaaattggcaataaaacataagttgttaagtgtgatgtttttgaagaatttttataaaagttgaaatgtctaattaatgtaatcaatagaaaacctaaagcatgaag

SEQ ID NO: 397251 - DNA, 715 bp, Cannabis indica
aaaatagaatttttttaatcgggccctatggggcccgatgcccgtccgatggtcgggtccgatgggagcatagctggaggttgaagatgacaacctgatgggcccgatggcccgatataggagggtctgatgggcccgattccttgggcctgatgggtctgattctttgggcccgatgggtccgatgccttgggcccgatgggtctgacgtttaggggaaaagaggtaaagagaggagttgatgtaattgggggagggtattttaggaaaaacaataaagttgtcatatattaaaaatattggtaagtataagtttaggaaaaatatttaaggtaatgtaagcatagaaattcaaatttcccttcccaaaatagaagttgtaagaatcatcttctctgagaaactttaacgaagtaaatcaaataaactaataacatgaataggagttcatgattactcaagatttagcctatctactattgatcatcattatgacatgaattatgtctttatagtaaaaggtaagtttgataaagacaacattattcatatcagtccttgtcatatataatctttattatatacaacacctttacttagatatcatactacatccgctatctatatcaagattgcttgcaccgaaaaacaagcattaatgaatcgtactagcaatcattgattaaagattctcaaactttaatatgttgttgat

SEQ ID NO: 397252 - DNA, 855 bp, Cannabis indica
cgaaaaatcaaagacgaattttcttgatacacaaccgagggttgcagatactggtgcgaatgggaaagtgaaggttaagatcgaatttgaagacattgtggaggaggttaattactggaaaccgtctcttgtgtgctatgttaattgagctaaccctctagtaaacatacttgatggatttgttcgtagaacctagaaagatgcagcggtgaaagttggattactagctaagggcattagcattatcagattccagaatttggaaacgagggacaaaattatggagcagggctatgtgttctttgacaggaagccaatggtgatgaaaccatggaaatcggtggacgatttcactaaggaagaagtcacttctgtgctaacttggatctagctgaaaggattagatatcaaatattggggggactcttccttgttcaagatagtgggacaattgggtgaaccactcgacaaagttaccaagaacagggatcgactacaataccccaagattttaatccaggtgagtctctctcaagaattcccaaaaatgatttcgtttattgatgagtttaatcatgaaattgaattggaggtgaagtatgagtggattcctctggtatgctataactgttcaggaattggacatgatactcaatcttgtaggaagaaagagagtaaggaagagcaggtgaaacagatatggatccctaaaaacccaaaagagaagatggaagatcaggtagatgaaaagggatttcagaaggtaacaaaaggatagatcaggtagagagtgttgctggaacaggtggaagtagatactgaaataaaaaatagttttggcacactagaagatgt

SEQ ID NO: 397253 - DNA, 1156 bp, Cannabis indica
tttttgtcaacatcttgaagttcgatcacccttggtgccctgaaggcatcgcagccaccaccatcggtgtctagcctaagattcacaacagaggaaaaaggagagaagtgaacacatatgtttttttgggagcttacccttgctgccatgaaggcgtcacaaccactaccactggcgtctgccctgattatattcatagtccattcctatgaaccaaatatcacctaacatgtcatcttaaatcttttatagatttccttttccatatcaataataacatatactgatgataaccatttctaccataaatgattacaaatgattggaggagataaggatgctgcaacaaataagggaaagagaatataatcagactacaaaaggctagtgcgaaagagatgggatatatcagagccactaaatatttgtagcttttcccatatgcaatattttaatgtttcttacggttagggaaaaaagaatatatcccttagttcttttacacataaattctctaaatccaatgaccaagctccgttattttttttgtttgaaagaaatttagcaactaattgagagacaaaatcaaaagcttaaatcatacttggatgttcgaactgcaaaactgagggtgagtcgataaataaaaattttctgatacaagcttcaacaaaattcaagtagcaaaacagcattttggacacgattttagagattcaagaactagccaacaataactaaagtacatcccaaaacagcctcaaaaactcacagttacaaagctcatccaacttgttcaaaatattcacaaagctctgaactttcccgtctcgaagaaatcccgaaaggcccttctccacaaaatctgctctcagcgtagacttaaactgcgaggcctcaacgcctgaatctgcaacagtactctcgaccaccattgcgaagtctacaagcttaccatctcgagcgaggttgttggcgaagtcggccaagcttcgtgggtgggttttggtgggctcccattggagggcggtggagaggggaggagagcgagaagacgaccttgggaggaggtaagttagagggataaaggtttgggatttgggatttggaagctttgagaaggtgggggtaatggcggttatggcgggaaggattt

SEQ ID NO: 397254 - DNA, 397 bp, Cannabis indica
ttttataattgttatcccattttttgctctatgacgtggcagcatgtatgagtgacacatgtttgtcattccttgcacttggacagagagatataccgaacagacttcgagcaacatatctgcacgcacaaagtctatttgaccgagtagagtagaaggtagataatccgagcaaagagtgaagctggttctctgagccatgtgttataagacttaactacttcaaagttgattttgtgaagcccaagcacaaagggaatccctacaatcatgggattgtataagaaggatacggcaggctgtcccaatcccccatttcatgtattctaattatgtaatgcatgatcttaccaattatagatattgtaagcaaaaggaaaaccatccctcatgcatt

SEQ ID NO: 397255 - DNA, 787 bp, Cannabis indica
ataataaaaatattctaataaaatcatctattcgtttaagcttaagaaagtaaaagagggtttcttcaatattaaaaaagacaggtaaataaataagaggtatcaatgaaaacatgcatgtgaaaaggactatctactttattatacatagcttgaggaaattagaagttgctaggtatggatggacatgtaatatataaatcaattattcttatctttcttaaattattacattgaattatattaataatattattttgacatggtagcttagaaattagtgcttacttttttaatattatctctctgaaatctatatatatttccatatttgggatgatcctataatcaataatgttgtagcagtagttggctggccggtatatgttaaatcatcatttaagtgcgtttgaaagtaattgtgtaattgctagttagggtagttactagagtagtaattatacattgtactaattacattatattttaaaatgcaaagtgtgtttggatatgaagtggtaattacatatgaattcctaatatcttgtttggcaaaatagttagtaattacatgggaaaataatattttttagtagctaatgtttaatatggaaagtttttagtaattacacagtgtaattacattcaattctcatgggggccatgagaattagagagtgtaattagaacccctcaattacttccaattacacagttaaagtgtaattacatggtcagacaaacatgtcaaattgtgtaattacctccaattacacacaaatccaat

SEQ ID NO: 397256 - DNA, 629 bp, Cannabis indica
taccattgtatggccaaacttgaagcacaattaattataggcttattagaattattacaccctgaatatacatgtactaaattatgtcacttgaactttttaggtcgttaaaaattctccttgaactattgaaattgttgaatttaaggacatttgtctaatttcatttaattttattaatgtagcgagcgtccattaactaaatgtgcccctaaactttgatatctactaaatcatgtctcttgaattttaacatgtaccaaattgcgcttctaaaattttcatccacctcagactttgtttagcataattggacaaaagtctttaaatctaacagtctcaatagttcgatgaaaatttttaacgacctaaaaaattcagagaacatgattgatgatttggtatatgtcaaagttcaacgggaaaaaatttcaatactaaaatccaatattatatctaatgaaacatccaagtgttcctttctcatgcaaagcaaactatgctacaaaacatcatcaacatataacttaataagagattttgttgggttggcaacgaaaataccattttctttctaattctaattgagaatgaatactaactacgtagtactaattgacaatttcttt

SEQ ID NO: 397257 - DNA, 516 bp, Cannabis indica
tgttgttattcagacatttgaagcattggaaccacatgttttggatgttctttcttcaactacttcacttccaaaaatatatccaattggaccactccaacctctactcgatcactatccacaacattctctacacactgtcacctacagtctttggaaggaagaaactgagtgtataaaatggctgagtactcaaaagcctaactcagtcatttatgtcaatttcggaagtataacggttctgagtgagcaacaagttattgaaattggttggggtctcgcaaatagcaatgttcctttcctgtgggtgattagaccagacttgataattggggaaggtaggctaccatctgagtttttggaccaaaccaaagacagaagcctaatcataagttgggcaccacaggaggatgtgttaaatcacccctccataggaggatttttgacacattgtggttggaattcaatactggagagcttgactagtggggtgcctatgatttgttacccatactt

SEQ ID NO: 397258 - DNA, 617 bp, Cannabis indica
ctctctctctctctctctctctctctctctctctctcttttataatcgatccaaccccaccatgcacagcctcctccgatcgtctcgacatcgcctccttcgatcatctcgtgctaagttcttctccatttctttatctcgtctcgacaccgactctaccacccacacgccgacgagccaaataggccatgaatggcctcttcccctctctttcgtctcgacaccatgccaattaccatgtaagttttctctgctctctctttctttcaatctcgtgggcgaacaccttctttgtacaaatttttgagttggggacgaagacgaagaggacgaccattatctatttttgggtttagattttatgatgatggctattgtctttcgtatttggatctgttttaaattttctttgcatgtttatttgtgtagatctctatatttgtatatttctattttagatctgtaaaattaaaatgaacataaaatttgggtatttgctttagattttggtgtgatctcgggatgaatatctaaatcttttttttttgttgtgtcggtacaaaactgacgggaatgttgtaaaaaaatttctttacactattagcgattgttttcaa

SEQ ID NO: 397259 - DNA, 885 bp, Cannabis indica
cactcaaatactggtttaaataaacctttagtcaaaatatctacagtttgatcctcagatttcacaaaagggatacaaatgactcccatttccaagttttcttttatgaagtgtcgatcaacctctatatgcttggttctatcgtgttgcaccgggttatgtgcaatacttatagtagccttgttatcacaaaacaacttcataggataattaactttcagcttcagctcatgtagaactcgtcttatccacaagatctcacacaccccattggccatagccctatactcagcttcagcactactccttgcaactacattttgttttttgcttctccaagtcaccaaatttccccatacataagtacaatacccagaggtagattttctatcagtgatcgagcctgcccaatctgcatcagtaaatgcttcaacacttctgttgtctccctttttgaaaagaagacctttacctggactactctttagatacctcagaattcgataagcagcttcaagatgttctttataaggacgatgcataaattggctcaccatacttaccgcaaacgcaatatcaggacgagtgtgagacaaatagataagtctcccaactaatcgttggtattgttgcacatccactagtgttccttgttgaatgtcaccaagtttcttgttcggatcaataggagtatccataggacaacactcactcattcctgtatccttcagaagatcaagaatgtattttctttgggaaatgaaaatccctttttttgaccgcgcaacctccatagctaagaaatacttcatctcacctagatctttgatttcaaattccttagaaatcttatttttcattgcctctaattcttctagatcatct

SEQ ID NO: 397260 - DNA, 518 bp, Cannabis indica
gtggcgttatcccagccacttccattcctaaccgaagaacaaatcgccactctctttatctctgtgatttcttttgtagttgccagcaaaagatactcattatatcttctcaagattgattctcttaccgtagcaatgtcaactagcttccctttaaagagtaggtcatttcttgccttccatataccttcaaacaaacaccccgtgaaccataggaattgatcatttagctccattggaattcgctctagagcccaaactaaccactcctttaccgaggttgcactcccattctcaccacagattgggaatggactgctgaaccataacgctcttgcgcaatgacactcccaaaaaatatgcaatgccgattcacaagcaccatcacacagggggcaatttttttctgtaatgaaactaagtctatctctagtaggaatgcatcccataactactctccaaatcatcactgaatgtctaaaatggatctctttcccccaaacctttttccacagctt

SEQ ID NO: 397261 - DNA, 637 bp, Cannabis indica
atactacatattcataaatcaattacaaaatatactgttgcctagaatttctcctaaaatacgtggcagtaaaggaatatgacatgtgacagtaggactcacgggtgcgagatgcatctccctaattactcatgaagtaaagtgatgatagattaatcatctccgagtctgcaagcattcctcgtctgaccttctccgtgagtgaggcaaaaccagaggatgatatgggaggcgtaatggaagatgatgtcactaatggagcattacattgtatacacatttaatgaagcatgggggaagaacatcagatgcttactctgactaacgtgtataagggttgaaacccatcattctcaaattttacgaacccctaggtgttaattagcggatgcataaataagccatcaagtcacaaaataaaggataaatcaaattccaccaaacacctacaaacaacctacaatcacttaaaagtaagaaagtacgccctaggtcagagatgggaaattgtgtcaagtataatgcaaacaagcatgataattgttgatctcaaaaagtgatcaaccgacagcggagtcgtatgaatctgatgtttgccacgtgctacacaacaagaacaataaagtaaataagacaa

SEQ ID NO: 397262 - DNA, 907 bp, Cannabis indica
gattacttttccctaaaccctaaaatacccctctcattattgtcaaccatctctctctcttcctcctttctctctcaaatcaaacccaaaatcaacccataccataccggccgaatcaccacgggaccacccatttacccaaatctcttcctcgtggaaccacccgcgtgattcctctcttcctcctcgaaccacccacgcacgacgttcaccatccacgcccattcatctacacccatctcgaccgaaccacgcacgccaatccaccacgcacgacgaaccacgaaagtcggccgaacaccaccggagatcaaaggcaaactcacgggcgaacacgcaaagtcagccaaggttagattttatggtattttttaattttttaattgttgatttaggtttaaaatgcttttccttgatagatttaggatctgtgatttagtatgtgatttagggtgtgattagggtttgttccatcaaggaagaagaaggtccgatgtagggcccgatatgggcccgatagtcggtccgatggtcattagatagtccgatgcaccaaaaatgcttgcaggcccgacgggcccgatggggcccgatacatagcccgatgcctatatgggatcgggccagatttttgacctgatggtgtccggtatatggcccgatggccaagattaattttgcaccccgatggtcccccgatatatggccggatggccaaagaagttgaatataagaactctcttcaaattaacctatatatatatccttaaattcctttttccaacttaattaaaccatgacaatttcttttttcttttaaatatatgacacgtccacctttctgaatgatgacatatgataatcaataattaaataaaaaaaacacgaacattatatatatcattat

SEQ ID NO: 397263 - DNA, 1470 bp, Cannabis indica
ctccacagaccaccatcaccatcgagtctctgaagctcagatagttctcgaaactagaactttagccacggagcaagaagaagaagaagaaaaatggcagaaaaaaacataggaactgatgctcctcccaacgtgaccatctacatcaacaatctcaacgagaaaatcaagctcgacggtactcaattgttattgtttttgaaattttccttgttgtgggaatttgaattagatttggggaccaaaattttgtgagcattgtttggttacagagttaaagaagtcgcttaaggcagtgttctctcagttcggcaagatattggacatcttgattcgactccggtacaaataaatcaagcggcggtcggggtctcatctgagaatctcaagaaggaaaacttggggtcggactatgatggatgtgctgaacttagtggcctcttgaaagtaacagctggttatggagagaatggtatgtgaaatttatctctgatgatgtattgtaatctagttatgaggcactttcttctgtatactttattatttgttctgtatgtgcagtatcactttctttattattagacaataataaagtcttatttaaacaagagtttcaaattgagaaaagacaactgagaattgcatccaaggtcagtgattttcttcttcatatttcatcctagtttttgcatgttttcccaccttttcttatcaaaaaatattattactaggtacctgtgattgctactgctggttccaaactagaaaatatcatttttgaaattgtcaactctgatggtattgtggatgaaaccttccaccatgaagacaagactggcggcctctcacatatgctcgcgattatggctgattggcttcatatcgaaaagtttgtacgatatactttcaatcatgggcggtgcattgttccttctatttcattatctgaagttgcagggaactatagtttctcggctttccttcttaagaatcatctgcctcaaacatgaaccgatcgactgcgacgaagaaattcctcgaggtgttgtgctcctgttccagtacgattgagacgaagaaggcgtggatgagtgcgacgcccctattgcagtgtatttaatctgggttctcaaatttcattttgaaactcaaagtctatgaatatacatttgagtgtaattcttttaggtataatttatttattattcagtgtatttgtttgagttgaatttgttgtttgtgaatcaagaatttgtttgagaattaagaatttgttgttgggaatcaagaagtctgccaaattttttaattcttatttctttaatttttatttatattaatattttttataatttatttatattattattgtaattagataattattcatatataataaattagtttaaatgtttttttttttaatttagataatatttttaccaacaattataaatagtcatttaaagt

SEQ ID NO: 397264 - DNA, 1159 bp, Cannabis indica
gaaaagtcgtcggaattagcattctcgccggaaaaatcgccaaaaaaaagtgttttcttcatcaagagaccgatttcttcatcaagtaatcggtttcttcatcaagaaacctgtttcttagtgatttttcggtgatgtttctggcgacaataccaattccgacgactttttcagcgtcggcagcaactccgacgacttttccaacaccaacagcagctacttcggtgatttttctagcaccaacagtaaactctaacttttctgacatcaatgacaaataaaactacttaaacaaataaagccataaaatatgagatttttttttttttatttttgaacatacattaaatatgagatttgaaaacctatttgtatatatatggtatattaaatgctatataaatacttaaaattaaaaaaaaaaataccatataaattagttaaacttaaaagtgtcatatttaactaaacaacttctaaaattcagtgtaatttcctcttttttttaatgatgcttttgttgaaccaaaagtttgtttcatttaggaaaagatgggtttagtagtccaaagtcggtgtaagtcgtgtaacccagattatgtattcagattcttttttctgatctatctagacagtctttagaaatacataacagtacatatttttatttggaactttgcatgaaaaccgttttatagcgtttcatttccccaaatgtcacactctttccatccatttacacctcataattactcaaacttgtctccattttgttgttccaaattttgattttggttgccaactatacgttttctcaattttgcttccaacaaaaactttaaatatatattgtgaaataggttaacctctttctctctctatatataattaactaaaataaaatatacaaaaattaattaacttttttgtcccacattttgcactttgttattcattcagctataagataataataaaaatattaaaatatttttatttttcattttctatttccaaaccacatcacatgtttataaccctaagatagtttaagtctagaggtgttcatccaatccaatccaatccgcactattttgctcatagtgcatccaatccgcactaagtgcggatttcattttttagatccaatccaatccgc

SEQ ID NO: 397265 - DNA, 954 bp, Cannabis indica
atcaaggcttcatattcagcctcttgtttggatgcgtcaaatcggaacctcagagcatagtgaaacttaaagccttttggtaatatttattacccctgcacacccgaaacctgttcgttggatgcgccatctacaaataacttccaagtttctgcgtctcgctaatcaggtgggatttcttctagagttataccttctatcaagaagtcagctaaagcttggcccttgatggatgttcgaggatggtatgttatgttgaactgtcccagttcaattaaccattttatcaatcttccagaagcatctggttttgataaaacttgtctcaagggctgatggattaacacttttatggggtgagcctagaagtatggtcgtagtttgcgagacgcgtggattaggcataacgcaagtttttttagagggggatatcttgattctgcccctagtaaccttttacttacgtagtaaataggttgctggtgcttaccttcttctcgcactatagatgcactaatcgcatcttccgagatggctaaataaagaaataacgtctctccatttattggcttcgccaaaactgaaggcattacaagatgcccttttatgctctgaaaggcctcttcgcactcttttttccactcgaaatttttttgcctcacaacatgttgaagaacggcacacgcttgtcggttgactttgaaatgaacctgttaagtgccgctattcttcttatcagggcctatacttccttaggctttgtttgggatggcatgtctattaatgtcttattttttcaagatttgcctcaataccccttgcgttaactatgaattcaaaaaaatttctcgaagagactccaaaggaacattttatcaatttcaaagcattctgtggggtctgaaatatgatccttactctttatcaattttaccaacatatcatcaacgtaaa

SEQ ID NO: 397266 - DNA, 1762 bp, Cannabis indica
attatgttgctagacattcttggtattaatctaatcgtagcatttttgatatttctatttctggtgaattcttacatcttttgtattcagaatgctaatttattcaatgaagttgatattccatctaaaataaaaaaagacaccaaattttaagttggttatgttttgagtgatgttttatctttttgagatttgtgctttgttttgagtttttagaatgttgcttctagccaaagggtaacacctttggctagattttttaagttttagttgagattttgttttgattagttttgttgagtttgagttaattaggttttgtgtttaaatttgtttttagcttattaattttaagttcaaagactactttttctaatacttgttgtatttggtgttgttttatcatgtttcagatttgttttctccagtgacaactatcaactaagaaaaaatgtttttttaatgaattataagtgctatttgagaatattatatttttaccgtctaaaattttgaggacaattttgtcttatgtggcttgcgataagaattctgcttaaaaaaacatgctttttggttagatataagttatccttgtttaaagaagtttcacggccaattgtgaatatttacatcattaattcatgagtgattcttatctctactaaaaaaaccagaaaataaattagtaaaaatgtgaatagaacataacgaaaacaaccgatttcaagatttctgccgttagattatataacaaaaggatccaacaaaggaaataggctgcacatctgaacatccaaacaaatcaagtataaaaggaataactatgatctattttagctgtcttcgctcgtttccccaattcgacttggacctcatgcaagcctgttccgttcgatgtcagaggtgggaaagggggttttcttacttgatctgagtttttggtttttgggaaagaagattagggttttgatgaaaaaacaagatttgggggagttcttatttggcatctcatttatttattaacatcaagcgaaacaaaagaaacaagaagatagatctatcaattgtccatgcttcaaggtcgaagacatttctcaggaagatcgagctccctgcgttttctcgatctatgaatccctttccccgggatttgggatgttttggggtcggcttaggatgggcaatcggagatggagagctcggttggccttgggagatggtaattggggtcattctttcttcggccgattctcagaagcaattgagaagtgttgaaagttcttagggcattatctatttgggagaaggttaggtttttcttcttaattttgttttattttttatttagtttggaaatgttttgaagcataatttttgagtctttgaatttgtattttaatttgcatatttatgttgtcctcttttgattaatctgatatcccggctttggttcaagagtcttttctctgttaaaatgttttggatgctgttttaatttatggatgttttgattcttcgttgggatcccggaatttgctttcgttttcttcattttttttttttgaagtatgcataggtagttccaaattatagaattaaatcccagtttttgttgttggatttcttgaatagttttattgcatctcttaatatccttattccagtatttgcttttaccaatctatttagttttgttcttatggtgatttttccactaatgaattttaaaggatatgtggtttttttcttttctgggtca

SEQ ID NO: 397267 - DNA, 543 bp, Cannabis indica
tcgggcccatcggacccgacccccaaaaaaaacaaatttgaaaatttaaggggtgccattaggcccatcggacccgacccaaaaaaataaaaaatgaaaaattttaggggtaccatctggcagccaatcgggcccgacccaaaaaaaaaacaaaattgaaaatttttaggggtgccatcgggcaccccatcggacccgaccccaaaaaacaaaaaaaaaatgaaaaaaatttaggggtaccatcgggcaccccattgggcccatcggacccgacccaaaaaaacaaaactgaaaaattttagggtaccatcgagcaccccatcgggccttcacccctttcaactattttgacagggcatcaggccccccatcggaccagcatcaaatcccatcgggctagacgaaaaaaattgccaaaactaggaaaaattcacaagcaacaaacattttaacccaaaaaacagcaaaataacaataacaatccacagatcaagcatcaaaacaacattctaaactaaatataacaacaacaacaacaaacaa

SEQ ID NO: 397268 - DNA, 915 bp, Cannabis indica
tgtcaggctacaaacctagggacaaggctgtttcgtgtacaatgtcagaggttgtcccccacgacacgatatcctgcaaggcattcgtgtcctcgtgtactgagctaaataatccaacggctaaaagaaaggaaaattcgaacaagaattaccctacggtgaaacgcgtctgaggcccagccagtacgatctaacacccttaaaaactacatggcaaacacgccacctaccaatccaacggtgggattccatccccgcggtgacctatccaacaacggcccatgcaagagaattggcttataaatacctcacagataaaagaagagggggatccttttttttggaccttcacctttagattgaagacttactcttcatcgtgagaaaacttgaatgtgaccctattattaactttagaatattcctactaagcttcctcttattcaagaggaacacagtggaaaggagtaaaagttcgttgtaactatattcgtgtaaaccatgatcggccaatgagcctaataaaatggactcctggactaaggatggttaacgcctgaaccacataaaaatctctcatttattatttcattattcgtgccttcattacattcttaagctctaaaaatattcggtttttgaaaaactcggtaaacatttttgaattctgggtttattacttgatgtttttgtgtggattctccttattattgtgtaaataggtattttagaagttattgtgaggtttgggaatgaaaggaggtgtgtagtgttggaatttattttaccaggatcttagatctactcacaagtatgttgtttaacaccccaaatatgaactttctaaaacgataaataaacacatacaaagttaagaaaaccttacattgatggcagcggaataatgtctcgttc

SEQ ID NO: 397269 - DNA, 814 bp, Cannabis indica
gatgttgttttgttttgtttgagtgtttaaggtgttattgatgttgtttgagcagattttgagctatttggtggtttaatttctgtttagacaaggtttgagctttagagctcaaactttgctctttaatggtgaattgtgtatctgtgggtattcgttggttttattacatggattttgttaattgtaatgtatttagcaggtctggaaggttgggtaacatttggagttaaattgaattgtttagagtgagttttgtgtttctcccagttgaaccaaaattccggttcagggggacttgtaggaacggtcgactggttggtcccaagaaaacccgaaaaaactggaattctggttggggaaccggtcaaccagttggggcattttaaaaacaatagtttttcccacttttacaatatttaggatattgccatgttatctatcgataggaaaacttttagtttcgagtttaagtccctacaaagtgatttagcgtgtcactcatccgttttgcgaataatgtgatttaggggtctgtaaatcgtcgagcagctgttccattcaggttggtcgacacacctaaacttggaaacgaggtaagattagtttaatgatatgcatatgttcttacatgtttcgcgtacatgttagttaagcctgttagattacattataatagtggtatccgtatatttagtattatattagatatcgagaaatgtatgttggcttaagaactactcaacagtatcatattggtacgactagagtacgactagcgtatcgagtataggatgatattatggtcgatagt

SEQ ID NO: 397270 - DNA, 506 bp, Cannabis indica
tgtatttttcttttactttctttatttttaagaacatttaaaaattactttttttttatttttacctacacatcatcattaatatagacaaaaatatcaacgattatatagactaataaaatggtaccatgtagactcattgtaaatgccacgtggaccgttcaatttatgccatgtggactaatcaattgatgccacatggaccaatcaattgatgccatgtgaactaatcaatttctacaacatgtaccaatcaatttgtaacacgtggatcatgtggtgccatggctgaaagccacatgtgtaccatgtggcaccatagttgaatgccatgtcagctgtcttacattacaacatgtcatgccacgtaggtaaacatgtcatcaaatatgtcacatgctgattcactactaagtggggtccactgtttttttacccactaatatgaataagtgtaggtgaagactctttctccacgaacttttacctacacatctctaccaatt

SEQ ID NO: 397271 - DNA, 653 bp, Cannabis indica
atcatataaattaataataagtaaaattatttaagtacggacaataacaattttatattggcaaagttatggttgacattagacaccaataattgacattacattagcattaaatttcatattacattagcattacggggattgatagggtgggcctttatgggcccgacaaaacaagcctagggcaccatagtaacccttgattggctaccacaccttataagcagctgcaactcacctcagaggagttttgtccaaagaagctctcctctccagtctccatccaccgcttaatcccattttccatcttccatcgaaaagccaagccaaaagaaaaagaaaaaaataataatcgactctctagaagcccaagagaaagggcacgcagccctaggaccccaatttcagcttaaactcactcaccatcaccacacgcctctgcgactcattcagtaaaaaaaacaccgaaatataaaaacaaaaaggtcgtttgtttgctgagctcctcttccttctcttctcctccattactgtttccttctttttctctcttatcttcttgatcaaagcaatcaatcaatccagtaatcgttatctctaaatctgttcttgttgttttgtgtatgaatgtgtgaatcattgttatgtatata

SEQ ID NO: 397272 - DNA, 358 bp, Cannabis indica
aaaaaaaaaaaaaaaattattaactagtattaattaataataacaataatcattgctactctaaatatagaacagttttaacaagtcatatgttatgagattataataataataataaggtaaatatcatttttgtaaattagactcttgattttgttaaattacaatttcaattttgtattttttaaaataatttaaaataatgcattgagtttaattttcgacaaaatagtacataagactatctttaatgcaagatctaaaaaattgtgctaaatttgacaaaaaaaattgagtttgtacatttagtctactatttacaattatgctccaatacacaaaatgttaaataaataaa

SEQ ID NO: 397273 - DNA, 765 bp, Cannabis indica
ttgtctaagtcctagatcctaataccgactacgggtctggtccaagcatcgagtcctggatcttaagtcccgaggtgggtcctaggtccaggtttgtgtctggggttgagtcccggatcacgatccaagttctgacgcccaagttctggtcctagttcaggggcccaatttccaggtctgggtcccccctcgatgttcgggtcctaggtcccggttcgagtccaagttcgtgtttcagtttgggttcgggtctggtccaagtccaggtcctggttagggttcgagtttgagttcaggttccagccccagttctgggtctaggtccaggtctcggtctgggtctaggtcccagtcttggtttaggtgtccaagtcccggtatgggttcttgtctcagtatgggtttaggtttgggtcctgctactgtctcatgtctgggttctagtccagacctggtcttattccaattctgggtctgagatcgggtttggatcccggtctgagtcttagtcttggtctggatcccggtctgggtctgggtcaaggtataggtacaaatccaggttagagtcctagtttcaaacaatgactacgggttaggtcaaagccttagttccaaattcggatctcagtcttggatctcggtcttgttccagtcccaatcccgggtcttgctgggtccttaatttgggttcgggtctgggttccgggttgtgtccctgtagtcaggtcctcagtttgtggtccaaggtcaggtcccgtgtct

SEQ ID NO: 397274 - DNA, 842 bp, Cannabis indica
gatgtaaacaatgcttttctacacggtgatctccatgaggatgtgtatatgtctatacctcaagggtatagacctaagggggagttaccaccaaatgcagtctgcaagctacagaaatctctatatggactgaagcaagcttcacgacaatggtttgccaagttctcaagtgcattagctgatgaaggatttcatcattcagcaactgatcactccttgttcatcaaacatttcaatggaaatttcatatttctattggtttatgttgatgatgtgatacttgctagcaacaatctagtggaacttgaagctttcaaagcaaggttgcacataagatttcagctaaaagacttagggaatctgaggtatttcctaggtctagaagttgctagatcagacaaagggatctttgtttcacaaagaccttatgcacttcagttattggaagatcttggctacctaggttccaaaccagtgagtacaccaatggaagcaaatcttagacttgggcttgatgaaaaagagaagttggctgatccaacattgtatagaagaattgtgggaaagctacagtacttgaccatcacaaggcctgatatttcctactcagtaaacaaactaagccagttcttgtgcacacctagagtcactcatctacatgcagcacaaagagttcttcaatatgttaagggaactcctggacaaggaattttctttgctgctgattctgaagtgaaattgcatgcatacaccgattcagattgggcagcatgtccagatacaaggaggtcaacaactggcttttgcatttttgttggaacatccatcatctcttggaaaag

SEQ ID NO: 397275 - DNA, 1265 bp, Cannabis indica
aatttatctgtgtgacacagaccggcatgatgcgctcacatgcctatttatgtttacgtggcgtaaacctacgtgttgctctcacacgtctatttacaataaggccttagaatggttcttctcagttttgatttccgagtccaacctgattatgccttgatcccataatccttaaatctcaatataatcatacacttagcatggcatagcatctatgcaacttatatcactagggtaataaccctaggctattaacctctcatattagggtaataaccttaatcccggttacaattactcacatatatcaatttcaatataagtgccaccacgctcactctacgtgctaactactgtcttaactattgtcctgcaaaggcagagattccaaatcccagggtgctcttgaccaggtgccggtaatcctagtcacacaatccaggattttcacaaatagagttaatccctgatttcacattcataaaatatattcatggcatttaaaatacagataatcacatagagctcaaaacaagctttcaaacgatataaagaactcccaaaacggagtctcgagtcaaaagttatggccaaaacaaaattcagcatttctcggtgtactccaaccgggaattctcgttggaacagccctgaaccaaccggagttccggttgtctgggcagtaaggacacgaaaaatttcaatctttaagcccccataacctactcaaatcatccccaaacaccaccaaactttccagagcatcaacatatgacattaaacatattccatagctcaagcacaataatttaactaaaaatcaaaaagtgccattaaagctccaagcaactcaagcttgctttacacaacaaaaatcagagtttacaatcaaactttaaactcagtgaaaccctaaaaatgcctctgaattcaccaaaaacaaatcccacaattaaacacaaaatcatgactttaactcataaaatccaagctcttgaacttgagcttaaaacgaacatgtttccaatattttacagcagccacataccaaaaataacaaggatttcaaccaagagaaaaccctaaaatctcagccacaacttaataattaaaacgtacaacaattcaagttattcacacccaatttaccaagatcaaacatcaaactcaacaacatacataatcaagaataccacaccctttacatacttttcttacaatattttcagcaagaaatttaactaaaattcagtaggaaaaactac

SEQ ID NO: 397276 - DNA, 530 bp, Cannabis indica
gtaagaatacttctttgaaagaatttgttgagcaatacaaagttgctttacaagatagacacgaaaaggaagttcaagcatgctttaatacacaccaaaagaaaccagctttgaaatccccatcgccatttgagaaacaaatgtcaatgatatatacacatgaagttttcaaaaacattccaagttgaggttttgggggtgtcagggtgcttctctcaaaaagaaaaggaagatggtcctgtctcaagctttattgttcaatattttgagaagaaaatgaatttcatgactagttgggatgaaagaaagttgaatgttaattgtctatgccgaatgtttgaatactatggatttctttgtaggcatgctatgcgtgttcttcaatcttttagtattttcaatgttccaccacaatatatattgaaaagatggactaaagatgcaaagattttatactcagctagtcatattccaaaagtccaatccaagaaacaatggtatgatgaactatatgttggaaatattttacc

SEQ ID NO: 397277 - DNA, 622 bp, Cannabis indica
aaaataattaaaaacaaaaaataccacttacaaaatttctcaaaagacaaaggttaaataaataatttaatatgtaaagcccaaaaattattcacactttttatttttgtagtctttttatatataaacaaatcatatgaaaaaactattagtaaaaagaaataaaaatatgtatttgtatgcattgtatataaaaagtggagttctctaaattataatttttttcttgtgattaaataatgtgaggatttaatagtaattaacaaaaaaaaaagatatttttgtaatttaatgtaggaagcccaaacctacattctcatttttatatagttatagataattatcaaattaaaataaaaatatctaagtttttggtaatttttttattactatctttgaataaacttttcacaattacaaaaaggctagctttattaattgcattttccatagcaaattcacaggcagtgacttcaccaccaacaggtctttgaaatgtaaattcttagtagtcatccacacgatatttgaaagatggtttttagccactattgccagggccggccctgaaacaaagtgggccataaggaaaaaaaaaatttgggcccttatgttaaaaaaa

SEQ ID NO: 397278 - DNA, 1141 bp, Cannabis indica
ttgattatagggtattttctagtgttgaatcatgtgtttttgagatgttttcatggctggaaattgtttgagttgttggagatgaagctcttgttcaagagcttgatgttgccatgattatgcataaattttatgattcttctacaatctgaattgagggtttattgttggatgttgatgcatagtgatatgttttaaatccctagtgtttgctagcaattctggtttatgatttggaagttttgattatgaatttgtatgagttcggttgagttttaggttaaaaattcgtgtttgagcttggtggtttctgggtttggaacccagatgtcgcggcatgatttgggcatgccgcggcccgccccttgttggtggaacctgggtttcgtcccaggtgccgcggcatggcttgggcatgccgcggcccgccctggtgtttttggtaagttttgagttgaatttcgaaaattcataacttttgattcggaactccgatttgggagttctttatatctttggaaagctcgttccgagctctgtatgattatatgaatttttaatcccatgattaaattttatgagttgaaaaccagcggttaaccctttgagtgaaaatcccggatttgtgtgactaggattaccggcacctgattaggagcacccagggattcacaatctctgtcaattgcgggacaacagataagacaatgattagcacgtagagtatgcgcattggcgcttatattgaaagtgatatgtatgattgtttaataatcgggattagggttattaccctaataggaacggtatagttgcctagggttattatcctagtgatatatgtatgaaaatgccattccatgttaaatgtaatgagatttagggattatgcgcttaaggcataatcaggttggactcggtaatcataactgagatgaaccattctaaggtcgtaatgtatttagacgtgtgagagcaacacgtgggtctacgccatgtatattttaaatagatgtgtgagtgcaacacataagtctacaccatgtagacataaatgggcatgtcagtgcgatatgcaggtctgtgtcatacagacagatgtgaatggcatatttgtttaaatagtatgatgagcatatta

SEQ ID NO: 397279 - DNA, 564 bp, Cannabis indica
aaaagattatgagcagcgctacctaatgcataatttagagctttcttctgtagtatttgctctaagaatatggcaacatcatctttatggtgaaaaatacgagatttacactgatcataagagtctcaagtactttttcacccagaaagatctaaatatgaggtagataaggtggccggaactggttaaggattatgactgcgagattctgtatcaccccgggaaagccaatgttgtggctgatgcactgagtagaagaggtcccaggaaaattttcaccaccgttatgatagctcctcaactggccttagagatggttaatgcaagaattgagtttgtagtttgaaagttgcataacatggcactctgattggatttgttagagaaaatcagattggcacagttagaagatcctgagctaattaagattcgagttaaggtgatggctggtcagcttaaagacttttcgatctcgaataattaaatgttactatataaagctcgagtttgtgtccccaatattgatgagctcaagaaagaaatcctcgatgaagctcataccac

SEQ ID NO: 397280 - DNA, 715 bp, Cannabis indica
catatccatctgtttgcaattctacaggcttgtttcacttcttttgcttccaactgattactctttgagcaacttgagtacttggatggcaaggtccacaagttactatcacaatgcaaggttgtgagtaagcacagggacgactcccaatagtaaaatacccgcctcaagcaagaaatcgagaaaacgaaggaggaagccgagaaggcataagagggatctgagaaggcgaaggaggaggctgagaaggccaatgaagaggtcgagaagaccatcaaatcccaagccaatgagtttgaggagaagcttactggaaaacttgttgagaaagaagctgagactgtagaacggtgcgataaggttggtttttgcactgtatatcgggcctggctttggaaccctaatatggttaccgacttcttggaggagcaggaagagaaaactttggctctttgcgagaagaccaagatggaggcagaagatggcgaggtcgaggaagaaaaagatctgtccaagtctcctagcttgtagaattggttttaatttatctcccctttcacttttagaaaatggccctttggctgagacagtggtttgcccttagcggcatttttttttgtaaggacatatttgcaaggttggatggccaactttgctttataatactttaaattgtaaatgtttgcttgcattttattcacaatataaacaatta

SEQ ID NO: 397281 - DNA, 540 bp, Cannabis indica
cctaaaagcaagcaaaattatatcagaaaattctatatggtaccttttaaaaaaggtgtattggtgcacatttatctgttttagtatctaaatgacaaaataaatatgggtaaattaatgcatattttttaggggtacatgtataatcatccaaaattcttatataacaacaaggaagaagtgatagtttttaatgaattggtttttcttcatacatataaaaagtcggttaattgtctaatccctctctctatatataataatagagaattaattaaaacactaattaacaatcaaacaagaaaacaaaatgggtagtgaagaagacaagagtagtaatagtaagaaaataattattcaaccaagaaataatggaaaagaaccaatatcgttggccagccaatctactcatcattctggtatttacataattaattcattacttaattaattgttcatgttttaattatgtacatattctgtcattaatctttcattttctttactcatcatcataaattaatcttttcaagaaagaaa

SEQ ID NO: 397282 - DNA, 694 bp, Cannabis indica
catctaagtctaagaaggttaagaatgttaacttggattatcaggatgatcacattccagaaatgataggagatgcacaatttcaatcaaatgtcgatccattggaatttcaaaattttgtagaggatgctgagaaacctatttaccctaattgtaataggtttactaaattgtctacgcttgttagattatacaatataaaagcgaaacatgggtggagtgataaaagttttacggatttactagcttttctagtagagttattacctgaaggtaatgagatgcctttgtctttctacgaggcaaagaagacactgtcttccttaggtatgcaatatgaaaagatacatgcatgtcctaatgattgcattctatatcgtaagagttttgtggatgcaatatcgtgtcccacgtgcggtgagtctaggtggcaaaagaaaaagaattctgatgaggtaaagattggtgtccctgcaaaggtattatggtacttacccccaatacctcgtttggttcgattctttcgaaatgtcaatcatgcaaaaaatttgacctggcatgccaccgatagaaaactagatggtaagatgagacatccagctgactcccctgcttggaaaacaatcgatgctaggtggcctgaatttgcaaatgaacctaggaatatccgtcttggtctttctgcagatggaat

SEQ ID NO: 397283 - DNA, 514 bp, Cannabis indica
atggaacaatgaatcatattaccctaaataattaggggcaagctataaaataagtgcaaaagccttgaaaggcatcaaagccaacaaaattgtggtgaaacaaatctttcacaatgtatacaatattaattggctaactatttgactaataataattgcttacagaaaataataatagaaataaatataaagactattataacttaatgtaaactaagggaaagaaaataaatataataattatatggtaaagtataaaattattaataaaatcacgtaattaataggcttaataaattttaataaatgtcgaatcaaactaaaaaccagtagcaacaaagggtgctacttccctttcagtacaagcacgagaaatattgtgcacagcagcccaggctgctagcttgtgagccacaacattggcatctcgaggtagccaagagacatttaaaccagaggaggttttaagacaagaaaacagatgcaaaaatatattagagaggttccaaacagg

SEQ ID NO: 397284 - DNA, 1115 bp, Cannabis indica
ctaagcgaaaagaattcactgagctggttcaaagtgaaggtatgttagtaacagaatatacgacgaagtttgatcgtctagccaagttggctttgggtattgtgcccatagacttcagcaagaaagaaaagtatctggtgggtttaaatgcaaaaatttgacatgatctggtaattactacgaatgaagcgacatcgtatgcaaaaatggttgataaggctctgtgagccgaaagtgcagtgaagtttcttcaggagccctgagggactcccagtgttggtggaacccccgctcttcctactcttgcttatggtagggatagtggtgactccactgctaatcaaaaaagaaaggctacctcagcttccggtggttcggaacagggtaagcagttttgagggaacataggcagaggtagacgccagggattattcttatcttgagtgcccacgttgtaagaaacatcatcccggagagtgcaaccggaaaacatactttcagtgtgacatggttggacatttcaagaagggtttcccgtaggcgatgaaagaagagcagaagcaagaggcaaaatccgtacctatttgggtgtttgctatcactcaagctgatgctgcagccagtccttctgtggtgacaggtcagcttcttgtcaacaactcccattatgaagtgttatttgactatggggctacacacttatatgtggcaacacaggcaattaatcaattaggtaggccttgtgactttatcaaaagagggttttgaaccctactgcctagcggggaattggttatctctaagcggggaattggttatctctaaaaggcgaattaggtctatgttagttagagtggaagatagggagttgagtgctgacttagtagagctagaactagcagagttcgatatcatacttgggatggattttctatccaagtattcgaccagcattgattgtaagcggaaaatggtaacatttcagagggtgaaggtccatttgcttatgttggatctgttcaagggtctcgaatcctggttatttcagtcttaaaggtgagagatttactacacagtggatgttgggttttatgccctaaataaaactctgtttc

SEQ ID NO: 397285 - DNA, 1477 bp, Cannabis indica
gaccaattagcaagaagaaaattaaacctcttgactattctgatagaaaagcagctgagtggttcatacttaacaattgtcctgaaattcaagtgtacatggagtaagtatctctatctacacattttttaaacgaaatttattattattttcgtctcttaacaagttttttaaaaacaaccaatttaacgaagagatgcaaggaagaaatctccaaaaagaatttccatcatggttttacatgaaggtaagcacattaaatctataaatctattagtctgaattataaaccttcataacaacttatttttctctttcttttatagatgtgtcatctacgtcaagcaggaaatgtcgagtgcactgaagaattgttttctttagcacacggttcaaatttcactgcgttctcttatgatgcttgcatcatcaacggtgtaaaatttgtggtagagagtcgtgatagcaaacgtaccacacaaaatagcggagtttctgtaccaggaactgatggttttacattttatggtgttctaaaagagattgtggagttgtattatttaggtggattctcagttgtattgtttcgatgtaagtggtccaacactgatccaaccaagggcaaactcattactaagaataacatcactagtatcaccatcagttctgaatggtacaaagacgaccagtttattcttgcttctcaagcaaaacaagtcttttacattgaagatccttcacagaatcataattggagggttgtgcaagatgtcaatcatcgcaaaatttgggatcatccaagtatcgatgatcgtaatgatattgatgttgttcatgataacatctcatctaattttgtattgactgttgactcaagtgaagtacctgttatgaatctacaagtacctggtgaatcaagtataattagtgatgttcactctcaatcaactgctccaattagggacaatgaagatttcattaatgatgatgaggaggaaattgtcaatgatgatgtagatgatattgatgtagttattagtgatcttgatgatagtagtgataatgatgtagttcaatattgttctagtgatgattccgattaattagttgtaattttgtagatttttttaatatattaaactcttaatttttgtcatatttgctattgtttcaaatttaattatttcaatatatatgcatatgaagttatgtctactgatgttgctcgatctcacggtggagatggtgggagtcaacctcccccaggccctagtaggatacccacaacgtgtgaggctaggttagtttttttttttttgttaattaattacataatgattttttgttaatattctaatataattattcaaatgtagcgcaagcaaagaaaacaagatcaaagtctaaatcgctaaatttggaggaggcctttgagaataataaacgaaaacctcttgaggtcacttttgatgtaaaa

SEQ ID NO: 397286 - DNA, 918 bp, Cannabis indica
aagtctaagctcaagaagccagacagtttctcttgagttagggcaaaaaagttcatgaagcttgaaaaaaacagaatggaaaacagacgcaatgcagttctaaacgagccttacgactgaaagctaacacaaggacatggaaaagaagagtcgtagaagtttcaaatcctagggtctcctacagtgttcttgccacagcaaagatacattcaaagcacaagcatgcaaaggaaaagcataaaggggatcagaaacttactcaaagattcatgtgtccgtattcaagcaagcctgaaatcgtctgtaaactccttagcaactttgaagcctgaaaactctctgtttttcctctgaagtttgcttaacagcgaagggtgaggaaatgaggtaatgagccagtactccaagtatttataggcaaaagagtaactgtacgaaaaggaacctaagacgcctcgacttcccgccttgaaagcaaatatgggaaatcaaaataatcgagtgcaaccgtcagccgtggagagagaaattcagattttcaaaatattaattgtccgagcagtaattagccgaaaaccaaagagacgcccactcagcttcacatggagtctcgaacggtcatgttcgacacgtgtcccctttcaaaggcagagccaacttggaataagtctatacgcaacctcggaggtcccacacagacttgggcggcaaatgttatcccaaaattggcactttgacgtggcatcagaagaatggtgacacatggcatctactaagagcacctggtcagatcaatacgccaagcaggatgcctcgctggcaagtccatgatggaatactcaacgagccgtgtagaatgagaaacacttagcaaattcaaccaagcacttcgtgggtcaccagctcaatccctataac

SEQ ID NO: 397287 - DNA, 996 bp, Cannabis indica
tttagttcttactccaaatttttcccaatgtaagcacattttgtgggattatttggatctaaaataacttcttccaactactcaatagatcttcttcttccctctcgccttctttagttaagattaccatcaagatgattgggtctcctattctgcagttctattcgataacactctcgagctaataattggttgcctctaactactcctactcttgcttaggtaggaaactttaaggacaagtgtttgattgaacttactgcccccagtccaattagtgttgggagacccattaatacattatatactgatggaagatcaacaactaagaactcctacattagtgtcaatgataagggtggctctcctacagttattggaagttcaatgatgcctaggttggggacattgtcacctgtaaatccacataggctcaccatacatggcttcaacattgcatcctctaatcctattttttccaatgtctccttgtaaaggatattgactgaactcctgttttctaccaatacccttttcacccttttattagcgagttagactatcccaatgaggggatcaacatgtaggtattgtacgtgttttgtatcttcctccaagaagataattagaggttcatttaattttgcctttttcaatggttctaaagcaaatgccaattgtccattctttattcatttatatatctcttttgggcattattactatttctagcgaggtgcgtccctcccgaaatgaccagtatatcctcgccctcaataggaggaggttgtattctctagctatttggattattaaggttgttgggctggttaagttcgtttccttgatgtcttacatattgtctgaagtataactgcaagatcaggctttctatctcgtccttcaattatcgacattattcgatagtatgccctatatctttatggaattggtcgtattttgttgaatctcgcttatgtctcgcatgcctcatgg

SEQ ID NO: 397288 - DNA, 812 bp, Cannabis indica
aaaagacagataaattgtcttaatagtggtgggaagcactgaatatgtaacaattaaaaaaaataataatgataatggtgataaacaagttattcaatcagctcgaggtggaaggcgaggacccctgtgctcctccaacaccgcatctagccttttcttcttctcctagaagctaacaagaacctcttcaagatttggataaaagtcgaggttaatattctggccattggtttgccaggccataaagactccatcatcaaagcgcttcttgcagtgttggcaagtaacaggggccaggatggcatctctcttcgccttggtcgcctccttctaagcctgctccctatattcacgaagccgcttcgcttcaatagttaggttggctatcatttgcaaatttgcttgatgcagctcttccagagactttagcttggcggtcaattcctgctctgcctccttagaatcccgaatctcgcgcctcgtagtggccacaactgcatccctggccttcagcgcctcatccttcgccttcagctcctcgaccttctcctcctgcgcctcctgatggctccactccgtaaaggcctctttctactgggcttcctcccagatagctctttttgtgccttcaagtcccggagactcttcacggcctcctccatgcccccaaactcagacatggtgtacccatggttgataagagtcttcgaaagacgaccagtctccgcagcaatctgacaaacaaaaaaaatgtatgtgcaaggaatacatgatgtcaggcaccaaaaagacaagaagcctgaaaatacctc

SEQ ID NO: 397289 - DNA, 607 bp, Cannabis indica
gctccaacatttttaagaccaaacatcattactttatagtagtatagacccttgtttgtttggaagcttgtgtgttcttagtcaggtagatgcattctaatctgattgtaccccgaataggcatccatatagcttaggatttcgtgtctgactgttgcatccacaagttgatcgatcttaggagtggaaaacagtctttgggacacgccttattgaggtcggtgaaggcaatacatacttgacattttttgtttggcttgggtactagtacggggttagccacccaagtcaagtagaaagcttcaataataaacttgtttgtgcagagcctttctacctcttcttttagtgcctgcgcacgttctttatccaataaccttctcttctgctggacaggacaaaagtttggattaatatttagggcatgagagatgacagtggggtcaatgtcgaccatatcctcatgtgaccaggtaaaaatgtcaagcttttctcttagaaattttattaaggctaattttacttcaaccaacaaacccttacaaattttgagcttcctagtcaagatggttggatcgatctccacttcttctaactcttctactag

SEQ ID NO: 397290 - DNA, 735 bp, Cannabis indica
tttttttttttttgttaagttatgtcccaaattaattgaattgcagatatattcctatttatttttggcctcattaattttttagaatttttttatttttacactttaaaatattttttttttatatttttatggaattttacataaaacctcctattgcaattagcacaacttaaatcgcaacaaaaaaatagtatagaaactcatgagagaaaccactctaagaactcaaatcttaaatttaaaaaaataatatatagaataattttcctaattttttttataatttatctaaatattttataaaattttaaaaaaattagaataatataatataaaaaaatattattttcacattaaaatttttaaaaatacttaaataattataatatataccatcataacaaatttcaactaaaaattttcttaccataaaagtgaatggcatcatgcaatatgcctcctaaaattctaatttttttttttttaacaatatcaagtctaaaatagacaggaaaatttgattttatatacttaaaaaattaaaaaaatttataattaaaccaaaaatttaaactctaaaaaaactatacttttttttcaaaaccccaaaaataccccccacacaattctctctctctctctccatctcacccaaccgcccaccctcaccaccacctccgacctccatcctccgacctccgaccctcaccgccacctccgaccacccgcacc

SEQ ID NO: 397291 - DNA, 1126 bp, Cannabis indica
  modified_base (72)..(72): a, c, t, g, unknown or other
acattgtaaatctttcaacatgaattatgcgagtgtaagtattttacaagaaactagaagatctattcgacncaaagcatacagaataaattttggttgatgatattttcgctattcgattgagaagatataagacgcgtggaagtagtgttgtctaaatttctattttaagcatatttttacaagtttaaactcatgaggagatagttatttaaaaatagtgacttttaaacatgttcggagtaaggaggtcgggaccgttgcccaagaagatccataaattttgttagaaaatctgtttagaaatttatttaaattttatttttatttctcaattaaaaataaatgtttttatttttttttttgaaaatgaatgtttttatttttatctttttgtttgtgtctatcatgttaggcgagatgctaatcaagatgttcatggtttggctaacgccccaaaagctagaagatgccttactctctttcattttttattattatttcacttttcaaaaaaacattcaaataatatatttattcctttttttaaacaaatccccaaacatacatataatgcatgtttgatgaaagttattattacttaattattaatttaaataataataataaaattaaatctaatataatttaattatatttttttaaaatatataaaatttagaaaattatctcatatactatttttttaaatttacgatttgggttattccggtagtttttatgtgagttgctatagatgttggttgcgatttagattgttccgttaattgttataaggatttttgtgtggaatactggaattccataaaaatgataaaaaaaactgttttaaaatgtaaaaatgaaaaaaattcctaaaatttaatctatttttaaatttatttataaaatatatctaacttaaataataaaaataagataattaacataatattattaattaatttgttatagtataattaattaattgaattaatgtctaattcaaatttaaattacgatttatataaataaaaaaaattcttatttaaatttgttgatatttttaaattaaatttaaatatttaagattatttttttaaaaaaataattaattgattgattt

SEQ ID NO: 397292 - DNA, 542 bp, Cannabis indica
aaaaagggggtggcggaggtggtatgcgagggttttgggttccctgggctgtgggttcgatcgtgaggaagaagatgatgatatcagacgcgatagggtttttttatataaccctatggcgtcggttgaccgacgccattgggttatttcatataacccaatgtcgtttatataatgtaatttcatataacgactcaaaatggtataattaatgcaattctaacctacagtttttataaaaaaaatgcgtctaaaggttaattttcaataatcgagtatttttacaccctttagcttccctttttataaaatgagttgaaaaaagggaagctaaatacccattttgtagtagtggtatgttgaaatatacgactttattgtgggtttgatgttcatgtgtttataagattttgtactatgaattgttgtttatgttagtattgttagtatatgatagtgataagacttttgactgtttctgtgagaatttataggataggttttctgctgctggtgtgagcatagcactgcagaatatattt

SEQ ID NO: 397293 - DNA, 416 bp, Cannabis indica
ataatatatctcataagattatttattacttttaaaatatcaccatatatattatctataaccatatatttactataactcctctagactatttgtggatttttaaattatggatgaggagttcctggagcattaatatttatctaacttattggattactcatgcatgtgtttatgcaatgttgttcatactaaagtttgaaattttaagtaatatgaacataatacattaatgatattataaatttttatttgtgacaatgatgatactccaagatcatatatttgttctattcttgttgtatgatcttaatttcaatatcaaatgatcatatatctacaattattgatgcatataaagtacttcatgacttttttactaatgaacaaactatatacatttaatatttctcaat

SEQ ID NO: 397294 - DNA, 1127 bp, Cannabis indica
tatcacagtgagcagcctgctaaataataaggatgagtggaatgtagatactctcaacaatcactttcataaggaggatgttccatggatactagggatccctatagatacccactcggaggacatgctagtttggcctttactaaggatgggaactacattgtgaaaagtgggtatagagtagctagggagataaaccttactcctacccgaagctctaatatggatcaaactcatgcttggtggaagatgtggtggaatctgaatttgtctccccgaatgaagctctttggatggaaaatgtgtcgaaattggctcccggcaaaatccaatcttgttcatagaggtatgagaattaacccaacttgtactaactgtggccgatttgaagaatctctctcccatgctctttggacttgtgaaaatgttaaaaaagtttggaaacttatgccttcttacaagttaattaaggatagtagagggcattcaatgatggatttgctggtggaattcagatataagcttgctaaggaggagtttgaagatgttgtcaaggttctttgggctatttgggagaatcggaatagacaatggaccaatcaacattatatgcatggtgctcgtttgctggaatgagtttttagtagctatccgaaagagaatcatggaaaggaaaggcttactaagatgcaccctgctgctaatattgatcagtggcaagcccctactgttggcacctattgtgtgcattgtgatgcagctattaaaccgaaccaagaaggggtggggataggctatgtctggcaagattggctgggtaatattctctctgcaggtatgaagtatacccctgtttgctgcaatgtgaatatagctgaagctcaagcagtggctactactttgcaagataggccgaagagtgtgcactagccgtttgagatcagaactgattgcaaggtactggtggatgcaatcttagataatggcaactcccttggtgacatgcagccggttgtgaaccaaataaagcgacatcctgaattttccctttgtacaaagttctgtcatgtaaaaagagtccataatataggtgctcatagcttagctaagagaagccttgacaaaaa

SEQ ID NO: 397295 - DNA, 622 bp, Cannabis indica
gcctatcccgcccgagaaggaattcgccggaaaggactggctactgagggtagacggatcctcaaatgtcagaggaagcggagtgggaatagtattgcaatcacccgacggggaaatgatagagcagtctctaaagttaggcttccgagctaccaacaacgacactgagtacgaagctctaatccacgggataaaactggtaaaggaaatgggagccgagagggtattagtccagtcagattctcagttgatagttcagcaggtcaaaggagattttgaagccaaagaactgaagatggccaggtacttagccgaagtaaagaaattgatcgcgactttcgactacttccaaattagccaaatcccccgtgaagcaaatatgcacgccgacgctttggctggcttgggatcctcttcccccctccacattacgagaacaataccatttgacttcatcccggaacctagtatttcagcggaggaggaaattaaatgcgccgaaatcccgacggatacggccgaagactggaggcggccaatcctcgaatacttgagggacgataaattaccaacggaccccaagcaagcaagaaaaatcatagtaagggcatcaagatacact

SEQ ID NO: 397296 - DNA, 473 bp, Cannabis indica
tggatgcctcgtctctcgttcctatcactatcacagaagagtactatggtcaggatgtagatgaccatgatgcgattgggttagcagtggacggggaggaagtctcagtaataggttatgccttagcccaattagtgaatgaggatgatgaaccgcgtttcttaggtaaatctcagagtattttacgcattaatcccgtctctaaattgacggttccactcctagcacaaatgagattggattatggcattcctcgtaatataaaaatgaagctacttaggagggaggaacgaatagactgggatgttcctgattagtgtgtgttggaaattattttaccaggatcttaagtatgttgattaacaccctaaatatgaacttctaaaacaattatgaaataaacacatataaagtatcagaaaccttacattgggtacaacggaattaaatgtctccttccgttcagatatcta

SEQ ID NO: 397297 - DNA, 751 bp, Cannabis indica
ccaatattcataaagtgactctctagtaatttgatgattccacagatttcttttcggatgcttccaactttagaggctgggaagtatcgctccaagaaaacagtcttcatgtcattccatgtttcaatagtacccgatggtagatagtacaaccactccttcgcagcatcttttaaagagaaagggaaggcccacaacttgatttgttcttcagtaactgatgtaggtttcatactagagcagacaatatgaaactccttaaggtgcttgttggggtcttctccaggtaatccatgaaaagatggtagtcaatggatgaggctgatttcagttcaaaattaacatccaaaggtgcataatggatgcatggttgatggtccagatttggcgcggccaactccttcaatgtcctgttttgagccatggtcttgtgagaagtaaccaacttgtcagaatctgactcgggattagttgatggtggttgtttggcaggaccaagaggttgaaagagtgggttgtcggttatagtctttgaagatcgagaagcagacgatgactcaagatattgtttaacccttgaaaggctctcttgattatcgtcagcactagacatgtacacctgagattataatagtgaaagaagttagtaacagaaattaaatatgaataataacactaattttttcgttttttttctaaaatctaaatttattttaaaaaaaaattctaaatatctatcctttattttttt

SEQ ID NO: 397298 - DNA, 623 bp, Cannabis indica
tttcctaagataaacttgatttgtagcatcagaacggattctgacgcaacaaataagactataaaaggaaacttgccataaacgagtctgattttgtattgggtcttaattcttgccataaacagtctgtataatctgactgtatcaagacataatcgaattaaataaggaatatagcaataatcaaagtttcatttaaaaaccaactttccataagagaactgcttctcttacaagaagtttccatacaagaaaagttcagctgaaaatacaatctttcctaacatggaaaagagcaataaaaactaataaaatcaaggtgagaaaatcggttaagaatgcaaagaaatctcaccataaataaaaaaatattttggcatataaatttccaaaaaaagactttacatcctccttttagttgagcaatgcaagtaatatttgttgggctttgtgccctaaataaaactcaatttcaatgtaatcttttctattcaattatcaataaagaaatagatataatttcattacttgtttaatgtgttatttggttcatgagatcatttatttacttatttgattaataaattcatccaaacccttatcacattgatattcttatttat

SEQ ID NO: 397299 - DNA, 1067 bp, Cannabis indica
agcttgtagatgcaacagcagagcacaaaatattaagcttcatggatgcttactcaggctacaatcaaatcaaaatgcatccacagaccaagaacatacaagtttccgaacagatatgggtctctattgctacaaagtcatgtcgtttggtctaaaaaacactggggctacgtaccaaagattggtaaacaaaatgtttaaagatcagatcgggcgaaatatggaagtatacgtggatgatatgctcgtaaaatctagaaaggctggggggcacatagacgacctggacgaatgcttcaaagtcctcagaaaatacaacatgaaactaaatcccttaaagtgttccttcggagtcagctcgggaaagtttctaggcttcatcgtcaatgcccaaggaattgaagctaatccagaaaagattcaagccctcctggatatgaactcgccaacaaaaccaaagaagtgcaaagtttaactggttggatcgccgcgctcagcagattcgtttcaaaatcaacagacaagtgtgtcccattcttcaacatcctgcgaggaaacaagcagttcgagtggacaaaggagtgtgaaaaagctttctaagggctaaaggcacaacttgcaaaacctcctgtactctcaaaacctctggacatcgaggaactgggaatataattggttgttacagaacatgccgtgaacgccgtgctaatcagagaagagaaggatatacagcacctagtctattacatcaataaaagactcattgaggccgagggtcgatatccgttaatagaacaactcgcctactgcctgatttcaccaacaaggaagttgaggccttatttccaagctcatcctgttcgggtgtgttgacttcgcttttagccaacaacaatgagtccttttaataagcgataaacgatacgtcgtaacgagtatatatataagaaagcaataataaaacacaggaattttatagaggttcagccccgagcaattcggtaatagcctaatcctcgttatttgtattgacttaagaacaaggaagaagtttccttttcttatag

SEQ ID NO: 397300 - DNA, 580 bp, Cannabis indica
ccacccatttgtcctcccataccaccattgtacatcccacccccatataatccagaagatccataaagtccccctccataccctgctcctcctctgtacatgctgttcccatacattcccccagctccaccataagtgctgccatacatccctccagctccaccatacgaggagttaccgtacattcctcccactccaccataagaggtcccatacattcctccaactccaccattcattgtagaaccataacctgtaaaatgttgaaaaaagaatccttaatgaacagagcaaaaagaaataaacctaatcttgccatgaaagccaaataatacctcctaaggtattgctcgtcccgtagttttgctcccaaggccttgtgggaacaggcctagaaagtgtgttagtgttaagggtattaatcctatcagaagtggaaacaatttctccaggtcttgcggttcctgaagcctcgactatgtcgcttgtgcttcccggtgatggaggtttgaatggtgcagggccagatgatgaacctgcccgttcccaaggttttgggggacgattactagctgcaagc

SEQ ID NO: 397301 - DNA, 601 bp, Cannabis indica
tatatactataaaagtactaaagtttaataaaaaaattaagttagacgcaatttttgagaaactctttgatttagtaaaggtgtgcacagtaagcagaaaagtattgtagcatgcctaagcaagtagggcattacaacactaatgagtgtaatcagttgcggaacaagatagaatttctcatcagacaaaaacatgttgctcttcagcgatatgtacgacatgaagctccagctgagggcaatgcacctctttaaaaaaaggctaatatacaacagtaagcaaaatacacatcaggtacaatccaaaacaactcttgacaacttaaccatacaagtcgaataagtcgatatgttcatttgtccgataagattgtcgtcgcatggctgccctagtttccctttgcctttacctacaccacaaagcacacataagtcacaaagacttagcaagaaaagtaaacaatgaaagtatataacaatcagatatccaaatcaagataataatataattaaacaataatattcacctacttgtataataagacaagtcatatctattactccatagagcaaccatttctattgttgcctaataaaacaa

SEQ ID NO: 397302 - DNA, 1233 bp, Cannabis indica
aaatgaaatgttacttgttcccactattgctaaaaatctcctcagtgtttctaaacttaccactgataatgatgtgataattgaatttcattccaattcttgttttgtgaaggacatagcaacaaggagggttctgcttcaagggatgcttaaggatggactctaccaactccaaactcctcaaaacaagtcagcctatctcagcttttcaacacctaagtttactgtttctgattgtaatccctttactggtttagcttttaaaaccagatctcatgtaaaacagtccaaaacttatttgctatttccacaaaagatgtttggcataggagactaggccatccatcctctagagttttacaccaagttttaaatacttgcaatgttaaaatttcgaaaaatgaagttgatcatttctgtgatgcatgtcaatatggaaaatctcactctcttccctttaagcattccaacagtaaagccttaaaagtcctagatcttgtgcatactgatttatggggcccttctcccatcacatccaaccaaggttttaaatattatgttcactttgttgatgattgcactagatttacttggatatatccattgaaaaacaaatctgaagcttgtgatgcctttcttgcttttaaatccttggctgaaaaccaatttgaaaggaaaattaaggcacttagaacagatggagggggagagtatcaagtgttgtctgattttgttgtcactcatggcatcaattttcatcattcatgtcctcacacctcttcccaaaatggaagagctgaaagaaaacatagacatatagtggaaatggggttaactttgttagctcaatctatcatgccacttaaatattggtgggatgccttttccacagctgtctacctaatcaataggttacccacacctattcttgatcacaaaacaccatttgaaatgcttcacaagaaaatacccgttacaagtttcttaaaacttttggtgttgcttgctttccttgtcttaggccttaccaagcacacaagttccaatttcactccatcaaatgtgtgaatcttggctatagtgatgcacataaaggatacaaatgcttaagtcctacaggtcgtatctatatcttacgagatgtggtttttaatgaactcgaatttccatttcaaataagttttcttaacaattatcaatctgaaaatcttgttatcattcaaagttccacat

SEQ ID NO: 397303 - DNA, 528 bp, Cannabis indica
atcatgaatacgacaagttttagtttttccagtaatatatgtctctgacacttgaataagatttctatttattagttctaccaagtattcttcagcagtttcctccaatgttttatccctctttgatttcacgaagccttcagctatccattgtagaatgatcctttcgcttctaaaagagtaatcctctgggaaatagccaacatacaagaagcaacatttaagataataaggtaaatcattgtagctaagagacaagattttttctatgctttcgagacgttcattgctttccaactccgaacttaggcttgtaagtagtttcttccattcatcaacaaccttgggtttagttgataaaagacctgctataactaccactgcaagtggcaatccttggcatctatcaacaatctcgcgagacaacttcttcaagtgacgtggacaatttccagcaagctcatttcgaaaagccttgttgcaaaagagttcccatgctttctctggtggaaggggttgtaaattatg

SEQ ID NO: 397304 - DNA, 1838 bp, Cannabis indica
gtctctccttttccttcaaactcggcctggttcttacttgagttttgcttcttattgctctttagctattcgctctatggatgatctaacaaactctctctctgttgctctcaacctcacagaaaccgaatgtacggttcaaactcttcatgaactcactcctgcaaacacccctgaaaccgagacacaacaagcccccctctttctggttgttaaagtgcacactgtcaagtctttcaaccgaaagaattttatagaaaaaatgacaaagaactggaaccatatctctaggagccctgtgattatcaccgagcgccctcatggtcttttccttgtggagtttggttgcgatggagataggcgtcgggttttgttgcaacaaccttggacttatctcaaccaagcgatcctcatggatattccgaactcattggatgtcctcaatggggatagtctgctcaaaattcctctttgggttcaagtgttcaacacccctttcctcaaacgctctaaagaattggcggccctagtttcttcttctctcggtcacatgttggaactatataagccatctcttcgggagacatggggaccctattttaggctccgtgtaatgtttgatgtggcgcaacctctaccccgtggcttacctatccacttctcgggtataaacaaagtcatttggcttgagctgaaatatgaaaacctccctgacatttgttttttctgtggccgaatggggcatagttacaacaaaggttgcatggattacatgaaagcttgtgatgaagctcctttccccccggagctcaggtatgacatcaaaaccatctctggcaaagttaaggtttccactaatactttattatgccctgaacagcttaacttcgccaatcctccggttgcttcctttatgactactaatccagctagtgctgtctgtgttgcacccccggaaagcatgccaccttttcccacctatggctcccaagaagttggcccgactcaaggccaaacgcaacaagtgggtctcttcaaatccggcccttccaccattcctcaaaactaccctcaatggaatcaacctggtcccataacaaacacaccaactcccaatccaccacagaccctcccacccgagaccatcacaccaacatacaccgcccttcttaacgccaccatgagcaacactagtgtccaaaaagcctcgccaacttccacaccgaatcaagccatcacctcccaacactccagtggctccaattccactagctcaaaatattgccatgtgcctttgcctgagaacatccctctccttgacaccagcaagagactcgaagccatgaaccttacctaccaacctggagttgctaccccctcgggttcaaaggcctcaaggaagagaaaaaacaagcctgattcaaaggacaagttcaaaaggcaaactgagatggtcaacggagaactccgccaccaaatcaagcgttcccgctccgacatcccacaagccactgaaatttcatctggaaacgcaggcctagccaccgagcaggcctgcccgccgccatgaagcttgtcagctggaatgcacgaggaattgggagtgaccgtgcattccgtaatctctcccgtttagtctctttttgtaatcctactattttatttattatggaatctaggcttgctaagaacgctgttgacaattttaagcataagctccattttgattcgggtttggaaattcctaggataggtagaagtgggggcttgcttttattttggactaatgatgtaattgtcactttactttctcaatctattagtcattttgattgcta

SEQ ID NO: 397305 - DNA, 424 bp, Cannabis indica
actcatgcaccctaatggctcaactatcactgatactcaaagcatttaatagttattgaacaatacttcactcaacttttcaccaaccaatatcctattggaaagcaaatggattatgttctttctggaatctctgacaagcttactgatgcggaatgtttatgcttggaagccccattcacatatgataaggtccagcaagtagccttccaactagttggcgataaatcccccgggccagatggcttcaatggaatattcttcccaaaaaactagcatttccatgggactgatgtcgttcaagcagctcttagcttcttgaatgataatgcatattatcgcctttcaatagcaccatcagcgtccttattgttggaatttattttaccaggatcttagatctactcacaagtatgttgtttaa

SEQ ID NO: 397306 - DNA, 525 bp, Cannabis indica
tttaatcaaagttaccactgatagttattaatcattattgttattgaaattttaatttttttattaaacttctttatgaaaaaagttgttttaaatttatttttccaaacataaatctgtaattagcgtaagtaacagaatgattttcttcacaaagtcttcggcgtgatcgtcggttaagtctttttttcgttcttccgaattacttagttcaataagactccgatcaatgcatgtgatgctagtgtttgagttaatctggtttgggattagtggtgatggttggatttttttagatccgggtattgtggtagggagttggtttcaaatctgagtgtagttggtgcggtgatggtggttgacggaggctatggtgatgtggtggttgctgttatcgtatggtaacattaacctttgcagttattttatttttaattattatttatttttaatttttaattttatatttttgttgcatattttttgcagttatttttaactaatcctctatagtttttcaaggaa

SEQ ID NO: 397307 - DNA, 580 bp, Cannabis indica
tagcacttgagttgggagcctattattggaaaggttgttgtatgaaatgcatgccaccaatatttaaaatctaaccccgattgtgcaagaagagtgagtcccatctctgttatatgccgatgtttacgctctgccctcctattttgttcacttgttttgggacaaggatgtgtaaattcaattccttaatctgtgagaaacttggcaaagggtagatattcccctccccaatctgcctgaacacttttaatagaaagattaaactacttctctgtcatgcttttgaatttaataaagatttcaaaagcttgggatttgagggtgataagatagatccaagtaaatctgccgtgatcatctaggaactgaacataatagtaatagccatctttggatttgatgtaggaggggccccataaatctctgtgaataagttccaaaggttgggaagctcttgaagtggaaatcgggaagggtagtttatggctttttcccatttgacaggccttacaaaattctaattgattaagagaaccagatgaagagactgttgggtttggtgccctaaataaaacccatt

SEQ ID NO: 397308 - DNA, 920 bp, Cannabis indica
aaattggtagttcacatgtataaataattttgtaatgttcaaaatatgtcttgatttgattttaaaaagatacatataaataaaaatatatatttttttttcttatttggatatatctaaaacaatatgtattgatttgtttttttttatttatttttacatattttttaaaaaatacatataaataaaataaattcatatatatttttttaatttgataacatatatcaatataaaaatatttaaaactaatacaaaactaaataataaaatatcattatttaaaagtgaagactttatattttcaaaaaaaaaagtttagagatcaattttactaaaaaaaaaataaaattatataatttgagaactaatttactaaaaaataaaatttaaaaaccaatttatcaaaatctatctaatttagtatttcaaaaaaaaatctatttaatttagggacctaccgtacataaactttccctagtgcatctttctagggtattgagggaattgatattttgatactgccaagacagcttataggctaacgacgtcgtttgttcacaatttatctatttatttttaatttgtctctgacgtttttatgcataagaaatctttgttttaattttcgtctgactgacgttgtgcataactgaacactgaaaaaaaaataaaataattagaattaaaataaggtcagtctcagataccagagagttcatacttttttcattatcattatttcttattttactaaattggactacaataataaataaatgcttaatatatgttagttggaatgtaatttcaggttagagggaaataagaatcgtacaacacaaaaaaaataaaaataaaaataaataagattatacatttgtagagagagaaagcttgtgagaatcagtttttttttt

SEQ ID NO: 397309 - DNA, 679 bp, Cannabis indica
caaattaaatcgaaattgagttagtaaaaaaatgaattggttaattttttccaaaatatccaacaaaaataattccaaaaaaaaaattccaattatttctcgtaaaaaatttgcaaacatcaaaaacacatagatcaacattaatcacatccaaatcacacatatatcgttttaagtccaaattttaccaggatctagatttactaacaagtatatttttaacatcctaaacatgaacttctaaaacgatacgaaataaacgcatataaagttttagaaaccttacagtggttgcagcggaatttaatatctcattctactcagatctctaacccttgtatcctttctgcagcagagtctcaccaagatctgagtccgaatctccttttcttgaaactggattcttcatagtcgtacacactatgattgagtaccacttgatgtgtgtgggcactcactcttatcactttagtgcttcggttttgaagagagaaagagagagaggatttcgaataggtagagagaaggcggctcaaaattttactgaaggaaagagtttgcatcaccttttcctttgaggccatcactacctatttataggaaataacttagggctaggttagatttatttggaattaaaataataaaaaaaaataaaatggtaaattgcttctcaagt

SEQ ID NO: 397310 - DNA, 658 bp, Cannabis indica
aggataagttatagtacgtttttcagttagctgtactctattggacacatctaatgtgtcaaaaaaaaggtagttaaatctctgtattggatattttaatacacgtgtacacgtagggagtttggttaaatatcatccttattcttcaatctttttttcccaaaaaaataaattaatagtactacggtaatgttctaacgtacgaggatggttgaattcattaaaagatgttggtaaaggcccattaatatcagcccaatgaatttaaataggaccaactacccacactactcaaaaatctcagtactttaaactcataaaatcatccttatttttcaatcttttgtttttcaaaaataaaaataagtatactatgattcttttctcacgtacgaaaatggttgaattcattaaaaaaggtcggtaaaggcccattaatataagcccaatagatttaaatgtgaccaccaacccatacaactcaataatatcaggcttttaaactcataaaataaccttattttccaattaatttattaaaaaaaataaaaataattttactattgtactattctgactaggggtgttcatcaaacctctcaaatcacctgcaccacaccgcaccgcaaaaaaaatgcggtttaaaattctttgcggt

SEQ ID NO: 397311 - DNA, 773 bp, Cannabis indica
cacagtaagtacaaggcagcagcagtaatggcattcaggattttagaagctaaattagctttagctggaagaacccggtcatgaagctctgtgatgtttttcggccaattaatctgcccagcccatttttccacaaacacaatgagtttccttgtgaagatgcattcaaaaaatagatgattatgggattccgaagcatcatcacagaccaaacacagccctgaaggaatgggaaaaaatctgctcaagtggtcacgggtgagcaggttttcatttatgatttgccaaaacatgaacctgtgtttaggaacaatatatttatgccaaacagtagcagtatagggagttctaacagctccaatcaactcattataaaacctgttcactttgaatttattacctttcgccgcctggttcaacatgtttgcattcgtcacatttctaatcttcaaaagcttcttgaagtaccaactcagatcaggttttatcgggcaagaccacacatcctgcttctttaagtaaatggagttgatccatttcacccaaagattatcctgcttgctcgaaatcgcccacaagtgtttggcaaccatcgccatgttccatttcttaccctctctgaaaccaataccaccgaactgtttagggagacaaactttttcccatgacggcatatgcagcttactcctattaccattcacaccccagagaaagtcacgacattttttatccacggctgccacaattttttggggtaaaataaagaggctcat

SEQ ID NO: 397312 - DNA, 964 bp, Cannabis indica
gatttttttttggggggggggggattatatcataatgggaaatgaaatttaagataagaaaaataaaagtttgaaatttaagatgcgggaaatgaaattttaaatttgaaacgcgtgaattgaagcatgggaattgccgaaggtttaaaattgtcggctatactacaggtggcgatttaaaactgttgcctatagtatagccgacagccattggcaactcccttttacaaatacacgggatttcttaaggcatgtttaaaaacagtcgcctatacatcttgacagtttaaaattgtcaggaataccctatttttcctgaaaatttagcgacagttaatttcccaaaaaaaacatttttagaactgtcgcgaatagccctttttgtagtagtggcatcatcagcgagtgtcctggtccgtgagtctgaaagctcgtatatgttcccggaggctctgatactttagctgatgtggagacttcgctcaaagaggagttggttaagttagttatttctaactaacttaataatcttgtttcctctagccaccgactttaggatcttgaccctaaacctgtaaataccaccttgacttgttatttcataagacgagattaaaaactaagttcagatgagattgagagtttgagagaaaaaatattgggaggtagaaagagaggtgcaaagaaaattaagagagagattaagtttggaattgtaagaagaatcttctatagataagattcttgggtgtaagtgcgagagttgaaacacttaatgaaatctcaatagagaatctcgtctcaattgttttatacctattcttgctcaatcaataaagaaggattttggtggtgttccaaaattggagtagagtcatagatcacattgatctatcaaacttgagccagtatatatcttggtgttgatttctttaatttttttgcatttattgtttctggtttt

SEQ ID NO: 397313 - DNA, 536 bp, Cannabis indica
attattatagtaaatattaataaaagaaaattaaaaaaagactataatttttttaaaaaatatatttaaataaatttttaaaataactcataaattttgattcttattttgaaaaataaaaaataaaaaataaaagcggttgaaaaatttacatgaaaaatacaaaaacttaaaattatcactcatataccctcacaaggccactctaatctttttacctttgtttttgttttatttacattaatacatcttacacatacatgatgtcattataccactttcatacagtattgtaacttttgtttgaaaacttctcacacaatcaaaactatttttgataaaaaaaaaaaaactaacttcgttcatcttcctcaactgccttcctccatcatctgaccgcattttgtccaattttttttcttcttttttctgttctataagtgaccattacttggtcttcatctttcccatcaccattattgtgacagtcagtagtcctgtgatttgtaaggggaaataccgggtaagctgtgcaa

SEQ ID NO: 397314 - DNA, 601 bp, Cannabis indica
actcttttttctaattatttttcaaatgtgctaccaaattatttattcttacaaaaatatttcaaaaaaaatatattacattagttttattaaaattttaaatagaattaattttacacataatatatatttttgacagttaacacaatttctaaataccatattgctaatctctaaaaattgaagtgaataaaaaatattatcaatataaaatatcgaattaagttgcactaaaagagtatatgtttagttttcttaggtacatatatttttgagttgatgtacaagtaatttgtaattacttttaagtttgtttcgattttttttttttttgagattatttttatgttttttaagttatcgcaatgtgttgatgtgtaatctattttcatattaaagtacagttgttatcgagttgttcattcgtatttttttagttgtttaataacaacaaaaaaaatatatatgtttaattttttatgagtactgttgacctcaaaaagtgatcaactgacagtagggtcatatagatctgatgctagccacgtgttacaaaacaaaatgaaaaagtataaactacacaaatttgttatagaggttt

SEQ ID NO: 397315 - DNA, 760 bp, Cannabis indica
acccgagtacccccaaatacccaatagctcttaaaatattattatgacttttttgttatttaattaatttattttaaaataaataataaagtgcaaaccaaaatatagcataaaatataactgtatatatctggattaacattttacatttttaaagagcagacctttttataacacaaactactgcgtacaaattatattgtaaaaaaagctcacttagacattaaatttgcaaatcaaaaaaataaatttaagtattgtgaccacacattacttcatatatatatataaatatatatatatatatattttatatcatgttttaatatgattgttttgagcttcatctatatattcctttgtttggtgaactggaatattaatgatgccatgcatgcatattaaagtaaattataagcatgaaatgatatttttatgtataatatttttgatgtattaacttaaattaacgttttgacacagcttcgagtgcttggggatcatagaaataccttctgagtagttggatgactgttgaaatttcagtatttatgactgaattgtaatgtgtttaaaggtcttagcgtatacgtttaaacttatatacatatatatagttattactaaataaggaattttcatatataaaagttatgtaatccatgatgatgatgatatatcgactttatgatacttgtcaataaagaaattacaaattatatatatttttatttttattaaataaaatatcaacttcatt

SEQ ID NO: 397316 - DNA, 525 bp, Cannabis indica
acatgtcatacgacaagactttctttttaggagaaatataatattgaggaaacattttacttcttttttttcctgttgtttatcgagttcttcggaaactaaatgtagttaaagcttagaaaagataaatgataataaataataaacagacagatttttacgtgatttaggcgttgaagataattagtccacgagtttattatattggcctctttgggcaaatgtttatgaaattataagatgctcacagtgcttctcttcagagagagtttacttggattttttgtagagtgattataagtaagaagttgttctctctcttcttgaagaaaaatagaactatttataggcagacatggggtaaagagcataccctttacccacctaggatttcgtactccatacgccaccaaggtcagtactactaaaggacgatctgaccattggctggtaagaaccttcttcatcgtgtggtgtacagctgcttgtgaggacttttgtgcgcgcactacaatgatctagcac

SEQ ID NO: 397317 - DNA, 1015 bp, Cannabis indica
tatactgatttcgaaacctccttgattgttcttcatcgaattcgcccttagtgatagagtgtcatgcccacacatagcaagttaagtattcaatcatagtgcagaagacgatggtaaccaacccaaaggagagaaagagatttaggctcagatcttgataatgctttgcgacagaaaggaacaaggtatagagatctaagcggaaggagtcatattatttcactgcaatcaatgtaaggttttctaaactcttatgtgtttaatttcatagtattagagatattcatatttaagatgttaatcaacatacttgttagttaatctagatcctagtaaattcccaacggttaccaccaaagcaggagattgactttgaaattgaattgataccaggggcagaacttatatcgaaagctttgtatcgaataacatctgcagaattaaaagagttaaaggttcagttacaaggtatgttagacttgaaattcactagactgagtacttcaccttggggtggaccggttttgttcgtaaagaagaagacgaaacattaaggatgtgtattgactaccgagagttgaacaagttgacagtgaagaataagtatcatttaccaaggatagatgacctatttgatcaattacagggaaagactgtctcctctaagatcaatcttcgatctggttatcaccagttgaggatttaggaggaggatattcccgagacaactttttcgtacccagtatgggcattatgaaatcctggtgatgtccttcagattaagtaattctccagtggcatttatggacctaatgaaccaagtattcaaagactttttagatgaatttgtaattgtcttcattgatgacattctaatcttctacgattcagaagaggcacatgagaaacatctttaaatggtgttgcaacgtcttcgagagcataagctttatgccaaattcaagaaatgtgaattttggttgccctaagtaagcttcttaggccatgttgtaaa

SEQ ID NO: 397318 - DNA, 1463 bp, Cannabis indica
ccgaaagtgacattcttatttctccccaccatactaggcaacccaagataaaaactatgatcatccgccgccctcatatgaagaggagacaaaatagaatcacgagtccccgcatcggtattagaactgaagaaaatagaagacttagtaaggttcaccttctggcccgacaccctctcaaaagtattaagaaactccaggacccgttgagcctcttctctgtttgccttacaatagagaaagctgtcatcaacgaacaatatatgggaaacacaaggagccccctagccacccgacaaccatgaagccacttcctctcctcatacaaccaaataagagcagacaaacgttctgcatagatgataaatagatacggcgacatcggatctccctaacggattccccgagatgggacaataggacccaaactttctccaccatgaacaatattatacgaaattgttcgaagacattccatgatcatgtcaacccaagcctccgtaaagcccatccgtaataaaataggttgtaagaaagaccattccatcctatcatatgccttactcatatcaagttttagagccatacaaccattcttcccctgttgcttacgtctaagataatgtaatatctcaaatgaaataagaacattgtcagtagtgagcctaccaggaataaaagcactctgaaacttcgagatgaccttcaataataggcttttgagccgattagccatgactttcgaaatgattttatacgatacattacaaagagcaataggccttagatcacccataacaaaaggagacttcttcttcagaatgagaacgagattagtagcattttgaccccgaggcatggacttagatcggaagaaatcctgaaccatcttaaaaacatctttacccacaatatgccaacacttctggtagaaagcaggcgtcaatccatcaggcccaggtgacttgtctgggtgcatttggaagacagcatgccttacctcctcctccaaaactggctgtaaaagagtaacattattctcagatgttatggatggttgtataacatcaagaacttcagcacaatttgaccccatagaatgaaaatatcacgtaatagtctaccataacttgagacagacccaacccccactgaacccaagaaccggtctcatcttttaattcatgaatgaaattatttttccttcttgagctagcagcaacatgaaagtaaatcattaccaaggctctgaggccagttgttggggattgttttactagaatttagatttactaccaagtatattgtttaacatcctaaatatgaatttctaaaacaatggaatttaaacacatataaagttcaagaaaccttacattggttgtagcggaatgatctctaacccttgtatcctttctgtagcagagtatcaccaggatctgagcccgattctcctttagttg

SEQ ID NO: 397319 - DNA, 997 bp, Cannabis indica
caaattttagaacaataaatagtgagaagatgtgaatgtaagaatattggtagagactacatagtcaagataaatcaaataagagagtgactatgtcaaacagaatgagaagaaaatccagaaaattttctatgatttacggatttcgaaaaatcatcaaaaattatttttaatgtttttttaactgcataattatcattaaattaataataattattaaacgaagtcaaaaaactatttaaaaatcataaaaaaattaaaattaaattctaagcatgctggaaaaacgaaaccccgaaaaatattcggtgtggccccacgtgcccccacacccctcctatgagagtgggcgttcacggctgagttcatgttcaacctaccagccaatgctccagtgggtcgcgtgacacgattgtgcgtaggcgggtcgaagatgtttcctagccaaaagacacgatgaaaacaacgggaaagtaggggctttgtccagaatttaatttctaatcagtctataggatcaatttcagttataaatggcgtaaaaaggatagatcggattgtgttcaatctgaaaactaagaacaaacaaaagaacccgatttcactatttatgtcatccaattcgaaaataaatgatgtaaaactattgtggattattcattgataaggtttgcacaatcaattttattcagtagtcaatagaatcaaaaaacccaaatttaatttcataaagaaatacataaacactaaaagtttaatcttaaaattctcctaatttattcaacaattttagtcatttaagatatcagtataaagagattttcatgatgaataaaatccctaaagttttaagattaaacagcacaaaatttaacgaaaaaaaataacgaaactaatatgtaattgtaaaaaattaacatatacatattaattgttatataaattataggttctaaatcatatacaattggcaatctgataccacatgttagataaa

SEQ ID NO: 397320 - DNA, 569 bp, Cannabis indica
agtacttgataattttatctgaaactttgggcatggttcgctcagaaggccattcacttaagagcaaatgttcttttattttgtacttgaaatggtcatccgatctggtatttttatttgtagtattttcttaagtgttcctcgttcaaataccttggtagtaaaacgagttgcatcttttcgtcatacttccccaatttgtatgcccctgattctagaacttcgaccacttgatatggtccttcccaatttggtccaagcacaccagccgtactgtctttcgtgttcaaaaatactcttcttaggaccatatctcccacaaaaaatttccgtgctctcatttgtttgttaaaataccgagctacattttgctgatgggctatcagctttaggtttgctgcggtttgtttctcttcaagttcatcaagtgattcttcaagaagtacatgatttacttcttggttgtacgctaatcttctgtgggtttgcggttagagttgtacaggcagcatagcttcatatccatatgtcatggaaaatggagtttgtccggtcgttgttttctcaat

SEQ ID NO: 397321 - DNA, 1086 bp, Cannabis indica
ccagaaccttaataagacaatattaaacaacttctcatttaatatatgataaatatttcagataatcaaactcaaaaacctcaaagatcagtgccattaaagaaatccatgagagaaaggacataagaaaataatggaatgatagacaataatccaatcaacttttatcatgccatgaaggttccaactctcaaaaccggattgatatcataaataaggaatacaaattgatgtgagacaataattttatggtatttttcctattgctatatggtgtaaaaccaattggttataaatgaatatttataatcaagagggatacaaattgcaatgtggagaagatgcacattatgtcttgtacgtaaagaattactcataaagtatatattcattttaaatagaatttcttttgttttaattgaaatactatttcaggacaatcatggcactgactgcttattatagttttgaattatatcaaatagattattaaagtgtcatttctcaatgataataatgatgacaaaagttatatagttcgacaagaaaattttgtatccaaagatctaaagaatataatttgaaaattaggaaaattcatgtataaactcaagtaagcttcttgtcaatgattacacaattttcattaaatattctcatttggttttttgatataaaagcttttgatgattgtgtatatatctgtaaagattgcttaagatcaaaattttggatcattaaataattagggttaattgcaatattgagttattaattatgatttacatgcttgtggatagttatttagttcaaaatgtattaattatgctatatgtggaattctcgttttctgtgaatgggttcggtggtagtggaaagcgacgttgggccagtagagagtcacgtttcgtgtagtataaaattattttaatagcggggtattattgttggaataattacataaggcactattttttgtaaaatatttgcatttttacgtccaaagaatgttttttttttttttttacatttttacgtttttccaaaaaataacacaaaacaacataaaatcaacaagaaaacaac

SEQ ID NO: 397322 - DNA, 1551 bp, Cannabis indica
agtcatcaatgaaatccctataaactttgggatctgattacagggatatgacatacacacgatcccacgatcagtgtattctgcatcaatcccatgatctttgtactcagcattaatcccacgatctttctgtttatacacattgtaacgagaggggaaacacttcctctccaagttcatagacctataaatagtgatgcatgttcactgggcaaaaggtcgcaaacagtttagtcgagactataccctaaaaatattatttaagaattacatattcagagatactgttgtaagagttataagaaaaggaacctttctccttgctcttaagtcaatacaaataacgaggattaggctattaccgaactgctcggcgctgaacctctataaaattcttgtgtctttatattgctttactatatatcgattgctataagtcacttatcgcttactaaattagactcgttgtggttggctaaaagcgaggtcaacattttggtgctttcattgagagcaaaatcaagaatcgctttttattcaacatctaaccacaaatacgatggtgcagactcgtagaggcctgactgatccagcaaattcacagacggtggatcttgcattgcagacacaagggttccgccagctgttaatcctagacagccaacaaaggtggggaatggtgtaacaactcctatagatgaaatcgcacttggtgtgcaagagaatgggaataacagttccgcacccaaccagggcattcataacataactgttccgcctggaaccaacacccagacaaccatcggaggtgctactgagttacaaaatctccgtgacgctcttggactcacgcagggtcataacaataccctacatcatgatcaggacgaactccgcactacggtaaatctcgtgttcgaagaaaggcgtatgtttaccgagtggagagatagagagatggaggcgttaagggctcaccatccagagattgaaaatcgtagtcagcaacctacagtgctgatacggaaagcctaccaaactgtaggtcagtaacctccaaatgtcattcccctgggtgagacggacgaagatccagcgatgaatacttcccagactacaaatggtcagccgcccaatccccggtcacaagttccagtcgtgggcctagcggtaagcgggcagaccatgtctagtaattcatcaggcgaagtcatacccgatggttccaaccagatcaatggtgccattccacccgtcaaccaagcaaatcaatcgctgaggcaaccaggcgcttctgtattcgaaaggttgggggcgacccatgacctaaggaatgatctgaacagaagaggggagtagacgatcagaatgtcacgacaatcgtgcagcccggaacccgcactcaaattcccgctcagaaagatgctgacgtaattcaaattgatcagaatgtcgagcagattagcgtagccgtacaggcacagctagacgtactgaaaaatatgtttcacggcatggctggacaaagaaacaatgatcttgagctggacc

SEQ ID NO: 397323 - DNA, 1749 bp, Cannabis indica
tcagtagtcctatgcaaccataagacctctgggagtaatttaggctagttgccttttgcttctttgaggaatttctacagagtttccttgagggtttttttgagagcttccactagcccatttgcataagctagagcgaatggagtttgcccagtggccaccttctcggcagtcctatactaccataagacctctaggagcaatttaggctagttgtcttttgcttcctcgaggaattttttcaaaatgtccttgagggttttgttgacaacttctacctactcatttgcttaaggatgggccaaggcaaagaagcttttgatggtgtcatgtctatttcagaaataagtgaacgtgtcaatgacaaactgcttgccgttgtttgacacaatcttttgcggaagcctgaattggcatatgatgttctagacaacaaagtcaaggacctttttggaggtgattgttgctagggttcagcttctttccatttggtgaagtaatctactgcgacgacaacaaaatgtacccctccttttccctttgcaacctgaccaattaggtttatcccccacactaccaaggtctaaaaagactacatcatcgtgagctcattcggtggagctcttggtatctttgaaaatctctggcacttgtcacaatttcttacatagtctatcgagtctttgatcattgttggccaaaagtaccccttttagtgtatctttttggataggctttacccggaagcatgattgttgtagaagccttcatgcacttctatcattagtctttcatcttcggctttggggacacacctcaagagaggcatggaaatactttttctgtacattatcctgtctaggatcaagtacttagctgcttttcttcttagtttgcctgcttcattttcatcttcttgcaaggctccagtctggaggtaagctgcaataggcatcatccatgttggggtgtcatccaatatgttgacttcttctgggataacaatgcttagttattctaggatttgtataggcaccaagtttgctttgtcagtaatggtgctgcttgccagacatgcaagtgcatttgttgtggcattttgttctctggggatcttcgtaatcatgcagcctttgagttgacttagcacgtctttgattttgctcaagtaggccaccatttttttcaccttgagttgtgtattaaccgaggacttaatttacaactaatttagaattattgaatatgtccaagtggtcagcccgtactttatgtgccagcttgaggacgactatcaaggcttcatactcagcctcagtgtttgaggctttgaagctgaatttgattgctttatgcagttgctgcccccccaagtgttgtaagggcaatgcctgcaccagacaattggtcagtacagcttccttcaacatggagtttccatcttagttcttcaggattttgttgttgctcttactctcgcttcttctttagctctttcatttttcctaagtctgaagggatctcaagagtatagttggtgcactcagccccaaagactgtaagggcttgaccctttatggctattcttggttggtatgtgttctcgaataggccaagctcaatggcccatttgcgtagttggcctgatgcttgaagtttcgcaaaacctactgtagtggttgatcaatgtacacctttatggggtgtgcttggaagtagggcctcagctttttggaagccaatggcaag

SEQ ID NO: 397324 - DNA, 714 bp, Cannabis indica
caaagtttccaacataccttgctattcttgcactcccaaagagcatgaaagattgtttcagcattatggaacgaacacctcgaacacccatcagtattagaaacatgacgtttagccaacaccgtagaagtaggaagccaaccatgagccaatttccacacaaacaccttgatttttgggggaattgttaaacgccacaattttcgccaccattggacagcaagatggtcattcgattgttgtctttctgccttcaattcacatgccatacgatagccgctcttaaccgaatactcaccatttttactatagtgccaaaggattttgtcatcaaggtcccaccccgagtttggaagtgcaagaatcatctcggcatcatctttattaaacaccgcagtaataaaaggttcatcccaagtaccatctcccaatttcaaatcaactacccgaaggtgttccggcaaaggcggcttatcatatatcttaaaggtaaccggcctaggtaaccatggatcctctaaaactcttatgttactcccatctccaacccgccatcggtaccccttcaaaattagtttcttaccccacatcaaacttcgccataaaaaagatgcatgagtaccacattttgcctccaagaccgaattagtaggaaaataggaggccttcagaacacggttacaaagagcattaggataccttatacaacgccaa

SEQ ID NO: 397325 - DNA, 562 bp, Cannabis indica
agtgagaatggacttgtgagctaactaatgatgagaaactctgctttctttggcttgctgaatcctaagtttaccatatttcttttgcatgaaaacttagatacaaatttattcttcaatttattatttgttgaagattgcttatgttgctatttcatttgattttaaactattacttgaagtttttttgattgggttttgagtttagtatattgcaaattaatggtgatttaattggcagggtacttttgatttgcttgtaaaatcataaacaagaattctgtatttgcttttatttcagtaatttgggtattcctccaattccaaactctagtattcagttttgatttggaaattgattttactaattttgaattgttttaatatttttttccttttaatttctgtagctatatatagctcgttttcttaggtaagttattatctcattaatgcttatggtgctatactcgatctctttacagtggttggtttagggttgattcttagggagtaattttctaactccataatgatccctttcattcatatgaaatataat

SEQ ID NO: 397326 - DNA, 574 bp, Cannabis indica
aataggaatgtccacaatcagtctacttttatttgttattgttttttttttattatttatttattttaaggtgtttattttatttggcatgtttatttaatgaacttttattatttaagtatttatattttgaacttgttatgtttttttttgttaattaatgaagtcatggacatttgtcatcctatacatgattctacaaataatggtgaggatatgtgtttggtggatagcgcaattactcatacaatacttaaaagtgataaatatttttcaaatttattaataatgaaggcaaatgttaatataatatcaagcattgcaaatttaattgaaggctctagaagagccattatattgatgcctagaggtacaaaaattattataaatgatgtcttattatccaccaaatcaaaaaggaatttgttgagtttcaaagatatatgtcgtaatggatatcatattgagacaatagacaaaaataattttgagcatctttgcattacgtctattgttacaagaaaaaagtgcatattagaaaaaattacctagtttgtcttcaagtttgtacgtt

SEQ ID NO: 397327 - DNA, 299 bp, Cannabis indica
atcatactaggagcattggatttacaaaggatgccagcgagcatctttctcaaccatgaaaaatttataatctttgaagcggagtttagtagacatcctagagacacccttgttgggttttatgccctaaataaaactcattacaatctgattagttatcaatttagaagtgaagcatgtttacatgtatgttacatgtttatggtttaatacatatatttgatatatgcacaaaaacttggttaaagatattgtaaacttaccgttgtatctttccaagtcaatgtcagaagttgatc

SEQ ID NO: 397328 - DNA, 506 bp, Cannabis indica
aaaacctttctagaaagcagggagtaggaggattgctatagggtgtccaatcctgcacaacataacacatagaagtggtatcctaacaacacctctaaggatccttaccaagaaagaagctgaatagctattagcagaagtgcacaaaggctctacggcagttacgatgtggggcaaagccaatcaagtgtagactggatcaaactacagcattgacctggcctgtagaaggctggccgatcatgacctcagcaggctggacgaccatagaatctacaatttggccgaccactaccttcacatgttggccatccataacgtcattcaaccagctaggcaatgctcccataatgtggctagcaacctagtcttgccttggccagcctgatccaccatcagtctgctctcatagttgtggtctacattgaccaagaggtaaacaacatcttgttagcaggatcccttgacaaaagggaaagaaaaagagaccaagccaactcaaagca

SEQ ID NO: 397329 - DNA, 1777 bp, Cannabis indica
cactcaccataattggaaggaagtggtcatgacgtttaagaggggcggccaaaccgtggagttgcgtggtaatccagccctccacaagacttgagtttcactaaagaccatgatcaagataattaaggaagaacatgaaggtttatgggtggagcttggtcacaccaccaccgtgggggctgtggaggacattccagcggttgtttctgagttgttgcagcgattttcgggtgtttttgacatgccaaacaaactgccacctccccgacaccgagaccatgctatttgccttcgccccagagtagccccgataagtatacgaccctatggttaccctcatgtgcagaaggatgagattgagaaattggtgtttgagatgtttcaagggggaatatgccagcctagtacgagcccgttctcgagccccgtattacttgtgaagaagaaggatgggagttggcatttttgtgtggattactgggctcttaacaaagaaactattgctgataagtttccgataccagtcattaatgagattcttgatgagttatatggagccaaggtcttttcgaagctggatttgaagtccgggtaccatcaaattcggatgcgaccggaggatgtgcctaagaccgcttttcggactcacgagggacactatgagttcttggttatgccgtttggactcaccaacgcgccaacaacatttcaggccaacatgaattaaatttttaattaaaccatatcttcgtcgggttgtgcttgttttcttcgacgatatactggtttatagcccgaccatggaggcacatctctcacatttacaggtagtcctggataccttggctaaatacccgttttatgctaacaagaagaaatgttgttttgcccaacagcaattggaatacttgggccacattatctctgcttctggggtctcggtggactccaacaaggtccaagcaatgttggattggccactgcccacaaatttgaaaagtcttcgtgggttcttgggtcttactgggtattatcgagggtttgtcaagggatatgggtccattgcaaggcctctcacggagcaattgaagaaagatcgattttgttggaatgaggaagctacagccgcttttgaagctctcaaacacgccatggtcactgtttcggttttagctcttctggacttctctaagcaatttgtgattgaagcggatgccttgggatatgctttaggagctgttctcatgcaagaaggccgaccccttgcgtatttgagccaagtcttgaagccacgggctcaactcaagtccatttacgagaaggagctcatggctatagtgttggctattctcaaatggcggccatacttattgggtcagacatttttggtgagaaccgaccaacaaagcttgaaattccttttggaacaacgtttggtgtctccggaacaccaaaagtggttggtgaagttactgggatttgattttgagatacaataccgaccgggcactgctaacaaggctactgatgctttgtcgagagttcttcccgcaacttgtgccgtgcgtactacatcttcttggattgattgggatgtggtccaccaagaagtgctagccgatcccttgttggctaaaatttgtgctgttttggagcaacacaaggaggttcccgggttctcccttgaccatggacagctgaggtacaagagcagagttgtgcttgctgccacttcttctcttttaccccagtttttgaaggaatatcatgagactcc

SEQ ID NO: 397330 - DNA, 671 bp, Cannabis indica
aaattaaagttgctagcaaacatagaactaaaacacataattcatgcatcaaaatccaacattaaaccccatatttcagattgcacatcaagcataaaatcaagctctaaactaacaaagttcaagctcatgaacttgagcttcaaactaaccaaactcagttatttttccagcaacacaacaccaaatagaacataaattccaacctagagaataccttaaaatctcatccaaaactcaacaatataacccacaacaatatcttgcaattaacacacaaacttatgaagatcaacaccaatttctttttacatgcaagtaagatcatcataacccaaaacatgcttttaccacaattagtaatcagcaagaattccgaataaaattagttagaaagagctacctcaattcaattcaaagccaagctcaatcaatccccaaataccaagctccacacaaagcaattttcaccaaatcaaatttaaaattcaaagagggtttgagagagagaggggttcgggtttgaggggaagcaaaaccagaaaattctatctcatttactcaaaattcaatcttttatcaattatcaattaaaggtcaaaatgaccaatttgcccttagggcaaagaaagtatactcacacacattcaagggtaaaaatgtcatttcat

SEQ ID NO: 397331 - DNA, 712 bp, Cannabis indica
gagttgaaatgagttataggtaaaataatttttgggtcttactataaaataaatgtagtttttaaaatattgaaaaaatatgtacagtttttgaaagggtatttttttttggacccctaaaaatgagtggacttttggcgcgggcctagcccgcctatgcctgaagccggccactacctgcaatgcacttttataagtaattattgataaaaaagtgagttttatatattcaactttaaattagattattatgtagaactcgatattaagtcgtacttatagatagaataaaaaaattattcttaggataaaagttaataaaattgagggtcttgtacaaaagtttaaagttaagtcctttatatatactcaaataataaatcgtgtatattaaaactacaattatattaccagttttttttttttgttttttttttttttttttttctaaagatacatttctaaactttcagctataagctttttatttatatacatataaaaaaaaatagggcactttttaaaaaaaaaattaaatcttaaaaaaatggaagctttgtgcaatggtctaaactgcccaatgccgaccttgaataaatacttaccttttagtaattcttttgaaataagtaaatttgaaatataatgtgaattcattaaaatttataaaattatttaataacaaaaaaaaatactattttgttataaatat

SEQ ID NO: 397332 - DNA, 1136 bp, Cannabis indica
aagggtactaggcaccattcttaaaaatgctaaaaatttccacatcgttcaaaaatataatattttattttatctctcttccacatcatttttgacactcttacttctaaaaatactccaatgacatagcactcttcaaaaataatataattataatctcttgcattattatttaatatacatcttaatttttagtaacaataactttttaactttacatttttattaaaaagaaatgaatagcattgtatagtatctatgcaaatttctaaaataatatctatctctctttaatggtataacatctcaatattttatcacttaatatgttcatttcaacaaatattctctaaatttttattattggagatgctcttagcattgaaaattactaaaagatattattggtgtttaacactctcctcgatattatactgctattaatataattaagtatcgtccaatataactaaaataaataagagaaatgctaaagggcaccactggtgcctagcaccctcctacgtgtcaatatcgctattggtgtaattaagtatcgggtcccatatagtttaatataataatttttataaagtatcgctagccaattgcaagtcgacacatttagaaggtgctatacaccactgatgccgaatagcaatgctcaataaataacttttagagatatgactaattaattatgggatgctaatcatcttttaacatttctcttatattaagaataatgatgacggagaatgaataggtaggggatgcgtaagggatttaaaaatattagttggaaagtttaatgagtacttactcttattatagattggggtttgccctagatagcaaaaagattattgggttgtgtgccttaattaattaagggattggatacatcctatgtgctcttaatttgataaaaactttggttaagaaactaacaaatgtactacatgtacaaataataataataaaaaaaaaacaggcgtacttatgtacctcctatttcattaattgaccctaataaaataccccatttcaaaatttataccctccactaatttatacaattaattccattatttttcaaaactcccaaaatacccttttattttaattttccctcc

SEQ ID NO: 397333 - DNA, 928 bp, Cannabis indica
aaaaaaataaaaaatattatatgaagtaattctccaaaatatgaatgtaaatatctttatcaaacccttttatttttatttttatctcttatctctaattatgactatctaatcaaaattgttagtttaacaagttttttttttattattattttgttagagttaattgttaaaattaatattgtaaaaaaatattaaattttgaatttttgatatattttaaatttaattcttttaaaattttgatagaattttaatttaaaattttaaaaatataactaaattaaaatttaaatatgataaaattgtaaatttaaaattatattaaattttagggccaagatgcaaatgaccctaaatctaacaattaaattaataatgtccttttttataaaaaaattaacaaaatgtccattcagttaaaaatttgatgatgaaattacaattataaccttgaataattaagtgtttggtatagttattttgcacaatagtatatcgtttttatgtacaatagtatatcaaaaaaactgaaagataatatattagtttaagattatggtatattattttaatgtgctatggtatataatgaaccaaagacgaaaattaaaaaatgtggaatattaatttgagtttgaggtatagttatgtttcactagaaaatattgtatttaaaattttggtatatataatattttttaatttattatattaagttttcattatagtaattcttgttatgattgtagtatatattttgtgtatgctattatataacttggggaaaaaatttcatttaatagtatattagtttaagtttgtggtatattcatattggtcttaggtatatcgtttgtaagtgatatatgatatatcgtgaaggaaagaaagaaaaaaaaattaaatattagtttaaatttgacgt

SEQ ID NO: 397334 - DNA, 935 bp, Cannabis indica
tcttcaatctcagaggtgatcgagtgcgatcgcagagacaaatcatcaaaactaaaggttagtttcgaattcatttgcatttttggtttctattcaaaaggaaaaactgctttttctgggtttttgtattttgaggaggggtttgagaatgcatgcttgtaggaaatgtatatagggctatgtttttctgtgtaggaaatgtatataggactgggtaatcccagaaaaatagacctgaaatttgcataaccgtgaactttaggaagaatgtttgaataatcgcatctttatcttttgaatacacgcgggtattcggatgaacacctcgaatactcgcatgtctgcttaccctaggtttcacagagactttatcacttctaatcgttgctttaaaaccttaggattttatactctgtatattttgttgcgagaacattggttaagtctttcaaatggtgggcgtgtcgcagtattccaatgctcatacgtgcgatcgtatgttccttgaggtactgcgatacgcccagccatttgtggcatacgccagtgttccaatataagcgtattctttggctggcagatttgctcgaaacggtgggagtatcccagtaacttcagggtcatgctcgggaacgcatgccccttgagtcactgaaattctccctgccgttttttgaggtacatcgccagctggagattagtgacatattcgcaggttgtgattaattaggttcctcaaaacggtaggtgtttcccagtcatttcagggtcatactcgaaaatgcatgtcgcttaggttactgggaaacacccaaccatttttttgagatatccttctactcgcacacctgtcatttcgcgccttggtgggctgattggtttttgcaagaattcaaatcatccccctaagaagattttatattttatatgcgggt

SEQ ID NO: 397335 - DNA, 408 bp, Cannabis indica
taaataaataaataaaagaggaatgaatcttgttgagttgttgaatgaatgtacattgtatgtttgctattattaattctctcttcttttttttatgaattaacgtaaacttggtaaatttcctagaaatttgattgagctgtggaattcataatcctattttatttaaatatttaaattttgaactattgaagtaataatttaaataaaattaatatttataagtatatttagtttttttttttaaaaaaaaaattattttatgttttttttttctaaaaaaaacaaaattttattttatgtggtttttttaagtttagtgacaagtagttaaaataaaactttgatgttaatgaaaaaaaatttcatattaccgtaaagttgaataaaatatttgtttataaatat

SEQ ID NO: 397336 - DNA, 638 bp, Cannabis indica
ttccatgcttctctgaaatcaaggaagattcaaaataagatcttctcgattgaagatgagcatggaacttggtttgattctcccgatggtgttcaaaatgcgtttctgaactactatgaaaagctgctggggactaatatgcagaatagaaggagtgtcatgcaatctttggttaatctaggccccaagatcacggatatgcataaagctattttacgggcagactatacgaatcaagaagtgaaagatgcattgttttcaattcctggtatcaaggctccgggaccagacggatttggaagtgccttttatcaagagaactgggacatagtgggaactgaatttacagaagctatcttttcctttctcactactgggaagatctcgaaagagattaacaccaccaccattactctaattcccaaaattgcttgtccaaagaatgtggcagatttcagaccaatctcttattgcaacgtgctctacaagacagctaccaagattatctgcaatagattgaggaaggtgttgccagatcttattgctgaaaatctagggtgctttgtccatggaaggtatattgcccataatattctggtgtgtcaagatatggtgaggctatatgggaggaaaaattg

SEQ ID NO: 397337 - DNA, 761 bp, Cannabis indica
taagtaatgaaataaatatgttttctatattgaaaaatgaatattcaagattatattaaaatatagttttgtttaaggcacaaaacccaacaaactcccacttgcactaatataaaacaatccgtacatttcaattaatccttaatttgttctgtgtttttcaaatgcagttacagtcaaaattttagtgaatggatcagctaagttgtcttcattatcaattttctctaccagtacgtcccgtcttgcaacatattccctgatgatgtggtacttcctctcaatgtatttgcttctcttgtggctttgaggctattaattattggctattgcaccagtgttgtcacaaagtaaattagtggtttttcccttcaacaccaagttttgtgaagaacttttttagccagaccagttccttagcagcctcagtggtagctatgtattcgacctccatggtagagtctaatattgtggtttgcttagcacttctccaaacaactgctccacccccaagagtaaatagcaccccagatgtagaattccagtcatcaagacaagcctataaattttagtcggtatagcctatgggatttaaagtaccacccttgtagactaacacataatgtcttgtacttttcaaatattttagaatatgcttaagtactgcagtccaatgttcctctttaggatttttctgacacctgctcactattcctactgcatagcaaatgtctggcctagtgcactgttgggttttatgc

SEQ ID NO: 397338 - DNA, 635 bp, Cannabis indica
agcaaaaacaaacaaaaaaatctttgaaaaaggtcccatctgtacaattagaggtctaacctatgagtccatgtccatttgtacaattagagatctaatatagctactagtctttcattgtcctattatagatagtctcttctttctcagcagcatcatgctcctccaactccggaaaaagatctgtgtcatactgcaacaataatcaagcactcaaattggacatctaaaatgtgtttatttagtaagtagcaaattttgcaaaataataaatatgacaatccacaaagtaatctggcaacagagttaaagtacatcaacaaagttaaagtaatctcacaatccacaaattttgtatttctataaataaaataaataaaaattattaatcctaccctattataattaaataaattactaccatcagattataaatcaaaggttgtaaaaatgctctcacatatttattttatttatagaaatacatatataaaaaatataaccaaccctcccatgtacaaagttttttatttttttgaataaaatttagcaactttattaactagcaatcgttaataacaatagaacgcacgttgaaacaatcctccacctgaagcacacgacttggagagaca

SEQ ID NO: 397339 - DNA, 1821 bp, Cannabis indica
aaaaaaatgtagtttaaaatagttgatggtttagaaatgtggctatcaagaaagcgtctacttccgttcccataaaagggctcctaaaaccgtggctcgaaaatcagtgagacccatccgattgccaaaattatccaattcaaagtcttcatcttcaaatggatcttcttctcttggcactgaatctcctcctcctaaactggtgttgcttctgcagcatcaactccgaagggcccttcctctcggacccatgcccaacaagattcgcttgaaaagaaacttcgcaccaaaaggcgtcatgacagatctattcctactgctaaaaagcttaagatgaatcctccctcggcctccacaagttctggtgatgaagaagaacccatggaagggtcttttaacaactccgagtcgaaaactgagtctttttcttctgaaaaagtacttccagaagatgttgatgtctctactgacagtgaggaaactgatccagagcctgagccacccttgccaaaatttgcagcaaccccttctcgttctgcttctgtagccaaagcctctgcagctaccaagggtaaacatcccatgaagagctccattcctggtaatatctctccctctcaagctgtaaattctaaattttattatcatgataaccagcgtgattggaacctatatgctacccataagtttgagagtgaaagaaattatgatttgcatgctcatcgtgtctatggtattgtaaagtttggtctcttactggttttgaagggtatattgatagaattgtcaaataattttatgctaatttatctgatgatattcttgatgagaaatctgaattttttggtaaagtttatgttcgaggacattggttttccttcactgaaaatgacattaccgaagtcttacaactacccaaaggtgtagcaaatgctatatgactatggatcgttacctcatgattattgatctcactggtgcacgagttgaatagcaacctggccaaagtcttcgcatcactcatctcacttatggccatgcttcactcatgcggtttgttaattggcttccaaactctaacaaaattgtggtgtctcaagacttggctcattttctctttcgcatcaccttaggggcatcaatcaatttgggttcttatatcttggaccaaattgtttcatttcaaagaggtaaaacatgtactcataagcttgttttttccaatttaatctataagattctttcatctcagaaggatgtgtttattcccatgagacactcgagcctcccctcactagcaccatttttcaaccctcagagtactttgatggagcctttcccaagcatcctaagtttttcggttgagttccagttctgctcatgcagatgtgcaggaagtcaagcaggaggtcaacttgatgaacaatcttctagtttccatgaaggaggttcagcaagagatgtccaaacaaatgtccactctaatcaagctttacggggcataagtttttctttatttttgactttttgatggatatattttaatttctacttgtctttagcccttagataggagtaatagtctttattttcttgctttgttttctcaactctggatcctttttccagggggagttgagattggtacctgtgttaaaccttggattaaagttagcattatattttggtttgaagttgtgcttctcaggggtagttttgtttggtatgtgtaacaccctaactagcatatgcgtattacatgatttttaaacgtactgtgcagctcgttgctaatcaacgaggtttatggaaatcgtgatt

SEQ ID NO: 397340 - DNA, 569 bp, Cannabis indica
aattatgaaaaatacttaggttattcagaaaattttaagtttattttatatgatgggctatgatatataaactgttataaattaatagattgaattttcaggcgattatgtatttttcatgaattattgatgttatttcttattttcattataaaaaatactaaggttgcttagaaaattcaaagaaaattatttgtggcttagtacagaatataaactgtgttagaagagttagattcggtttttaatcaattttggtatttttcatgaatttacttagttaatgcttaaattaattatgaaaaatagttaagtgttgtaaaaatagtaaaaagtatttttgtaataccatttactgtctatgttataaaatggaataggttttataatttattagttgttgtaggtatttattttaattatttgtgattaattaactatttatttgggttttaattagaataaatagtactttagtaaaattttacgtgaaaaggtattgtatgaattcatattttacgtttaaaatgtttatttgagtgcatgcaatatgtttgtgtgaatcaaaa

SEQ ID NO: 397341 - DNA, 849 bp, Cannabis indica
aattaatacatgcatgcatgtgctttatctataattaagcaaaatttgattgataatttatacgaaaaattcaaaaaaaaaaaaaaaaaaaaaatcttatatatatattttgaaaatttgacaaaaaaaggatcaaactacaattttttttttttggatctcaatgtgcattatccaaaaataatatgtacatcaattattattggttgtaaaataattaataaatctgttcgtgtggggttcaagttatattggattcacttaccaaataatagatacatacagatattcagagagaaatttgcaaaaaataaaaagtttgtacgagctatatatatagctatatagttatatatactactgaatataattattatttcattgaagaagctaataattacgacaccaacaaccctagttttaaatatttgtaactatagtagtggtaatatttattatgtcatgggtcacggaaacatacacaccaatttatatcatatcatataaatacacacatatatatctattctatataaagtgtgcctatataactgaaattcttgatttttgagaaatttatgggtgacttttaatttttatttaataaaataataaaatattatttatatataataaaataataataaaacaaatcccattaatatttgaactgatatttgggtgacttttaatttttatttaataaaataataaaatattatttatatataataaaataataataaaacaaattccattaatatttgaactgatatttgatgctaaatattcgagaatcacaacacatttaaaaaaaaaaacaaacccgagatttgatactctgagact

SEQ ID NO: 397342 - DNA, 1319 bp, Cannabis indica
gttttatttatctgattattaaagggtatacaatcgtgatgatacaataagtatttatagagttagaggtgacacttagctatataactctagttttattgggcttgctcatcaaatgcaattagttaattggaaaatctcacatttttgcttcaactagactatacacatgcacatagatcttaagcacattaactattaatcttagcacaacaaaaaattatccaatcaacctatagttttaataaaattaataaaagttaatataagctcaaataaaaaatgtaacactgtgtggttcccaaaatttttgaaaagaccaaaaaagtggagaaaaaatatgcaccatgtgatctccttttgttaataataataaagtaaaagagaataaactacaagtcaagctagtaatattccatttttaagcatcttttgtacaaaaattgaaaggaaatataaattaaaaggggtaagataaaacttagagggctcatttggtatgttatattgtattatattgtattgtgttgaattatattgtattgtattagtattatttaagaaaatagtatgtctggtgttgacttgtattaataggttgtgtaaagttataatatattttcaataaactcgaccctaacaccgactttggatcgggtccgggtccagtgtgggtccaaagtttgggttcgggtctggatttagatctgggttggggtcgggtcttggttcgagccttcgtctcagtcccggtcccggtctcagtcccggtcttgagtttgggtcccgagtctgggtctgggtttgggtttagatacgtatccctagatccagttcagagattggagttgactaggactgagcataggcctgtttggttggtttttttctatctaaaaatctagaattcaattcagtctggattggtgcaatccgaaaattgaccgaccaatctagaacctatcttaaaactgaccattttgaacctcggtttggtcggtttcaatcgcccgaatcgaacttctttttttcttaaaatatgatccaatttattctataaccacattattcaaaattctaccaactacagtcatacaaattaattgttcaaaaattaaatgtcttattctttttactttaatattaacaaaataataatatattattattatattacagtagaacctctatccaagaatacacttgggaccaagtaaattatattctaattgggaggttataactaaatagagttacactaaaaaaaaattaaaactaaaaaaatatcaatgtaacaataataacaataaataaatcat

SEQ ID NO: 397343 - DNA, 859 bp, Cannabis indica
tttttatttttttttatttacatctatatgggatttttatgctatatttttgtaaaaaaaagaatagaaatcccgtatttttaaaataataataagtttcactggaaaattcacgggcaccgaaaaaatcattggaaagttagtgtcaccgttgctggaaaagtcactgttgccgaaaaaagtcactagaaaagttatcagaagtagatgtctcaaattaatataaacaaaaatggaactggttctatacataatgaataaaaataaataacacaaaataactcaaaccagttataattaaaatagaaccggttctataacagtgttataataaataaaaacaaataacacgaaataattcaaaccggttataactaaaatagaaccggttatataacataatgaatgaatatttttgagataaatatggtatgtgtgtaattatttagtgggtcggagcatgttaaatgaatatttttgtttgagttgttttatttaactggtttttgtgtgtgatttttttatcttatttactttacggaaccagtttttttctctcaaatttttaactagttgataaatataaccggtttctttgtattatatttgagttgttgtgtgttattctttgtgtttattattttactatggaaccaattttttttttcatatatatgcctcaatatttttttagtattgattcctattttttacaaaaaattataattgggtttatgaggtattttgttgtggaactaattctgttttttttttttaatttatgtttcagtattttaagaactgattttctctttgttttttaattgtaatcggtttgagttattgcgtgttacttgtt

SEQ ID NO: 397344 - DNA, 722 bp, Cannabis indica
ctcaccaaaaattatgaaagagattaaacatcggaccaaacatcgtaccctacatcaggccaatatccagccacaataaaatattaaaattcaaattaccattgggccctatgtcgggcctatcagacccaaacctaaaattatgaaagagaaaacacattggacctaaatatcataccctatcgggcccacatcaggccataacaaaaaactaaaattcgaaataataatcaggcaccatcgtaccctatatcaggccaagttaaaacttttggaagttggtcagacaattagactgaccatcgggccctatattgggcctttgtcttcaaccctagaactaactttgcatcacgatacatcgggcctgcctaaaaatgcattttctctcccgaaaattacagatgcaatatctaaccctagatctaatctaaaacacacataccaaaccctaaatctatcaataaacaacatttattccctaatcaataagaaaaacattcaaaaataccataaggggattcttaccttgaccgttattgtgctcctcttcttggtgggtcgagtgggtggtgggttcggtcgagtggtgctcagtgggtggtgggttcctcctcatgtgggtttagtctagtgctcagtgggtttggtcaagaagcgtcgtggtggtggtgggttcgagagagttcgagagaaagagagagaggggagagagagagaga

SEQ ID NO: 397345 - DNA, 529 bp, Cannabis indica
caattgctcacgaagatttggccatcttcgatcatagtttctcgttcaccttgtacctgagtaactctcaaattgactacttcttgtatgactcatactttctcgatcattactacgtcgaggtctatcccttcttcacgtagatcgagtgtaatctcgagattgtgaacatcccgggcttgaacttgcattgtcacgtacaggccttctcctttaggaaaggttagatacatgccccctgttgtcagtgcgagaaagacgttgatagtgtctcggtggcaacccacttgtcctaggttgagtcccaagatttctctcgttgccatgagggatttcctattccctagtcatgggttgtcttctgttctcgtttctacaagaagactctggtaaatcattgttttcattcccttaggttatgaatccctggggtctccgaggcacttcttgacgaggtacctggtcatttggttgttcatcttcaggaacatctccagtttccccaggttgctcctcctgagcattctgg

SEQ ID NO: 397346 - DNA, 517 bp, Cannabis indica
gggtatttttaacaccggcgcttttttttcaccggcatgatttcttgccggtaaaatagagtttcaccggcgcatttagtctacatgccggtgaaaaaagtcttttaccgaccaagattcccagacaagttttgccggcgcggtagtacaccggtgaagcttcgccggcgcatttagtgtacttttgccggcacaaaaatgggccggcaaaagagggttttcttgtagtgtcaattcatgaactccaggttcattataattttatttcaatgaaactttcataaggtaatgtaaaatcactacaacatataagtaatcattacaagtttcatttttatatacacgaataaataattatattattctccaaaacatatacactcttcaggagtcattattatgtttatcaaactttatattttttcaggaatcaatatcatcaattcaatgatgtgtataatttaaaagatacatgataacttcatcatgttgttgtaatggtcaaatagatataacc

SEQ ID NO: 397347 - DNA, 1372 bp, Cannabis indica
taaaaacaacacaaaacaaaggtcaatttaataaacaagaaactaaaaaacaattgtaaaaacacttactgaagaagtaaaaaatttatcaagataactaagcttgtgaaaccacatcttattgtccacttcctcaacaccaaaatgaaagtgaggagaaaacttatcctggcccttcagataaacattagttgttttcctgaaaacaaaaatatatatatattaagatacaataaatctaaaaataataaaaaccaacaagaaactaatcaacaaaataaataattacattgatttcttggatctcagtccttgccctaagccaatattgtgtaatgatcgcatgattaaaatatagattagtagggtaattagcattaattatctttatcatatagttttatacgaatatttatgttgtcgactcattttttagaaataggaattagagttataatttctcaattccagaaattttattaaactctaagagtattatttatgctaaatatgaaatatgtaatttttatggttttttgtttggtgactatggaaaatgtgatagatggctaattttgtcacaagggttagcttagaaccctttttatttagtgggaaagtcctttgttaatatttagaatatcagaattaggcgggattatagttttggaccattttactcctagacctataggttgcttaagggtgaagcaatgggtaaaattggaaattttgcctaagagtttagttttggcttttagtgaaaatggtggaatttccctaagtttattatttgattttttatcatttgaatagaacaaatactatagtttaatcaatttatttcattaagttaaggaaaattaagaaaaaaaaactaaagtcttctcaccctaactctagctctctctttcggccctaagaagaaaacaaccagaattaagcattctttcatcttttctcaaggggttcaacaaggaatttaaaaggattagttagccaagagcaaggtaaaatcctagaatataactcctttaattttgatggcttttccttggttttaagcatcaaaatggagaattagattttgtatgttttggtttgagttataagctgttcgatagtttgaatttgggttgtggtagctagttttgggtttctcttgcagctgaaacatgtttggagaaagtttgagtttgagaactcaagctttgctctccaacggtgagttttatttcatgtggtttttgttgtgtttcagttgtgatatatgtttaatatgttatatgttgatgctctagaaaatttggtggtgattggggaagatttgagtaggttttggaggcttaaagtttgagaattttcatgttaa

SEQ ID NO: 397348 - DNA, 579 bp, Cannabis indica
gcgcgcacaacaaggaggtgagctgagtttcctcggcgctggaggctgcaagcagccattccgcgcgcggatgaaaattaagttctctaaaaaagtaaattgcttaattttttttcaaactatccaataaaaataattacagaaacgaaaattcaattattttcacaaaatttcacaaacatcaatcaatcatcaaataacacacagatcaacatgaaaccatccaaatcaacacatatcattgttttaattcatattttatgaaagtaaatcattaccatggctctaaggccagtagttggaaatattttaccaggatctagatttactaccatgtatgtttcattaatatcctaatatgaattctaaaacaatgaaataaactcatataaagtttaggaaaccttacattgggtgcagcgaaatataatgactccttccgttcagatctttagcccttgattcctttctgtagcagagcatcaccaagatctaaacctggacctctttctctccttccttgatgctagattctccttcttgttgattgaattcttcacaatcttccacactatgatt

SEQ ID NO: 397349 - DNA, 561 bp, Cannabis indica
atatggaatcttttattaatcaatgatcttatgggtaaagcattcgacaggatacaccaccacaagaccttgtgtcgttccagcactttgctattccaaagacgattccagaggttcggagccacctcacactgggaggctctgtctaaagcttgaactagataagccgatttgctcgagaattgcccattacttgtcagagtccatatccatctgtcatcgccctgacctgaagggtggcccccttttaaaatagcagaaacagtatcctgatcaaaactttccttcagtttattgatgtcccattgtccattggtaagcatcaaatcagctaccctagtgaggttagattgatcttccctgtttggttttgggcaaaagcctttacaatggggaatccaggggtccccccaaacatttttattctcaccattagacacgatcttgcaagcacctcttctcagaattgaattggccttcacaacactcttccagaattaagagtcagagtttttacacttgtaatttagcaggtctttccttttaagtacttggctgcta

SEQ ID NO: 397350 - DNA, 615 bp, Cannabis indica
gaaattttcaattcacaaggatagtgttttggacttttggaggccttgggaaaaatttaagggtttttgggagtttgataattcttgaagtaagcttaacaaaggagagtagaagaaaatttctcaataaaaaaattaaaaaacggcatgggaaaaaaattcctaccttgaatgattaagagtgcttgaaagcttgatgaagataaaattctaaggcttttctaaaggcttgtgcgcgggtgatgtaaattggaagtgtgagaaatttgatggaaagctcttttatttataagtgagttcaatctcctaattctagagcaagtaggagtcttttgaattcaaagccttaaagcaaaaggtacatgataagaaaaagataaaaatatatatttttccttctcctttaagctttaaatttgaaattcgtagtaaaataggaatatgattttgaatttaaaaggtaacatcaattcctaatgctacttaaattaagaaaaaattagagttttaaataaaaaagataaatgataaacaaaagtcaaagatctttattcttcttttttttctctctaatttttgaatggcacatatgaataggattaggattcaaatcca

SEQ ID NO: 397351 - DNA, 912 bp, Cannabis indica
caataatcttaatagttcagggacatttaggagacataatttggtataagtcaaagttcaggagacaaaaatcctaattatcctttaataaatgatgattcttcataacaaaaaggtcatcttgaaaatcaaaggaaaggcaatacataaccaatatcgtacgtacatagaatatcaaaacttatctttttgtcatttattttcaaaaagaaagataaaaaatatatatatattttttaattaattttatatttttctctcctaagtttgttagctaattaatatgatgatttggagaaataaataatataacttaaatattattattattaaaaatcaaatttaaatatttatctatatttaaaaattaaatttaaatacttatctcgtaattagttaagatttattatataattttataaataaaatatatatttattatttatttatctttatatattaaaagtgtctatctaacggcatttcttggtttaacagaatatacttaaaaataaaagaatattctgttaaatttaacgatgttaataggtttgattgttaataaataaacacaataattaaacccaaaaaattaaacaatcttttttaaattaaaaaaattatcttagccacatatctctctaacaaacccaactaatttttcgtttagtttatgagaaagtaagctaggaaattaatgtgaatttttgtactttgacaccctaaacgatttttcttgtgaaaaggtatttgtgataaatctgtctctgaatttaaaaatagcaaagaaagtgttatcagattgtatacttatttcactgtagtactgttgatgtgatctttgattatccatttgatgagtatttataagtttgtgttcttattatattaatatatgtacatatatgaatg

SEQ ID NO: 397352 - DNA, 602 bp, Cannabis indica
aattgttgcttttaactccctgtatgattcttataaaatctattgtttggtgttaggttttggttagttattggcatgaattagttgagtttggaagctgaaattcgtatgaattttgctggttttctgggtttggaactcaggtgccgcggcatggcttttgcatactgcagcccacccctttgagtggaaccttggagttggtcccaggtgtcgcggcccgccctcgagtatctaggcagattcgagtgttaactttgaaaattcataactttgtgatccgaactccgttttgggagttctatataccgttagaaagcacgttccgagcactttgtgattatctgtattttaaatgccatgtatatattttataaatgaggaatctattggattatgttttacaaggatctagatttactaccatgtatattatttaacatcctaaatatgaatttctaaaaaattgtaaataaacacatataaagtttcagaaaaccttaccttgggtgtagtgaataataatggctccttccactcagatctctaacccttgtatcctgtctgtagcagagtatcaccaagatctgagcccgaatgtc

SEQ ID NO: 397353 - DNA, 1080 bp, Cannabis indica
aaaaaaataaaagccaaaatcggattagtcgggttattcggtgtaattgggcgggttggacctattttcaacccgcccaattaacagattgggcggtttgtaattttttcaagttatttcggtttgtaaattttaccggttttttcggttcggtttgggcggtttacaaattttttttgtacagccctactcggcaccaccaaggcctgatgaagatggtacactgggctgagggtctgaagcagtggcctgaaaaaatatatcctaaaaaaatacggtaagcatacggtaatatcacaaatcaattacatagatatcgataatgtaacaaataagatacatagtcatcgacgtcatgtcgacatgacatcgataaaatataaattaacaaaaaagctatcgacaaaatatcgacatgatgtcgacattctgtcaataatatcaaagaacaaaataaaaatacaatcaagttatcgacaaaataacaacattatgtcgataatatcacacaacaaaataaaaatacaatcaagttatacaatcataaaaaaaaaagttcaaaaaaatagtacctgagtctctgcctcgggcaaaggagcattgtccacatgttccgctgctttttctgcttgtcttccaaaaatagctgggtcttgggtgtcctcctcagcatgtgtgtcatccacaacaccatcaaccaggttttccacaccattgtaagagatggtcctcacatattcctcctcttttgtctgtggaagtagccccttcatcacttcaagatgctgtttaaggttcaaagaatatttacaagtatttatcttaaataattactctaaacataagagaaactcatacccatttagagaataatgcactgaggtccttcttcgctatatcacccttgctcgtccagctaagaatcctgggaaactgaatcccatgattcgttcaatacctcttcccaacctctaaaatggcctcatacacccaatattgtactgcaggtgcgaagccataagctgtgtatttgcattcatgctgaacattcaaactcagcttcttctcgtagttggcctt

SEQ ID NO: 397354 - DNA, 1224 bp, Cannabis indica
aagatctggctgaagttctaatgttccataacttagattatgggacgggtctgagatttcctttcaaagcatcaaaacatggaacacatcatgtacagctaccagcgttgggggcatagccaacctgtatgctacttgccctatcctctcaaggatctcaaaaggtccaatgaagctcgggctgagtttccctttccttaccaaaccgtttgatgcgtctcataggcgatactctgggaaataccatgtccccgatctgaaaatcaatctctcgtcgctttgggtatgcataactcttttgtgtgctctgagtcgcgagcattcgcgctttgattttatcaactgcctcacttgtcctctaaatagcctcgggacctaagaactttctttcacctacttcatcccagtgaataggtgatctgcatttccttctatataaaaattcataaggggccatcccgattattgcctgataactgttgttgtattagaacttgatcaggggaaggtactttacccatgatcctttaaagtcaagcacacatgcccgaaacatgccttctaagatcttaatagtcctctaagactgtccatctgtttgaggatgaaatgttgtgctaaacttcaactgagtacccatagctcgatgtagactctctcagaatcttgatgtaaatttcgaattactattcgaaacaatgaactttgggacaccataaagacgaacaatttctctaacatataactcaacatactgatcaatggagaagttcgtccgaataagtaaaaagtgcgctgactttgtaaacctgtcaactatgacccacacagagtcgtactgtcccgtggttctaagcaatcccaccacaaagtccataaagatgtcttctatttctactccgggatattcagtggctgcaacaaccctgcaggcttctgatgttcagccttcacttgctcacaagtaagacacttagcaacatactcagcaatatcattcttcatgcctggcaccagaacatggctttgaggtcttggtacatttttgttgaccctagatgaagtgaaggtatgagactcattcatgatctcccttataatgtcatcatccataggcacacaaacacgattcataaatcatagcatccccatatcatccattgtaaagtctccagtcttcccagccgaaacctgctggaatttattttaccatgatcttagatc

SEQ ID NO: 397355 - DNA, 784 bp, Cannabis indica
agtatctcacagagtagagtggtataaccttattatgtatttaactagacttgcatccgaatttggagccatggcttgactccacttatgggatgtagttattaacctaattaggccaataaatgggcttgttttgcctgatatagtcctttggaaactgcttacattactgctccgtaaaatatggataatatatatttatgtatttatttcttcaatatatatttatttagaattagtataatattgttaaatatatatggctattctacaatgtaccatctaaaagaggtacacattgatgcattttttatctgtttcgatatttaagaaaaacttttattctaattttttgtatagttctatacgttatagttatttaagacgtctagtaaagttttgagaaatttagaacaatttacagtatataaaatagtgtttaaacagtctatttcacacatgtataaaataaaagaatcactcatgtaatagactatttgaaccctattttttatgtgtaattttttctggaatttcttaaaattttacaagatatcttaaataactataacatatatgacaatggaaaaaaatagacttaattagaaattattccgaataccgaaatgaataaggtgtatagtacacccctttagaagggtgcattatagatttttccatggtgatgcataatctatttatatacctaataatgaatcaaaataatacttgataatttatagtcatgagtattgctattagggcctagtaacgtttagcatca

SEQ ID NO: 397356 - DNA, 807 bp, Cannabis indica
acacagatattttcagttcagttattaacttgtttacaattttaaatttccgattatgagatttaggtagtgtgtattccattccttttttttttcttgagagaacggtgtatcatggtaattgataataatccatattgtgtttaagtgcttagagcctctcctattttctaactaaacttgactaatttattcatttgaataattcaaaactcccctcaaattagatgatatatactattcaatccaagcttctctttcaatcttttaaacaaaggcatatacatcattaaaaaaacattttaaaaacaaaaattactattaaaacaccaaaaaaccaaagcacacaattgctttttttccttaatcactgaggtggtttcattttcatctccaaaactgtcatctttgtgatggcttgtaaagaccgcttagtttaatttagaaattagtagttaattatgtttaattatgaaaattatttatagatatttaaataattatttatgctgttgttattgaattctaagatgcattttatgtcatatagtgaatttcataattttgcattttcggtgcccggtaacatggaactcggtgtttggctcagtaaaatcacaacttagtatgttagtattgtgggacggtttattagacattgggaatgtcgggagtggccgggaatttagaatttcccaaaatacccttttagtaccctttatgtgatgttagtgtggaggggcaaaatggtcattttgccccatttgtattcttgtcctttagtggacttagagtgagaaattaaat

SEQ ID NO: 397357 - DNA, 877 bp, Cannabis indica
acaagtagctcttgatcactgaaataaagatcaggataaaatttcgttatcatcaatttgtctgcaaagcatcggtgatggcactgagtcatggactagacccgcagaaaacataatcaagattaatgtagatgcagcactctttgatagcgataataagtatggtttcagaattttttcccgaaaccatcttggtcaccttattgcagcacgggccggttgccatggcggaagatatgcagctgaagtcattgaagccatgtggattaaagaagctctcagttgggtaaagaccaataattggcaacatgttcaaattgagacggacaatcttgtttcagtacaagctattcgaagcaaccaagcaatgaggtcaactttcggccttttaatcaaagactgccaccttttgttatctaccctcccaaatgttaatttatttttcattagacgatcagcaaaccgagtagcacattatgttgctagacattcttggtatcaatctgatcgtagcatttctgatatttttatttctggtgaactcttacatattttgtattcagaaagctaaataattcaatgaagttgatatttcatctcaaaaaaataaaatgaatctcattacattttatggatataaaaggagatttatggccactaaaatgtggtgtattgtaaaagattgaaattaatttttattatgggtctcacttatttaatattacgtttgattcatgtaaaaaatatttatttttcttttattaaaaattacacactaaattaaaaaaaacctcatttcatgtaatgtcgtgcaggagtccttaaatgctgtaagtgtaaagccctaaacagttaggcacgctacccaaaatgctta

SEQ ID NO: 397358 - DNA, 684 bp, Cannabis indica
acactaaagaagatggggctcgacaaggctaaattgaggccttgcatggtaaatctatgcggattcacttgcgacaatatcgccagtcaagagataatcgagctcgcattgaccttgggtgaggcacttctatccgccacaattatgcaagactttttggttgtcgacctgctatcggcttacaatatattactgtatcgtctagccttgatcagactagggcagtcagttcgatcaagcacttatccctgaagtttcaaacaccgaagggtgtaggtgtagtgcgaggcgatcagatgctggcccgccattgctatcgcatagagctacaacacagaaaagtcggtcactagttaatggcattcttggcagaagaaagcgaaaaagggatgaagatcttgatcctcgaattcaagatgaaagaaacttattgaaaccaattgaagaattggaagaagttgttatggatcaaggaaatcccacaaagtgtgtttacattgggaacaacctggaaaaacagttaaaatagcaactaataagtttcttaagggcgaaccaggatcagttcgcctagagccatggagatatgataaagattgattctaatattatctgccaccatttaaacatcgatccaaactacccagcaaagagacagaagaggagacccttggatttcgagag

SEQ ID NO: 397359 - DNA, 884 bp, Cannabis indica
tttccaagtagattgaaaaattctaagaaaaaggagcccatctaggacattcttgaaactcttctgaaagttgaggtaaaaattccatgtctttaggtaatcaaagaagagtttgtgctaacattcttaaggagttgtgtccaatagagaaaaagtttaatggtggtgagaaagtaagtttgggggagaaggttgttgttctctaaagaaaattattgcctaagacaaggacaattcaatgcacaattagtaaaaccgggtttgatcattgcatgatagatttaggagaaattattaatatgatgtcttattgcaattttgcttctttatatcttggtttattaagagaaacgcaggttttaattcaattgactaaccagactaatgcttatcctttagggataattgaagatatttttgtgcaggctaatggacttgtcattccaagtgattcttacataattgagatggaagatgagggtgatcccaatcctacatcaattctatttgggagaccattcttactccatactaagaagttggatatgaaagcatggatacctacaatgggatttaatggtttagtaattaagtataatgtgttagattccattgataaatacataaacaatgagtctttgttagaagacccaacatgaagacatgagcacaacatgtagtcgagctaacaacgttaaaacaaagcgaacttataggagtttttctcccttttctttttattttgtattgattttatttgattgagccttcgtgtctatccattttttttcttagtggttagttgtttatttacttacttttatcgttttttagtttatattaatattttttgctttagttttagtgagtgtgggttgaatgaa

SEQ ID NO: 397360 - DNA, 1270 bp, Cannabis indica
gacctagataggtatccggattcgaacgtggactctgaccaagactcagaatgggatcgaaatgttggacctagatctggaccgagatcctgacccagacccaaagttggacccgcactcgagaccccaactttgatctgactcaaacctagacccagattggggtccatacctagacacagacccagacccagaccgaaactcgaacccagaccaggatcggacccaatctagaccaagacccaagacgcgaacccacacccggagcctgatctggacctagactgaaatccggacccgaacccaaactcagacctaaactcgaactccgacccgaactgaaacccaaactcaaattcggaattgtaaatggaactagagcagaaataggactaggaccaggaccaggacctcacccaaacgcaaaccctgatcaaaacccagagagaaagacctaaacccgaaccgaggctaggactcgaaccaaaacctagactaggacccaaacccacacaataaccgggaccttgaactagaatcaggataggcacctgggaaacagaactaggaccgggacatagtacccgacctagacccgaaatagaacctaggacccagctcgggacgcggcaccagaaatggaaccagactgggacaagatattggaatatggatcaggacccagggcttggacaaaaatcgtagtcggtgtttggatttggaacccaagcgtggacccgaacactgacaaggacccgaacccacacccgaaggtgaacccagtcccaaaccaaaaagtggacccgaacccgtaccctgtgccccaaaattggaaccaaaactggaaggttaccgggattggaactaggacttggactaggaatgataattgaaattggacctacatcaagaaccctaaccagactaggaccggactccaaatctgacctagacccgaattggaagccgtacccggatcccaacccaatcctcgactcgagacccaaacccaaacttgaagtcagagccaaacatggaaccaaactagggacacagaaccaaggtcgggacctagaatcgcaccccaatctcaatcctgaacacaaactcaaaaatgggacctgggacctaaactagaacaaggccgagtcccgtgacagtgatctagatcttcacctgagattcaggtaacgggacttggaacagaccagtattccgtatctagatcagggactcagacttggaccagaacccagacgaagaaccaaac

SEQ ID NO: 397361 - DNA, 690 bp, Cannabis indica
ataaaataaaaaaataatattacacatatattataagaaattttacaatataccccataaaagtgatgcaccgatgcaaccttatctgtttcggcatccaagagacttttttaatctaattttttttatggacgtatacattataattatttaagacatcttgcaaaattttgagaaattttaaaaaatttaacacgctaaaaataaggtttaaactcactacaaaaagtcttacttttagtcacaaccaaacttgtgattataagttaaaaaaattgtgactgattataaatcatgattcctatattgtaactaaaagtccgtggctgaaattattagtcacaaaaattacaatttgctgtgactaaatgtatttttagtcacaaaacttgttgtgatgacgtctagaacttaattagtgacaacttgtaactagtactatgttttagtcataagtaacatttgttgtgattaaaagtcacatttagtcacaaaatgttgtgactaaaaagttgtcactataagtagcagttttttgtagtgactgtctgttgcacgtgactcttttattttatacacgtgttaaataggttgtttgaacattactttcttatattgtaaattattttaaatttttcgaaattttataaaatgtcttaaatagctataatgtacatgaatatgaaaaaa

SEQ ID NO: 397362 - DNA, 608 bp, Cannabis indica
tatttgttctaatataatatagattaaaacatttaaatctgacaaattatatattaatatgagattaatatatattatgtgttggaggttggattatatcctatatagtataataatacacataaaagttgtaacatatgaggatttacaaatctgaatataaattgtaacttaaggatcacatgtaattaagtgagttattagatatgaaagttatggagtcaatgggataagtttcttgttgttagaatctgttacaatactcaattatatcatttaaatgagtattgggacattaaaggaagatttaattcgaagaggagttacaaaaactaaattttgagttttctggaaacaattatttaatagttgtttttatgttgttttatagttattttacgaacacctggaaccagtttttgaaatgtccataaacgtacatgaatcgattgagcatgtttcttgaaatttcgtattttaatattcccagtttaattatttaattaattgattaattaaatgcagaataataaaactggtattgaaaacagtttttccgtagttacagaatacaactctgtaactccagagaaacccagaaaaacaaa

SEQ ID NO: 397363 - DNA, 94 bp, Cannabis indica
aaaagaagaaattatagaaatatgagcatttaaaacattcaaagccattatggcatcaattcctacttgtgcaattggtagctgcatctgtaaa

SEQ ID NO: 397364 - DNA, 580 bp, Cannabis indica
atgatatttcccaaagctttggctaaagtttggacttactcaggaaagcagtctataacattggacccaaaatggagaaaagataagatcatcagaagtgacctttttgcagaacacttggtcgtgtacaacactatgtggtggttttgaaagtggtagggctccttgagaaggtaccctttttttttatctccttcacaaccaaaagaaagtacaaacagatcaggtggtttttcagtaattgtggtttggaatctaccattccaatggtctttcatttgcttttggaatgtggataaaaacacagactttgtggtgagaactcttgcaactaacacagtatccagagtgccatcttgaacctctacatcatcaaggattagaggaggttcatcttcttcaacaatagtcatcttgcctttcattttgtcagtgagaggattcatggttcaggcaaaaattctgattgtttttggattgaagggagcggttacagagatgcaggaagcaagaaaaaaggaaaaaaaccataaaggacttcttaactgcctcagagcacaactaacggcagactgctctc

SEQ ID NO: 397365 - DNA, 696 bp, Cannabis indica
atcaacggtaaaaaaaaaagttttctgccgatagggaacttttgttaggtcataccatagtattaccctatatatatatatttatactagatgaaaattacgtggcgagccacgtaaatattagtttttttaaaattttagtggtttttgtttaagaattcggtaactaattgtagattattttataaacaatatgttttatgaaagtaaacttgttaagaatgtcataattgtgtatataaacctataatatataaattattattcaaatgttataatgggaatttcaacccatcccgctatacatctctcaaatgttattgtgtttgtaaagatgtcagagacaaagttcacttacattgaaagaacaggaatgtctgatgttccccatcgcattctgaagaagcagatcaaagaaagaagaaacaagaacagagtatgttcaaaacagagagatattcaggaaaagttcaattttcattaatgaccaactgagagtttatatacactctgaattacaacagaaccaaacaaaactaacaagataaaatcaacaaactaagtaacagaaaataactaacacaactgacacaactaaccaactgtcaaaacagttagttagttaacacattcataaaagaaaaaagaaaagtaaataaacgtgtcagtatccatttaggcattttgctaaaacaa

SEQ ID NO: 397366 - DNA, 687 bp, Cannabis indica
aagaattttttgaatcacttcgtccaagttcttggagctcacctcttattattgaagcacattgtttgaaacttagatgagccatggggttatagaaatgaagaacttagacaaatgaaaaatgttaaaaaaaaaatgaataaatgttgggtaaatggccatcgtttgttataaatatagggaaatttataccctatactgtattattcccatttatttcaattatactgtgatacgacagttttttctttttcactgtctatttttatactgccttcttattttgtgtattctaatattgttttgctgataaaagtttttttattttttttgtttacacgtgtaagcctagagttttgcatgtgtttattattattattattattattattattattttggtattttaagtgttaaaaaggtagatgtgactgtgtattgtcacatttgtggcaggcttttttttttcttttaattcaatgtaatcatcacttgaatacaataactctctctttcacaccacgttttggtggtttatacccactatcccatttaactattcatcatcttcttcttgtgttcttttttttttttaaaaaaaaaaaacacatctagttattctcttaggggcaatttttaatggttatttaaatcaaatttatgcaattttttgttgttgttgttgtt

SEQ ID NO: 397367 - DNA, 554 bp, Cannabis indica
aggggttccatccagttcactgcggctacaagttcggcctgcacagcaggggcaggagcaactgatatttctggagaagggattgtaggagcaccctgctgtctcaaccgccgaagatctcttcatcttgttcattgatcctggcttgcataactgcaaatctattttcccaatcttgggcaacttgagcagcttgggcagcttgggcaaccttagcaggttaacatcacctcgaccatgtgccctacctctagggcctctactttggccataaatgtttgggggaatctaaactccctgactgccactaaatccgaccgagttaccctgactcctagtgtttagcctggcgtccatactactaaaatagcctgcgtgaccaagagccagtctggtcagatcgcgatcaagaataacttactaattaccgcttactttggaaatttaaaacatatgcctattcagctatccgactactaacatgcttcttatcaggcttttcttaaatcatactattaagataaactactaaagcaatgaaagcttactgaacc

SEQ ID NO: 397368 - DNA, 589 bp, Cannabis indica
gatgagaagagcaaaaagtaatgatacccacaattgaaaaaacgtggatcaatctttcaaacaaataaagaataaaaactgaaaaataaagcttaagaagaagaagaaaattttgaagatgatagagatgagaagatcaataagtaataagtgtagggtaacatgtattcaactcgtttttttttttaaaaaaaaatagactcaaaagaacaagtcagattacatcaaaacaactgttaaaaaatattaaaaatatacatacaataagaaacaaaaaatataaaatacataacaacaataaataaattaaaatgagcagaaagcataaataaaaaaaaaagaaaaaaaaccaaaaacaattgaaaaacaacataaatacctacgcactttgggtatttcaaaatcttcatcatcaagttcgaaatcagagtctaaatcttcaatgattggtttcaaacattttgattttttctttttcagagattgaacaactgatttcttttttgaagctatagaaaatgtagggctacgagaattttctttgaaatatttcttacccattgctaatttactaacaaaacaagagaaa

SEQ ID NO: 397369 - DNA, 1221 bp, Cannabis indica
gtccattatactggttggatggtccgtcgagattgtcgcaatctgatattctttaagaagaattagattaatcctcgctagtcggtaattagtcagtttattccaactgcttggatgcttgctcgacataaatcttggattgtccttgtttattcaacaattctaacatagtatattgtattaacatatatagtacgttgtatttctctgtttcccaaactatctgactaacttcgttcctcatatccagtaacataccgaccaattgttccttaccacgtgtcgttctttttcttgctatatcactcaagcgatcttttggataactagacaaaaaaattaattaaaatgaaaaaatagcaccaaataagtctaccttataaactataagcttccacttgaaaaataaaaagattaattacatagaattataaatgaataatttttttttcttgaacaatgaacttccattgagataataaaagtttaatgcatcatggacaagcaactaacttttacagttaattagttatgttagttgtcactgttttgtacctaactgtccaactaattcggctgtatttcttggttgtactctctcttagtttgttactcctctttgtactcactctctataaataaaggaagttcttttctattggcttaacctttacaagccttagagacttttatttcaattgctttcagatagtgcttagtattgataggttcatacatggtatcatgaccatatccatagtgcttaaaagttccacaaatcacaaaaaatcttgttagtgtctggaaactcaccaaagataatagtgttttcctaaaatttcactcaacttgctgttttgtgatggacaagaaaacagggagggtcttacttaaagaaagagtcaaaaatggattgtatctgctcactcaacccaccacaagaacactagtccagattcaatgcctactagccactaaggagtccaaatctctttctgttactgaatgtaataatgttagtaataaaatgactacaaatatagtcttcaacccttgtaccaattctaaaatcaataaagaatacaattctactagtactgatgtctcttttattgcttttactgttaacactactcaggttataaacatttggcattcaaagtgttggattatttattttaccaggatcttagatctactcacaagtatgttgtttaaaca

SEQ ID NO: 397370 - DNA, 522 bp, Cannabis indica
gcattgtatgactcgtcgagaagaatgttttgaggctttatatcgcagtggatgatctgagtactacactcttcatgtaagtataaaagtcctctagcaactcccatggctatttcgattctttggttccaacttggtcttatgtcaccgaaaagaaatcttgctagagctctattcctcatgaactcatacactagtagtctttgtgttaggctaaaattagtctaagtttcgggtcgtattttcggttacttttcactctttgtttctagttttagggctattttacgcttgattcttttgtttcaggtccttgggtgtttaaagaaagtatgtacaagaattgaggacaagtggtgaaagaatcgagaagaaaaaccaagattggtgtctctgcatgttccagtcgcgacgggaaatttgccagtcgcgacgggtgctggcagagaggatctcgaagtttcaaagtttaaccccgtcgcgacgggggctttgccagtcgcgacggggacccagagacgg

SEQ ID NO: 397371 - DNA, 607 bp, Cannabis indica
tataatatatattacacgctaagtgttctaacagtcaacatgtctcatcgacacttctttatatgcagcgaggttgatgcctcgctgtgtattttgacgtcatccttatgattgtgtcttcatattagaaatggtttctcgtcaatatgtaaattaatagtttgtacattcgtgtctcacttaagactttacagtcaacgagttatagatatactctataaactccgcatttaatgagttattccattttaataccctttaatataattgccattattttcattgattcatattctccaagattgacacgtgtcctcctctgaagtgccatccaaatttcaagtataacaattgccccttaaaaagttctttttggtgaaaaatgtttaaatgattacggagggtatttttgtcataatccattttaaaaaaatgcatgtcctctgattttggcggttttgtggttttgaggcacatcagcatttgataaccatcttttctacttatcttttttaaattctactcgttggatcaattgtctccttaatctgacgaagatcaacccaagagtataaaatgaaaaaaaggaaccaccttttcaatacct

SEQ ID NO: 397372 - DNA, 1003 bp, Cannabis indica
ctatggctatgaagcaatgctactcgttgaactggaaccactatccccataggaggacaacctatggctaaagagtaaaatcacacattgctgatagaatccattgacaaaatgtaagaaagaagagactaagacaacttaaagctgcaggcctactagcaaaaagttgccagatactttaataaacaaagttaaggaaataaaatctttgtaggagacttagtgcttcgaagagtattcctgcttactaaaaatcctgcagtaggagggtttggaccaaactgggaaggtctgaaccaagttacagagataacaagtaaaggtacgtacaagcttggcaggtacaatgagaacatagaattagttctcctaccaaggtattggaatggagaacatctcataaagtactatcaatgaccaacttgtaaaaacactactctttagtagtggttcctatatagttcactgtataggaattagcgtaaaagagctaagtttccaccactattcagtggtggcccttgcccgatatgttgtgtaggggtaacgaaaaaatgagttttaaaagcagactttagatttgtaatcttttagaatgaaaaaatgtaccttgcacaggaacaacacatatttaagataaattgatgaataaaaacattgtttcaattcaatattacgtcaaactacttgctaacaagataacttcttaaagttaatctttattttttaattccacatgcgtaaaaataggtccctccaagaaaatacgcaggcaaaggtctatagttctaataccctagaattaagaaatagattagcaaaaccctaattagaaaattatgaataattgaggaattatattattatatagttcaatagatgtaaattaatatgatttgtaacatggtaagaccccattggtgagccaggggcattttagtaattatgacccgagaaaggtaaaataatgaaattaatttaattatgtgcttaatagaactat

SEQ ID NO: 397373 - DNA, 764 bp, Cannabis indica
aactgaaatgtaaatattataggtgactacaataagaattaagggtattcacatccaatagatttagacccaactgatcaaatcaaattatttattggatattgaattttgtcatctgatccaatcgaattgagttatccgatccgatctaatagatgtattaaattggatcggttccaaccattggatgcattgattggttttctattggattggattgaatccatccaatccattttagctaccatttaagttgatttcattaaaaaaaatatatatatatataattcaaaaactaataatccaatatacataataaacaacttaattctcatgatctcataataaaactgtcaaaaaataaaacttattcaatacgcatcgataattttattagcgtttaggaatatgagaattaatattttagataagtttttttttctttaatctcatgtgttaaatgtatattaaccaattatatatttttttttaaataaaatatattacatatataaaattataaatgtattttaaaaatatacaaatataattgaatgaccgttaaatgataattggattggtttggtcggttattcattggatcggatgtcctatccaataaccgatttaatccaactggattttcaaaatttacatatgatccgatccaattatgattggatatccgattttattggattggtcagttgtaattggattgaatgactttctgcacatccttaacaagaaccatctaaaaatga

SEQ ID NO: 397374 - DNA, 1233 bp, Cannabis indica
taaacacctatgttctcatgctcttgctgctgatgatgaaagagatgaactttaaatgttttacatttactgttcactattcacagtattacacaacaagagcatggcttgaaacatatagcgggtcaatatatcctgtacacaattacatagcatgggatgtaccatagaacatcaaaaatattatttttctaccaccaaactagaagataagatccagaagaccaaggaaaagaagatttatagctgattgggatacaaaaaactgaataggtgtagcaaatatggacaacaaggtaacaaccgaaagacatgcaacaaccaagtaattaaatagatacaacatatttatttgaattgtttaaatttatatgagaactcttacaacatgaaaagttagtttgatagattgctattactttcttaaattgaaatagttttttttttcagcaattgagatacttgttaaaaatatattataattagatttctactaaattaggttttaagagttggatattatttttttaaaagttgtatactaaaaatgtacaaaaatatcattataagttcattacacatttggtgttaacatgaaaaagaattaacataatagaatggttaatttaaaattgcataacagttgttaatcacttgagaaatatgttacaaatatattgacaaatatattgctaccaaattagttttttaacagttagataatagttttttaaaagttgtatgcctaagcaaatatactaaaaatgttcattataagttcataacacatttgatgttaaagataaaaaagaatgaacatactagaatggttaatttcaaacagcataacagttgctaagcagttgtcataatatcaaatgtattaagtaccaaaacacagaaaagaccagcaattgtttgaaataaaatgattacaataagtcatacagaacttaaagtagagcataaccaaaaaaaaaaaaataccatctattaaaaagtataatcatttaaaatataaaaatcaaacaacgagcacaaaatagttccccataaaatgaccctacttcttccctaaagaagccttggaagatttgttttgcttttgatcttcactgtcaatatttttattatttttcctttgaacatatgaaaacaagaggacaacaagacgagtgtagtaaacttcaatgtcaaagtcagtggggacatatttcccatggatgaagaact

SEQ ID NO: 397375 - DNA, 579 bp, Cannabis indica
agactttgtaaggtctaattaaataagtgaaatggaaattttatttgataattaattataattaataaatcaatatattttacatttataggattgaaattaaaatatggtatttgtgaaagataagataagttgttaaataaaaaggtaaaattgaaactattgaggtccacataggaagtcggccacttaaggagattttaagccattattattatccttttttaaaaaaatttcatataagttccaacataggcttcattagataagcccaaatctatgtattaattgcaaattccccattagaggaaaagggtaactaagtatgacttttgttactctataaatacataccgaacccttcatgcaaagggttgagatatcttgacttacttgctccagaagaaaatagagtactcatactcattgtaattccttaggcttttctagcttatcttataattatattgactcatatactaaggcttattaacatcccaaccatgtaaaaactctgagtatctttttgatttattgatcttttcattgtattttctttagctctaatattaaataatt

SEQ ID NO: 397376 - DNA, 543 bp, Cannabis indica
tttggctttcatgaagaaaggcttaagttgcacaaaaatttgggtgatgattacgtgttaaaagaccaaagggtgtgaaatatcaatgggtgtgtgacagacttcaagtagtcattctcttctgcgaaggagggacgaagacatattgagccctgagtgatctttcatgcatagaaaaaccacatgcctgcaagaatcatgtttaattttatgtggcgaactttggattccgttaagaaaggctaaagtcgcactaaaattcaactgatgatttcacgacaaaagagcaaagagtgtgaaatagcactagatatatgaaagacttcaagcagtccttctcttctgagaaggagtgttgaagatgtatcgaacccccagtgatctttcacacacgaaaaaaccacatgcctgcaagaatcctgttgaattttatgtggcagactttgtcttctataaatagaaggcaaaggcttcagagttacacacatctgtacaactgaaaaagcttttcacagcattattctgaaagaattttctctcaga

SEQ ID NO: 397377 - DNA, 1183 bp, Cannabis indica
aattaaaaataaaagtggttacacaatgcatttttattttttaaaagcaaaaattttactttcattttgtgattaaaaaattagaaactaaaagtgttaccaaacggcacctaagttaaatatcattttagaccctgtgttttgtaaaagttatcaattggaccctctgttttgttaaatgataaaataaatcttgtattttttaaaattgtacaaataggaccctgaactgatttttagtcaaaataaaacttaatactaatctgatctagaaatgttaagacaaatctggttatccctcaaaatcgcttactctgtcccgagccgcgagatgctgaggtagcctttcttttctgatcagcggtggaatcaccaccgtatgcagtagtaggaagagtgacggttccaccaacacttggagtcactcggggctcctgaagaaacttcactagaccttcgactcgcagagacttatcaaccatttctgcaaaagttgttgcttcattcgtaataatcaccagatcatgtctaatctttgcatttagacccgccaagtatttttctttcttcctgaagttcgtgggcactatacccgaagccaacttggtcagacgatcaaattttgttgtgtagttcgttactgacatgtcatcaccctaaaccaattcgatgaattctttttgcttagcactacggactgcctcattgtaatacttagcattgaacaagtcttggaattcttcccaagtcataatagtgacgtcttgggtgagggacactaactcccaccacacgagcgcatctttctagaactgaaaggtagcacaagtcactcgtcatttctgatgacccccgtgaaattcaaaatcttttctatcacagtgagccactgctcaaccttcatcacattcggacctcccagaaaaactagaggtgcttgcttgcaaaatctctcatacagtggctccatacggttgccaacaataggttgttctactagcaccggaggaactaaagcggcttaaacttgtggtggaggcactgcaggaggaccctactacctcaacctcaaaatttcttcgtcttgccgatgaatacggtcttgcattttcgtaaatctttgctcccaatccagaggagcttgaggtgggtttttatgcctatgttgaaattattttaccag

SEQ ID NO: 397378 - DNA, 741 bp, Cannabis indica
ccaaagctccaaccgccaaagcccctccctcaacctccaagggccaacccaagcctaagcgcaccacttccacatctccaccacctaaacagaaccccactactcgtcctagagccaaagccgaccccgtccgtcatcaagagcggtttgagatattacgaacccgcagccagttggccgagcgcggctttctccctgccccggaagctttacctgcatatattaccaatttgattgcggagcacaagtgggagaaattttgtgcaattcctaagcccgctgtggcctcggttgcccctgcattttatgctgctcttgatccaaagtatcctgatgtcgttagagtgaggggtcagagtgtccccttttctcctgatgtgattaacgacttatatggattgagagctccgcttgaggatgagtttgctctttggaggattaacccagcttctattccatatgacgccgtgcttcgtgctgttgctcacccgggttctgaatggtctatctcgtcttccggccaccgcaccttgttacactcatctctacggcctgaagcgagtgtttggcttgcttttattaagtgctctttgatgcccacaacacatgacaccacagtgagccaaacacgcctctgtttattgtattgcatcctggcaggcaagaaaataaatgtgggcaagatcatttatgaggaaatttggaagtgttttcagaaaaaaggcggcaagttatttttcc

SEQ ID NO: 397379 - DNA, 1098 bp, Cannabis indica
tttagtctaacgatttatcagtaaactggatttacactgacattataatcagcgataaggtttacttacacttgaataagtggaatctctttttggggcattagtaaagtaaactagtattgtatgtatcagctatacattgattggaccgatattgactgtggaaaagatttcataaacttactgttatatcttttctaagtcaatgtcacttaactcatcatagattatttgatctcaatcttaagatggctaagctccagcttaaatgtattgcacgagttctttgacttgtcgttacagcttacctgagtgcaattgagtaggagcgttaatcatagatgtggaatctatagcttctattagaagtaaacatagtttccttagaacttgacttaacgcgataaatgatagagcgcctatttagtaattatattagtttggtggaatatcattcacaagtttctaagtattttaaggataaatatatattaaaggataaaatggtaaatttgtccctactcaatgtaaaccgtctataaaggatcattaattgttttcattgtaacaatggattatttatagcgtatctatatttggtatatagagtattctatgtaattaagagtacaattgcaaatctatagtgaaatcaagaggaattaataagttaagaaatttacttggtaaattttggatatacttattaagagtttgattacataggcccatggtccccatattgtctatgataatatcatcttgtagactcaactaattaatttaataagtcaattagaattcaaaaatagactatatcttatttgagaattttcacaagtttgggcgattttgagaagaaaagagaattagagatttattttttaattagtacactttgtgggtctaattaataaatatatttaaattgtattttatttgataattattaaaataaaatttgtacttaaataattagaagagataagtggtaaaataggaaaaaacacattgtttcatttaaatgaaataaagtggcaaaaatctaactccaaagcccaataagcaattcagccctagagttatacttcaatccaa

SEQ ID NO: 397380 - DNA, 565 bp, Cannabis indica
gtttaattagtttatgagaagtcgaggtgcaactatcagattacctgttgatcctaaaatagagaaaacttgtaaaaagaacaaaagaaggaagaaattagaaaaagccgcaatagagattgaacaagaaggagtcatggctgacaacgccaataatggcaacaatgaaggagttgtagaagaccaggctaatggtcacaacaacaatgaccgtagcctgagggactatttgcttcctaacttggcaggggccagatcctgtataaggccacctgctgttgatgccaataattttgaagtcaagccagccatactgcatatggtccaatcttcaatctagtttggggggctatcattagaagacccaaacttgcacctagctaacttcgaggaactctgtcagacattcaaggtgaatagagttagcgatgacgccatcaagctaaggctgttcccattctcactaagggagcgagccaagagttggttggtatctttgccgacccactctatcaacacttggaaggaattggccttgaaatttctttccaaattctttcctcct

SEQ ID NO: 397381 - DNA, 909 bp, Cannabis indica
taggttgagtactcacacatttttttttatattcttaatttattatttattttggtgttgtctaaattcctccaacaacacttggcgccgtttgtgggaaataaatattctatttattttggaggaaaattatcatggctggaaaccaggcgaatggagatgacaacaatggatcaatcaatgttggaattgaatgttccactcctaggtaatgaaacgacacccatcgacaccatcaacgggggactgggatggacaaccattactcccctcaacttattccctgaaactgtcgctcatgctggggaaacatcttcaccggcgaccactgtgggggcagttctcgcatatcacacctactgtggtgtttgaaggtatcatccaattgaccacggcccagtatacgaccttacaagacaaaacgcaggctttacaggctgaaattaatgtaagggttaggacccgacgtcctccaagaataccaaacacacgttcagataacccccaggtgacaaatactaggcgacaaactaatcgcactcgcagagaatgcatgactggacaagaggaacttgacttgaatcaaccaacacagagggaacaagtcgcacgaaactccaactgtgaagtaccacaagagaaggatcctgagcgatgtaacccacacagcaaagcccaactgcgtaatgaggtaaacaatgttgaatatcattcttcatcctcacaaagttgtactcctagtgtctataccaggtctggctctgtggaaacaccacgaggaggaagataccaagttcacagaggtgatctacgtggtcacctcaacacaattttcagggcacgatctcaaacgccccacaaccacgatgagccccgtgatccccaattgggcgatcaaggcacaaacaa

SEQ ID NO: 397382 - DNA, 572 bp, Cannabis indica
gaaatctctttagaaacagaatttaaaatccaagatatgacaatgttattattacggtaccaagcattataaagattcaattcagaaatatgaggtttaggaatggaaccgtcgagaaatccgatcttgtttttcacagagatcgcgagttgcatcgccctgctccacgcgatgtagttatcttgcccagtcagaggttgtgataccagggcgtttccagggttatctccatggtggagaaagaagggactggaaggatcttccattggattcttggcagcagtgattcgaagactttgattagtagaagaatcgccaagatcgacaacagtagcaggagttctggtttgatcttcttctgtagccattgtgcggaatcaatgttcagaacgagaagaggatcaccggagaggaagaagatgaagcttagaagaacacagctgcaccggagaagcagacgcggtggctggaaggatcggacgggagggcttatctctcccgctctgataccatattgagaaaaggagaaaatgaattttatttgtgttacagaaccaagaatggtcaagtct

SEQ ID NO: 397383 - DNA, 2208 bp, Cannabis indica
tctagcgatgaatgcttctcagatcgcaaatggtcagccgccaaatgcctagtccgagttccactcgtgggccaagcggttggcgggcagaccttgtctagtaattcatcgggagaagtcatacctggtggttccaactagataaatggtgtcattccacccgtcaaccaagcgaatcaatcgatgaggcaaccaggcacttctgtattccaaaggttgggagcaacccatgacctaaggaatgatctaaatagaaggaggggagcaaacgatcagaatgccaagcagcccggaacccgtactctaattcccgctcagaaagatgctgatctaattcaaactgaccagaatgccaagcaggtcagcccagccatacaggctcagctagacgaactgaaaaacatgttttacgacatggctggacaaaaaaagaatgatcttgagtaggaccgagcacgcggaactcctttctcacctgagatcaatctcttgtcgctgccccacaagttcaaaatgccgacgtgaaagatgtacaccgggagagaagatcccctttcccgtctcaaatacttcgaaatgcaaatggatttgcaaggggtacgaggagatgtatgctgcagaatcttccctgccaatctgttggaagccgctcagcaatggtatttcaagttggctcctagaaagttcagttcatggagaaccttctcttcgaaattccatgcacaattcttctcctcgcgccaactcccattggatttgggagacttggtcgaagttaagaaatgaccaggcgagcctctccgggcctacatcactagattcataacagaggcgaccaaagtttcacgggtaactgaggagggaaagttatccgcgatactggggggcatcgaagtcctcggtgaactttggaaagatataaggaagaacgggccagtagactcaatgagtgatatccttgaccgagctgaaggcttcttcaagctcaaagaagccattcaacgagcggaaaaatgaataaaatcctggcaagtcaaaggctccttccactggaacatctgcccaactgccccactacccaagtaattcaagctcaagtggtaaacgttccagtaacaaccacaagcaagggaatgggaagaaaggaaagtttactggcaaatccgaacaagctccccatgccaaatacactgcattcactattctgactgaagatatagaaagtgtatacatggcaactcagtcgctagccctgtataaaagaagcccgggcccatgaaaaagggacatgacaaagttttgtcgcttcagcggagactatggccacgacactaatgaatgctacaacttgaagcgagaaattgaattcctaataaggaaaaacaatctacacctgcaaaagtatgttaagacccaccaaggtcagaggaatgacaacaaccaagatttgctacctccaccggtagatggacatctccaagtcattgttagaggcccgcacattgctggagattcgggcaaagctcgcgaggggtatgcccgaacagtgcagcacgagcaagaagaagtcatcctgtccgtggaagaaatgaagcccaaagttccacgagcaggagagtcgaccgtaaccttcaacgataaagacgctatcaaattagatttccgtacaacgacccggtggtcgttgaagtccagatagccaataaaatggtggccagaaccatgatcgataatggactctcttccaacatcttgttcaaaactgcttacgaaaaatgggactctaactcaaggatctaaacccatgcctccaacctgtctatggtttttctggtcaacgagtcgcacctctaggacaaattcatctacccctcactgttggacaagctccgacgagcatgactgtaatgacacaattcctaatattagatgttccttcagcttttaatgtaatgcttggccggccgaccttgtatgacttaaaggttgtcacgtaaatatttcactcatgcctgaagttcccaacaaagaatgggctacggtgtctaagaggaaaccagcagtctgctcgagaatgttataaccttgcagtggccaaggctaagaaggaagtatcctccagcctgagaacggacaaggggaaaaaaattcccaagtagggaacttcccaaggcggggatgaagatgtggatcctcgacttggggacc

SEQ ID NO: 397384 - DNA, 691 bp, Cannabis indica
tctcatgtatttttgacattttcttaaattattctctccaactgctctttgctcttgaaattcacaactaattcaaaatccgcaatttgatcaagaatctcctatgggaaattaaaaggaattcaatttacaaatcagtgtttgcagtaaaaattaatagaggcaaacaattaaacattatatacaaacataaacaagataattataaagtcccgaaatcttggaacttgcagcttgaatccggaaatgctgatgatcccttggccattgttcgtccaatgcttgtctacactggtctgattgagcagctgcagcgtttctttaaggttaaaaaatcgacaaatgtggtatcagccaaatagaaggacttcagtagtaacagagagtgacgatgaaagtggaagcttcagccagacttatcgtatgaggaaaaacaggtgcaggtacttgatcgaagagagaaggccttgagaaacaagacgattgcactggtaaaagtattatggagaaacaataaagtggaagaggcaacctgagaactagagacggatatggagcagaaatatccgaagttgttcaagtaaattttgggacgaaatttctataaggagggggtaattgtaataccctagagttaaaaaatagattagcaaaaccctaactagattattatgaataatttagaaattat

SEQ ID NO: 397385 - DNA, 1789 bp, Cannabis indica
gttatctcaatttttgcccacctatcgtggcatgtctacgtggcagatatcaacatcacatggcagtatagctcaccaacaagaaggtcaagtcatctacccaactgtaatatcctaataagcctaatggtagataattagggtttatatttatattatgggttaataaggtaataagtggaatcataatcctactaatctatttatgtataaaatttaaatttttacaataagtgagtaaataagcgtaatttataaattatggagatttatatagcatgtgtgaatgtgatatgagctatatatggaatgaaaatatttttaggttcgacgaccttgaagcctcgataagtggataaataagtgtaatttgttcatcacggagatttatttgaaatacttagatataatatgagttatttgtgaaataaaaatattttcatgttcggtaaccctaaagacccgattggaggacaaaaatatcacaataattttagttagaaatattgatgggattattagaataagttgattttagaaataccagggtatttcagggtactcaaaattggccaaataccctagaaataaagattttttagtgactaagaaataataagataactattaataataaatttttttattattattattattattattattaatatattattatcataatattatcataatattaaattatgtatataaagttatcgttaatatatattataagttacagtaaataacgaagaacaaaattctcgttctccctccttcaacaaaactttctccctctaaatttattttcttcaattttctaacccgaaacctagcaatctaagccccggtacgtagtaggagtaacaaataccttgtaagagggaggagcaaaataattagtttcgtataggggttttatgaattagaatagttaggaaggttctgaccttataggattggtctcgggtagtcatgggactagtttcaatattttcttgctgaaactgaggtgattttgagttagaaatcgagtttagaactttttaaagcttagtcctaacgttaatgacgtttttcatttaagggctcaattttaattactgttacataaggatggtaatatttatggtatatatgtgccctgtgaagtttggagtgatttggataagttttggtggtgtttcggtgagtggaaaaattgagattttcgtgtttcatagttttaagaatttcataggagatcataaattatatttttgtcataacttttgactcgggtgttcattatggatgttttgtatactgttttgaagcttgggacgagctctacaatatggtgtatgttttagagcgaaaatataagttttatttttgtgtatttatattacggggttcgatagaaaatcctagattgtcttatgcaaatattaagcagtgttttgggataaacacttattggtttaccgttgttgtggcatagggtcaagatcatcggggatagttctccacttgggttgaccaacatggatgaacttggattaaaggtaaaaaagtatattatactgcatagtacgttgtatgtaatataattagtattgttatgaattaattgatactgagatatagttaatattgttatataatgaaaagaatgattggttgagtattgataatgtgatgatattatgcatgtcatatatgggctcacttgattaggtgatgcaatatacctagcgacgtaccgggtgtaggtacgggcgtcagtggtatatgatgagta

SEQ ID NO: 397386 - DNA, 542 bp, Cannabis indica
aaaaaaaaaatgtgagtaaatatagaaccacatccacatgtgttgcttataattagttttcacaaagcatattgtatttatctgggatatcaaaatcaagataaggaagaaatgtaagaagtagaaccaccttgtgttgcttattattagttttcactaaataaaaaattgtaaatatgctatatctattaatattttgacttgaatatatattttaagaagtgttttatatataaatatatttattgattatcacgaattaattgaatctctttaaagatatacctcatttcgaatacggaacttgcatcagtgaaataaacatctccagttaactggtcaacatttaagccatcaggaaatttaaaaggcaccccttcagcccctgtggctagttgtacagcaagtttatccttacctcccacaagcaaccctttatatgcatccgcgatgtacaaaagtttttctttataataaaactcaatacctattggtctcccacaaatagctcccaacatatttgttccatcacataatctcga

SEQ ID NO: 397387 - DNA, 513 bp, Cannabis indica
gcagcggaagtgttttctagactcttggaagaggagattggaaagggtattattaaagggatacaacttagcaggggagggccggtgctctcccatattttctttgctgatgacctcatcttggttggtcgggctaacataaatgaagctaaatctttttggaattgtcttgagaagttctgctcgtggtctggacagaaggtcaataaacttaaaacatcaattttctttagcaaaaatacctcagcaggaatgaggagaggaattaaagaagctctgggtatagacactcctgagggagttattaagtatttggggttgcctctctttagatcaagacaaaaagatgctgactttaatttcattcttgaaaatctcagttctaaacttcaagggtggaaggctaaaactttatcaaaagcgggtagggctaccctcatcaagtccgtggggctgtctttgcccgtctatgccatgcagactaccaaattttctaaccgccttgtgaatagg

SEQ ID NO: 397388 - DNA, 1063 bp, Cannabis indica
gtgaaagcaagatcttcaggcaacattgcaatcatcttctctccaaatttcccaatagagctagagtctaaactttctctggtttttgtattatgatacaacccaattgcctttctactatttgacacctctggaagccaagaacagaaattagaaccacaaaaaggcagccaaaaagcaccaccaaccatacggagatcgaagtcttcaaaaaccgacctctgttcatcttcataattatccgattattttgaaagcaaatgatttgcaactaaatgaagtgaaatttcactagttctactgtagaagttagatgtagtgtcaaaaacttgctttttataagtaaactccaataaattttcagttaccgataaatctaaaatccaagcgcctttcccccaaatctttaaattattgatgaaaaatgatcgtgagcttgaccgaaagcaagaacaaaatcgtacacgtactccctcatagccaccacaggcatcgatgtttaacaaacaagcttgctctaagaaaacccattacgccaatcatgcaaaatgaaaccttttcagttaattgttgaggagtgagtatttcccgagctgcctgcatcatttctacaaatcaatagccatgccgtttggttcctgggaaagttgaatcagaaagaagaaaaacacaataatgtcggaattgaaaataccttactcattcggaaacttagtaaattcatttccgatttccggtggatagatctgacaagtgacaataaaccactgacattttctattggactcgggacttgggagagagacaactcaggttcagctctctgtgatttgatttgaggttgaacgctgtactctttcctctattgaaccaattataggcacttctccaataagcccagtccattgaccaatactgggtcccgattgactattgggcctcttatgtaatatgttaaaagaaaaaaaaaaaaattgaggaaattataatctataccttttttatagggttaattttacaaatgtacaaaaataataaaaaaaacaacaaaaatacggtttca

SEQ ID NO: 397389 - DNA, 1619 bp, Cannabis indica
tgccagggttgtgagtctcgcttttgttagttggatgaatttataggaagtttcctcgtagcgagatggtcgcctcgcactcttgtgttccgagtcggtttgacttttatacttagtctacttattgcaagctgaggtatgtattatttttctctggtacctcgctattatcccttagcgacatatggtttctcgttcatactctaagtaccagttcgtacattgattctttgcataagactttacagtcagcgggttgcagatatactctagtacttacgcaattaatgagttattccataaaaagatatggcaccgattcacattccctttatcttgacacgtgtcctccagccgaattttgggtataacagctggccagcctagggactgtgtccccatggctggccagaccccatgaaagtcgtccatggcctgtcgggcttcaaacaaagcctccttgggcagccagcatgtgcatggatcaaaagacgtgatttttcaagaactcaaacatgttcttcgtgactcaaagagccaagaatcacaacgaaggtcaaattcatttctttttcatctacaaatcacacattgtttatcctgaggctatcatgcgaatcaaaataccaaatggactatctaatgtaagaatcaaagcatgttcaaaacaaaaaataatgttcatgaattcatgacaaaatcaatcaaataaagtgaaagagtggggatagaaagctaacccacaataagatttcgatgaagatgaaggtgggaagcttggatcgttgaaatagcgcaaaaatcccaaggagaatgaagcttcaaggttcgaccacctagagagaaggatgagctttttcaagagaaaaattctagtgagagaaagtaaaagtgaaaaaagggtttccccccaaaactcacttatgtcatacatgtgggccattttttttttggacttacctcaccaactcatcataaaggcacataaatgagttatttctctattgcaataagatcagacagtcaagacaaagtgctttaacacactcaccactttttgttcaacaaaggtaactacagtcctgacaacatcaatattgctggtaaagtccttaggggcaaaaattatcccaatttttgtcctcatcacgtggcatgattacgtggacataacctatgccatgtggcagtgcagctcactaaaaggaaggccaagtcatcatacgagcaaatgaagaccctgactttcaaacatggatcaagtgacagaccagctcactctcaggagctggccagccacccctggcctacccggccaggctgggacaacatcatggtcggccagccaaggattgcattgtaggtcccgtaggacactcctacatgtggacatcataggtgggctgtgaattgggctccaaaagcccaacagaatggctgaaaaatatttagaatctaacggtattttggtcttttataaatatctaactcactatgctatttttaagggatttgaattgtaaacctagggtttaaggcttcctatataaaggccttaacctctacctgaaaacctaagttgcctaagccacctctaagctagaaatctcaaactctct

SEQ ID NO: 397390 - DNA, 1080 bp, Cannabis indica
cgcatcatcacactttggggcacgcatgggcaattcctcggggatgagtgtccaaatcctgtcccaatccgcactcgccgccagcctggcaggacctcctcggagctcccgaagtaaaaggtcctcaaagggcagtacccggactgaggacaaacgatagcggagagggtatacctctcaatacacggagctcacggatatgcatgagcgtgtatactttgccacctggtagaatacgcattaccggaagcctcctcccttgtatagggatagctcccgaagggatcccaataaaaggtgtgaatatcacagcgacattggccacaacaccaatgagtgcaagaacctgaaagatgaaatcgagaacgtaatccaattaggttatttatacgaatgaatcaaaaataggttaccccaattaaacccggtccaagcaggacgccccctacctcaaggaggagcagggggtatgcccggagggcaagtaccccccagaggagcactcccacagcaggtgcttggattaccaccacggccaaatgggagagtggccatgatctccggtgggcctcatattgggggaaccaccagaaacgagttaaagcattacgctggggccataaaacacgatgaagtatgggaagttactcaactcccaacacaaaggcccaggctcatggaccaacccatcactttcacgaaggacaacgcgaaaccggtgcgcttctctcatcacgaccctctagttatagaaactcccatcgccaacaaggtcgtggcgaggatactggtagataacgtaagctccgtgaatctattgttcaaagaaaccttcatggccatagggctcacagatagggatctgtcgcctagcgactcccagctcacaggattcaatggaacaacacttatccctatggggaaagtaaggctttctgtcaccctgtgcccaaacaccccacagagcactttcaaatactgcacctttgtagttgtagattgtccaaccgcgtataatcccatccttggccgaccgaccttggtcgattttagagcgatcacctccattcgacacttatg

SEQ ID NO: 397391 - DNA, 598 bp, Cannabis indica
tatcgggagcccggtggagagaatgacctccaaaccaaggcctgcaggccaggttccgaatatgggggctcccgatgccagcacttctggttctggtaagtcccctttaacgatacattacgtccctcctgtccgtgaatacgctagccttaggcctatagggttcgatgaacgtctccataggtttaggatgccctctacttggtggggggggatcatgcaaaggagtattacttctctcacttaggcaattatttaggccggtctcggatgggttctggacctccagtgcccgttcccttggactcttcagcctatctgtcttctagctggttccgtccctcggacagctatctcagggatgatgcagccagtgttaagattcgggactttgctagggccgaattagagagtcagggtagggctagcttgattgctttttaagtgtacactgctttcacagatattctaacacttgactcttttctcttgttgcagcagccgatcccatggatgcgatcttggccacccttgctggagcccacagtcctgatgcctcccctcctcctacttcttcccagttggtcacccccgggaa

SEQ ID NO: 397392 - DNA, 693 bp, Cannabis indica
attttctaattattttttttcttgcataatacttaataaaattaaacttagatttatctacaataactagactgaaaagaacattcaccaaaatctactaaagacaaatctctccaaagtggcaaaattataattttgcccttgcttcgcacttaaacaacttaaaggcttaggagtaaaatggtcaaattttacgaccctgcctaaactcgacattcaaaatgtctcttatgattatcgcactaagaattggattctacacttacccatgtgcctctaatggccatccatcgcattttttattgaagggtgtaatggtaaatttgcccctaatcaatgtagatcatttatagctagaggatcattgattattaggattataacaaatagataattcagagatcgtggaacatatagagcgtacctatatcgtggaacatatagagcactctatataattgagagtgcaattccaaatctataatggtgcaagaaagaattaataagttagaaaaattatttggtaaattctagatctacttattagaagcttggttatataggcccatggtccccatactagttgagacaatactgcttgtaagacttagttaattgattttaattaatcaattataattctaaattagactatgttttatatatgatttttcactaagttatggcttgatt

SEQ ID NO: 397393 - DNA, 803 bp, Cannabis indica
ttggattatatattgatttcggtgaatgatatagtccaatcaatcaaaggtaccctatatccttgagtccaatggtggctcgagttgtaacaacaaagggatagtttcactaggtcccgcttcattgtcctcctatccttcatcaccatctcccttgggttgatgatcgcctttatggcatttttgtgactcttctagaggtgtaaaagaggtcgatggaaaagcataataatgtcttcgagaaatcatattcatggggggtagtctagtcccttaattatccgatggtgagagcatgaacacaagaaggagagattgtgcataggtggataggcgccaagggcgtagttgtgtgtgttgggttttatgccctaaataaaattcaaattcaatgtaatccaatttattcattatcaataaaaaaacagaagtatttttcattcatttgtgtatgttttggttcatgttatcaattgcttgtctatttgatttataaattcatctaaaacccttttcacatacttgatcctgtttattgtgttgtcaacacattggaaagtaaacatgactgtaaagaccgcttagtttaatttgaaaattagcagttaatcacgtttaattatgaaattatttatagctatttaaataattatttatactgttattattgaattcagagatgcatttttatgtcatttagtagttttcataattttgtattttcggtacccggtatcatggaactcggtgtttggcttagtaaaatcacaacttagtatgttagtagtttgggacggtttatt

SEQ ID NO: 397394 - DNA, 638 bp, Cannabis indica
ccaaaagaaagagtgaaaatcttagatttagaacttggaaaacattagatctggaggcttcgagaacgcaaatatatcgtggtgaggtcgatttccttctgacggtggcctaacggagcagggcgagcggtgagcaacttcacagtcaccgcgacagagaaaggtcaaagatttcgtgtctgaagatgttcgtggccagagatgcaccatttgtggccgatgtttggctcgccaacgtcgatgtacaattgggctgacttcgtacagatgcaatttttacttttctacttctaatactctctctctctctctctctctcgatttacccatattattttttaatttatttttttatgtttgaatttgagattgaggttgattatgaatttttgttgctgtttttggtatttttgatctaaaatctatggaatatttaaaatgtaagtttgttttttttagatatgggtttatttgtgttttgatttcaatttgaaatcttgacaggtggtgatggtggtggtggtttcagttgtggtggtggtagtttttgtggatatagtggtggtggtggttggtttgatgaagaagaagaagatgcagacgaaaaatgataaatgaaaaggaaagataaaaaaata

SEQ ID NO: 397395 - DNA, 889 bp, Cannabis indica
ataatttgatttagtgtattttttgtgaattactcgttggagtatgttgtgtatgcactatataggtactctggaaagtttggtaacatttcgatgagttttgagcaagaaatggattgttgggggaaacctggtgcatactggctagccggtttgccagacctgtaaaactggcttggcagggtccccgaacaagccattttctcaactctcgtgcatttcattgtcgtagttgggtgtttttctattttctgagttagtgtaatcccttgagagtatagcagagcctagagttataggtttaggtttcccagattagggtttcaaacatgtgatttacccggtttcaatatgtaattagggcatccattcaggacaggactttccgttcaggtcggccaattcacttaaatctggaaagaaggtaataactatgtataatatatgatatttatacgaatgtatatatgtatgatatatatacatgatgtgtgtataattgtatatgtttgtgtgatatcatagccccacaatcattgtgtcggttcagctatagatgcatcatactggataagagggatattcaccccaaaaagtatgaattagtgctatcatagcgacacaaacattgtgtcggttgggcagtacaggcatcgtactggttaagaatgatatcatgggcaattatacttttggatgctattgatgctatcataggagcacgaacatagtgccggtcgtgcagtacgatcatagtgctggtagtgggtgatatcatggtcaatagcacaaccagttagaacgttcttactcatctgttaagccttgtaaataggtgtatgggcacctagatacaagtctgtattatatgatatgttatatgcttttc

SEQ ID NO: 397396 - DNA, 1002 bp, Cannabis indica
taaattcaacataagactttcatgttaaaatactatcttattatggggatcccctgcttaataaaattcttttacaataaattacaaatccattagtacaagaataggttatatgttcaatcatagaaaagggttgatcctgcttcacaaaagccaagacaacacggttgatatgtacattgctgggagacctctggcccatggccgaacaaaattgctaatcttcttacctgcaccaagaagcacccgtgagtcacagtgactcagcaagaaaatctactagacaaagcaaatcgtggaaaatgataacaaattatagtaccacagattatacatacgaggagatcattctcttttaacatacatatacagttcaacgtctatacaagcaaacttgttacaaaattaagagtatttatagttatacataatcaacaaccttagtgtttcataaaacacacaaatcatatagtattgtaaacacttactttcaatgcttcataaagcactctagttcacacattagcatatccattcaatttcagagcttcatcaaccactctaatcatggatcattataatcatgtagtcttacatccctaggccactgagattacaagaaaagtgatcaacttcacaagcaatataacattcattcaatcacactataacaaaatgtacttaattacaacttatcacataataacacttttgattcatttcacaacatcgtaaccacacaatttcggtacttcataaagtactcttaccactcgttaaccacaagctacatatgtcactatcattgcccaatacaacaaacgataagtaagaaacctatccgcggtttaaggagtaattactcataacggtaatgaccgtttcttttactcgatcataatcggtcacaacgataataatcggttcatatcattactctcgattataattgagtcataacgatggtaatcgtttccaattatttttcccacgatcataatc

SEQ ID NO: 397397 - DNA, 887 bp, Cannabis indica
agtctatttttttgttttccattgcagttaagtttgttaaatggtatagaaacgaagcggctaattggttagctcgttattctggttcatatcctgatcgtcttcccagtaggggattgtccctgttgctttggaagctattttgatagttgatttgctttcatgaaagttgcaatctttggttcaaaaaaaaatataggtaccctcgtcctatctcaaaatttatatctattttactagaacacagtcaacactcactcctcagattttatattaaaatcataaaatatttaattagtgatcaaacaattaaaagtaattaagtacgaataaaatagatgcacatagaaaaattagggaataactaaatcatgctaattaaactaaaataaagtgtcaaacaatctccataaatacctaataaaaatttagctattcataatcagtgtaaacatctgataacaattaaataagaacataaaaaatagtagaagaaaataactcgtaaaaaaatattaataaaagtctccagagctgctttctacctctaatttttgtctcccaaaaattgctgaaaagaggcattaatatgtatagctaaaaaacgataaaaaaaacctattttttaccgtttaaaagaggcgggttgtgacactagtgtcgcggtccttgaagcacgattttcagcagcgatcgtcctagtacaacgactaattaataatgctttggccataattctttttctttcaatattgcttagaattagacgattctagatgttttggaaagataaaagagagatctaaaacttttattcaaaatattttttctcaaagtgaacgcatcatagttgtaacgcccttacttacgtaaaataagatgccata

SEQ ID NO: 397398 - DNA, 809 bp, Cannabis indica
tacaaattcagtgttagtgtcccgtaatgcatgtcaccaaagatatgaggtgtcactaaagagtaactccaataatttatattatttttttttaaaaaaaaatattggcttacagtaacacgccaaacgcgattggataaacataccccaacacacttgactcgtcactatatatatcatgtattaagaaaatcttaagtggctaagtatacactacttaataaaaaaacatttataattaatatattatttttatttaaaaatgaatgtctgtttaaaaaaatagtgatacacacgtatacactaattattaataacacaccaacactttacctttaatttttttttaagtaaactattttaactctcaaatgaaaagaaaccctaacagctagatatttctctcagccgcctcttgattttctgcgttcatctctctcagtccagatgagcgaacaacctctctctctttaaaccgtcgacgacaacccaccaatatgttctcttcctctcaattctttgtgcgaactcagctccactgtcggtcgtcgccccacagaaacgcccaagacagtagcctgaagactcgaacaaagaccccccactgtattggcgtcgttattatcccagaaaattcgagacccaaatcgtgctcttcttcctcccatctccgtctcgctctgtcgtggatcactagacgagtcgctattcatggagatccgagctacaccaacaaccagatcttttttttttgtatatcttttaggtttttacatgcctaaaaacttgttacagccagaaattatttg

SEQ ID NO: 397399 - DNA, 510 bp, Cannabis indica
ctatctaggaaagttatcaagttcactatattttcttcttccactctttctgtagattgggataatacatggcgttcccctatggtaatttgaatatccctttcctcaggaactgttagtgatgcagctaaattagctaatgcatcatctttaccattttttgatcaggggatttgatttagagttatatcttgaaattggctaagtaaatatttaaccttttcatgataagggactaaattctcatgcttgactgcaaattcaccactcatttgtttaataatcaaagaagaatcgccaaatacctccaatgactttatttcatttcgagtgcaacttcaagatcgataattaatgcttcatattctgctatattattggtgcatatagctagaatatggaaagaataaggtatcgagcctcccgacggtgtcacaaagacaattccagcacttgccccactacttctcgctgccccatcaaaatataattgccacgatgaagtatcaa

SEQ ID NO: 397400 - DNA, 569 bp, Cannabis indica
ttttaaatcatttaattagttttaaaactttgatttcttttttaattttcttaatcgttcaaaatagtttttatttaagatctaaattaatttcttaaggtttactaaaaaatattaaatcttttttatttttatatggaggagtacgatttgataattgtcaaaatttaggagtcaaaattgctaatttacaaagacatatcaatatttaaacaaaataatgaaacaaaacttgatagaaagaaaattattaactattctctgcttaattgtaatcggatgtcttaaaacttacaatgtaatttataagaaaaagaaggaacggatattgttggaaatcactcaaaaataatactttttttttttgtttgtttaattttgtacgttgcgacatatctccctatatctctctatatttttttttttggtgaaagagggggtgtattccacccattcattaaaaaaggcaaagccaagagtacaaacgaaacggggcaaagcatcccaactgccccaaacagacaacaaacttaacaaaaaagaaagacaaactaccagtaacaaataga

SEQ ID NO: 397401 - DNA, 685 bp, Cannabis indica
ataaatgggctgaatggtccaagcgaatgggcaccgacggtccagaacccatccaggaccgacctaaatagaggcctaagtgggagaaataatactccttggcatgattcccccatcgagtggaaagcatcctaaacctatgaagactcatcgaaccctataggcctaaggctggtatactcacggacgggaggaacataatgtattgttaaaggggacttaccagaacccgaagtgctggcatcgggagccccaatatttggtactgggaccacgggcttgggtctaggggtcctccgctccaacggagctccaatacgaagggccctcccggcggtcgcctaggccttaatataagccagctcatgttccctcttgaagaggtacttctggtacttgtcctcgccatggaaatgatttcaccccggagcaccttctccgcggtcggagctctcacgttcgggcagatgactttggaaagattatagtcatccaccgactggtgccccaggatcaacttggccttccgacaatgctctgtcgtgaccaactccccgacatcaagggccttcttgtcgtatgtggcgaaggtcttggcccgttgaagaaatatttgagtaggttcagtccgcatgtaaggggggatcctaacccactccgtgagaagctctggatggtccatggc

SEQ ID NO: 397402 - DNA, 1130 bp, Cannabis indica
ttagtttattagcgagaaaccatgtgtttctaaatacgaatagtgaggcaccaaagaaagtgacatgtatcaatcgtgagagtccttagcgtacgatgaccaaaataagtgtaaaagtcggatcaactcaagaacaagtaaagcgaggtgactgtctcgctatgggaagacttcctatccagttgacggtaaagaggcttacaacattggcgagttagaatgactcattgaaaataagaaccgcgatcaacaccagatatacattgtcgaccttagatagaagaatggccccaacttgctattggaataactgtaaccaagtttctatcgagacatctccaaatacaacagttaaagacatgtttaatacacgattgttttcatccaataaaagcttgaaaatcacagctatacgtttttcaaatcataaatcacatttacactgcatgatatgtaatcaaatcccatgattttagggatgattgttgtaaacatattctggtcaactttgtaattaactgaccactatgtaattataattagtggcagacaagatcaaaagggggaggcaaaatctcatacgagagaggccctaaaaaaaatacacaatcagaaatctgaataagattgacttgtggactatgcagaattttaactgcaaaactacgtaaaaaaccctgtgttcatatattatttttcgattgcttttacttttatgtgtggaattattatcgcgaggctcaaatttagttaacgaaaatctgcgttaatagtttggttcttccattgagagcctctatgaaaaagctcagaaaaaattgtcccttcttttgaagaaaataacctccttcagggctgaaaattcagaaattgttaacaccccacatgaggaatcaaatcatcgttctgggaaagagcccatgggctctcgaagacctaccaacccgtagtctagaaggaccactcgttccgagagggttcagcccgagggtggtttagcgcacggacaacacgttcttggagaacttgacccaacgttggtcctagtacgcggacaacacactcgacgagaactcagcgtgggaatgttcaaaaccccgggacgagggatgaagagctcaatcgttgag

SEQ ID NO: 397403 - DNA, 1130 bp, Cannabis indica
tatggatagaaattcaaatttcctatttggtattgtatagtaagttctctacatatttctcaatttgtaagatttaggttttttttttaactttttttaaaaaaaaaagaaacttttaatcctctcatctctactattatttgattatgtcatttatttgtttttttactctaaattgtatggtaagatttttttttaaagatttcgaacctattattatattatatggtaagttttctataaatttttatgtttgtgagttcttatgtttttcattatattttagatttcttattttcattatagatttctcaatttttaattttatcttccattttctaaacttatttatttatttattttattttctaaaagaactaaaatatttaaccctaaaaaatatctataaaaccaaaattcttctaaattgatttaactattttctcctttcaaaccctaccctttttattcttctaaaaaatatttaaatttattttctttttcttctattcttaaaaagttctaaaatatctaaccttaaacaatatttataataaaataatattaatattacttaagtcatattctcaaaccctatcctttctattcattattatatatgtatttatataaataaattaaaactcaaaatcataaagtttcccccaaatttttattcatttcttaaactattttttttaaaaaaataaatatatatttaaaactaaatcttatgtaggttaaaatagtaaaaataagacgctgagctcaattttcaataattttattttttaatataaccaactataagacaatctctgacagaaatagatacaaaaagtaatcagttttatcataacatctctagatcaaattattattaaattaattttattttgataaaaaaatagtgatcatggtcctatttgaataatttaacagaacagagggtccaattgataacttttgcaaaacacagagtctaaaataatatttaccctaaattaaatcattattattattattataattactaataattactaattaaaaatattttaactctaactatatgaattataattattaataattaaacaaactaattaaaatatataattaagtacaaa

SEQ ID NO: 397404 - DNA, 642 bp, Cannabis indica
aaaattaattaattctgtacaaaatatttgtcgccgaacgactaactacaaaagcgctgctgtcccgaggatcgtacgctccaagcctaaccgccccaacatgtacaatcttcatcgactcgtcctcacggttcctcggttttggccttgcccttacctacacataaacatagcactgtgagtcgacagactcagtaagaaaagcataaatcataaacatacataaatcccgagttatgatcagacgcccatacccctgatcacaaccctaaccaccatgtcccacacggtactgagtctcgaacgttcgtacgacggtacttttgacagagtaacaacctaaactcggtagactggtcatactccagctgctagtcatactctaaccttaccgatgttttacagtatcagcctatactcggtacactagtcatactctagctttaccgatgtgatatagtcaaacaacacagtaccatcgaccataatatcagcctatactcggtatgccggtcatactccagccgctagtcatactctagccttaccgatgtgatactgtcggatggtacgaagccaacatacatatctaatgtaatctaacaggcttcctaacatgcacgctaaacatgtaaatacata

SEQ ID NO: 397405 - DNA, 577 bp, Cannabis indica
ataatcattattatgcaataaaaatatatatttaacgtataatatatataaatatatatacacatatataccaagaaaaatatatattataccgtatgaatgtatacaatatatataaacctgtgaatatgaacagaatatatatatgtatatacgtaaataaaaatgtatgtatataatcgggattatatgaatatgaatatgaatgtatatatataaaatatatataaactaaaaaattgtatatgtacgtgtatatatataaacgaaactcaaacaaaatcaaggcagaaattaaaccgctcagataccaactgttagactataatgtataatatgaaatacaacatatgtaaacgatatgtaatgcagaaaatactataaatatatcgaaaacatatatgcaatgaaagatcgaaatacctccagccattgattattgagcttcaatccctgcgatagcttcggtattggagttcgggcttcctcgctctctcaactccctttagatgacattttgctgaataaacagaatgagtgaggagatcggggaccgagaccctatatttataggtga

SEQ ID NO: 397406 - DNA, 627 bp, Cannabis indica
atacaactggcagaaagagtttcgcacaacttagaacattacaggttaactttgaaaagtattttaacaataatagttgaatattgtttcaaattaggtatgattttattgtttttctaattaagtaattttttgtagaaagcggatggtgcgagtacaccaacacgtgcaactatgttcaaaatttgttatgcaaaaagaaagaagagtgttataaatgagaagacagaagaggctatggtatgatcatccaaatatttttaaattatgtattatttcatgctagctagtttaatcttattttaattgatatgtttacaatgttaaattaatgatagttacaattacaagaaaaagaagaactgaatgaagatgcatcgaaagaaaaaagtatgaatgatacgttttctgaagtgatgggcagagaaaaacatggatcagtgcgcatgtttggattcggtgtttgcccatccgatgtgtggaaggataaatcaacttggaaaagaagtcaaaataagtatgtagatgctctagagtcaaaagtaaatgatttagaatctcaagttgaaaatcttaaagctatgttgaacaaccaaagcaatgacaatgacatacctactgcacagg

SEQ ID NO: 397407 - DNA, 638 bp, Cannabis indica
tatcatatgttatgatatgaattctaatttttattattaaatggattttgtacaatattttaattcatgagtcattattttttatatatatatattacataaaatgtttttatcaatgtctagccacatcaataatcttaatttagattatttaaaaaaaaaaatcttaatttagattatttgtatcaacataatgctcaataaactgcacttacaaccctaattaaaaaattctaaaagttcaattagttgttaactagtgatcttaattctcttgtactactacaaaatcacattatatttacataaattaattaattaataatttaacaattcaaatataataataagaaactaatatatttatttattcaatttaaaaaatgataaatatgtttacatgcttttaagacacattcctaacatgcataaaggtaaaaaaaaaacccgatttcatattctcatattcgaaaattttatctcgactcaatgatcataacgagtattaggaagatttcatcatcaatttatttttctttttattttttttattttttattttttgttgttttcaaagtattagttttgtatttttatcaattatcagctgcttatatggtttattcatcatgatactt

SEQ ID NO: 397408 - DNA, 635 bp, Cannabis indica
ctaattgttaggttctattgcttcattttggtttgttggagtgtatacaggtattctggaagttttgggaaagtttggctttgatttgaggtcaaggggttgtttttcgagttcccagtgcagaaccggaattccggttcctggggacctgtaacaaccggtcgaccggttggtgcccaggaaccgaacttccggttgggaaccggtctgccggttgggggcttttcccgaaccctaatttttcttgtttttgggctatttagagagttagcatcctatttatcgatagggttattcgtagttttgattttaaatccccgataggtgtttttaagtgtctctcattgagttttgaacattatggtttagggccctgtaaagcgtcgagctacacttccactcaggctgacctgcacacctgagcacggagcgaggtaagatatataacatgaatattacatacatgtgaatgaatgcatgttttggaattttacactactagcactaatatgtatgtgattcaaagagtgttagtatagtgtagaatatcagtagggttacggtgtatgtgatacatgataactctaggaattagagttattttcacatttttttaactaaaatttgcttagttc

SEQ ID NO: 397409 - DNA, 1167 bp, Cannabis indica
ccaagctatgccatgagtgtttttcttctaaccaaggaaatttgctcaagcttagaagggatgatgtctaaattttggtggaaatcccaaacgaactcttctaaaggtgtgagttggatgagttggaagagactttgcaagcataaaaatgaagggggcattggttttcgtgatcttcgggattacaatttggcttttcttggtaaacaaggttggaggttattgaccaatgaaaactcattggtaagtagaatctataaggcaaggtatttccctaaaggtagttttctcactgctaccttaggacaaaacccaagctttatttggaggagcttatttgaagccaaagagttggttcggtctggtgcaaggagatcaattggtggaggaaatttggtcaatattcttgctgatccgtggctacctgatgatcagaatccctatgttagttccagccaccctgcgctagaaggccatctggtgtctaatctgttctggggcagaaacaatgggatcttgaagtgttggatgatctatttaatactagggataaagacctaattctttctattcaactgagcgactctgtggacatggattcctggtattggaataaatctccttctggtttttatactgtcaagtctgcttacaaagcattgcagcaacatgacagcaacatgcttattgatcaagacagggagggttataaaaggctttggcagattgcaattccacctaaggtgcaacatttcctgtggcgtgcgatatcagggtgtcttccaacaaagatccagttgaatacaaagcatgagaactgtgagactcgctgcccgttctgcaacatagccgaggaaaccatttcacatattctgcttggatgtcgatttagtcaagcttgctggaacttatcttgtgtgaattttgctgcaactcaggttgttgatttcagatcttggttctttagcttgctggagttacaaccgattaatgtcatccatgaagcagcgatggtctgctggaaaatctgggcagtaaggaatgatgtcgtttggaatagtaaaacttgctctgctatcgaagtggtgcgatcagctaggattactcttaaccaatggagtagtgctcaatcacaaaaaatgggggcattgttagtagatgatatta

SEQ ID NO: 397410 - DNA, 1593 bp, Cannabis indica
attttattgagtataatactctagctgaattattatctattggttgaagattcttactaataaagttttcatttctattaaaaaataaataaataacataaagtcatatagaagaattttagtcccgctaaaacctaccgtgcaagttggtgtttcttgaattgtgtactatctaatacagttgactgactatttctaaggtatatattaggggtgtttttttattttcagaacatataaaatttatttttttaatatttttatatgatattatgtatagtaattataataaatatttaaagtgattctgaaattatttgaataatttaattataatgtaaaaaataaaaacaaaataatcaattaataagatatgcatataattattgtttgaattttatttttaataatataaatttcttaaaagttttcaaaaatggatatatagaataccttattaccaaatgtgcaaagttcgtacctaaaagttttgtgatctttttgttcaaaaaaaaaaaaaaaggttttgtaatatataaaataaaaccatgcatatatatatacgacaaataatatataacaaaattaatgttattaaaatcattgactagaatattcaattaaatcgcaaaagtctttgtatgtatctatataaacgtatatgttacacatccatttgtttcgaaattccttctcaaagttacaagaaacgagaaaagtaagtacattattagtgtagtgcactggaagcatcaaggaaacaatagttttgatcacattttttcagctaaaatttttttttggatcacatcacattaattatacacatatgattgagagttgaggaaaattcatggaaattgcatttttaaataatttctagtcacatcaatttttttttttgaatgatcaaatattttattaaccaataacttcagctaccaaacaaggtagcaaatcagttggaacatcctccaaactgaaacgacgatcagggaataacatagcagccttcgcaaagtgatgggccactacattagcagatcgtttcacaaaagaaacagaaacattaccaatagagttaatcaaagtcttacaatcataaataactaaaccaaacaaagaaagcatttttaaagagctacgaatagcttggatagcaccaaggcagtcggattccaatagagcattttgccattgcctttccttaatccaactgagcgcttccttcaaacctatagcttctgcaagggggggatcaaccaggtcgtgtgagaaaacagtacgggcttccacgagaaagccatttcggtctcgagccaccattcctataccatacttgtgtccaccatcgaacaaagccgcatctacattaatcttgatactactaccagttggaggtgtccaatgctcattaccatcgccgaactgaacttcagaccgagacgtatccaaattggagtttcgagcattcttccattgatcaagatactttgttgcaaacgcgaccacgtttatgggattaaagacttttttctgccacacaagattatttcgggctccccaaacagcccaacagaccgctgccattgt

SEQ ID NO: 397411 - DNA, 635 bp, Cannabis indica
aattataactagtggggcccatcaactatggccaaccactatgaggtttattttgctattattttctatttcatataatttaaatcctaactctagataaaattgtataataggaatatgatgctctcattcttatccaagtctttaaggatttgacatagttttcattctgtcagaaaactagaatttttgagagctccttccattactattttcgaaattctctctcccacttcataattttcgagtctatactgatagagtacatgcctactcatagcaagtcaagtactgaatcatagtgtggaagactgtgaagaatctaacacgtgaaggagaactaggctcagatcttgttaatactctgggacataaaggaacaagggttagagatctgagtggaaggagacatattatttcgctgccaccaatattatttcgctgccaccaatataagatttcttaacattatatatgtttatttttattgttttagaaatttatatttaggatattagattatggaacacttcttaatgggtaatacccattgatgggaagtaaaaaaaattaataaggtaataatctaataacctttttatggcaagtttctaaaaattatttttttttttaaa

SEQ ID NO: 397412 - DNA, 751 bp, Cannabis indica
cctttgtggtgatgaatttaaggacgtatgtatgtgtttaaatttaaaaggacaataagttattgttttctttctcaatccatatattcaatttaaggacaataagtaatactgaaaacgattagcaaatatgtgaatatgatttcttccaattatagagaagaaaataatataaacttagatttattatggtcatgggacaacttgatttttattgttattttttattttacaagatacaatgcctagttatgatatatgttgacattgtaggaagaagtcacctaaatatttttccgtttataacctcatacttaccacacttattgtaagaaaaatatagaagagaaaatagaaagaaaaaaaaaaattctcaaacaagaaagaaatattatatagaaaaaaatttgatttaacaaaacttttcatgccaaacattattttttttaggctaattaggatttttgcccctgaactttgacaagtactaaattatgcctcctgaacttttaaggccattgaaaatgcccctgaactattgagattgttggatttaaggacttttgtctaattttattcaattttactatttcaatgattgtttatgtactaaaccatgttccccagactttgatatctaccaaatcatgcccttcgaactttgacatgtactaaattatgtcccctgaactttcatccatgttagacttttttactaaaattaagaaaaaagtccttaaatccaacaatc

SEQ ID NO: 397413 - DNA, 1145 bp, Cannabis indica
ttttttttttgaatagagatatttttaggagtatttataagacttttagggtttgaattttagagcttttaactacgaatttgagagtgaactcagagagagagcagggaagagacggagatcatggcttcaaagtgttcttcatggttcttttttctccttaaactcttactatctattatgattattgttataatatctagttttgagtagtttccttttagttaagggttattttaaaatccgagacatgaattcttaattttattatttaatgttaatttctagtttctattatatcaaattgtttctattcttctatgttgaatgtcatggttattattttaatcttttttagatggccactaaattaggttttactttaatctacattcatcttactattcacctaatagtctaggattctaagtgtttatgataaattgtaatttttaatattgtcaaaggtattttaattgtgatgaataatagaacctaggttaaataaattatatgtttcattgatttatttccttgattaatctattacataaatcttaaagctttatctaagctaaataaattgcatgctttgtggattactgcttaggtaaaagagttaattattgagcgcttcgccttgattgcatgtaataggaagattaagataatttactgcttcagcgttatctgtggaattaatagtttgattagaaaatcgaaattacattcattaacaagaattaagaatgattgttgagggtggagaataaccttcgactatttatctcatatcgtagtctcacctttaatttgtttttatttttatttatgctattttattctaatcatcaaaactccctttttcaattcttgtcattaatttttaataataaattgataatagtcatcgtgagattgacctgtatttactgttatactgaagtaattggtaatatagaaataaaagttagtaaatttattgtggtaaacgacacgcatcaatgtgattaattaaagaaatattgtataaaatagtttgagtgtgaatagtaaaaaaaatgtaaaagagagaaaaagaaatataccaagcatttgtatttttttttaaaaaaaataattaaagtataaaaatttgtaaggag

SEQ ID NO: 397414 - DNA, 896 bp, Cannabis indica
caatattattattttaaaaaaactgggctcatgatcgataatacatgactcgtacagaaaaaactcgattgtggtaagttttatttgtattacataggggcattattagttgttttaaggtttaatattagctgcctcacatgaaatataattgttgcattatagtttcatgacaattatctcatagttgacttacaatgcttaaattttcaaactgttaggaaaaagatgcaattctgtttctcatattttacaatggaaaatttgatcaaggaatgaattatataaattatgaagctattggctaatacacttcaatagattgcaaatatgaagaactagtacatgagctaaaacaggtgctggaatgcaaccaagaatacactcaactaccactgaaataccaagtgaaagaaggataccaaccattgaggataaatgacaatctaagcctattcttctacatacaactaaaattgaaagaaccttacttcacagggtatctattgtgtgtgagcatggtcaacaacacaacaacaaccaacaacacgtccttctttgtgatgagctactcattgcataacaattattttaagagtgtatgtcatatctaaaaatattaatacaaatataaagcattatcaacatcatatttgacacattaataaaatgtttcaaaacttttctattacattgactattctgttgaatcgttaaaagtttcttattactaaaataataaaatttttaaggcctaatataagtgttaccatgggaaattgaactccgaagagcaaccaaatgatgaacctgttgggttttgtgccctaaataaaactcatttcaatataatcagatttactaataaagattagaaatcacattttatgttgcat

SEQ ID NO: 397415 - DNA, 979 bp, Cannabis indica
ccccccttctgcctcagttagttggctcaactaagcttgcttttcgcctacaagatttaagcttctccttaggcaaagtctttgtcaatatattagagtcattgtcactggtatgtgttaggatttatgtcctaaaaaacttataaagacatttatgattattaataaagagttgaacattttgatacatgcatcaatgttaaattattaatatttattattgcataatttatatataaatatcagaaaaatcattatttatatatgaagttgtgacttgtagctgtatagagaactaagatcacttaactataaataaaacatacatcaacctattaaagttatgaaatctttaatcaatgcatggttactagtatgatttactgatgcccgttcttcgatgcaagtaatctcaatttgaattactaatgtatgatgacatctaagtgaagatggtgtatataatatagattatatatgacaaggaccgatatgaataaagatgtatttatctaacatgtcgtttactataaagacctaattcatatcataacattgatcaataatacatcggtctaaatcttgagtaatcatgaaatcttattcatgttattagtttatttgattcactcgttaaagcttcttagagaaagatgattcttacaatttttattttgggaatttaataatgtgaatggttgggaacatgatctacaattatagaatcctgacttttctaacggatcgaatgttggttccctttaaatattaattctttgattgaaaagttgtgcacaaatttagatgagatctaaattatacttacactagtgaattaatggtactaaaggagaaaaaaataattagaagggtaaaacaataatttgaccaaaactaattacgaaccaacacatggagggctaatcaatggaattgattatatcaatagacactgaagtaaaactcagtaaatataatt

SEQ ID NO: 397416 - DNA, 835 bp, Cannabis indica
cagtttcaggaacccttagttttccccgtttttcaatattaagagtattgcaatgttatccatcgataggaaactttagtttcaattttaagtccctaaaaaattgatttagcgtgtcactcatcagttttacggataatgtgatttaggggcctgtaaatcgttaagcagttgttccactcaggttggtcggcacaccagagttggaaaacgaggtaagattagtataatgatatgcatatgtgtttacatgtttagcatacatgttagttaagtctgttagattacattagaatagtggtgtcagtatgtttagtattatattggatatcgataaatgtatgctgacttaagtactattttatagcatcacatcggtactactagagtatgactagcgtaccgagtataggctgatattatgctcgatagtaatgtactacttgacagtatcacatcgatatgactagagtatgactagcgtaccaagtataggctaatattatggtcaatagtactgtcgtacgaacgttcttaacttagtaccgtgttggacatggggatagggttatggttgggtgtatgggcgcctgattataattctggttatagttatgttattgattatgcttttcttactgagtctgtcgactcacagatattgtttgcatgtgtaggtaagggcaaggctaaggttgagtagccgtgagagtgagcagatgaagattgtacatatcggggcggttaggcctggagcgtacggtctttgcgacaacttgttttatattgtctagtcactaggcgacaatttttgtactatgcactatgaactttt

SEQ ID NO: 397417 - DNA, 517 bp, Cannabis indica
atatattaagtaaacaaaatcatttgtacaatattttgctggaatttttttttttttgttatatttgaatgttttattctctcttatgagggtacttaattattataaatataaattgatactttattcataaagtaaaaataacatttatactttttatgtgattttaattatcaaaataccacttatactatcacttacataatcaaacgatagttgcagggtgattgttgcgtggttgcgcggtagttgcatcagacaaaagtttcaatcagacgatggttgcagggtaattgctaggtggttggtcgaaagttgaatcgacgaaagtttcaatcagacgaacatttctaggtagttgctgagtggttggccgaaagtggcatcagacgaaggttttcaattagacgaaataattgttagcaaaatatttatgcaactgtaatacaactgtaatgcaacttttgtgaaatattaaaatcagaacagtgtttgtgtttccacgcacgtaactcta

SEQ ID NO: 397418 - DNA, 1064 bp, Cannabis indica
atgttcaagttgattatagctgtccaagatgtgtgcttcatgctgaaactccttaccactgtttggttgaatgtccgttcgctaatagttgttgggagcttgctggtttgaggaaaactaccccagccatgacctcttttgcgggttggttggaagccatgttcctgcagctggataaagatcaattagcggatgttgcagtgctttgttgggctgtttggaagaccagaaacgatctggtgtggtcagacacgtcatcgacagcagctgctgttgtctttctggccaagaatactctctccaactggtgcaatgctcaagaccgaatgctggttcctacagcagcttatctcacagcaaaagatgggcattcggcttggtccaggcctggtgcaaacactattaaagtcaatattgatgctgcaatttttgacagcaatggcacttatagctttgtttgtgtggctagagatgcaaatggtcactttgttgaggctattacaaggtgtcgggcagggattgtaactcctgaattggcggaggcaatgggggttcgggaggccttaagttggataaaacaacgagattggcaaggggcggttgttgaaacggattgtttatctgtggttcaagcaattaggagtgatcttcctttattgtcatattttgggagtattgtttctgattgtaaaatgtttttagaacaattgagtggtgtttctgttatttttattagacggtctgcaaatagagttgctcatgcgttagctcgagcttcctactttgtcgctgatcgtactcttttgagcaatgaggtgtctaccgatttgctttttgtaatcatgaatgattgcagttaaataaagtaggatgattttatttcaaaaaaaaaaaataaattatacttttaatatatattgttcttataattagtactcccttctaattaattaattatggagtctcatacaattttaaaaaataaatatttgttataaaataatataaaataatataaagtagaagagaagaaagaagatgaagagagaaagagaaagtgaatg

SEQ ID NO: 397419 - DNA, 920 bp, Cannabis indica
atagtgtcaaaaataaaattaattaaatagctagtcgcatacgtgttagatttttaatttatttttatatacttacaacagattattttaaattttattttttaaacttgctgatcaagattttcggcaattaactaaatgagataatgatgagagctttaggataattaatgaaccgtagtccacgaatctttattattaatgagagttcttatatagagaatgtcttggtgagacgtttttcgctctcccctttgatcgatcccctttcccattttgtctaggggtatttatagagattggtaaagatagttcaaaagagataacttgtctttgagtgccaatattgtatgagcagtattgtatgagcacaagttcccaagagatacaaaatagggcatgcacaacctatgctgtaggtaccatagggattacgtgagattaatctttattctttcttgattgatgtgattcttcataatagagctgtcactagcccctttgattactgtgtaattgtcgtaaacgaggcttacgttatctgacatgtcctcttatgggcgttccaagacgttttccccatgctacattaaatgcgaggtgattgttcgagtatattctcctcctcccagagatgctttattatatgcctagcttccggagaggaaggccatgcttattgcacttcttcgggggctcacatcctgtactacaccaattcgttttaatatgtctcagctaattcttaggtgaggtgtccttttagtccacgtgtcatatgtggtcgaggccacgtattttgaaaaaaactcgaggcaacaaaactaaatatgttatagggataattgcggcaaaagtccccaaaaacttgaggttgatgccgattagtcctcaacctcaaaaattggcggtgaaaatac

SEQ ID NO: 397420 - DNA, 964 bp, Cannabis indica
aaaaataattcactttccgtcaatatattttcttcaccaaacatctttcatgaagaattaatttcttcatcaaaaaaatggttttgataatatagaagtaaaatttatatacgaactgttaagttttttatggtcctttttatctacgataaattctcatattttgatttttttaaaaaaaataccatattttgtacatatatcaattttttttccatatttaatagtccttttcttattttggaaaccaaacccattaaggcccaagattaaaaccaagcccattattacaagaggcccaaagttaaaacccaagcccacgaacaaagaaaccaaactgtatcatctttctttgactttggcaaaattttccttcttttcagagagaaagaggaagagagaagatgatgcttcgtctctgtatcagaagagctcgtcgccattgttatcaccaccattttcgacaccttcctcctcgtctattctcttcttcttcttcttcttcttcttcctccgaaatccctatccaatcaacccaaaacaatctccaaatttcccgccaactccaaccaccgtccaccgccactccttcctccggtctctcgcgaaataacattctcaccttctcctctctcgccgccgcttctgccgctgtcgcatacgcatttctctcctctgataatgatcgtgatcataaggccgccatcgaacacggaattcgcaaatacggtgattcgatcaataacgttttcgttcacattaagaaaaccggtgttgctgcttcggttctctggcaatcgcttaggtcggtgttgtcttcggctaatcacgaggtacgttcggggttcgagctaagggttgcgtctcttttggccgatattgtttctgctaatgagagtcgtagggctgctattgttgggggctggtggtggtggtgctgttgttgattggttgcttgagtcgg

SEQ ID NO: 397421 - DNA, 629 bp, Cannabis indica
aacctagacccaaacctagaccacaacgttgtctcgcacctagaccttgactgggacacagatcgggactgcgaccctgacccgaacagggacctggactcagaccgggacctaggcccaaactcaaacctgaacacgtactgggacctagacttaaacccaaactcgggatccaaacccgaacctgaacttggacctaggccgggttctaggatccagacctagataggggacttgggccccaaacctgaaccttgaccaagacctagaccaaggatcgggacctagatgggggactttgacaaaaattgggccccagaactaggagcgagatcaaaaattgaaccttagactcgagacacgggacccgaccctagatcaagactcggacctaaacccaaattcagaccagaaccaatactgggacttcgacccggaccgggacctgtgacttgggacctaaagcaagaccaggacaaggacccagaccgtgtcccggaccctgacctagacctagaccaaaaaactgggaccacacccaggaactaacaacaagacttagacatgggacttaaaaatcagacccacactgggactgggacccggacccgaacccgaacacggaccaa

SEQ ID NO: 397422 - DNA, 1053 bp, Cannabis indica
agttgagtaagggtgtgctaaccagttttacatcagtgaaaccaaactttgatagaattttagagatgtaaccactttgagaaagctttaagcttctaaattttttgttccttgtaatctcaattcccaaaattttttttggctgagctaaggtctttcatttcaatttccttgctcaaaagcttcttgactttgtctatttctcccatatgttttccaccaattagcatattatctacatataggagaagatagataatggagcttgagtacatgacataaacccaacgatcataggcacttctcttgaaaccaattttcagtacacattcatcaaatcttttagaccactacctaggggactattttaggccatatatggatcttttcaataggcatacatggtcttcctttcctttttcttcaacgctttttcgttgcctcatacagatttcttcttccaaatctccatggagaaaagctattttaacatctagttgttccaatttaagatctttaataataacaatgcttaaaagtaatctgaatgaggtgtgtttcacaataggagagaaaacttcattgtaatcaattccctctctatgtgaagcctctagctactaatctagccttgactcttgcttcttcaattccaggaataccttctttgtacttgtacacccatttgcaacttatcaccttacaccctacgggttttttcactattatctatgtgccattcttcctcaaggataccatgccttaagttcccaacaaagaatggggtggggtgccaaagaggaaaccatcaagttgcgcgggaatgttttaaccttaccataacgaaggctaaaaaggaagtatcctctagctagagttcggacaagggaaaaaacattgctaaatagggaacctcgtaaggcggggatgaagatgtggatcctcgacttggggacccaagcaacaatgttggaacaggggaagaactagaagagattggaatcgacccaaatatcccgaccaggaagcttaaaattggaaaaggtttgttgc

SEQ ID NO: 397423 - DNA, 1396 bp, Cannabis indica
accaaactttttgatttttcgagcaattgcaaattccgcctcgtgatgacagttattatctgtcttaagcaaacttgaatatactttaaatgattttatcactttgtatatctttgattgctcttatgaatagttagattatctatccattttctaggtttaagtactttatcaagacgtcttgatgtctcgtttagtactttcctagctcgcgcgaaccgttaatattcagctttatacacgagttatgagttatatctcatttataacttttgattttcctttcctgttagataggtttttaataaaaaaaattatagttgtttgatcccttcttcgtcaaaaaggtttgagcaggatgctataacaattcgacccctttctcgtcaaaaaggtttggttaggaagttataacagttcgacccctctttcgtcaaaaaggtttagttgagaacctttaaaaaattcaaagttttttttttaattttttaagtggtgggtttgcattatatcatgtatttctagatgaattctggttaatcatacacaaatgccccttaagtagttttaaagagttaaactttgtaattacttaaataatagaaatgattctctttattcataattaaagttaaaatattacatcagcaatgtgagtttcatcatttaattattggtagtagggtcgcaaatgttccacgttccagtagttctttattagtgagccattgagtcgagccaatttgtaaactccaattccaactactgcttcgatgacatatggaccctaccagtttgggttgaacactcctgcagatgcatctcttgtatttgaaaatactcgccttagcaccaagtctccaacattgaataatcttttcttgacttttttgttgagatatcttgtaactcggtgttgataggctgcattagtgacttgcgactcagtttgtttttcatcaagtaggtccaaggataactttagaagttcctagttttcttcttgattataaaactctcttctgtgagtcgatatgttcacttcaacaagtagcattgcttccgagccaaatgctagcgagaagggagtgtgtcccgtttccatcttctcggtagtcctgtgagcccagagtacttgaagtagctcatcgacccacctacctttggcagcgtccaatttcttcttgatagcatcctttaatgtttaattgacaacctccacttttccattcgcttgagtcctagatactgacgagaaactcttaattattttgttcctctcgcagaactcagtcgccatcaaattgggttccatcatcggatactatcttcatggggattccaaacctacaaataatgttctgacgacaaagtcgaggactttcttgcaggttat

SEQ ID NO: 397424 - DNA, 672 bp, Cannabis indica
taattattttccttatagagcctaccaaccaaagagtcatcattaaccaacgatcgccaatattgtttccccagaagagtcaaattaaagtctctcaagcttcggaaacttagtcctcttgcatgtttatgaccacacaactgctcccaactcatccaattaatacctttaccactgctcgaatctaaatgccaccaaaacttagccataagccgctctaactccttacaagtgtctaaaggcaaaagaaatacattcatagcataatttggcaatgcttgagcaatagatttcagcaatacctcctttcccatacgagacaaaatgcgcccttcccaaccttgaattctcttccgaagcttacccttaagaaagccaaggatagcattcttattcctcccaaccaaacaagtaaggctcaggtaatagcaatttttatctgcctcgtaaatttccagcataacatagatagaatcctgcacatcactaccagtattattactataaaacacaaaagacttagtgaaattaattctttgtcccgaagccacctcataagtacgcaacagctccttcacattgtacgcttcctcctcagtggccttacaataaatatagctatcgtcagcaaagagcatatgagagattactggcgcacctcgagcaatttta

SEQ ID NO: 397425 - DNA, 1089 bp, Cannabis indica
tttagctacagtgtgatttcttcaccgaacagagtacccggatttattccaccaaagaattctatagacaaatctcctagttagaaaaattatggtaaactgtaaggactacagcaacgttcattttattttgattttttttttcttttttttgaggaaagatacaaaagagcaaacgcaaaaacaccattactacatatagtaatgttcgaataccgcccacgaaaaattatactttactgaagacggtttacgtttttatgcacaatgagttaaaagaacaccaatactgctgagcctatgatttgcagaaaacatccaactccaagatctaaacatccacctctatattgctcaagatcctattatttttatggatggaaattttgaacataaacaaaaggaaaaatatccattcaattttttgtttcaataccgtacaaacttaatagatcaaattttaaaaatctaagtcaacagaacgaagagtgagcaccagtatcgaagtatagtttatctaccttcccaattctcaaaaaaaaaaggtaagcgacaatgagatactcatatcacaaagctcaaaatcagacattattggaaatcaaatttgatacagacaccattaaattctaacagaaaaaagaaaaaacaaaaacaaatatggaaagaatacagaaacagaaccatcaccgacaaaaagatttaaaaaagataactccattctccaatctgattaagcaaaacatcacgaaatccaaaatcatgcgttcagaaaacaccaaacaaaaaaaaaaaagcattgaacaatcaataatatttttcttcactatttgtttttaatcaaaatcttatcatatacaccaacagtaagcgaaaattacgaaatgcagaagaaatcagctcaccagagaagaaaaaagaaattaaatagctagggaaaagctggagtgataagagatagtgaaactgtagtagtgaaagagacgaaaactgagttctcttcagagattcaacaatggagatcccagattacgaagatttatttcttcaccttcaagtttcgattaaaagaaataaaaataaaaaaaa

SEQ ID NO: 397426 - DNA, 526 bp, Cannabis indica
ttgtcgttgtgatttttgactcttttagtcacaagaacgtgttaagttttgaaaaacacgcattttgatccaaaacataccctggccggccctaggggtcttgtttaagacttggctggctctagggtttcaccctaggaagttggccggttcatgcttaggtcttaagaccttagccgattcttgcatgggtcatgcgatcctgttggccctctcaaagctttgggaccctggttgacctaggccttggttccaaacgagtggccagttttctgtcctcttttgactcagcaagaatcctgtcatggccttgtgagcctatacaactttaatctcatacgtggttcccttagaaattttgtatgacactttatggtgagtctattatagttgaatgcttaacttaagactcaacatttatccaagttgttacacttgaaactatacttcgttgatacccaaccttgtacgatgaaattttctagcaagtacccttgagtattgttgaccagagtcttgtctaaac

SEQ ID NO: 397427 - DNA, 862 bp, Cannabis indica
tttgtttaagacaatgacagagtttgtactgataaatttagagaaaaattgcagttttacaaatattgggtacttatgccgctaaaaataaacattgggcttatgccgcttacaaacataaaactttgggtacttttgccgctatttacccttattttttttatataaaatcatagaaaatataacatttattcaaggctaattagaatttttgcccccgaactattgagattgttgaatttaaggacttttgtccgattttagtaaaaaagtctcatatggatgaaagttcaagggcatgatttagtacatgtcaaagttcgaggagcatgatttggtataggctaatttggatttttacccctgaacttttcaggtcgttaaaaattctccatgaactattgaaattattggatttaaggacttttgtctaattttactaaaaaaacgtctgacgtggataaaaatttaggggcacaatttggtacatgttaaggttcagagggcatgatttagtagatattaaagttagagaggtataatttagtacatggacaattttcacattagcaaaattgaataaaaatggacataagtccttaaatctaacaatttcaatagttcatggggaatttttaacgacttgaaaagttcagagggcatgatttagtacatgtcatagttcaaggggcaaaaatcttaattagcctttattcaattactaaaattttactaagagcatctctaaggataagctaaatatggtattactatcaccaaattttgcgtcaaaaaatatttctactataaccataatactaaaaattaaactaaataatattccttattattatattaattt

SEQ ID NO: 397428 - DNA, 712 bp, Cannabis indica
tttttcgagaaaaatctttgattagcaaagattgcacaataattgaaaaagcactgtagcgtgcctttgctttagggcgttacatgtttagtcattgtgatttattgaattaaagttttcatattttgatttagggttccatagaatttgaactaggtgaattttccataaaatcaagactaaaaaaaaagaagagggtgaaaaataatatattgataaaaagaatgtaagtacatataacaatcccctcttttgaactacatttgtacaaaacaatcttaaggacatgtcaaaatgtcattagaaaaagaaaaaaaaaagttacaccatggattcctcatatatgtattctatataaagtgtggctatgtaaaagaacttttggtttaatggtgttttttaattttctacgttaactttaatagagtatgttattacttaacagaatatgctattatttaacagaatattctttattaattttatagtattattattatatatatttaaaaaaaattatataaatatttttctttaattttctcatcttttaaatttttttattagttttatatagatatattatttttaacaaatatcaaaaaataataaataaatcaaattacctaaactatcaccttttttttttcaaattttcttattatttttaaaataaacaaatagatattaatgttgggtttttatgccctaa

SEQ ID NO: 397429 - DNA, 896 bp, Cannabis indica
ccaattttgagtttcctggtgggaacatttgggtcaattccaatcttttctagttcatccactagcccaacatttgtatttgtttccctaagtcggggatccacatcttcgcccccgccttgggcggttccctatttggcaatttcctttcccttgtccaaactccgactggatgattcttcctttttagccttggttagggaaaggttgtaacaatcccgtgcaacttcttgatttcctctcagggacccaaccccattcttcgttgcaaacttaagtcacgaaggaaatattgatgtcacatcttttaggtcatataaggctggtcagcccaacatgacattaaaggctgatggaacattcaatacaaaaaaattttccattatagtcatgctctttggagctttcccaacaatgaggggtaggcgaattttccctaaaggtgcgaaaactgtggccagagaaatcgtatacgggttgaagacaaagggttagatctttgagttggagtccaattttttcatacagtgttttgaacaagatatttacggaggctccattatctatcatagtttgggccactattttgctggctatatgtacttccacgacaaacggattattgtgcgggaagttaaccttgatatcatcttcttcattgaacgttatggtgggttcccctacccgtggtatttttggtttcctttctttgacgaccaggaccacttctttttgctcgtgctgtaaggttcgggcatacctttcccgggctttacttgaatctctagctatgtgggatcccaatgatgacttgcaaatgccctaggcggccctctgattttaatcggccttgacatatatttgtgttgggttttatgacctaaataaaactcatt

SEQ ID NO: 397430 - DNA, 1174 bp, Cannabis indica
agacgcaaaaagagagaaattttatatacttttttttggctttattcgtcatgttcatttttaccgtcattttgataaatgacgcaattcctatatttttagcatcatttaggaacagacgtgaccaatttttaggtactattcacgacagccaacgcaatgaacagtagtgtggaccgacgtaaatagtgtaatttgtagtagtgaattttgccctatatggtttgcgaacatttcgtttaccaattgctaatacgttgctccagcgttctttagtccgaacgacatgactttataacaatagagtcccatgttggttacaaaggttgtatgttcttgatctgggacatacatttttatctagttatatctagagtatgcgtccataaatgacataagctcgtgcccaacagttccatccactaactggtcgatcctgagaagtagaaaacagtcttttgggcacgccttattcagattggagaagtcaatacaagttctccaagttctgttgggcttcgggacgagaacaggactggctatccaccagggataaaacacctcgcgtataaagtctttggttaacaacttgtcaacctcctattttagtgccccttgcctctcaaaatccaagggcctccttttctatctctttactgggtagtttggatcaacattttaagtgacggcagataatattagggtcgatccctatcagatctccatggcttcaggcaaactgatcctggttcaccttcaaaaaccttattagtgctatttgagctactcgtccaggttccattttgtgggatttcctgggtcgagaataacctctttcaattcttcaattggttttagtaggtttctttcatcaaaaactcgaggatcaagatcttcgtctttcttctcattttcttccgccaagatcatcatcaacttatgaccagcttttctatgctgtaactttatgcgatagaaatcgcaagccagcatctggtcaccacgcactactcccacgccatctggtgtctaaaatttcaaggataagtgattgatcaaactgattatccctaatctgatcagtgctggacaacccaacaatatgttgtaatccgagggcaggttaacaactaagaaatcttgcataacagtagtagttaatgttgggttttat

SEQ ID NO: 397431 - DNA, 598 bp, Cannabis indica
aaaaaaaaaaaatactatatataaatgcatgtgctactcaactctttatcaattaattttgagatgacggagccccatacatcactacaaaaataatatttttagtgataattttttgtacaacataaattttttgtaactaaaatatagtatttaaatacaagttgttactaatttagttttagtcacaacaagcattgtgactaaatacacatttaatcacaataaattgtgttttttgtgactaacacttttagccacagatttttttgttacatcataggaattattcactacaaaaaaaaactgttacttttaatgacaattttttagtcataatatataatttttttgtgactaaatgtgacttttggctacaacaaaatataattgtgactaaattatagtatttagatacaagttgtcattaatttagttttagtcacaataagtattgtgtccaaaaaaatatttagtcacaataaattataatttttgtgactaattaataactttagccacggatcttttaatcacaacataagaacgataactaattataattaatcacaactttttacttttaatcataagtttt

SEQ ID NO: 397432 - DNA, 1126 bp, Cannabis indica
gaataaatgagaattttttgaaaaaatttgaccaaaaaatatagacaaaaactagaaacatgcttgaatatgttcaccacccccaactaaaataagacagtgtcctcaatgtctaaaaatatagaaattaaaaagaataaggaaagagaacacccaaggaaccatggatggtagcgatattgatcctctgaaaacataaaaactaaaaaaaaaatgataacaaataacaaaataaaatgacaaaaataaaaggaaaaaggagaacaaacctatgtacaagatcagggaaacactactgaaggtttgtaaaccggagccacgaggatatcctcgataggatggggcaccctctctatgtagtgtttcagtctctggcctttcactttgaatttcctcccatcggttgggtcttcgacctcaacagcaccgtgggggaaaacaatttttacaacatacggcccagtccactaggatctcagcttcccagggtggagatgcaggtgagtgtcgtaaacatgcactcgctgatttggctcaaattctttcctcaagatcttcttgtcatgagccgcttttaatttagtcttgtagatcctagagttgtcataagtatcattccttaactctttaatttctgacaactgaagcttacgattaaggaccgccgcattgagatcagaatttaggctttttacaacgtagtatacttaatgttccagttcaatagggagatggcaggccttgccatagactagtctataaggacacatgcctagttgagttttgtaagtagtgtggtaggcccagagaacatcgagaagttgggaggaccaatctttgcggttagggttaactgtcttttctaaatttgcttaatttcacgattagccaactcagcttggccatttgtctgtgggtgataaggcagtgcaaccttgtgaagtacaccatacttttgcatcaaatgctcaaaagagtggttgtaggaatgggtgccttgatcattgataataactcgtggtgtgccaaaacgagataacacattttcttttaagaatttaacaacagttgtgttatctacatttcgacagggcacgacttcaacccacttggagacatagtctat

SEQ ID NO: 397433 - DNA, 988 bp, Cannabis indica
aaaaaaatataatattaaataaattaagtctatttaatcctaaaatttaaatttttataaattttaacatatatactaaatgatattattaaaattttttcttaaactattaagattgttacatttaaaaaattttgttcaattttactaaaaaaatctaacgtgagtaatttttttttttttttgagataaaaactgttatattgatataaaatcattatacataacagaattgaggaaggaaatatactccaaccaaattcaatcaacatccaccaaaaagcattaacaaatcaaaaaacatgaatgatttgtgccttaaggaaattggatacaagattgtaaaataaaagaaactcaaacaactttaagaaattttacatcaatgaaatcaaaagaaactgcatatccagccactttagaaataaaagaatgtgagagcatcaatttcttgtagttgaatatagccctgaacaatgatgaatgtaatatccaccatatctctcatagagtttctctcgtaataccgattacttaaatcgataacacaattgcttcatccattctacatttgaggcgtcctgatggtgggttaagccatttctttatgagtataggctcttgaaataatgtagatcgcttctcctttagatccattttaattggatgaaaacaatcagagattggcctcgacatcgctaagattgttacatttaaaaatttttgttcaattttactaaaaaaaaatctaacgtgaataaaaattttgaaagtacaatttagtacatattaaaatttaggagacataatttaataaatatcaaaatttagaggcacaatttagtatgtggacaatcactatattaacaaaattgaacgaaattagacaaaaatccttaaatcgaacaattttaatagtttaaagtgaatttttaacaaaataaaaaatttaaaaaatattatttagtacatatcaaaatttaataaa

SEQ ID NO: 397434 - DNA, 519 bp, Cannabis indica
attgttctacataagagggtccaataattttaaactgtcacttttcttcttttcattttcaagtagtgttgtggaaagctctgggtggtgaaaggctaggaagtctccttcttgttggtaagtgtttctagcattcctttcatcatttaaaatgttatcgtgttcttggtatttttgatgctcttagaacaattttttatttataaaatagctgtgtagtgtttgtatgttttgattcgaatttgtaacaaataatgtggtttttgtgttttgaacttatccatgacttgcatagtatgaccatagaaattttgtatacaagcaacaagaatttttttataaccatagtgggtatggtatgaccgtataatttcgtatgagcttgatgcataatatgtccactaaaattttaatgtaagcatgatatgtagcatggatgtaatgcttttatatgatgcgtagtatgatcgttggatatatatcttgagttttaaattttgtctagtgtttgtgaccata

SEQ ID NO: 397435 - DNA, 1241 bp, Cannabis indica
gtttactttccaatgtgatgacagcacaataaacatgatcaagtatgtgaaaagggtttaagatgaatttataaatcaaatagacaagctattgataaagtgaaccaaaacatacacaaatgaatgaaaaatacttctgtttctttattgatgttgaataaaatagattacattgaaatggagttttatttagggcataaaacctaacatttctcatatctcaccgtttctgcatggttgcgcttttgtgagtaggagggcgcccaagcttgaaggcaccactggcctgcagcgcttttagagtgtcgaccgatcggatatgagttttcccaaatgtgtttgggtactgcattaactccaaggttgtttacatccatcttctccattctcctcgcttaggtagggatgtaggccttcattgtcgacaatgcccttggtcagtgagccttcgagttctgaccagatctcggttggtagtcaagctgtgtctttttccttttttggatgggttctccttcttgcaacttgagatttgtgatggaaaacactgtgcatgtttcaatctttcctcagatctcaatgaaatgagcaaaatatttaccgagatttttagaaacaaactaataagagcttaagaaaataaatgatattaaacaacagatgagcaattttttacgtggttcaggcattaactatccttaattctattgcatgggctgtcttggatggaccaccaaagggatgaaatcccaccgttagattggtaggtaggatatttctcatgtggcattctaagggtgtcagattgtaccggctgggcctcgaacgcgtgtcaccgtagggccattcctatttgaatttcccctattcttagttgttcgatcatttagctcaatacaaaaggacacgcatgctccgtttgatagcatttcgtgggagacaacttatgagatcgtacatggaaaagcttggtcactgagttcgtagcctaacacacgtgggttgagcctccgcgggccaaaggcatacccagtactagtgtatccttgaagtgctttggcgtagttgagaatatccacattcctcgcgggaccaaatggcctccttcccgtaatggtgtaagactttagttcacggatacccttggcctgttcatcaattggggagatttctttcacagagactattggaaaatattttaccaggatcttagatctactcacaagtatgttgtttaaaca

SEQ ID NO: 397436 - DNA, 539 bp, Cannabis indica
aacgtgtaacaaaagcttatagcctagtgttcgcttctgaaatcacgtagtggctacccttacgtaacttagcaaagtagaggccaacgttgaagaatactgggagaccacgtcaagaaggccgtgggtactagaacttttatgggttcctgcattatgaaacattagagtaacttaattgagaagttggccagtgagagtacttatcgagatgttccctattttagtgtttggatagaagttctatatttatgttctcatcgtactcgctagacttgtatgcacctttattgttatcttgtaacatggtgtggaccttctatgtttggtttgaatatgctttttgtagaggatttgctgtccatgaatattcttcagggagtaattctcttgcaaagaatttctttcctcgacctatttgttgacgggcttggtaactccttgtgtgcagtcatgctactttgagttgtcttggtctctttttctttcccttttgtaaggagatccttttagcaagatgttgtgtacttcttggtcac

SEQ ID NO: 397437 - DNA, 673 bp, Cannabis indica
tgggttggtcaagggaaattgagaatggatgagggaaaagtcaaggcgatcagggattggcctatccccactaaagtagcagagttgcgatcatttttggggctggctaattactatcggaaattcattaaagggtactcaaagagggtgagcgctcttactgatcttcttaaaaaggatcagaagtggtgttggtctgaggaatgcaatgaggcattcgagaaactgaaggtggcagtgtcttcggaaccaatactaaagttgcctgattttgatttaccattcgaagtccaaactgatgcatcggatcgtgccttgggtggagtactggtgcaagatggccatccaatagcttttgaaagtcgaaagttaaaggatgctgagcaaaggtattcggctcatgagaaggaaatggctgcggtggtgcattgtttagatgtgtggaggcactatcttttgggaacgaagtttacagtggtgacagacaatgtagccaacacatacttcaagtctcagaagaaattaaccccgaagcaagctcgttggcaagagtatttggctgaatttgattttgtgagggttcatagaccggggaagcagaatcaagtggctgatgcacttagccgaaaggatgtacaagtttttgttggtgcgttgactcaggtgagttcaa

SEQ ID NO: 397438 - DNA, 863 bp, Cannabis indica
aaaaactagtctcgactccatgcattaaacaccagctccgttttcttcttcctttgatctggttcgacggtgagaatgctgaaatattaaacttgatttaatatagttgatttctaaaattttcttgttgttactaaagtttctagactattcttacaattactaaagtgtctagagctttcttgtttgtttgagtacccttgaattttctagaattatctttcacttgtattagtagagagaactatgtagaacaatgtagaagctagccatttaataatgtttccagattagtccatagagtcctataaaaagagatgtaatcccatcattttgtacgaagtcacaaattacacaagttgagatataaaatatagcttcttccaatcaagtattctctccaaagttcttcttattttccaacaaagtggcatcagagccaagtttgtgaaaaaaatggcaagtggaggaatgatccccttccaagttccaatgctcaccaagagcaactatgacaattggaatattaagatgaagacgctactaggagctcaagatgtatgggatattgttgagaaaggtcataaggatagcaagacgatgttgctctttcccaagctcaacgagatacgttaagggattcaagaaagagggacaagaaagctctctacctcatctatcaagcggtgaatgaagatgcgttcgagaagatctcaaatgcaacgacggccaaagaagcgtgggataagaagcttgcaacaaaggagcggagcaagtgaaaaagatcagtcttcaagttcttagaggtgattttgaaactttatttatagaagatactggatcaatttatgattatttcacta

SEQ ID NO: 397439 - DNA, 903 bp, Cannabis indica
tctttttctctccaattctcactttcaaaccctgactttcatcctccaaaaatcgtacaaaaagtgtgttcttcattccatggcttcctcatctaatccatcctcaagagcaagtggaaggttggctagtgcaagccaactaagggagttaagagctaaaacaaggcaagaacctccattattctacaatgatgaagactaccaacgctttgtcaatgacttctcttctaggaagactctaagaggtaaaatttgtgatctccctagccttgattgtgtagattttagtcatcatttttaagttctaggttggacatcttttattcaaatcaatactccaatatatcctagacttctacaaggtttttatacttgcattaaaccttgctttgcacctttaggagttaaaggaacccttagaggaatagcctttgaacttaatgtagaatctctcaatgaattgttaggagcacccaatagtagcattttgcttgaacccaaactctctcttaagaataatggaatctttaactttgatgagtgttctaaaaatctttgtggtgatggccctattataagacatcaacttactttagaggccaaaattctccgcaaattcattgtggctaaccttgcacctaggagtggacaccaagatgagattaattccattgaccaattactcatgcatctcatcttagcagaaactacacacattaacctaggctatctcattttaaaattcatcattgatgtgaataaacccaatatggtcaaggcccttccctttggttttcttcttagctatcttttccctcgcttaggaatccccaccttacatgaaaagaaagatgatcccacctctagtgacattttaggatccaaaactttcaaggctatggg

SEQ ID NO: 397440 - DNA, 850 bp, Cannabis indica
gaaatccagacttcgttctagacgtgtgcatgttgataccatctgtcctgtgtgcaaagtaactgatgaaatcatctaccattgcttggtggattgctcttttgccaaagcgtgttggcaacagttggctgctggtattaatttgacggctgttggttcttttgccaactggtttgctacggttctacagtaggcggatggggagaaagggaggttgatcgcaatgacatgttggacaatctggaaacatcgaaatgagctagtatgctctaataagtcccctactgttgcgagtgttgctcacttggctcaagctttactcgcggattggactgggactcaagattcaacatttcatcctacggctgcattccttactgatgttgatggtgctgaaagttgggccaaaccagctgaaaacaccttgaagattaatgtagatgctgccaatttttttcaggaactgcaacttatagctttacaggggtgattagggatgaaactaacgccctggtggaagttttaacctgctatcggtcaggggtgttacaactcaaaatggtggaagctttgggtgttaaaggaagcactgagttgggttaaacggaaagattggaggaaggttgtcattgaaactgatagtcttactgtggtgcaagcgttacgtagctctattcctatggtttcatactttgggagtattatttctgattgtaagatgttaaatgacttgcgagatgtttatgtcaattttattagatgttctacaaatagtattgctcatttcttagcacgagcatcctatttagtttgatgatcgtgttatcaggattagtgatgttactctaga

SEQ ID NO: 397441 - DNA, 719 bp, Cannabis indica
ctctactttgttcgagaaaaagttcaacaaggacttattgaagttaaacatgttccttccttcgaccaattggcagatggtcttaccaaagctatctcaagtgctcgttttgctagcttcagaaacaatctcactattgaagattcttcaatgctgagattgagggaggatgttaagactgttaagacagttagaagttagttagtttgtttgtacagctgtcagccgttagttgctttctgttgtaaagttgttagctgacagttggttgttacaaccgattctttctgtcttagcttgtatatattcttgctcctttagtgagccaatcaatgaatcattatctttctctgattctatctttctcttcctcttttctctcttttctttcattcatgtcctttgcttccagttctgttcttaacaatctttgcagctatgtcaagaaggaacttcaacaattagacattgggaatgtcaggaatggccggggatttagaatttcccaaaaatacccctttagtgttatttatgtgtttttagtgtgaaggggcaaaatggtcattttgccccatcgttagtttgtcctttagtggacttagaaaataaatttattaagtgttttattatgttttgttggctgaaataaaggatatgattttgcaagtttctcatttattcaaagttagaaaaaattacaatttctcaaaaaagaaaaa

SEQ ID NO: 397442 - DNA, 640 bp, Cannabis indica
tgactttttccaaaatcttatcagaaaatagtccaatttaagcttgaattttcagctttattttcttgcagaattttctctattccatagcttgttattttccgaaatttgatcaattaatatatttcaagtgtgaaacctgaaatcaaagaaaacaagcgtaattctattccaaaaagaataacaaagaaggaaaacaactgtaaaaagtgacccaaaatgtagactaaaaatagcctaacaggtcccatataacatgatacacgcacataatcaaataatgcaaataattaatattaatcgattactaattctatattttaagtatgtggtcattaaaattagtgtaagtgctctattatattttttagtagatattctttataatatgtgcgcatgtggcgagggtttcacacactttgctagtaggtgatctagagctttcaaagaaaatgaccatggaagcaaagatcgcagctaacatcacacaatatactttatgtaaacacccgccaaagacaaggaaagttgcaccgaccaagcaaacttacaggttatttttttttaaggacccgcatcttgtgcagttaacggcattagttcatgctccgtacgacggtgcaagaagtagaagactagg

SEQ ID NO: 397443 - DNA, 505 bp, Cannabis indica
tttgggtttgggttcgggtctgtgtcttagtcctgctcctcgtcctagtcctagtcaagttccagttccaattgcgtttcggagttcgagtttgggttcgagtccgggtcggggttcgagttctagttcgagtttgtgtttgggtccaggtcttggtctaggtccgaatcagtctctgggtgtgggttgggaccctgggtctaggtcaaggttctggtccgagtcctaggttttgatctcaatcttagtctgaggttagttctgggtctaagtcatgggttctgatcctggtctgggttcgagtttgggtcctggttcaggtctatgtttgggtctgattcttggtctgtgtctgagttttggtctgggttcgggttttgtcctggtgtgtgttcgtgtccaggttcctgtcctagttgaggtccagggcacgtttcatgtctgggtctgggtctgacttcagtattcccgggtccaggtcaggtcctggttcaggttcaagtct

SEQ ID NO: 397444 - DNA, 538 bp, Cannabis indica
tttaaatctaaatagagaaaaataaataaataaataaaaaataaaataatacttaataatgcctcgaaccaatcggtcgcggagttcttattgggctggtttgcgtgtgatacttggacagaccagattctgttttcttacttactcacccttttcatttaatcattgttcatcattatttatcaagtatgcagtaacctattttttatttaaaaaacttaaatatttatgttctattttattaaatttttttttttttgttttgctagatttttattaaatcatgtttttaaatttttaaaattgttaagaatttctctcgaactattgagattattgaatttaaaaatttttgtctaattttaataaaaaagtgtaacataaatgaaaaaggggcatgacttaatacatgtcaaagttcgaggaccatgatttggtagatattaaaatttaaggagcattgtttagtacataataatcactgaaatagtaaaattgaatgaaattagacaaaaaaatttaaattcaacaatctcaa

SEQ ID NO: 397445 - DNA, 835 bp, Cannabis indica
aataactcccagaattcttcccagtttataatagtgacatcccgggtgagggacaccaattcccaccacactagagtgtcttcctagaacttaaaagtggcgcaggtcacccgatcattaccaaccacgcccataaaattcaaaattcacttaatcacagtgagccactactaagccttcataacatcaggacctcccaaaaacactggaggtgcttgcttacgcaacctttcgtataacggctccatacggttgccaccaacaggttgttctgctggcaccgctggagctactatggcctgagcttgttatggaggcacggcaggaagaccctgctgccttaatctcagtatttcttcatcttgttggcggatttggtcttgcatctcggcaaacctctgctcccaatccggaggatcttgtggtggatttacaggacgaccaccctaaactctgccacggccacggccgcgaccccggggattctggggaatttgatttccctaacagcctccgatctcaaccatattaccctgacttcttgtattttgctcggcgtccattttataggacttagcctgctaacccataagctaggtaggttagacagcgattataaaacttaataccgctcttgtagattttaaggcaacatatttaaaataaataaataattataatctactatgcttcctaacatactttaatattcaaataaatactaatcaagtacgggcttactgaaccgtgagccgagctttctctgatgaagattgtacctgtcttggcaagctttggtagacaaacctggcggctctgataccaaaattgtaac

SEQ ID NO: 397446 - DNA, 1028 bp, Cannabis indica
actccggcaagtattgaccggtttcaccctatgccgtccaagtggtaggaagccgttttaaagatttttcggatgtggtctagttatcctctatatcaagaacaagttgctgaagcatggtccaaaccggttattggttcgaaaatgtttcaagttgttaataagctacgaggtctgaaaccggtgctgaatgcgattaacaaacaggggttttctaatgtatatagtgaggagttgaaggctaaagattggatgcttgagtgtcaacaaaagctggtgagcgatcctttgaatgctgaatggcaaaaccaagagagagaggctcgggaatcatatgcagataagtataaagtgttaacatcctttttgcaacaaaaagctaaggctcattggttaaaggaaggtgattctaacacttcattattccattcaagtattcgagaaaggagaaggcaaaacaggattctttctattgttaatgctagcggggaaagagtcgagaatccagtccaaatcacagaggctttccttcagtactatactgatctgctaggaaataaaatgcaggggaggcagatagtgaagacaagggtgattcaagaagggcctgtgattacagaagagcaagcgaattttctcatgacagagttcactaaggaagaaattaaagcagctgtgtttagcatcccaggggggaaaagtccgggaccagatggatttggaagttggttcttccaagataattgggagctagtgggaaatgatgtatgcgatgctatttcttctttcttgggatcaggtaatcttttaaaagagattaactcaactgttattactctaattcctaagattacatgtcctaataaagtgagtgattttcggcctatatcttgttgtaatgtgttatataaagttgctaccaagctgatttgtacaagactcaagaatatcctccccaatttagtctctctaaatcagggtggatttataaaaggtagatatatagcacataacatcatgatatgcca

SEQ ID NO: 397447 - DNA, 557 bp, Cannabis indica
tttttttttttaaacaagattcaaaaaattatgtctgaaaataccacattttaacatttatttcttttcaataaaacaattataatgaaaacgtcccaacaaattaatgattgatatttattacaacgatcgggtgctaatatattagagttagcattgtgtctcaccattggtgaattagagagaaagagatcaagatcgaaagagaagactagaaagaatagtctcattaccattgaaggagaattacaaacttatatacacaagccttaagctagtaaggctgtaaccgaaaggtacagctgtacaaaagaatgtaacaaactcttacaactaactaacccctacaagtacaactaacaaaactaactttttttacattccccttcaaacttgatatttgtacactcaccaataccaaatttgtatcgaaacatatcaaacgagagcaataaatggacttagttagacctcttgggttttgtgccctaaataaaactcatttcaatataataagatttattagttaataaagatcagaaataacattttatgtt

SEQ ID NO: 397448 - DNA, 711 bp, Cannabis indica
gtatcacctactttcggccattcttcatcattcaaaatcccttcaacttgtaagtgcccctctatttcatctaacacattgaaagcattagatgtttgaggatcttctactgtattctgcccaatcttcctccatccattagcaacctgcctaagttacttttaccagcatcgtagcgaactgtgctggtaaaagtgacaattcttgtagtgtaaattattattcctatgttgtgactaaaaagtctgtggctaaaaatattagtcacaaaaattacaatttgttgtgactaaatgtatttttagtcaaaatacttgttgtgactaaaactaaactagtgacaacttgtgtctaaatgttatgttttagtcacaaataactttttgttgtgactaaaagtcatatttaatcacaaaaaatttatattgcgactaaaaagttatcactaaaagtagcagtttcttgtagtggagtttggggactacatccttttaaagaacaaagacattcgcagtattctataagattgggaaacgtgtaagtttgcaagtcttttctatgaaaaataaaaggaagagtgcttttaaggacatgatgttatagaatttgggatataaggtgaatgaggttccttctcaaaaccaattggcaatgggaggagtagttcattcctcttatatatctattatctttccacacattgacaatgtg

SEQ ID NO: 397449 - DNA, 1939 bp, Cannabis indica
atactttaaataaataaaaaaaaggccatgtaaattgatcaaacttaaaagtgccatatttaagtaacaacttttaaaatctcatagtaagtgtaatttctttttaaaaaattaacttttagacccaacgtgttttttttttttttgtaaaatattaaaaatagacaacttgaaaaaatgtgtttgaatataattatatctaagaagtttgttgttcgaataataagttgaggagttctaaatccacaaaatattttatgacaaattttttgagaagaaggaatttagggctcgtttggtacgctatatatgggtcgtattgtattaaataacaaataatactatgtttggataaaataatgtattgtattaattattatgaccaaatttttgtatacaatgtatgttgtattatttaatacataacaaatagtccgtattaccttgtattataatttttacaaaagattcagggtcaacaccaatctccgagccgggacccgaacccggacccagaccccagacctggaccccagacccggacccggacctgaacttgggatcgaactcgggacccggacccggacaaaatatttaatatttttaatgttgggattcttacaaaaacacttatcttttcttttttattatttttatatttttactattgttatcttattttttgcactgtgacatgacaatatgtattagtgacacgtggctggagaaatattccgaacagatttcgagtaatacatcacacacacaaagcctgcttgaccgagcagggcaagggtagatgacccgagcaaaaagtgatctgaaccgtgtatcaagacttaatcattccaaggttgatatcgtgaagctcaagcacaaaaacaatccctataatcatgggattatatcagagggatgtggcaagctgtcccaatctcccatttcatgtattctaaatatttaatgtatgttcttaccaattatagatattgtaagcaaaaggaaaatcttccctcatgcatttagccctataaatagtgatctagcatcactgtaaaaggggtcgaaagaatcactttagagagagatctaagagagagtactcagagatttcattgtgagagctttgagagaggaaacactgtgttatttgttctcaagtcaatacaatctaaggggagtaggctattaccgaactaaagggaccgaacctctttaaaaaatcctgtgttctttattatttactgatttttgctctatcttgattacattcttaatcgcttattaattgactcaccgtcgttggctaaaagcgaagtcaacattttggtgctttcattgagagacaaaatccaagtttactctttgtcttaagatttagcagacacacaaaatggtggtgcaaactcccagaggcgtggttgaccagagtgactcaccattgacagatcctgccttacaaactcctagaaatacttgggtcccaccaggaaccaatccagggcagccaaacatgcaaccacctattgtgggccaaggtgtgacatcccctctggttgggatcacactaggtgtgcaagagactgggaatgcttgtaacgccctaaataattaggcacgctacccaagatgcttaaggaaacctaatcccctaaacaaaattactgatagaatatgcgtggaaattaaactttaataacaaactgaatgaaaataaacttgtaataatttaaactttataaactaaaagttacaaaatttgggattccaaaaatatttacaaaatactattacaagttcttttctagtagccgacctaagcggcaaaacagagtctcaaaaattacatcactggtagaccccaacccgcttggtctagtgtggcccgaacatatacattcttcgtctagctccaacactcatggctgatcagattcag

SEQ ID NO: 397450 - DNA, 679 bp, Cannabis indica
gatattttaattgatgggtaaatggtcattttgcttcttagtgttttggcttttagtggaaggtagaagcttccttttctttaatttatgcttagataatattaatattatcaaaggaaaaagaaaggttaagtgtgagatagatgctgaagcttgaaattttgttcctctttccctctctctttcgtgcaccctagagaaccagcaagaaaagggtttgaattgttgatttctagtctttctaatctcttgaaggagaacttgtttaaggtatgggttcctagcctttttcttcttgtttctagttagtataaagttaggttttgagatttaaattaggaattttggttctgtagttatagttgttatttgaatttaatttctgttgattaagtgagtttaattgagttgctttttgctgcctttgttagttgtggtaaggttttgacaaggtttgagtttgagaactcaaaccttgacctctaatggtatttttggaatttgaaggaattattgtgatttgctgcttgggattggtttattatgatgcatacagggattctggaagttattgtgaagtttggggttgttttgaattaaggggaagaatttttgggttcccagctcagaaccggaattccggttcctggggccctgttgcaaccggtcgaccggttgg

SEQ ID NO: 397451 - DNA, 572 bp, Cannabis indica
gtaccatagctgacaaagcaaacatgttgcccatccagttcctagaagaacccatcattgttgtccccgaggaggtcgacatgctggatgacactccaacatggataacacctatcgcaacttacctctaaacaaagatcttgctagagagcagggcctaggaggacggctacaaggtgtccaatcctggaaagcataacacatataagtggtactccaacacccccaaggagcatttctaagaaaaaagttgtatagttaatgacaaaagtgcagaaaggctctacgtcaattacaccagggggcaaagccaatcaaatgtagacgggatccaaccacagtatttattgggactttagaaggctggccaaccatgtcctcagtaagctggtcgtccatagaatccacattctggctaatcaccaccttcacatgctggccagccatggcctcatccaatcgcctaggcagtgctccctcaatatggctggccacttgtcttgcctgttgggattttatgccctaaataaaacacatttcaatataatatgatttgttattaatagaagatt

SEQ ID NO: 397452 - DNA, 863 bp, Cannabis indica
agacttcacaatcagggttatagatatactctttcaactctgcatttaatgagttatttcattttaatatcctttagtataaatgttattatattttttgattcgtattctccaaggttgacggtgcagaaggataatactgccagctattatcagtcaaactataacaatttgtaccattatattcgttagagttgttttgtatattcctctgttcactctcttttaatgttattagtttgttaataacctagtcaatcttttccttgattgtagtatatatcagtattccttcttgtaaatgtacatgcctatataaaggctctttatcaattaataatatcaattgctttcaacatttacatggtatcaatagcctttgatctttaattttttcccccttcgtgtttccatttatcactatggccaccaatcaattaaataatgctcaagatcccacccaacctttcattcttcttcaccttccaaataccatcaaactcacatctaccaactatcttgcttggaaaactcaaatccaggcacaacttttgggtgaagatctttataaatatgttgatggcactttcccttcccctcctgctaatattaccaccaataacgtcaaggcggctaatcccaatactctcacttggttccgtcaagatcgactagtcttcggcgcacttgtcggcactctttctcatgatcttgttcctcttgtctctcaaacaactactactcatgaagcctagacaattcttcaatctacttatgctaacccttctaggggtcacttcaagcaaataaaagatcgtttggaaaaattaactaagagaactctcacaattagtgaatatatg

SEQ ID NO: 397453 - DNA, 963 bp, Cannabis indica
cttctttttgaaccgcattatgtttgtcttccatattgcttattctaagcttcatgaaattttttgccctaactcaagaaaactttctaacttcttgagttttgacttttctttaaacatagtcgttctttaatctgttgagtactcctagtcggcatatctgcttatttttcgtttgatactccgtccaatactcatcttgtgtgttgtcttttgtagatgaacccaggtgagtcttgggaactcgggcatcagatcgaccaggatttgcttcaacttctgcacgaggttcatcctcgtcttcgtgctagtcctccttctagcgaaggaaactcttttgacctcatacccagccataggatgatggcgcttacgaagaaaactacgcatttggccgacgcttctgatcctcaagtggctcagcttgccactctgcccgaccccgaataggtttcgaccgtcccaatggaggaggaccgagagggggacgctgaggtccaggaggctgaggagctggatgaggtgggtccaagcactccttccgaggtggagggagagtaagaggctgaaccccctaacttcggggagtacaacgaggctgggcagccagtcgatgctgacggagacgtcctggttgagggcgtggactacgtcagtgaggacctttctgaggtggttcctcataggaggcagggtgccttgggcgccaggtgggtaagtcctccgtccaagattgcagaggcacgcatccgaactctcaaccaggacgggtacctgggcgagctggactgctacattcccgcccacgacaatcgtgccacaaatcctgataagggaatgtgcgcctggttggggcctcacggccagcaaggggtgctgatgcccttgcacaagtacttcagggatgcggatgttgggttttatgcactaaataaaactccatttcaatgtaatctattttat

SEQ ID NO: 397454 - DNA, 507 bp, Cannabis indica
atctaaataacctgcggtttgagaactttattcaaacgtatagtcaatcacagtcgcctagtggttcatcttctcaaagttatgtcgctcctccataacatcaacaacaacctccttcgcaacaacaatttcgaccttcttcgcagcaacaattccaaaaaatatcgcatgcaacaaccccaatctttttctcaacagcaataacagtctggtccgtcgttgggaaatcagttcttatatagaactccatcagagtctcctctgctcggctcaaattttgatgattttgaattatttgggagttcgtcgcaggaacaacaatttttttcaactcctattctcaatgaagctgtgctggggaatctaacactgggttcatcatcagagcaaccatatgttccttctccgccatggccattggcaactcgtaatgataataatgcggatcaagactttataactcgaaaccttaataaagattttatggaataatttgtttatattttt

SEQ ID NO: 397455 - DNA, 755 bp, Cannabis indica
tttttttttccttttaattttgattttcctcaaagggaaaaggatttctaattaatccttgctgccctttaactttctaggtgtcacaaccacaaccagccacctaactctccccttaataaatgactaaaatacccttaagcctataacttaagcatttaaaaactaggggtaaaatggtcaatttccataaccctgcctaatcccggtattttattttctccaatatatttcccatcaagaaataagattctaaacttacccgtgtgatcaatctagccatccctcgccttttccgttgtcgtcgagcaaaattacaaaaattacatatttcacatataagataaataatccccctagagtttaataaaatctccggaattgagaaattataactctaatatttatttctaaatattgggatccatagataattaattcataaataattataaactaacaaaaattagtgctaattgcctttactaatccaaattactaaagcggtcattacagtaaccaccatctcagattttttatgagttggtgtagacataaggattactaatatatgcatccttattatctaacacataggtcactttcataaatctttcttgactgtcccttaatgttccttgtttgattacatctgaaatagctcacactcaacagtaggagtctggttaaattcatacataaaagtacatttaacctcttactattgttttgagggatatcttgttgtgacatat

SEQ ID NO: 397456 - DNA, 1192 bp, Cannabis indica
ataataaactatatgattgttatcattactttttttgctaagtccttgtgactcgcgggtgctatgtggtgcagtaaaggtaaaggaaagctagatcaactatgaggtgacagtcttctccaacaatgtacatattgatctaccggcctgcgtgtcgagttgcgaatagttgttttgggctggttgtatctgctatgtattttgattttgtgtttaattggttgtcatatatattttttagcaaaactttttgtaacagagattcacagaacacgctttttatgctattataatgtccgtttttagtattttattttggtcaaatttttaatattatcacggttttaataattaattaatctattagtattaaaatagtttataaaattacacacacatcgtccctatagattagggtgttagaacttggtatcagagtagccatggttttaaaggtcctgaagactggtcgaatatgtatatttgctgggaggacaggtcgactcatggtataataagtatttatattattttctattggattacctgcctaggttattataaagtatgttgggaaaagttctatagtgatgattgtgataagagtatgtgtatggtatatgcatattgatatgatattcgtttgagtcctaaatggttagaagatgtggattaaatgtgtgatacattatgtagtaagggcaatcgaatagtctgattagcgagctatctgggcttggggaaaacggtaaagaagagaaattttttattgccataatgctgggaacatgtaaattctgttatacaggatatgattagaaacaacggggaaacagatccgagatctgagagaataacatgcccatcttttgtcaattcatgtaccaccggtacttcatgttgtgccactagatgtggtggaatatatgaagccaacttactagagatcaggaagcaaaaactaaatgaaccaccaattatgggacaaaagaaaaaggttccagggtgaccttatcctgagtgttcaagatgcaaaaaggcgccatttgaactaatgtagagtcagatcttattttattgtgggtagtgggtcatctaaaaagaacctgcccgtagttaagaaagactaatgttaaaaaaggaaagtgtatgggtcctgcccaagtgctagttatgactcaagggggactcg

SEQ ID NO: 397457 - DNA, 626 bp, Cannabis indica
tagcccatttcaactcagggtcgttcctgggtatggttatatttattggggtatattcattttattttctatggtatatagaaaaagaaaaagaaaaaaaaaattgtagaattaattgctttgagatttaaaaattgtgttttctaaaatagtgttttggatataaaattttaaattttgtatgtgaaaaattgtttctaaaaatgtgattagttgtagtgtaattttgtgtttttgagttttaaaaagttaaatttgtgattggttgaggatctcaaaataaaaaagtaagaaagtatttaaagagtttttagattcaataatttgaaaatataaaattattgttttcatttttaagcttaaaactcaaaatcatattcagatttagtgttttcatcaatcaagtatttttatgtggatccccactttttaagatttcaaaaatataaaattgttatcaaatctcaaaccaatcaagccctaagtctctcacactaaatttaaatgtaaatataaatcttaagtgaatatatgttcaaaacattacattttgagtaataaataaaaaaaatggtttgagctcaagatcattcaattttttttttttttgaaaatgaaatatcaac

SEQ ID NO: 397458 - DNA, 602 bp, Cannabis indica
tctgttcttactaaatcaactattataatcattttatttttttaattatttatcttactattatttaaacaattgtggctaatgacgtatacacaatatgttttgtcttcatatttataatatcattttccatatatcattttacccttacatcatattattaattagtctactatttaatttataaataaatttttgtgtatcgtccatttaattttttataatttcctaaaaaattataggctatcctaaataattattgttgatcgaggatttcagcaatcagtaattagagcggtatgaagtaattaatgaatattagaagagctaattttttacatggttatgttagcctaagatatgtttccaagagagggatgaattggaaatttaaactaatttcggtaaattaaaactcttaacacaaaattaagcaattaaacacttaattaaataaatgcaagtaatatggcaagcaatatattataacaaataatcgaacttggaaagtaaagagtttaagggtaagaaattgcaaactctcaatttttacaaggttcgtaagaacttagccacctacatccttggtcttcaaagctatg

SEQ ID NO: 397459 - DNA, 755 bp, Cannabis indica
attatttttttcaacaaccgcttgactcatcttcctcccttataaaaataaatagataaataaataaaatccccaatttaaaacaactagggtttccgtttgtcccagcctaacatcatatgaatttttcactttgatacaatttcctacatttttcccacaaactcatacctccaattcactagctacagttagatttctctttgttttagtgatttgcttgctattttcttagtgttatgtatatttgtgaaaaagaagtaataatctcagttaattgataatttactttggtacttttttacaatctatagattgatgaagatgatttcaacttcgagcaaaaatagtttagtctttaattttataattgttattacatttgaaactattttttaatttaatttttcatttttttttaaaattaaataatctgaatctgagactgacacattaatttgacaattaaaggtattaaaaataaaattaagtataaaattacctctaattagaggtcattcttaccattgtttattaattaaggttatgtgtgtaataattttatgttatgctcgattttcaaaaataaaaaaactcaaccttgcgactttgaccaaggcttataaatgtcaaataaatcaagacatccttcttgagagccccatggcacttctagaagactcaaaaacatcaaccaaccatttggtgtcgggactcacacatctgagtgtgcccaaactgttggaaattatttt

SEQ ID NO: 397460 - DNA, 1201 bp, Cannabis indica
cagaatggaagtgggacaagattaccatggactttgttactgggttgccattgacacctttgaagcatgacgctgtttgggttattgttgatcgtttgactaagtctgctcattttattccaatcaggaaggattacaagcttaccaagctagctcgactttatgtagacaatatagttcgactacatggagtgccttcaagcattgtttctgatagagatcctcgatttacatcaaggttttggaaggccttgcaacaagccttagggactgaacttcacttgagtactgcccatcatccacagacagatggacagtctgagaggaccatacagactttggaagacatgcttcgctcttgtgttttggattttggaggtagttggggagaacatttgtcactagtggaattcacatacaacaacagctaccaagccagtataggcatggctccttatgaggccttatatgggagaccatgcagatcgccattgtgttgggcagaaccagatgagcatgtcactattggacctcagattatcactagtaccactgaaaagattaagggaatccaagaaagacttaaggttgttcaaagtcgtcagaaaagctatgccgatctccatcgacgggaagttgagtttgatgtgggtgattatgtcttcttgaaagttactcctatgcgtggtgtaacgagatttggagtgaagggtaagctagccccgaggtatattggaccttttgaggttatcgagaggattggggaggtcgcttatcgattaaacttaccaggacggttgggacatgttcataatgtgttccatgtgtctatgttgaggaagtatactccagatccgtcacatgttattgagtatgaggctatccctcttcaggaagatgtgacttatgaagagcaacctgtcaaaatcttggcgagagagctaaaagtgttaaggaacagagagattccagtagtcaaggtcttatggaaaaaccacagggaagacgaggctacttgggagatagagtccgagatgtatatgaagtatcctcatttgtttaattttcaacttgaggttgtactttaaaatttcgggacgaaatttctttaaggaggggagaatgtaaagactcggtttgaccgagtcaaatgtgtttatatatatataaaataataataaaataatatatatatatgtat

SEQ ID NO: 397461 - DNA, 698 bp, Cannabis indica
ccctatacggggtgcactttagacttaacctatatgatatgtaggaaaattctacaatacactccttggtgcaccgatgtatccttatttgtttcgatatctaaaaaaaaaaaattagtccaattttttttattggtagtatacgttatagttacttaagacatttggtaaaattttgagaaaaattcaaaaaaattatagacagtttgaacattgatttctatattgtaaattattttaaatttctcaaaattttgtgagatatcttaaatagctagtgatttcttccttcaactggttctctttactgaacacaaatctagtgttcaaagtaccttgcaggtacctcattgtccattttagtatttcccaatattcagagtcagggtctgaaatgtaactgctgaccacaatcatagcatgagctaagtgaaagagttcaaggaactcaagcaaagataagaaaaagaaagaacagaggagaagagagagagagagagatgatgaaatgaatgatggctcaactaactgttgaaagccttgaacacttgaatatatatagcatttgttatagacaattcaccagagaaagataaagggtacaaaccagaaaacagttaaaagaattacaacaaaataacagactgtgtaacaatgttaactgtctaactgtctaactgtttttccttattcctaac

SEQ ID NO: 397462 - DNA, 833 bp, Cannabis indica
gtcgtacacgtatataataagttttggttagttaatataaagtaattgtaatataagaatagaattagggttaaaaagatatattaactaataaagagtaattgtaatatgaatagaattagaattaaagaaatatctaaaagaacaattgtaatatgaatagaaataggatttatttatctatacatttataaatatatgatacatgtaaagacgaacatataattgagtatttatataactacatacgtatatataagagtatatatattagtaatattctataataatcaaattaattaatatatagtatacattaagaatggatgattggatacctaatgacatcttcattgacccaaatattaattgggatgaagttaattgggatgaattagacgatgacttccaccaatccaataaggctgataagataattattcaagataatgatataaacctagatgcgatctcaattgaaactgatcatgagactaataaatcgatgaaagaagaacctattgatgagcagaacagtttccactcatcatcatccgaacaactactaccagtagttgttaatcatcaacaagttaattatttgagtgataataaaactactacttataacctacatggataacatctaaaccacttttaaatgatatgagattttttgtttgtatgtgtagtattttttcaaagaaaataagagaatgtattataaaatagaaaaaataggaagaaaaaaaaataagttgccagacattaatcaatcacccataaaaaataatatttttttagataaaaaaagtaaaataataaaactacta

SEQ ID NO: 397463 - DNA, 501 bp, Cannabis indica
ttttggttatatttattgtaatctttctttcattttttaatctattttgtgtgtatgttgttggaatttattttactaggatctagatttactaccatgtacgtttttaacatcctaatatgaattaaaaacaatgtaaaataaaacacatataaagtttgagaaacattatagtgggtgcagtggaattaaatgactccttccacacagatctctaacccttgtatcctttctgtagcagagtatcaccaagatctgagcccgaaactccttcgttgtgtttggattcttcacaatcttacacactatgattgaggaccaagttgatgtgtgtggacacttactcaagcactaatggatgaataatatttgtgaagaaaggcttagagtctcgaaattgaacaggaagaagaagaaggaagaggtctcatcagaaagctaggtttttagctttagaggcattagttgggatgaagagaccatagccttccttttatgcta

SEQ ID NO: 397464 - DNA, 1166 bp, Cannabis indica
tttaatcacaaaaaaaaattataaattttgtgactatatcacgaactttttagttacaatataagaataataattataattagttataattcttttacttgtgactaaaaataaaaaaaatttataattgtctgctcactccaaaaggagtgtataatattataagtacaatgaaaagtaaaaggttagtttagtcactttgcatatatctatatactaacatgataacatacataatgtttgcgaacacaaaatatacactaatatttgtttaaaaaaaccaaaacacgttaatatgtcatgatacaataataattggaaatgtagatatatactttaagaaaattctacaatgtacccctttaaaatggatatattgatgcacctctatctattttagtatccgaaataattttttggttaaattttttctcatagtcatgtacgttatagttatttaaaacatcctataaaattttaagaaattcggaaaagtttaacacgccgaaaactacgttcaaacagtgtgttgcacgcgtgactattttattttatacgcgtgtaaaatagattgtttgaacattgttttctatattgtaaattattctgaatttttcaaaatttttgaggatatcttaaatagctataacgtacatgaatatgaaaaaaaaattagactaaaatttttttctagataccgaaacaagttaagggtgcatcagtacatcccttttaagggggtgcattatagaatcgccctgtatatatagagagatggtcagtacaataccctttagttggtattctcagcacccaattgagccaaaatctgtctaattttactatatttttattatctatatattgttaaaattttatttaattattaaattatttgatgatagtataaacggtcaatatctcatcgcaccatactatatttttgtggtgtgatatttttccttttttttttattttgattttgagatcaaaatacaaattgagatattacaaaaattacatgtacaatttagtttaaacaatagccacaaaaaacattactcgcaccacaagcactcgtaattatatgatattttatattgagctttgtttctacacattttatgttaacatttgtttcctattttactcaataaacgagaaga

SEQ ID NO: 397465 - DNA, 694 bp, Cannabis indica
tctgtagtacattagatgggtctaggagttcattaaatgagtatcagggtacatttttactttttaaccctaattactcttagatcaatctcagccatcagattaaataagcctctcatctgacagctgtcgtacatcacggaatgcattccgtaaaagtacaatcacagaataaaatcatatcccatataatataatataatatatatagtttgtaataatatttggcactagtatcctcaaatatttctccatgatatatgaactaattatatctcttgtcagctaggaatattattgatatgatatactatacatataaagttaccctttaaatgtgccatgtgaatagatatttttctggtcgaattattttaattcattccttcttgctattctattttataagctattttacttttctaaattcttctgtaattgctactatagcacatgcatatatagccggtgttattttcttaattacttgcaaaaatccaagctaagtgcatattcaaaatatctatagataaaatatatctgatcatgaattcccaatgtttatatctattctatataaaatgtgcatatacaacagaatttttggtttataagaaattattgggtaccttttttttttaattttttattcaaaaataacaatttttttaattaagatgtattttaatattaa

SEQ ID NO: 397466 - DNA, 661 bp, Cannabis indica
tcagggaacccaagcactagccggttagaatgaaatttcagtgcagatgaagcttgtaatttgggtgcaacaaagcttggtactttaaaaatgagaagtttctttcgataaaacttggcaataatccaagttatatttcgaaaagtcttgttgcggtaaaggatttgattcgtaagggggagcggaaggaaattggtaatagagaggagactcttttatttgatgctctgtggcttccgaatgggtcaattctgagtaaaagtattctagattcttgtttggctaatgaaaaggttagtaatctttttgtggtgggtgagaaagcttgggatgttaatgttgtcaaaaatttttttgatgaggaagtggaggtcaatattcttggtattcccctttctaattcagttactaaggaatactagtattaggggtttgaatcttctggcaagtatacagttaagagtgcgtttaaattattacaggcaaaccgtgagggtagtgtagatggggaggttgtggcattttggaagaagtttggcagtttaaaattcctctgaaggcaaaaaattgtgtatggaggacggttagtgggtctcttcctacaaaagtttagttgaagaccaaacatatggatgtctctttgttttgttcgatttgtgat

SEQ ID NO: 397467 - DNA, 1134 bp, Cannabis indica
taagtttacccatcattcaattatttcttaagaacaactgtctaaggatttcaagaaacaatttcaggcagcaagagacagacgacctggggcatcctctcttactaacgtaaagcagaaaccaggcgagtcacttaaggcttacctaagttgttttagtacagctgctgctaaagttagaaacttgaatgacagtatccaacttactactcttcaagtagggatcacgactgatctctcaacagctgggggcgagttgtgggatgccttacaaggttgcccgatgaggaacatcagtgagttcaatgaaagagctcaagtgttcgtacggaaagaggaagtaaggaacgagatgaaattgctaaagactaggtcgggaggtcaatcgagcactgtcaccgcaagcactgtttcgacaaaggctgacaatccaggtggctctaacaccaaaagaaaagatgactctggggaattagccaaaaataagaagaaacttaaaaagcacgataagtatgtgccgatttacgctatttatactgagcttaatgaaactcgagaaaatatatttctcacaaatgagcatagggttgcgtttcgcaagcctgagccaatgagacatgcgagacaaaaaagagattcaacaaaatctcgtcgatttcataaggactagggcatacaacagaagaatgttgtcagtttaaagacaagatagagagccttatctcgcgcggttattttcaacagtatgtaagatgacaaggtaatagacaaaaccagccaaatctgcccgataaaccaggcaaccaaacattacagctgtagaaggagatgacatattggtcatctcaggatggccgcatctcgctgcagaaaagcagtaatgcctagaagagatatgtcaatcaaataaaaaatgagcaatcaatttttactccgagtaaagattacctatacagtggatcagtacgctgaactgtatgtgaaggagatagttcgtctccatggagctcctaaatccattattttagacagagatccaaagtttacatcaaaattctagataagtctttagagagctatgggcacaaagctaaagttcagtacagtttttcaccctcagactgatgggcagtc

SEQ ID NO: 397468 - DNA, 1207 bp, Cannabis indica
aaaagtcgcacaaattttacttcataataaagtacataaatcgcattaaatcgcacagaagtcgcacaataatcgtataatgatgaaaaatcgcaaacaaatcgcaataaaatcgcagtaaaatttaaaaacacaataaatttagtcagttaagaaataacttacagcatcgtcgagccactctccctgcaccatcagcttgacgaaccaggatcgattagctgggcgagtgtgaacatccctaggacggtcgttgtccctcgcgtacgtgatccacttttggaaaaattttaacagccgtgagtctgccggtttcaaagtgtccacttcaactggcccaggtcgttgtttcttcttcccctctgtgtagtccttcaagaaaaccggcttctgttttctcctaaccctggtgaagtccaccccaggaggtggcccgttcaactcttccacatcctgagattctgtatcacccatggcaatgacaatggcccttgtaggagtacaaggaaccacatctacattgggttcccaatcttccggatacacatcatcctcatcaaaattatttttgggcggtgatggatgtatcgtccgtaatggctctgtcgggtctgatggatgtgtcggcgatgattgtgtcggctccgaaggctgcttctataacaaacttatcatggtcgcaatttgatccatgataagattcttcatctctttctgacttctcttgaactcagccttcatctcagtctgtgcagtgagaatcgcaagttgttgcgcttcgaccttctccaatctcttttccaacaataggtagtcagagtcattagctggagcagaggttgggggcacagtggcagacgttggaggcacagttgtagatgtggaggggtctggtgcagctttgggtgaggatggtggaataatatttgcactttgaacataatctgccacccgtcttgcttgggtctcgaatgcagtcgaatcttgcgccccggcttgtgtttcttcgacctcatccaagcccatttccactgtggggacctcaccctcacaattttccttccaatagtcaacctcccaattccgaggatataaaatttgaagaacaaccatctgcaaaaagtgaatatccgttaaattgcaatcatgttgcacaaacatcgcaggagctcgcaaaatttcacgcatagtaatcgcacatatattg

SEQ ID NO: 397469 - DNA, 1245 bp, Cannabis indica
taaccctagcaagttagaagattcccatatacccgcaatcgccataaaacatatcaagttgacctcgaaataaagatgattccagctcgccattgggatcactacaatcaagtttatgtcgagacatctccagattcaacaattaaagacctatttaatacacgatatttctgacccagtaatcagagctaaatgttttcaaaatcatacaccgcatttacatttcataatatgtaatcagatcccacgatttaagggataattgctgtaattatattttggtcatccaaataattaactaccactatgcaattataaatagtggcaaacaatatcaaaaaagggacaaaaaaaactcttacgcaagaggccttgaaaaaatactcagaaatctgaataagattaactcgtggactatgcagaattttaactgcgaaaccacgttaaaactctggtgttgatattttgtttttctataacttttatatttcttgtgttaaatcataatcctgaggcccaaatttggttaacaaaaatctacgttaacagtttggtgctttcattgagaacctctgtgaaaaagctcagaaaaagccttcccttctgtttaaagaaaaaccttctcctttatggctgtaaatccagagactattaacaccccacatgaggaaactaaccattgttcccaaaaaaagcccatgagctctagaagatctaccaatctgcagtcttgaaggaccacacgttcccgaagaactcaacccgacgttggtcctagtacgcgaacaacgcgctcaaggagaactcagcgtgggaatggtcagaatcccaggactagggacgaagagctcaaccatggaggtgcccaatctgtgagagaaagaacttatgaaacggaaagctgccccctaagacgctatcttgaagaggtgcagcgtcgaaacgctgagttagaacgagaggtagcctcagcctagacgacacaggggacgaacgctcaaaattaacttgaacctggagtgagaagaccacgaggcggacgtcgtggctcacgaaccatgataccggaaaaggcacgggaagaacaacctacggaaaatgagacaccccctgagaatcaggatgaacagccagaaaggagacaactgaaaactgatgaacgagagatccctcatgaaaatgagaaggatcttggaactcagtcggatctagatttactaccatgtatgtttcattaacatccta

SEQ ID NO: 397470 - DNA, 274 bp, Cannabis indica
atagtaaaaaggacaagtaaccataagatgaaatgtagcttgacatactccactacaaagagggcaaatactagtcacattcactcgcttagttcgaagtgaaacaagagtcggaagacaattagagagggcccgccaaagaaaattcttaactttcagaggaagctttaaataccaaaactttttccaaaaagccagaattgtcttgagaattccatctccccattaagctcttgcaacacacgataggcactccgaacagaatagcttccat

SEQ ID NO: 397471 - DNA, 522 bp, Cannabis indica
tctctcctctctctctctctccttcttagtctcgatttagggtttttgaaacccttgggcagccaccacaggccacctcggtggttctctgaccacccccaagctctcgtgacctcctctttctctctttcaatcccgatttagagttttcaaaaagattgggcagccaccacaggccacctcgacagttctctccccctcggtgctctcataagtcctctcctctcctcatttctcttatcacatattgcggtaaaatatattattttatttttccagatctaggtggagagggaggcgattaacatattttcactatcctattttggtttaagaaactccattttggtgttttgtgatttgcattttttttttctgtttcaggtgaactttgactgagttttagtggttttggtgaggtgctggtggttttggttaggtgatggtggtttctgggggagagagagagagagctgtaaatagaaaaaaaaaactgaaaagaaaaaaagaaaggaaaaaaaa

SEQ ID NO: 397472 - DNA, 572 bp, Cannabis indica
aaggaacagtgtcccactgatccacaagatatagaaggcatgaaaaaggttctttatgcttcagcagttggaagtctaatgtatgatatgttactacaaaaaagtgttattttagtggaaaatttttagtcacaatataatttttttatgactaaatgtgacatttagttacaacaaaatgttacttgtgactaaaacgtagtaattagttacaagttgtcactaatttagttttagtcataacaagtaatatgtctaaaaatacatttagtcacaataaattatgatttttgtgactaatacctttagctacggaccttttagtcacaacataagaatgataatttataattagtcacagttttttaatttttagtcacaagttttgttgtgactaaaagtaagattttttgtagtgcatgttatgcactagaccagacatttgctataaattaggaattatgagcaggtatcagatgaacccaggaaaggaacattggactgcagttaagcatattctaaaatatttaaaaagtacaaggcattatgtgttagtctacaagggtggtgct

SEQ ID NO: 397473 - DNA, 1253 bp, Cannabis indica
tttactagttccactaggaccatcaacacaaaatatacctcccttcattgtcatgactctctcaacaataatatcataagcttttttctgctctacatttagcaaggacactaaagataaatcttttttggtaacaacaatattgagttcttcatctgtgtcttttatagtgtcacgctcatcattttcaagtacatggtaatcaactaattagaaatcatttatatcattatccatagataacaaagctaatcaaatttgttctaagacaactcttctaactgcttctaatgtaatatttttgtgtacataatcttcagacattgcacgataaaaactttcgaataaaactcttggatttcctagtttacaatatactaaaattgtagaaaaaaggcgacgtagtgtatacgacaattgatatatagatgcctcttcaaggtaactgtgaaatgttgcatcagatgttagtaaactatgtaaataagcagcctcacgaaatgtttttacaatggttgaattattagttttcaactcatcaaaagagtgtagacctttgatgtgattcaaaaggaccctcaagtaatatctttcaccttccattggagatgtgctaacagttcgtccaatgatattttctcgctttcatggagcccatattttactattagattctcaaacaaaatgttctgggaattctctatagaacaaagtccgtgcaaatggattaaatttattctaaaaaaatcaataagcattgatcttgcaaaaaaatatgatgacataatatttgaaagatcatttctattatcaaaggtaataagttgtttattctcaaggtgtaaaggtaaagagtaaacagtaggatgtatttcattcatcacaaacatataaatgagccacattgcttcagcagctgaaatccatcgaccagcttggaatgtatcaatttcattaatggtagtagcattatcaaaatcggtaaggttgaatgcaacacaatcatggcctttgtatatatatttataaagatacttaactgcctttatagtagaacaaacttctacattcatatgacagttaaattttgctagtaaatatagattgtatggaatgacccaaccattatccaataaagttttacggactgttactttatgactagtgttacgacgcctataaatagcatatgaattgtcaccacgggttgttgtcgaagaaaaaggcttaggatacttacttttgcaagtttt

SEQ ID NO: 397474 - DNA, 602 bp, Cannabis indica
taatctatatgagactttgaagagaggttggaagagcaaaatggttatttatagattcatgtagaagcacaaatcaattgatcggttttaattaaatcgtgtaataaataagtatttacttaagaggtactttagttattacaccaccaaatttaatttggtgttttgtttgtttgacatttaatacgaacccttatagtaactataatgtaactagtgttatatttaatcttttattaaaaagacttaatttcatgatggtgacaaattttgttagatgctgttgtacgttttcaaacaagtgttaataattaggggtgtgtttggaagtaactgtgtaattactaggtagggtaatcactagggtgataattacacagtttagtaattacactatattttaaaatgcaaggtgtgtttggacatgaagtggtaattacatatgaattcttaatattttgtttggcaaaatagttagtaattacatgagaaaataatatttttttgtagctaatgttaatgtggaaagtttttagtaattacacagtgtaattacatccaattctcatgggggcgataagaattgaagagtgtaattggaa

SEQ ID NO: 397475 - DNA, 900 bp, Cannabis indica
ctaaaacaagatactcgttatgacgcattttgtagatttttaacaactataaatgaggggcacatacaagaagatgctaaaaatacaaaaatttcttctatcgatattgacttttatttagttaaagattggggatttcatcgtaactttggacatgtcatgacatatggtggccctggtcctagataatttttttacattgtattacccaccaaaataacattttaatgagaaaaaaataaatatattaatatttgtgcttttgatagagttgattataaaatataatattaaactcaaaaatgagtatcttttaaatattatactcgtaagtgcgcgaatgatatttgaaattaaagtgttatataagaggtaaaaccaaaagataagttgggtgacataggaaagaaactattttaaccaaattaatgtaataaaattttacctttgtgatttatgtctaaactatcttggggagaacctcttatacttttatttaggtttacattaatttttattagttttatcaaaattttagttgattggatagttttttttgttgtgttagctcatattgctggtgatcaatagttaatgggcatagcatctgtgtgtataaattctagtttaagtaaaaatatggacttttctagttaactgaaacctttgatgagtaggtctagtccaactaaggttatgtagctaagttacttccctaactctataaatacatatttactcatcacaatcgtataccctcttgataatcagattaataaaactgcttctgatttagagacctagggagaaagacttagttgatagtattgcattatcaaattaagataattattatagatcaatcaagtaccactactacaaaatagacttttagtgtca

SEQ ID NO: 397476 - DNA, 1146 bp, Cannabis indica
tctacccttgccctactcggtcaagcaggctttatgcttgcagatgtattactcgaagtctgtttagaacatttctccagtcaagtgtaaagaataattaacacgtgtcactagtacatattgccacgtcatagtgtaaaaaatgggataacatttgcctcccaagtctacacgggacttccaaagttgggagtagacttcactcgatttgaattcgtgtttgaacgggtggcacgtgttcgatatgcatgttggtgatccgatgtgattctgaccaaaggtctcttcaatattcggctcataaacactaattgattcgtacctcgaacctttccaaaaatttgcacgcttttgatggttgctcttctttaggtacttgattacttaatttcccaacgtttacttttggggggaaatcgagacgtttaaatttcaaaatgattacaactcatcactaattttcttacaaatagggcaaaaagtcctaataaaccacttttagcatttttcttactttgacgatttcagagcaagaacacctttttctctcaaatactttaaagaatttccagaaggtagtggccaaaaatcatcttcataaacataatattccattgtcatgagctctttgacttgaggaatgcaagaatgctcttgctgaattttttcaaaaactgggcaattttgctgtgaaaatgctacagcattatgagcaacaacaaatgttgacaaacttggaatgattgcttcctcatcttttctttcactactttggattgaaatgagctcttttaatgacatttttactttcttcttcctccattgaattttccatatcactacccaaagtttcataggaattatcacacaactcattgaccaaaagctcaaattgattctccaatttctccaaggatgaagcttggctttgaattaaggcatcatttttagccaagaactccatcatcaacacttcaagtgagcttggttgaatcatttgatgaggatcttcttctatgttagactgttgtaaatcttctaaaatctcaccatttggtccttgagtgtaagggtcaaaatttggctccaaattattgtagttgtcctcccaaacatggtctttgtttggacaattaaaacaccact

SEQ ID NO: 397477 - DNA, 715 bp, Cannabis indica
agacattttactaacttagttttttaaatattaggatcatttttgcatctcaactctttttactattaatgaattcagttttgatatatttttagcagatcaaataactttatttgacaggttttgaagttcaaatcgtgatattggtcatttttagaaaaagtttcctttttggtcgtaatatgatgcatcagaatctgattctgatgctgtaaataaagaaattttttaagaaagttttgtacagctggataatcatgtttgtggttgtctctagggtttgtatgttttttaaataggacttagagagcaaccaaacgattctagcctcttctagcttcatttttcataatttcatctatgcgaggagagagtttcttttgcgagaacctagagtgttcagctaggtttaattggtgtttgttttgttcttatacagttcgtaaaaattattgaaagaattgtttgaacaaccgtgggtcttcgagagaagacctttccaagtcccattttgggaggagtgagcatatatgttcaggataagatttgtttaagctttacttcgggaggaagtaagcacacatcaatagttgaaaggagttcactacttggtgtgtttaagatttcaaattagcaaggtggattataaagggttacgacaaaccattagagagagtttaaatttgtttaagtcaattgcttttgtaatttttga

SEQ ID NO: 397478 - DNA, 1284 bp, Cannabis indica
ttctcggcttcttcaaggctttttttcgacctcttggcttcctgtttgagatgggtgatttcctgctaagcgtcgttccattgtttaatcacgacctcgcgttgggctagtgacttttggacctcaccctctaggtatttgagtcaatgcaaggttcaccaatgggaggaaaaagaaagaaaagaagtctggagaattacgagcaaatgaatataagaaacagggagaaaaaagaaagaaaaaatagtatggattaatacaacaaatttaccatgagggcataatgcaagttcctcgaaagcgtctcttgcggattcgcaagatttattatatcccaatcatgggggaggagagccttgagttggcaccagcaggtagtcccaaacacctgggcaaattccgaaccagccttccctactgcaacagacagtatttcaatggcctggctcgaagaggcagaggcatgggttgtctcaggaggaggtgctttggtgttgggatcaaccggaggagaagtcagctcatgggtgttggtctcagagacctcgaggtcaataggctcaaacactttcttgtttttatgggcagtggttttctttggccttttagaaggctccacctcggtttctatagaaacccctaagttggttccccttttcttccctttccggtccataacatcttcaaaacgcatgttagcgaggcaaaataaagtgttaaaattatttaaagacaaatgaaagggaagcgtggagtgtaattttccacctaagaaatttaccaaaaccattagaaggtgagctatcattagaagagggggtagaaggaccgttgtgtccactaaaaaccctatagcctgtaatcttgaatatatcaaagggatcgattggttctaaatcccagctcgcatttatatgacttgccctatcagtcatggtgccatattgttcagctatagcatagtatgactcgttatagttaatctgaacgtggaatctagggtaccaactgtcaaacctatgtgcaattcagtttacgagaacgaaattccgaatataaaaattaaggcgactatctcagaaagtaactaatgtgttacgtttagccctaagtattatgggtgaccaaccacattaattacctcgggattctccttcaccgacttcccgagggacagtgttttgaaggtattgtgctcgagccacgcgatctaaggccttatcctcctcttgaacaagaacctattgccaagaagaatacttgggaaacttataatcacaagta

SEQ ID NO: 397479 - DNA, 784 bp, Cannabis indica
tattttagtctatttattgtaataaattattaatgaaaatttacttaatttaagttggtccaaaattaattaagaaaattaattttcaactttaatctatttttcaaaaaaaaaaaatcaaaaattatctgtgttgaccgaggtttttggcaaccaaaaataataataatttagagagctgcaagaaattaagaaggagattttttacatggttggggcgttaatgagccttagtccacgagtctgtgtatttatgatagtatttaatacagagaatgttcttggtgaatttttactcttctagcacttatgcaacccagaattctcgacccctctttaatgagctttggggggtatttatagtgtttttgtggggggatccctagaattaaggtacatacaattctgtgactattagtaaagttatacattcccaatgaatatatcatgggtaatgtatggtgtaatccctaggtgctgtagggatgttatggaggttgtccttaatcccttttgactgatgtgattcctaacagagtagccgtcactagactttattgatcatagcctagtaggtgcaaattgggggttgtgtcgtcagactttattgcgtgtggcagttccaatacgcttcctcccatgcggcattaaatgcgagatgaccgttcagatggaatctgacaccacccggaggtgctttgtggccatcttgctctccgggggcacatgaggcttacatgcccttctccgggaggcatgtccgagataatcctttgctttcaag

SEQ ID NO: 397480 - DNA, 1423 bp, Cannabis indica
actccaaaggacatttttttgggtttagtttcatgttatacttctttaatatcttaaagcattctgcgaggtctgaggtatgatccttattttttttttatcgattttaacaacttatcatcgacgtaaacctccatgtttcgccctatttggtttgtgaacatttcgtttaccaatcggtgatatgttgccccagcgttcttcagtccgaacggcatgactttataacaatagagtctaatgttggttacgaagcttgtatgttcttgatctgattatatctagaatatgcgtccataaatgacataagctcgtgtgtagcagttgcatccactaattggtcgatcctgggaagtgggaaacaatcttttggacacgccttattcagatcagagaaatcaatacaagttctccaagttctgttgggcttcgggacgagaacaggattggctatccacgagggataaaacacctcgcgtataaaatcgttgactaataacttgtcaacttctggttttagtgccccttgcctctcggaatccaagggtctccatttctatcgattctctgggtaacttagatcgacatttaaatgatggcagataatattagggtcgatccctatcatatctccatgactccaggcgaattgatcctggttcaccttcaaaaagcttattagttgctatttgagctgctcgtccaggttcttcccaatgtatacacattttgtgggattttttaggtcgagaataacctcttccaattcctcaattggttttaataggtttttctcatcttgaactcgagggtcaagatcttcgtctttcttctcattttcttctgccaagatcgtcatcaactgatgatcgacttttctatgatgcagctctatgtgatagcaatcgcgagccagcatctggtcgccacacaccactcccacgccgtctggtgtttggaatttcaaggataagtgcttgatcgaactgactacccctagcctgatcagtgctggacgatccaacaatatgttgtaagctgagggcaggtcgacaaccaagaagtcttgcataacaatagcagataaaggtgccttgcctaaagttaatgcgagctcgattatgccaaggttggcgatactgtctccggtgaatctgcaaaggttcaccatacaaggccttaatttggctttttcgaaccccattttctttaaagtctccttataaaggatatttactgagctcccattgtcaattaacactctcttaatccttttattggcaagttgaatggttatcaccaatggaatgatgtgaggatatttcacgtttttctcatcttcctccatgaatgtaatgttaggttcctcagttttcacttttttggaatgttctggggcaaagaccgactgctcattctttat

SEQ ID NO: 397481 - DNA, 531 bp, Cannabis indica
taaagacctaagttcgggtttcgaagctcaaacttgcttaattccaacacaatacaacataaccagtatccagaacctggaatcaactcaaaataagcttagaaatcaaatcacacaacctttaaaccctaacaacccctaacttccaaaattgcatatacaaaccaagtagaacttaaagaaatcaatagacaagagcttttagcgtttcccttggttagaacgtcgtcaaattcttactggaaacaccaaaaactagcagtcattcccatggttcttgcggggttcgaagaaagagaaaggaaagagggagagttttctatttttggtattttttcttattttcttcaaatgaaaagagattaactaattaatctcttgctaaataaaatggccaggtgtccacaccctaggcagccaccaaatccctcacaccaaaatgaacaaaatgcctttttacttacaacttaagcaaaataaagtctaagggtaaaatggtcaaaaaccataaccccgctcaaactcggtatt

SEQ ID NO: 397482 - DNA, 1100 bp, Cannabis indica
tgaaatacaattacaagataaatgaatatataattatagaagtataataataaagatctaaaaattatttatttatatgtagaaagtataatcttataagtatatacaagagaattaagattatacaatatgaataaaattagttgatagtgtattaaagtaaagagatcttttctatagaattactatgagaacggtttaatatacactatactctagtgtgtgtgatattaattcgaatcgcatatgtggatacacatgtagtaaaggtgttgtgtataatttgattatacatgactggaccgatatgtaataacatctttcattaatatgttgtttaccatgaaagagttatttatatcaaaaggatgatcatgagtgataagtcttaatcctgagtatacatgaacttctatttatgttcattgagttctttaattcactcgttaaagtttctctgagaatatgattcttacaacttctattttggaagcttaataacacgagtggctgggaacatgttatgcaataatggaatctaagatttttaaaatgatcgaatattagttctcttatagtattaattctacgagtgctaacagttggatccaaatctataataaattatagattaactgttcacattaaattaatggtacatatggaatcaagagataattagaagggtaaaacggtaattttgaccaactctaattataaactaataattgaagggaaaactacttatattaattatatcaatggactactagtaagaaatctataaatataattctatattatcaaggagtgcaattctatatttatagtaaagtaataatagaattaataaattggattattctattgatgagatcaataacaattaagtatttattgaagctttgaaatataagtcaatggtctccaagtcacctctatacaacactgtatatgggaaggttatttaatttgatgagaaattctgagtgagaatcaatttctatgagaaataatactcaagtggaaaatagttttttgtggaaattattattttgaataactacaacaattatgaattgtgtaattaaatagtattt

SEQ ID NO: 397483 - DNA, 625 bp, Cannabis indica
agaaaatctctgtgggatgcaacggttagggtttatgccctgcctgtgaagacatctctatttataaataaaaattgagcattttcatatatgcttgaatgttaaataattaatatttaatattgaataatttatatatatatataaaaatatcaaaaaattctttattcatatatgaggttgtaacttgtattgtacagaaaattaagatcacttagccatgaataaaagagttagcaacatattaaattttggaatctttaatcaacagttcctagtgcagttcactaatgcgcattattttgtgcaagcaatctcaattaagatttccaatgtagtatgacatctaagtgaaggtgctactgtatattgttgctcctgattttgtccaaaatacgtggaccaaccagattgagacacgtagactgaaaaggttaaactctgggataattcaactaagtctctttaatcaaaggaattcagcatttaacatgcctcctagagaaggcaggtgagtttcacatactcccggagagcaaagctacaacaaagcatctccgggaggtgtcaaatcctatctgaatagtcaccacgcatttaatgccgcatgggagaaggcgtattg

SEQ ID NO: 397484 - DNA, 761 bp, Cannabis indica
atctagattcagtttacgcaaagtcgaacgaatagtccttatgaaagttttcaacaaacttgaagctcaaggtctctctttttgctctaaacttgcttaacaaagaaggttgatgaaaataagtttgtgaacaaatgctcggttaccccaaaaacaaatattggaaatcaaaacaattcaagtgtaactatcaaacgtggtgagagaaaaacggatttcaaagcattaattgtgtcacagcatttattagccaaaaaccgaagagacgcctagtcagcctcacatcgaatcgcgaacagacgcacctaatacgtgtcacccatccaaacataaagacggcttggataaagtctacatccaactttggaagtcccatacagacttgggggcaaatgttatccaatttttgcactctgacgtggcatcacacgatggtgacacgtggaattgactctgaatacctgctcgcaagacataggccgaacagggaatctcacacattttctcgaacaaagtcctctagaccgaacagtgagcattctgcgcagaatgccaacacttagcgaattcagctttcgcatcgttagtcatcaaagaaagccctataactttgggatcagattacagagatatggcaagctgtccaaatcccacgataagtgtattatgtatttattatgcaatctttatgcttatattaattgtaattagaagggaaatacttcctctacaatcttatagccctataaatagtgactcat

SEQ ID NO: 397485 - DNA, 593 bp, Cannabis indica
ttgttttaaactcgaaaaaatagatagcgcatctacgcgtttatgagtttagtttgacaagcaagagtagatgcttatttgaactgtaaaggatatatattaacattgctattgtatagcaatggtagatgctcactaaaatctctccaatgtaataactactctttcaaatagctaccacttagcaattcatatattttatgcattggagcttttctaatttaagcatgaattttcgctcatttaagagcaaaccttcactataaatagcaacaaattattatactaaatttgtgtcttttctctattcttctattttttttacgcggttatcaaaatcacacatgattaaataaagcagcaattcacaattgacggagacacatcatcgaaccaggatagctcatcgtctaaccgaagagcatgatttgccaaaccaggatagctcattcttcttttattattattattattattatttcttgtgtaaaagcaatatttttcttggctaatttttttaacaagactgaagtgtaagtttatattaattttattttttttaatatattgattctctttgttcttcatttcta

SEQ ID NO: 397486 - DNA, 956 bp, Cannabis indica
ttagagatatttttacaaacttacatacaataataacaaaaaattaaattttaatcgaagttaataaatatatgtacgtattaataatgaaaatattaaagatacattaaggtaccaagcaccacaaaaaataacatcgttgttgatatattttaatattagttcctacaaattttaatttaatatgatttagaaaactgctaaccaattattatgtatgtaaatcggtatagtattgagcactttaaggtgccacataacgataataatacaaaaaatcatttaaaaaattagtacaaagattattcataaaaaatataaaaaagattaaataaaaaattactaatcaattagtaggtactacatcgatataacattgaacactttaagtactaataataaatacaaagaattattaactaaaaaattaatacatagaaaaataaaaaatagtatataaaaaaacaaaaacaaaaaaaaaacacaatgacaagtcactactacaaaagttagaattcgcgacggttctaaaaatgttttttttgggggaccgttgctaaaaaaattaagtaactatttaacaccgtcggaaaaaatcagtattcctgacggtttataacaataattacaataataggcaacagtttttattggaattcgtgaatttattgggcccttaactcgacagtataaaatcgttgcctatactataggcgacggttttaaaccgtcgggtataagggcccaataaaaaatcgttacctacttctcatcacatttctcacgtgcccacctacttcttttctattttccacatgcccacctatttcttctcacctattagttgtaacaccctaaggaacatttctaaagcataaaaatcgagcttcatgcaaacaaaccaaaatcaccattaaagcatcaagctttgagttccaaactcaaacttgattaaa

SEQ ID NO: 397487 - DNA, 565 bp, Cannabis indica
aatctcttcttctaattcaccatgctggtaagattaaaggctgtaacaaccctgctggtctctgatgttcagccttaatctgttgacaggttaggcatctagatacgaattctaccaaattcttctttataccactccactagaagtacggtttgagatcatggtacatcttggtggttccgagatgtagggaataaggggtagaatgagcctctttgaagatttcattcctgagttccacactatccggaacacaaacccttgctttatacaatagcatcgcgttgtctgacactgaaaaatccctggcttgaccagttgaaatgtcttctctgacctttaataattctggatcagtcatatgagtgactttgattctttctaacagatcatattgcagagtcaatttgtgaagcttgcctaccacaaactcaatgctagatctgaccatgtcttttgctaactgaggtgagatctgaatcatactagctacttgcctgggacccttcctgctcagggcatcggccactacattggtcttgctggggtgatagagaatctcaca

SEQ ID NO: 397488 - DNA, 1441 bp, Cannabis indica
tttacgaagataaggttcaccttaaggaggcacgacacactacttctatatataaatacattcacccaagctaacggacaaagttaaaggaagagggaaaaaaaaggtgtctagtcccatcaaacttgtcttattaatcttcaaagaatgatcctttctttctcttcctctacacaggctgcttgtaggcctcaaaacataacagcatgcttgtatgcaagctaccaacttcatctgaattcattgaatcttccacctcaaattcttcaaaaagacaaacttcaaactagtcatgtgcttacatgcacactctttgtttactttgtcttttcttttcttcttcattttatttctctctacacaaccaaaattacagtaatactgtttctattcactaacatacctaactatttacacaccaattcaattgagattattgttaagaataattcttaaagtctatagatcttcatttattaataaaacataactgttgaccgaggttttcggcaaccaatataataataataattaagagagctttaaggaattaagagagaggtttttacgtggttggggcgttaatgagccttagtccacgagtctgtatatttatgatagtatttattacagagaatgttcttggtggatttttcctcttctagttcttatgaaacccagaattctcgacccctgctttaatgagtttggggggtatttatagtgtttatgtggggtgatccctagaattgaggtacatgtctttctgtatctatcagtaaagccacacattcccaatgaatatatcataggaaatgcacggtctaatccctaggctttgtagggattttatggatgtagtcctttatcctttttgactgatgtgattcctcacagagtagccgtcactagactttattgatcatagcctagtaggtgcagagtgggggttgtgccgtcagactttaatacatatggcagtttcaatacgcctcctcccatgcggcattaaatgcgagatgactgttcagataggatctgacacctcccggagatgctttgttgcagtcttgctctccgggagtatgtgagacttacatgccttctccgggaggcatgtctaaggttgatccctgcgcttaagaagacttagctgaattacataaacgccaaaccctttctacctacgtgtcatcatccggttggtccacgtattttgggcaaaatcaggggcaacaataactatagcttaaatgctatatggaaacataactacttgaatttgtgaatcacatattctccaatttatatatacctatgacactataattacacttatacatataatttatattttgtctatattaagttatatattatacattatattataagttttaagtttttatttatatattttttggaagaggtttcaatggtt

SEQ ID NO: 397489 - DNA, 1034 bp, Cannabis indica
ctttgatagaacctgaggcttcactggtatgagaagctcgttttttggccctttgtagacgagcgggggctgttgaacatattttccaagtctagatccatatatatgagataaaagagatacatcaacacttaatcaaaaataaataaaaggaaaatggggaataaactcccacttaaagaaagttaccataatcatcaaatgatgaagaaggaggactataatagttactaaattccctagatcatgtgatcatgaatatgtcgtaaggattaattggatctaaatcccaattcgaatcttggtggcttgccctatccaagttggtctcatactgctcggcaatcccatagtacaagttagtgaaactaagttggatgaaaaaccttgggtaccaactatcaaacctatgggttatacagtctatgaggaaacggttccaagtataaaaattatatcgactatcttggaatgttactaacgaagtacgttcagcactaaacacagtaggtgaccatccacattgatttcctcgggaggctccttagcttctcgaggggctattctctgaagatagtgtgcgcgagccacgtaatcctagctctcttcgtcagttggaactgggaccttctcccacgacgagtactttggaaacttgtaatcacaagtgtactcatctgaggcaaaaaggccaataatttttagattggcttcattcaagaggacgtctgccaattgcagtctgaatggaagactcagtaggattttacggcgctcggccatctcaggagtaggaattggtctcttaaaaaccgttgtaaacacaacaagcataataagtaagcaacctcaaaaatataaatcagaaaacaactcaaaactaagtttttgagacaaaggttacttacgtatgatgcgaaatgcggttgtgtcaattggagaaagaccagtcgtccaaaagaaatcctccttacaatcggtcttgtttggtaacctcacgatgatcctacgacatatgtgtttatttatcgttt

SEQ ID NO: 397490 - DNA, 514 bp, Cannabis indica
ttgagtagttgagttctgtagttcttgtgattgtttggcatagttttctaaagttaagttatgtttgaatatgttgtttttggttggttttagtggatgtagtgttgaatcagaaagctttgagttttagaactcaagcttggctcattaacggcaaattttgattctggttatattgggatgttttattgccttgattatgttctttagggtatatttatcaggtctggaaggtttaaagagatttggagttgatttgaggttttggtgaaattttgaaagtgtcctgcaatgaactggaattttggttcagggggacctataggaaccggaattctggttggtccccgagaaacccaacagaaccggaattctggttgggaactggtctaccagtttgggaaattttgggaaccctagtttttcccattttggtgatgtttagggtatctccatgttgtttatcgatagggaaactttttagtttcatgtttaagtccctagaaagtgattt

SEQ ID NO: 397491 - DNA, 861 bp, Cannabis indica
gagagagagagagaaaagaaagcttgactgaaatgtttttagggttacaatttattatactgtgtgtgtggttgtgtggttggttattgatattttttttatttttaaattattttttgttttgctaaaggtatgtgtatttattatttatttattcatgtctttacctaggcccacgcatgcttttattttttgtcatgatatttgcttttttttttattaacgtacagtgacgcgcataatgcgattgggtatgcatttcccaatatgtctggcgcgtcgctataccatattttaaatttgtttaaaattattaaataaataattatgatatagtgacacgctaggtaagtcgggatatactttcccaaacgttcctggcatgactctataagttagtatttttaaaataaaaaaaaaatagaaacttatgggtattactctttagtgacacttcataattttagtgactcacattacaagtgtctaacactaaaagtttagagtctaatttagtgtgtcactaaaaaccaatcctaactctttagcgacacgcaaaaatgtgcgggtcactaaatagtgtcactaaaagaccaaattgtagtagtggttcctcactggcgtagtctacgccctcaaccagaatgtcgctatcagcatcgactggctccccggcctcattgcatcccccatagtttaggcgtgcaacctcctcctcttcctccgccacggagggactgctaggacggacatcgtcctgctcctcaatctcttggacctcagcgtccccttcatgatcctcctcctcttggacgactggatcttgttcggcgctgggtaaggtggcgtgccgagccactt

SEQ ID NO: 397492 - DNA, 585 bp, Cannabis indica
tggtgtagcttcagattttattgtgtcacacaaatggttgtcaactggtatgtcattgacaaaggatatcatttgcattgtaaactgacagtgctttaaatgtcgactcttgtaattcacgcgcgtgtcaggtgcgtgtctcgggagacgtcaaaatggccgcaaattgattgaatagactcttcatttaataaacactcttcacgagatatgccataatgaatgttaaatgtttgggctgatacagtctttttgtctccctatccgtcagatcttcagatgccattttggtgaatgatctaggtcattcgcttcgcgtggaaggcactcctcttggtacatattaaatactcatagcgttctcatctcctttgaagtttcaaattttttgcatgctctccacaccagagcttttgcaccttgtttcatcctactttttgctttgcaaagctcaatcaatcgaaccatcctcagtcgtgcacgtatccgaacacgacacagttgggccattcctcgtaactgacaaatatactaatatttatttctaatacctccaattatttagtataattttaagtaagggtc

SEQ ID NO: 397493 - DNA, 791 bp, Cannabis indica
caaagcttgctcaatcaacaaaataaccactcaaaccagctcaaagcaacatatctaaccataaataaaccccagaaaacaacaccaattaataacagaaactacagaactcaaaaaacacaaatcatgcataattctcaacttaaagcttaagaaaactaaagagagagtttctaggatccttaccttgacgtgaaatcactaaacacttgttggaattcctagaattgatgaagaaaaacccaagttcgtgctggtttttagggctcacgagagagagaaagagaaaaatgggaagagagtgtatttgatcttttcttatttttttttaaataaaatgaataatagaaatgagttttatctaattaactaagggataaactcggcacacaaatccaaataatgtccactaaaagacaaaaacacaattaggcaaaatgaccattttgccctccacttagcgaaaaagtcatcaaatcacttagggttattttggtcacttctaaaatcctgactattcctgacattctcaatgtctaactatattgccctgctatactaaaaattctaagatgtgattctaatagccaaacatcgtgttccaatgttgccaggttgaaaacatgcaaaaatatgaaattctatttatgacatataaaatgtattctgtattcaaataaatctccgtaaaatgataattcataactaacatgcaagtttaataattaaaccctaattatctgctaatttcaaaattaaagttaagcggtttttacaattatcccccctta

SEQ ID NO: 397494 - DNA, 526 bp, Cannabis indica
taattagtaataaattaactagtcataaattatacaactagtatgtagttaaataaataaatttttaattttgtagtattctttatgctataggttgtgaggtcaatttataaatatccgacttatttgatgttgatcggtttctagctagcctggggtatatatttactaacttttattattaattaattatttattcttaacaaagtttgaatatcttaaatattcatccgtagtgaagtaggttctgcgaatacatgtactacggtcaaatgagtggtaaatttttgtattgttaaatgttgttgtgattgttttatattattttagattgtattttgttattattaatagctttaaattttttgggaacattcaattatagttgttatatatgctgctaaaattttagtagcattatgactagttattactagttagtaatttagtatgctttatgacttaggaaaatgtacaacatgtggcgttatgtgactttattagaagtcaagtatataatttttgg

SEQ ID NO: 397495 - DNA, 679 bp, Cannabis indica
aggctgaaacttgtctgaatactctaatctcaccacaccaaagcgctttcctcccgggccgactcatttctgacaatatcattatagcccaagaagttgcgcactccatcaagcttaagacgcgggggaaaaagggatggatggcgatcaagctcgacatggctaaagccttcgaccgtgtggaatggcctttcatagtagctattctcaggaaattccaattcccccccaggtttgtccatctgatttatgcctgtatctccaccgcctccttccaattcaacctaaatggcaaagtcttaggcagtgtcaatccttccaggggcattcgccagggcgatcccctttctccttatctctttctgctgtgtgcggagggcttttcttccctcttgcaccaacaagaaagaaggagagctcttttaggctttaaagttgctagaagagcccctgctatctctcacctcctatttgcggatgacggtttccttttttgtcaagccaccattagttcctgcaatatcctcaaagaggtgctcgaggcctatgggagggccacgggacagcaggttaatttccaaaaatcctctttgtatttctccccaaatgttgagctcagggatcaaactttgatatccgattttatgggtatcccggtgcggtcttccttcgaaaaata

SEQ ID NO: 397496 - DNA, 525 bp, Cannabis indica
tcaaaaaattaagaaatgttaaaaagtaccacctaaaagtgttatatcgctattggtatatggattatacataaattcatttaataattattatggaatatcactaattatttacaaggtgacacacttagagtgctaggcacaaagtggcgcctaatattagcaatgctccgaaaattttggtaaactatttaaatgttgtctgcttaaattttttgacaattattttctgtctcggagatcattttacaaacaatattttgaaattaagttaaaatgcaaaatgaatccaaatgcaaaatgaaggaaaaagtattaattgattgtaaaaatatcattacgctacacttatggcatgtttacttaaagggaatgggaatgaatggtatggtattgattcccatacatttgtttactaaattttggaaagggggaaactagtgggacccacacaaattagggagaaaacaaagggaaaggttctccccccattttcatagggaatgcctttccctttccttactt

SEQ ID NO: 397497 - DNA, 993 bp, Cannabis indica
atctatacttattatattataaagtaatataacataaatttctatcaacaaagtattttgctagaaaccctaagaaacttgatgattctcaaaactatttttatgagagttctcttagtgcttagagatataaaaaataaatttttggacaaatgtgataataccttgttcaagtacttatgatgatcctcactaatttataattaagattgtgagtgagtgtatatatatttatatatatatatttttcattcatattatattatatatattatatattacatggtaattcatctcttttacttttcttaaaaacagaagtgtatatataatagcataattaagagcaataaattagaacttttacaattatgtatacttatatatcaaaaagcaacaaaatagtaacttatatcacatacaatgggcacgaaacactaaaaaacaaaatattattacatatatgatgataaatatctaaaatatatagaaaacacaccaaacgttttcatctcttctagtctcatattttcatatctttctttatgagaagagtgtttcatttgtaaaaacatagagtgttcaactaggttttggttttcttattatgatctcatactattcttagaataggttgaagagaagctttgaacaggcatgggtcttcgggatcagacctttccaagtctcattttgggaggaagtaagcatatatattcgggagaagatttatttaagccttacttctagaggaagtaagcacacaccaatagttgaagggagttcactacttggtgtgtttcagagatcagattagcaaggtggattacaaatggttgcagcaaatcactagaggaagtctaaatttgtttaagtcaattacttttgtaatctttgatactttactaattgatttcattctctaggcatggccccgtggactagtagtgtttgaaagaacactgataccacgtacaaatctcttgtgtcaag

SEQ ID NO: 397498 - DNA, 606 bp, Cannabis indica
acatagagatcttaccatgtttgccaagcggttaattttttctcggagtgataatatattctcctcttcttcaattgattcgggtgagtttggacaacaaggagggtattggtgactccaaccttgaagtgatggatcccagtgacaatcgtaatcaaaatctaccatgtcattcaacaaatttatgatttcatggcctctccttaacaaaggctctctagtaacgtatgctccataatcaacccaattttttttttcatcatcaagtctgttatagaagaatagagtaaaacacccacttgagaaattggaataacatctctccccaagctccttaaatctcccccaagcagaatagaatgactcattgtgttgttggaaaaaattcacaaggtatagcatttggatttaccttgcaggtcaaatacattcagtaaaacatcaataaaattaactaaaaagaaaccaaattagaatagaattcaactatattgatattaactaaaacagtccatggtaacggtgccaaaaacttgttgtgataaatccaacacgcaagtatacatatcgttttagcaagtaatactcaggtaagtgagatcgttc

SEQ ID NO: 397499 - DNA, 819 bp, Cannabis indica
atgaagattagtttcgcgttaaaattggttaatatggccctttaattaaaaaaattaagaatattcttcttttcaaggtaaattttaagaagttttaagttttttccttactcttacactcgttagttttctgttaaaatctcaacctacacatctccaaaaatcatgaaatttcacggggacaaagccaagaccgttgtgcatcacttttttattggacacgttgagagaaaaaaaaagaaagtagtttccttgcactaacaatcattttattcgaaatagtgaatatctcacgttttttatagtggtagccctttgtgaaagatggcccggacccatctaggaatattttttggcactagtcacaatgaattcgtactactaagatgtgaatatgaagattagttttgcgttaaaattggttaaaatgacccccttattcaaaaattgaatttattcttcttttcagggtaaattttaaaaagttttttccttactcttacacttgttagtgttattttaaactctcaccttacagatctccaataatcatgaaatttcacggggaggaagccaagactgttgttcatcacttttctattggacacattgagagaaaaagtagtttttaagcactaacaatcattttaatcgaaatactaaaaatctcacatttctgacagttaggggtgttcatcaaaccgctcaaactgcctgcaccgcaccacaccgcaaaaaaatgcagtttgaaattctttgcggtgcgattgcggtttgaatttttcctaaaccgcatggtgcggtgcggtttacagtttt

SEQ ID NO: 397500 - DNA, 579 bp, Cannabis indica
ttatcttccatgaatgagagcctccttattcgaatggtcggatgcaacactgccagacagatttggtacaacttttattgcatctcataatcataataagcctttattgcttcaaaatttactgcatgtacctgagataactaagaatttgctaagtgtctccaaatttgctttagacaataatgtttggtttgagtttcatgctgatgcttgttatgttaaggaccaggttaccaaggaagtgttgttgactgggatcctccacaatggcctatatacttttgatccaagccatttcaaagtgttgtcctcttcccatccatctctcagttctggtgttaagttttctgatccaaaatctgccttagttgtcacaagtgaccctgctgtttcagcttccagcagccattgtactcagccttctgtttcagtttttgatttgtggcataacagacttggccatccttctcaaaaggtggtcacatctgttttgaattcttgtaatatctcatgtaataaaacctccaacagtgtatgtcaggcttgttgcttaggcaagatacataaattgccctttcc

SEQ ID NO: 397501 - DNA, 540 bp, Cannabis indica
aaggcaatcaaatcaaccaaaaatctagaatttcacatatatttccaacaatatacataattataaaaaccaatgcatgatctagggttcaaactggccttccgtagttccaatctaacccgagaaaccaaatccaattataatagtgaacaaaaaaaaatacacaaaacaaccaaaataggaaacgcaagagagagatacctgattgagcgtggtcggaccttagagcgatcttcgaatcttgaggaaaatagtaaaagagctgaaaccagaacccgtcccttattgacttagtcaagtctcgagatctagggcacaataacatcaacatcgaccggaacaagaggaccaaaactcaaaccaagactgagagaggagagagagagagtgtgtgtgtgtgtgtgagtttgtaagtgagagaaagaagagtagtctgttaatggcaaagtaagatttacctggtgaagctagccatggaagactctgagttgaggaagtgatcgagagagagagaagcaaaatgaaaaaagtgtttttaaa

SEQ ID NO: 397502 - DNA, 856 bp, Cannabis indica
tcttgctcagttaactcatcctcggttaaactcaattctaagggatcttctatcaactttttcttctccacaatagtctcaatcagatccacaaagaaacagttatcacttgcctttggaaaagtgaccacctttagtacattgaagaccacttcttccccttacactcgcagcttcaattcacccttctgaacatcaatcagtgcttgaccagttgccaagaatggtctcccgagaataattgggacattactatcttcttccatgtttagaacaataaagtcagctgggaagatgaacttatcaacttttactaatacatcctcaatgactccccttggatgagctagtgatcgatcagccagttgcaaggttactgtagttggcttcgcctcacccaatgcaatcttctaaaaactgacaaagacattaagttaatgctagctcctaggtcacacaatggatttattcttctattctcccgatggtgcaagaaatggtgaaactcccaggatctctgagtttgggaggaagtttcttctgcaatatggcgctacaaccctcggtcaatgccactgtctcatagtcttctatttttctcttcttcgacaagatctccttcataaacttcacatagctaggcatttgttccaaggcttcagcgaattgaatgttaatgtgtaaccttttaaagacctctagaaatttcaaaaactgcttgtcaagattagtctttcgaagtctctgcgggtacgggaccttcacatggtgatctatactgattggtggagacgctaatttcggtgtaggactttcagtagtcttcttttctgttgataccggtgccggttgatcc

SEQ ID NO: 397503 - DNA, 855 bp, Cannabis indica
tgaacactctttagaagacaccctttattgaacacagtgaggtgatgtctacttatctcattactcaattcgaagcactaaccattggaaatgataaaaatatgccaatgttagtaattgagagaatcagtaatgaagagaagattcaagaactacaaagattattggccgagatggatgaagaagtagcccgactctcaacacaattatctcatcaacctaatatgagacaaaaggagagtgaggttggacaatattcctcgtcttcagcgccgcctgtaggcaatatacaaccgccaccactcggtgtgcaaccaacactaactggtgttcaacctcaacaggacctaaaggcttttatcatggagagtattcgggaatatcaggatgcaacaatgcctattctaggatatcataagccatacccagcttactatgaccaaatcccacttccaacaaacaatgtctgacaaaagttcgaaaagtttgatggaattaacggttctccccatgagcatttgacctatttcacctctgcatgtccaatcagatgcactattgattagacaattcgtgcaatcgctaaaagaggcagcattcacctagtatactcagttaccccaaagatcaataaatatttgggacaacatgcaacaagcttttctggcacaatttgtgagctcaaagaagaccacaagtctccatgacctggtggaaacgaggcagcaaattagtgagagcgctaatgagttcataactaggtggagaaatctcaatctccaatgtccagaaaggatatcggaacaagcgataatttcaatgtgtgccaaaaacctcaaccctgaggtggcaact

SEQ ID NO: 397504 - DNA, 739 bp, Cannabis indica
ccttgtcagcgagaaggcccaccgatcccaggttggcctcattcagaaggaagtcgcatgaccaaaggccgtaggggagagttatcaggcgcttgtgcctactgaacatctcaggggtaggagtaggcctcatcaaaagagctgtcaaaacaaatagaacattggtcagaaaattgaaaaacaaagattgatataaatgagcaagaagagagcaaacacttacgaagtttgcgaaaagtggttgtgttgatgggggaaagaccatatgtccagaagaagttgttcttgaaggatactttatttggcaagtccacagtaattttaagctcgctagaatgagtaccaaggtagtagaagcccactggggcgttcttccttgacggaacgaccttaactgagtaaagatactcaatctctactggtgtgggacacccccagttcagaattctgtataagacatcaaactatcgagaatcctgtaggagatgggagtcagttggaatggggcaactctaatgtgatttatgtagtccttgaagtagtctcgaagaggaagcatggcccctgcgctgatgttcttaaggctctaggcgcccataccagtcgaaccactggtccccggtttactgcttgaaaaacacgcaggagggtagcaactgcactcaccctcccgtactgatctaacttagcatgattgcccaagctcgaccccgtaggtctttagcatctcgcccgtgta

SEQ ID NO: 397505 - DNA, 612 bp, Cannabis indica
atgacagtggcaaacataaaatgaagtggaggatgaagtgtggatggctggacatcgccggtgaaggcaaaaacagaggattcttcatttgttaatgatagtgtggaacggattgagtgtgtgagggagtccatagggggggttacggtatgtagtgaaaggaaaagtgaagggaagaagatgaagatgaaagaaaaatgaacccaaaaagcagttagattgatcagggaacgagagagggaaataaggaatttgaaaaataggtagttaaagaccaaaatagtagttaaaatgcataactgctacagaccccaaaatgggcacccttgttgttgttttaatcttaatggtctacccaatgtgaatttcactatcctgatccaatttattaagtggggacggggcataatcccataccaccatccacatataccactattgttaggcctgcattcccacccaatcaccataccacatcaattacaacttcacccactacagatgttacaaactgtagtaactccacttgttccactaccatcaacttctctaatatttttgttccagatgtggggaatacatctcgacaacctatgccttgtgctacttatc

SEQ ID NO: 397506 - DNA, 798 bp, Cannabis indica
tgaatttttagccttaattcttcttctgaaaaataacctgttacgtggattccggccgtttctatagctttctgcatggcgatcattatctctcacatcctcctattttgttctttttgtgcggccagttcggcttcgtgatcggccgccttttgcctcagggccagtagtttggtataacgaccatcgtcataagcatcatacccttcttggttttcttcatattcctcgtcatttgtttcatctttctcttctgtatctacatttactcgtgaagtttcctcttcgtcccctagattctagggattttagggaggacgaggttggcgtgtatggttcctagtctcgaccattgtaccttgaaatccctattgtcgttttgagactgaacaaataatttttgataataagtctattcaatggacttaacaaaatttcccaatcctagtctcataattttgagattatctaaacctatgacttgtgctatgcctggtaatttatttattctggtgcaaataacttactttagtaagatgttggagtatttttctaatggctaactctaatgacatgtttgtctgaccatataattacactgtaactgtgtaattggaagtaattgaggggttccaattacactctccaattctcatgcccccccatgagaattgaatgtaattacactgtgtaattactaaaaactttttatattaaacattagctattaaaaaatattattttcccatgtaattactaactattttgccaaacaagatattaggaattcatatgtaa

SEQ ID NO: 397507 - DNA, 596 bp, Cannabis indica
tttttttatttttatattattttcaaatacaaaaggttgtttaataattactttaatcccactccccaacctccactgtttatcttcttcttcttttagtttcttaggcagttacctaagtcgtgggtggtttttttcatttcaaaaattttcagttaatataccatcttctcaagcttccctcttatttttcctccccattttcctagttattttctataaatacttctcatcctacatctaaatggttgttacacgttcatccccaccatccggtacagctaaaaatccctcaaaataaccccagaaaacgaaactcaaaccaacaatgggtaagaaaaatctaaaagataatccacctagccctacttctcctattgctcctaaaagaaaacaacttgctggaacttgcaagaacactcgagggaaacgtcctctaactgttgtggagttttcagactccgattttgagttggaaactaagtttgtgaagtctcctaaatctgtgaaggtattttcgtattgatctagtgttgtttttgggttttttgcatttttagtttattgttcatttatctgtatattagttggggttt

SEQ ID NO: 397508 - DNA, 614 bp, Cannabis indica
ataatactatttagtttctgctcattttatagtatacacaaagaatcaaaagcaggtttcttattagttttaacattaaaataataagtaaattaggtatgttcttacaaataatcgtacctgcattaggctatactcaggcaaataagagctttcaactttttgccttattattcaaatcttgatggttctgtttttccgcgtatgaaccttcaccagtcggttaaaaaaataaaagaagaaaagagagttgtgactatggaataattagcattaaatatcagttcaaatattaataagatttgttttatttctattttattattttattaaatataaataaaaagtcaccattgaatttctcataaaccaagaattcagttatatagccacactttatatagaatagatatgtatattagtttaatttctatataaatagagatagaaatagattattattggagattaagaaataatagtcttttttttaattttttttctatgaaatattaaataatttattattaaaaaaataaccgatccaattcgtactattgcggattggattggattggattggatttaaactcttatgcggatcggattggatc

SEQ ID NO: 397509 - DNA, 639 bp, Cannabis indica
gggttgcatttaaggccgtgtgcgggatcgaggtcgtctaatgatgatattctccttgaaaactccattgacatgaacctgctgtcatctcgcatccctaagcttcatgcattttttcaaggcgcatggtatgcacggaccaaaagatccatgacatgtgtacttaattctaggaagacgaatggatcgcaagcctctgccacttactactttggaatctcaagagtttgcacctgttcatagttctacatccaacaataaatttgggaggaggctgcaagccttcacgactcttgagtcctgaaggtgtaatatcccagaaattaatacagtatttaattagacatatttttattaaatatttaattattttggtaatgaagtaagattatgatcttacttagggtaattagtgagaatctattaaatgattatattaagcgtaatttattaattacggagattttattgggatatgtgggtatcgaggatactatttttgaaataaaaatattttttccaggcccaacgactgtggaaatttgacgatgtggtcagaaatgtcacgacattaatggatggattattttgaggatattccggactagtttagtgctggaaatttattttaccaggatc

SEQ ID NO: 397510 - DNA, 522 bp, Cannabis indica
ttggccactgctgattgtttaggaccatctccttcaacagatcataagcctcattcgcactcttcctcataaatgctccaccagttgcagcatctataagagttctagtgttaccaaccagcccattgtagaagttgtgaaccagcatccacttctcaataccatgatgagggcactttctgatgagatccttgaacctctcccaagactcatggagagattcattatcctgctgacagaagttgttgatttctcctcgcaacttggcagactttgctggaggaaagaactttgacagaaattttgttgccaagtcattccatgtggctatggagtttggtggcaaggagttcaaccaactcttggctcgttctcttaacgagaatggaaacaatctcagacggatggcatcatcactaactccattgactttgaaagtctcacatagttccatgaagtttgataaatgcagattgggatcttcagaagggagtccaccaaactggactgaagactgcacca

SEQ ID NO: 397511 - DNA, 628 bp, Cannabis indica
aatatcagaagccaattttacagtaaaaatgttatttttgcaaaataattctagaaatggtacttttgaactataaagtaatttgatatgatatttgtgcagtattgggcaaccatgattacagaggcgatgcagaggcccaattgagcccattactacgcaaaattgataataggtggatttgcttgagatcttttttggtaaatgctggtaagttacttattactaccaagtaatttatgggtataaatacttaagtttaactcctagttatagataaatacttaaatttaatttttaaatgtaatcatgactaagttataattcatggtttgttgaagaaaatatacacttaccaatatttaccaaaattgtaccatgagcttcaacattacatatttcatgaatttttttttagagcgaatgctattttagactatttgttttacaaaagttaccgattagactttttattttattaaataataaattgaactatgtatttttcaaaatgatacaaatattgagttgattttttgttcaagctaaatttaataattaataacttgatctagtttgcattatagcaagtatagtttatatttttttgtatttgttcgtgctagaa

SEQ ID NO: 397512 - DNA, 755 bp, Cannabis indica
tctttaatacttagatcttgtggtgatatttgctttccttttccatttaaggtaacattgactttttttttgaaaaaccttttttggtttcttcttttctctctacacgtgattcaaaggtaaggaagttactttccttttcaattttttttcttctgattttgggtaagtaaaatcatgtgtatatattctcaactacccactcacccacgatcaccactctctcttgtctttctattttttctcaaaggtctaatttttattttcaaagtgtgagagtgtttgtgttctagggtttcaaagagatggccaaaactaagaatgcccaaccgtccaagaagccctctcgtggctctgcctctgcatctccgatctcccctcctgcaccgcctgcactagtgaccggagctcctggttcgtcctctgctccgacgacaactgccagaaaattgaagacccaagctcaaaaatcagtgatcaatctcgcctctccacctgtcgttgcttttcctattacttcttcaaaatccgggtttggtgatcatgataaatctcattcatccgatcacacattgtcaaagtcctcttcttcgaatggtgctcctaatgtcgacaaagctttggtgactctgcccacggtgagttctcgaacaaggtccaaggtttccactcctcaaaagcccgaagtggttcaacctaaaattgtatccaaagggaaaaaggtggtttctttatcttcaaaggccaaaaatctc

SEQ ID NO: 397513 - DNA, 955 bp, Cannabis indica
ctaatcactgaaattaattatatcaatggacattacagtaaaactcagtaaatataatcctataattactaagagttcaattctatatttatagtagagtaatcataaaattaataaacataattatttagttgataagattcaataaataaatctagttatgtgttgattcattgccgttttgctaagtcctgttggaatatctctgcggttaactgtgcagaagatgcgaccgtgagttttggttcctggtttggtgacattctgtcaaaaaaccagcaggcagttaaggaggaagctgccatgattgtttggcgcctttggatggctcgaaatgatgttctttggaacaacaaaactgttaaagcttttgaagtggtaaaattagctagaactaatcttgtaagttggaaaaatgctcaaacccaaagaacaaatccataacttaatgtcaattatagtgatgatctggagcattggaggaaactgattattcataaatacaagatcaatgttgatggagccatttttgaagctgaaagtcgttttggtgtgggagtggtcattcgggatcatacggaaaaactaattgaagttgtgtcaattagcaaatctggtgtggttcgtcctgagattgcggaggttattggggtcaaggaggccctaagttggataaaaaagcatagttattctgatgttgaaattgaaactgactctttagtggttgttcaagctattgatggggaggtttatatgccatctcaatttggtatgttagtacaagattgtcgtttgatggtatcttctttgaattatgtggtgaattcttttgttaagcgatctgcaaatagggctgcttattgtgttgcgaggcaatcttgttttatgtcaggttgtatctttagtgagctaaatgctccttctgatttattatctattgtaatggatgaacgtt

SEQ ID NO: 397514 - DNA, 1312 bp, Cannabis indica
atcaatattatatttatagcacaaaatctacatagaacgaataatattcacattctgtggcctaggcactaatttggaataaaaaaaatatccttagtggtggttgcatgacaattggtagagtatttagaatttggcttataaatgacattgatagcacgagttgtcatgtggtggagcatgggattattaggcttaagagaggagtgtggtgctgacatggatgtatgtgacgatagaattcgggccagggattgggccatgtgaggtgggtgaggccaagataggagaagaagttggagggcactgctgcagcatttgagctacatgaggagtgggtcgggactgagcagcatgagaagtgggggtggctgggcccgtgtgagaccgcgcctcattgtgaggaataggtggagagttgggtcgttgggttgggtcaggttgtggatttggtggtgctagattttgagagaataacattcatgattgatggatcaatattatcactgagaaaatcataatttgtaggagtgattttgtgcagggtcgaaaatggaaatttgatttcaacaaaatgcacatgacgaaaaattattatctttctactagacatatcatagcattttgagccacaatggtttggagccagactaagataggcacaagggaaagatcgttcctgtaatttgttgatagcaatggaggaaaataataaaaaacataaacaaccaaaaacatgtaaattcgagtaagaagggtcactttcataaaggatttgtgtgggtgataaataatctaagaccttagaaggaaggatatttagaagatatgtcgccatagatagagcataatgccaaaagaacggtggcattgaagcatgagctagaatggtccgaacaatattattgatagattttatctgtctttcgactttaccattttgggacgatgtgtgtggacaagaaagacgaaagactaagccataacaatcaaaaaactactcaagtaccatgaaggaaattcatttcgtgacttttgcattatcaatcatagtaatatatacaagatatacgcataatgttaggctataaaattaactaactcattgttaaaatatgacctttgtacggctaaactttctcaattgttactctacttgcacttaattctctaagctcaaattttgatggtaaaaccctccaaattactgaattacttgtaaatttaaggtgtcacctattttttacagttaattgccaatatagactgtttatgtatacacttttatgtatgtgtcaaatttatattggta

SEQ ID NO: 397515 - DNA, 2702 bp, Cannabis indica
ggcaggagcccggatctgctcagatatgctcttgaccaactcggatctgccctttgactgctcgggcctgtccaagcttcctcctcgagagtctttgaacttaattgtttttggggcagaaggatccatgagggttggctcctcggagagatcgataacagcttcggccggtgccttctctctggatggtgttgtctcaccgcccctggacttcttggctggaggagataagcccgagcttcctctcactctcttcttcagagcttcaagcattttttgagacatgtctgcacaaaataaaagcaacatggttagagaaaagcactagaagtatgaaaacataataatcaagaaagttaaaagcaagatagagtagcttgcactctagaagaagcatttgctcgagcaagacttgatggctcatcatcatctgacaagtctctttgctcctccaggatgactttcccctttcctactacaggagtggatggccgagcaagtagactaggctccctagtctaaattgcatgttcaacaggcctgtgctcggttggaagttttttcttccttttgagtggagtcacctgctcctcctcaacctcgtcttcctactcaagatgctcctgagcatactgcttggccctcacacctcccttcaactttgcttcacgcttgagttgaatgagttcattctcctgaagagctccctgagcctggccagcaatgaaattcccaattttgctaatggccttgtccccggtgcccatcaaccacttgaagtcaggatgagaaaagtagaagtatctcgacctgccttgcttgggagtagacttcaagtcaaaaaaccagctaacctcatgaggagaaagcatatcccacttctgggtggcgtaaagaacaaacaaggcagaaagatacttgatgcccttgggagtgaattgggtcagacagagacggaaaaattttgccatcttcctaaagtacggctgcaaaggcagtagtgccccttgtttagaatgagcacccgaccaggcacacatccccctcttagggtttgtggctcgattatttgaggtaggaacataacagtccaggactgatccagatcccgtaggcgtgcctcagtgaccttgaacggagagctcacccacctggtgcccaaggcaccttgcctcctgtgaggaactgcgacaataagttcctcaatgacgaagtccacaccctcgaccaggacatcaccatccgcgtctactggctccccagcctcgttgtatcccccaaagcttggaggtgcagcctcctcctcttcctctgcctcggaaggactactaggatggacatcgccctgctcctctatctcctggacttcagcgtccccttcatgatccccttcctcatgcacgggtggatcttgttcggcgctgggcaaggtggcatgatgggccacatgagggtcagacgcgttgactttacgcattgtctatttaatgcgagccatcatcatgtggctggacatgaagattgaactaaaatctccgtcgcttgaagagggcggactagaacaaagacgagggtgatccttgtacaagagttgaagcaaatcctagtcgattcagtgttcgctttctcaaaactcacccgggttcatctacaaaagacaacacatgagatgagtgtttggttgggatatcgaacattaaacaggaaaatatgccaaccaggagtactcaacagattaaagaatagaaatattcgacgaaaagtcaaaactcaaaagtttgaaaattttcaaaagttagggcaaaaatttcacgaacctttgaataagcaagatgaaagacaaacattgtgcagtaaaaaagtaagcatcatgaatggtgaagtcgcatgaatcattacaatggaaaatcgcagagtttctgaacctagggttttctacatatcttctacaacaaagttaagatcacattcagaaagtaaatgtgcaaagtaaagtaaaaggaatcgagaacttactcaatgatcgacgcctggactcagtttgcgtaaagcttaacgaacagttcttgtgaaattttttcaacaagcttgaagctaaaaacctctcttttagttctgaacttgcttaacaaataaggttggtgaaaatgagtttgtgaacaatgctcagtggtatttataggcaaagcagcaaaaaggggtaatcatttcaaaaaccccagacgcctcggttcccccaaaagcgaatattggaaatcaaaagcaatcaagtataaccgtcaaatgtggtgagagaaaatcaaattttgaagcattaattatgttagagcatttatcaatcgaaaatcgaagagacgcctagtcagcctcacatcgagtcgcgaatagacgcacctgacacatgtcacccatccaaacgcaaagacagctcggatgaagtctacacataacttcggaagtcccgtacaaacttgaggggcaaatgttatcccaatttttgcactctgacgtggcatcacacgatggtgacacgtggaattgactctaggtacctgctcgcaagacacagaccgaacagggcacctcatgcatttgctcatacgaagtcctctagaccgagtagtgagaaatctgcccagcacgccaacacttagcaaattcagctttcgcatcatgagtcatcaaagaaatccctatgactt

SEQ ID NO: 397516 - DNA, 1382 bp, Cannabis indica
ccacacccaggaactaacaaccactgggacccaaaaatcagacctacactgggactgggactcgaagtcggacccgaacccgaacccgcaccacgactgggaatgaaactttgacccgaacccgaattgggacccaaactcgaaccaagactcaagacccaaacctgaacttggaccaagactaagacctaggaaccggacatagatgggggacctagaccaaggacctaggccccagaacccagacccaactcggaatctgggactcgaacccgaactaggacttgacctggacccaagaatctgaagtcagacccagacccaaacctgaaacctaccccagacccaaactaggataggaacctggacacgaaccaggatcaaacctgaacccggacccaaaccaaaaatcgaacccttactcgggacgtgaacttagacacagacctagaatcagacccaaacctagacctagacccagacctgaactcgaacccagactaggatcggaacccaagacttagacccagaactgtacccaaactcaaataaaaaatgggacttgggactcggacctagacccggacctagacccgaacccacacctggagcttaatccagacctagaccgaaatccgaacccgaacccaaactcagaccaagtctcgaaccccgacatgaacttgaatccaaactcaaactcagaattgcaaccagaactggaaccgaactaggactaagactaggacctaaacccgaacccgacctagataaaatcaagacaaagacccaaactcgaatcgagactagttatcaaacccaaacctagactgggacccaatcccagaccagaattgggattgggacccagaatctggatagggacctgggcaacggaactaggaccgaaacctagtacccgaccctagacctagacttgaacctaggacccagctcatgacatggcacccaaaatggaactagaatcgcacctggtctcaatcccgaacccaaactctaacctggaacccaggaccagaactagacctacacccatgacagggatccagatcttgactcggaatccagaaaatggggcttggaacagacccgtagtcggtgtttgaatctgtgactcagactaagacccgaacccagtctaggaaccgaacccaagcccagacctagatccaggacccgaaagtagcacctaaacaagaactgttggactaggaccatgtaacaagactaggaccgtgaccaggaccctgacccagacctagaaccgaactcggaccaagctcaagacccaaaccgagatcgaaactcaggcttagacatggtcgtgtacccagatcagaatcgagaattggattagacct

SEQ ID NO: 397517 - DNA, 1125 bp, Cannabis indica
ttcttcttcttcttcttcattcatcatatcaacactaccgccacacaaccactactcagtaccactgcaacaacaccacttgcaataccactgtaacaccctactaatttaggcgtgttatcgtgattttatattaactgcgcagttcgttgctaatcaatgagtttattaaaaattctgaataattaaaactttctttaaatatttataaacatcaaataaataacatatatataatcagaattccgtgtataaaatatttacaactgttacaaaccacgtaatacaaaagttgttgcccagggactatacaaaatacaaccaactgtcccaaagatcgtacgctccaggcctaaccgctccgacatgcacaatcttcatctgctcgctctcacggttgctcaaccttagccttgcccttacctacacatacagacaatatctgtgagtcgacactcagtaagaaaagcataatcataatcataaatataactcaaattgtaattaggcacccatacacccaatgataaccctatccccatgtccaacacggtactgagtctagaatgtttctatgacaatattatcgaccataatatcagcctatattcagtactctagtcatactctagccgtactattgtgatagcgtgaatctcatacttgagccaaaaatacatctatcggtatccagtacatctctatgtatactgatatcgctatcaatgtaatccaacaggctccataaatatgcacactaaacatgtaaatatatatgaatatcattatactaatcttacctcatttccgaatttagatgtgccagccaacctgagtggaaccgctgcttaacgatttacaggcccctaaatcacattatttgtgaaactgatgagtgatacgctaaattactttttggggactgacaattgaaactaacagtttcctatcgattgataacatggcaataccctaaatatcgcaaaaatgggaaaaactagtgttataccaaaaattcggctgtactttagaaagtgacacgtgttaatttcgtgtaatatgaattaacaaatataatgataattatgtcattaaatgcaaaatggaataactcattaaatatag

SEQ ID NO: 397518 - DNA, 1633 bp, Cannabis indica
gaaaacctatcctataagtgctattctcacacaaacagtcaaaagccttatcactatcacacactaataatattagcataaaacaacaatccaccatagaataaacatgcaaatacaatcccataatacagttgtatgttttaacatacaccctgtgcacagatgtcactcttcttacctcagttgttaagaacaccttcttgctactccaagcacctcaatgaatttccttgttgagaacaagatcctaaatattcattaacacaacaacacttaaaaaatattcaagcataacctaagattaaaaatgaaattttaaatcaaactacacaacacgtaggtcaatttcacttgcatgacacaccaaacacaatcatttatcactatgattcacaccaacacatatgatgtactcaaacaaagtcttttaacgtaaaacgaatactttagtgaaatttaacgtaaaaagtgtttgtatgagttcatgttttacattaaaaatatttgtttaagtacatcactactcgctggacagctgctgccaggaatttattgaatgacgagtgaaattgttaaaccagttactcgctgctctaacaagcgaggtggagaacaaaatacaacgtaaattgttcttcacgttactcgctcgcagtattgtgttaaagttattcaaatgcaagaccggatctgtggtttcgtcataggacgagacatgcgggtttttgaatcctgaaggaaaaagggtattcataatatctggatgatacggatcaagctcctcgtcagagtcatatccagacaatttccctatttcccccacttatatctcctgaacttgtcctccaactcgtttatccgtaattggattgaatcctcttgctttagaccaagccgttggcaaagatcaagtttcttccgattcaagtgctctcgcagatctggttgggagtaattgctggcagatctcgtcttactcattaactgcgtcctacttatagactttgtttttaagtggcttgcggatttacttgttcccaaactctcccgatcattggcttgttgagtattctctcctctttgagttgatcgactatgaattctggattgccttgaagtcacacttgcctcttcacgttctgttctttcctcccgagagcggtttgtcgtatttccccaatcagggtacgtacgagtcctcactctatgggtttagaaagaatgctggtgattcccagcaagtgatctccattctcccggctgagttcctagatcctcctcattttcatgagggatttcttattcatcagttttcgattgcctcctttctggctgttcgtcctgattcttagggggtgtctcattttctccgggttgttcttcccaggccttttcctgtgtcctggttcgtgagccactaggtcttccccgtggtcttctcattgcaggttcaggttgattttgagtgttgctcccatgcgccgccttggccgaggctacctctcattctaactcagtgtttcgacgctgcgcctcttccagacaacatctcaagtggtggatcttcatttcataagttctttctcccacagattggtcacctccacggttgagaactgttgggttttatgcc

SEQ ID NO: 397519 - DNA, 1072 bp, Cannabis indica
tgagccaatccttctgatgcaacattaagagactcttccttctctaaatcgttgttaccatgcattgtgagaagctctaggtcgtaaaacttgaaattcatctcaaatcatgtaactcctcccaaatgtgcctgcatttaattgttaaatattaatgttttataataatttcactagaaattgatatatttgattaattaggttaaggaagagtatacatcattctgaaaagcattccctggtttagtcacacaatgccacctgctgtgaatcttctcctgatatcctgatctggttacgaggcactatgaatccacgtggtacttgaattgggattatcacattttgtgcctcgattctcagaaattcttcaaccctccatttgattagcttagggattagcgccatgatctttggagtgaataatagataagcttgaacaccactgcctttttaacaaggcatgggaccatttcccttcgacacatcacgtcttgatggtggttgagctagtggaccctatacaaaacaccatataatatatcaaaatttatcctaattctaccaaaattccagtagcataacgactataattgaacgtgcccaaaaattttaaacatgcctaataacaaacaaaataaataaaaaatacaaaataaacaaaataacattaacaatacaaaaattatctacccaactgaccgcagtacatgtattcgcaaaacctacttccctatggttgaatatttaagatattgaaactcgactaaccattgataattaattaataataaatgtaacgccctaatctatagggacaccatatgtgtgattttataaactagtttaatactagtagaataattaattattaaaaatcgtgataatattaaaaacttgactaaaataaaatagtaaaaatagacattataatggcataaaaagcgtgttccgggatccctgttataaaaagttttgctaaagaaatatatacgacaaccatttaaacaaaaaattaaaatacacaatagatacaaccagcccaaaaaaactcctggaaactcggcacaca

SEQ ID NO: 397520 - DNA, 532 bp, Cannabis indica
aaaagtaaaaaaaaaaaatggcaatttgttatacacctgtgtaggcccatttgacaaatatgaattggtcatttcatataaaacaagttagcagttagcccgtttaagtctgatacgtgtccgatccaatacgaataatttatgtttatgggccaagctagacttactttaaaaatatggattaggttctgtattttggtaattaaaatcagtataaatattgtccacataaataaagtgttaatttatattttttataaaataatttctatatttttatatatatttatattattatgtgtttataaaattaaaatttaatttattgtgtaaattaaaatgtatttttatttattttaatataaaattttttaatttaattttttctatagcctgtatattataattatttaatttattatatataaatttaatgaaaatattattattatttttaattaatttaaataaagaattattaaaaaaatatttattttaataaaaattaatataataataaaaaatatatttt

SEQ ID NO: 397521 - DNA, 987 bp, Cannabis indica
ccctaaaccctaaaccctgaaccttgaaccctgacctctgaacccctgatcccaaacccctacccctacccccaaccctaccccaaaccctaacctctaacccctaaaccccaaccctaacagcaaccctaaaccctacaccctaaacctaaaccccaaaccctaaaccccaaacccgaattcccattcccactcccattcccattcttattctcattcccatccccatccccattcccattgccattcccattcccttcgcatttccattcccattccccagcccactcctattcccattcccattccctggcccattcccattcctattccaattcccattcccattcccattcccattcccaattgcattcgcattcctattcccattcccattcccattcacattcccattcccattccctagtccattcccatttctatacccattcccattcccattctcattcctattcacattcccattccctggcccattcaaattcccattcccattccaattcccattcccattagcattgccattcctattccccgacccattcccattcctatttgctttcgcattcccattcccattccccgtcccattcccattcgtattcccattcccattcatattcccattcccattcctattccctatcccattctgattccctagcccattctcatttccattccccagcccattcccattcccattgccattcccattcccatttccatttccattctcgttcccattcccattcccattcctattcctattcccaatccccattcccattctccgacccatgcccattcccattcctattcccattcccattccccagcccattcccataacgattccccaaaccccaaaaccaaaatgccaaaactgcaaaacgccaaacccgaaaccctaaaacccaaatcccgaagcccaacccctaaacccaaaacccataaaccgtaaaa

SEQ ID NO: 397522 - DNA, 1276 bp, Cannabis indica
ggtcggtcccagatgggctctggtcctcccatgccaattcccctggatcactcctcgtatacaacttcaagctggtttcttccctcggatagctttctaggggatgacgaatccacccttttagtttgtgaatttgctaagacaaaattagatcatcaaggtaggactagctccactgtgctgtacttgcaaaggtggttcattttttctttctttatacccatgatagtggcttcgtcaaatcagagaaagatttgatccaacagacatgattcaaagcggaattggaaaaaatggtcatttaattctgatgtacctcgaaactgcacaaccgccaatatcagagggtatgcgtcttttcaaaaaagaggaacatgacggaaataccctttgtaattattaaaaagctctttttattaaaaaataacttttcaaggggcaattggtatactcaaaactcggtgagcacatcagaggaagacacatgtcgagctggaaagaacaaagggctcaaacacgcaatcataagtacacttggcatggaacaactcgttagtaacataatttgcagagaatgtttataactcggttggcttaatggtcttctgcgagacaaaaatgtacgaactgctaacttatgtatcgacgagaaaccatgagaggacaagtgtgcatgacgaggtttcaacctcgctgcgtgaaagagaaacgataacggtaaaaacacttagcgtatattgcatggtatacaaactaagtataaacagtgtggtgaatcaagatgacagatagcgaggcatctatctcgctataagatggcatgcatgcaagaccaaaaaatatagttgttagagttaaaataatattaatctcagaaaagtcagatgacaagcaactgctcgccatcaaagttaactcggctctgtttctagcgaggcgtccccacgagataaggcttaccatatatccttaaatgtgcattcatctcggcccaataaaagcgggatacttacagttgtgtaaattatatttaaaaacctcatttacttggcgtgatctgtaatcaagtcccatgatttgaggggataattgatgtaacgatgaaaatcaacttttataatttactgttcactatgtaattataaatagtggcagataagatcaagagaggggacaacaaaatcatatacaagagaggctctaagaaaaaacacaatcagaaatttgaataagattgactcgtggactatgcagaattttaactacaaaatcacgt

SEQ ID NO: 397523 - DNA, 675 bp, Cannabis indica
cacaatcggaccctacatcggaccctatatcggacccatcagaccctatatcaaacccatcagaccccccatcggacctacgtctcctatctcgcaaactcacagtttcattcaaccctattggaccccatcggaccttgtccaaaatcatagatctgagattctaaaacctaaatctatccctaaatctaacaaaatctatctttaacactaaaatcacaaacaaaatcaataataataaaaaaaaaacggtggtggtgcttcggtggtggtgcgtcgtgggtcggtgggggagcgtcgtgggccggtgggtctcctgtgtgtgtgtgtggctggagtttgagacgatttggggtttcaggtgggattgggacgactcggttgggaagaacagaaagaatagaaggaaggagagagaatgggtgtggaattttgagaggggtagttttgggatttaggtaaagtgggcttattctaacaattacctatagtttaagtttttctaattaattaacccttaaatcatccataaaaaatcaaattataatctttaatctaatttgtaaatttatataaattattagttaaatataacaattgtggtaatttttgttaattaatatgatattattttttattttattaaaaaatgaatataataataaaaaatatttt

SEQ ID NO: 397524 - DNA, 544 bp, Cannabis indica
agtcttcggtatatcttcttcccgaatgctgagttgatgataaccggatcgtaggtcaatctttcaaaacacagtctttccctgaagttgatcgcataaatcataaattatgggcaatggatacttgtttttaatcgtcagcttattcagttcccaataatcaatacacattctgatggaaccatccttctttttcacaaacagaaccagagctccccacggcaatacactgggtcagataaaccctaaattaagcatcccttaatgctgtatttttatctccttcagttccgctagagccatcgtataaagtgcttttgaaataggatcaactctaggtgtcaagtcaatcacaaaatctatctctcgttgggaggtaatccaggcaactcctcgggaaatacgtcgaggaaatctttaacaaccctgactaactcaggcccaaatggttcgagtatgctggagtcaatcacaaccgctaaaaatcctacacatccactgtgtagtagatacctagcccttaatactgaaataatcgggatct

SEQ ID NO: 397525 - DNA, 694 bp, Cannabis indica
tatttttatttaatcttgtaatgtctaaatataaaataaaataaaaaaaataataaaaaaaaaattagtaacttattaagttatttaatacattaaattttatttaaatttaagtattttttatttatttattaacaaaatataaaaataaacctaaaatatttaatagaaaaaaagaagaagaaaaagaaagagaatatttgacaagtttatcatcattgttaaaaaaaaattatggtatatgtcatgagtcacataaaagaataaaaaaaaaaaaaaaaagtaaatcacaaaaaaaaacgtagcaggtactgaagcctaaaagagaaccactaaagtatattggtatctgtgtcaatctatttcaaaaaaaaccactgatatgcgtgtgtaaaactattacataatagccggtattttaataaccaacaacaattctcgaaataatttgatatttacgtggtgaaatgtaataaattttatagttttttgtcgacatcaaaaaaagtgatcagaattaaaagtaatattttgatagcttttataataacaaacaagtaactaaattttaaatttgaacaaaattagtgtaccaactaattttatgagttactataaatatcataatatttcatatttaaaagttactaaatagtatctaaatcagtaattattttgtgaagcaatttagatt

SEQ ID NO: 397526 - DNA, 478 bp, Cannabis indica
attttgtaactatcctaatctttcattggtgaccccaaaatacccctctcctctaacccaaaaaattttgcctccttctccctctctccacgcactctctctctatcactcccgccgactccgccgagtgccaccctaaacgctccctgtcccgaccgactgccacctccaccattttcaccctcaacgtccacctcactcaacaaagcaatgggtaagtgtttttcttagtaaatagtgtagttttttgttgaattgcatggatctgaacgttgttagttgtaatttgtgacttttgtgtcattgaaatggaggtagagtttgttgctatcagtctgtatttttctgggtttttttttgttttttgcgattttatgcgacattatgcgatgttttgtgggatgtcatgagaaatctgaggttagggatgacatgattaattttggcgactttgaacgattattgtacaattttctgt

SEQ ID NO: 397527 - DNA, 1551 bp, Cannabis indica
tattgcttcattggtctgctgaattgattttgagcctaggtattttctttccccatttttatcccagtgaattagaaatctacattttttgccatacaacatctcataaggagccattcttattgtactttgatagctattattgtatgaaaactctatcaatggcaaatacttactcatgagccttcaaaacccatcacatagtctcgtaacatatattttagtatctgaatcgttcttttggactgaccatctgtctaaggatggaaagttgtactgaacttcaactttgtccccatgactcgctgaagactttcacaaaactttgaagtgagcttcagatccctatccggtactatggactttggagccccatgtaatcttactatttcttttacataaaattctgcatactgatctactgtatacgttgttttcactggaaaaagtgtgctgacttggtaaacagatccatacttatccatatggaatcaaacatactcgtggttctaggtaatccattcacaaaatccatggtgacatccacccatttccacttaggaagagttaaaggctgcaacaaccctacaggtctttggtgttcaatcttaatttgctgacaagtcaggcattgagatacatattctaccacatcctttttcataccgcaccaccaataataaggttttaagtcttgatacatcttggtagtattaggatgcaacaaatagggagtggtatgagtttcatcaataatttcttttctaaattccacactatttgggacacaaactcgggttttgtaaagtaaaatcccgctagttgaatatcgagaaatctttagtttgaccaggtaagacttcttattggatcttcactaattctggatccaccaactgagcatttctagttatgtctaacaaatttaattacaatgtcaaattattaagtttgcctatcacaaactcaatacctgatttgaccatgtcatctgccaattgaggtaaaatcataatcgtgttgaatacatgcccgagacctttcctacttagggcatatgccactacattggccttcccgagatcataatctttaaccaactccaaccatcacctttgtctcatattcaaatattttagaaaagaatatttgaggctcttgtgatcattataattatcatattttctctatagagatagtatcgctgctcatgttccttcaactgatgagaggcataagcgataatcctatcatcttgcatcaaaatgcacccaaaccttgtctggatgcatcacagtaaaccataaacttttcctataatgatggtaatgctaatatcggagttgtgattaatcggtgctttagctcttggaaacttacttcacacttgtccgtccataaaaaccaccgattctttttagttaattctgttaaaggcattgaaattttagaaaacccttcaacaaactgacagtagtaaccaactaagcctagaaaacttttgacttcagtgactgtctatagtctcggccaatccctgacggattcaat

SEQ ID NO: 397528 - DNA, 500 bp, Cannabis indica
ctctacatcttcgtgcttcctatattatccattcccatagaggttcattctctctctctctctctctacacccaatttatggtcaccttcaatagcttattgcttttgtttgtttttttttttttgaaagaagaagcaagaaacgagatgaagtatttgttattgttattttgtatttccctatttttgtgataaatttttatttgaggactaaaatgtaagattatttttaaaaataaattaaaataaggattagaatgtaaaaaaaaatctaacaccaaattggtgtagattcaaaatccaacaccattaatggtgtagaatttgatgtacaccaattttatacacaatttggtgtaccattagagtgaaatagtgtaaagattctacaccaatttggtaaaatagtgtaccattagagatgctctaacagtaaaaatataaaaaagacaaaaaaaaaaaatagaaaatttttgtaagattgtaaacaaaataaaaaa

SEQ ID NO: 397529 - DNA, 714 bp, Cannabis indica
tccagctttgccagtgggttttgaggcgattgttgtcattaattccccaccagaaatttgccatggtagattcaagggagcggcaagtggcaaccggaatgcggaagcaggccatgctataagtgggaatggcttgaatgaccgattttaagagagtctctttgcctcctttagaaaagactttatctcgccaattatgtaggtggccccaaactttgtcatgaaggtaatgaaacaattgctttttcgttcgaccaatgtgttgagggagacccagatatttttcaaaagaggggcgaacggggatccccatgaaatcagaaatcaaagtttgatccctcaactccacgttaggagaaatgtacagagaggatttttggaagttaactttttgtccagtggccctttcgtacacatcaagaacctctttgatgacgttacaagagttaatggacgcttgacagaaaagaaaactgtcgtccgcaaaaagcaggtgggagatggccggggcccgccttgccacttttatgccaggcagggtcttatttctttctttctgtcgcaagagagaggagaagccttctgcacagagaaggaagaggtagggtgaaagaggatcgccctggcggattcctcgagaaggggaaacacggccagtaactttaccgttgaggttgaattgaaaggtagccgtggagatgcatgaaagcacca

SEQ ID NO: 397530 - DNA, 623 bp, Cannabis indica
tacatttcaaaaaaacttctctccctcactctctgcgttaaccccgacccagaacccctaccgtcgaacacacagacccagagtctcggtcgcaaggcctcgtcgtcatcttctctcacggtctctctcatttttttgctttttttttttttagtttactagttttttgcgatatttagcgatgtatgtgcaatgatagaataaatctgagatcggagataaagtttggtgatgatttgcgatatttagcgatgtttagcaatgatatttagagatattttcacaatttcgcaatgtttcgcgacatcgtcgaaaaccagaaaaaaaaatgcagaaaacaagagctgttgtgaattagagacatttagagatattttccgattttgtgatgtttcgcgacatcgtcaaaaaccagaaaaaaaatgtagaaaacaagcgatcttcgtgggtcgtgggttgtcttgggtgcggtggtcgtgggttgtcttgggtgcttctcatgggtcgtcgtgaatcgtcatgggtcttctcggtcgtgggtcgtcttagtcgtaggttgtgggtagtcttggtcttggccgaaggaagatttggtcgtgggtcgtcttggtcggtcggagctc

SEQ ID NO: 397531 - DNA, 779 bp, Cannabis indica
ctattatttgttttttttatttattttatttttaattttataattatcttttttataatattttaataattaaaattatgtggaccactaaaaatgtactatgtgtgtacatgtaaacaatttactttgacacttaactgaaatttttagacaaaagtgtaaatacaaaaatggaattgagattaattaagttttaccgtcaaaaaatgagtttatagagttaagtgttataaatcataaagtttaggtgattttgtctcaaaaaaaaggtacacaaaatataaaagtaacccttaaaattttacattcacacattatttttttgatttaattgtcaaaattgacttgatcaagtatcaataacatttttatttgtttgagtatgttttaatacccttatttatacatttttttctctattttttattcctttttctcttctcttatgcttctctctttcttatttttctattttctttccaactttaaaaataatgtctgatcacgtcgttattcggatgaacctaaaaaaaataacattgtaatctattcttcaatgtgaatatttcaaaatgtggcgctatttttagaaaagaaacagttagttactaatatagcgattagttactgttttataatttttttgaaaggttattttataattttattaaatcttagttgacattcattttagaatgggaaaaaaacaaaaaatacaaaaaggaaaaaaattacaaaaatactttaggccggcccattaaacatttatacagtccaca

SEQ ID NO: 397532 - DNA, 611 bp, Cannabis indica
tttaatgcatctcagtgaatctccaaagatctattctatttaatacttttgcagaccctatttaaatctcttttgtttttcttctttctctctgctcagcgcaccgtcagtagaagaactcaggggattttggtgattattacttcttctatcgagggatcatgccagtttctcattaatctggagatggatttggcatcttcccttcctcctcagatgttttctgttatcaggtatcttccttttctatatatatccttttatgttttattcagtttgctaagtgtctctttggctatttctctatctgtctatccttgttcctctgtctgcacaatcttttctttctgtgtcatggcgagttctagcagaagtttgcctagtcatcttgctttgaatgaagaggaagctcttattcataactttgatggtgtttctctaggtaatggtccttcctctgagtcgtactgtttagttgttaagatcatttctatgaaaaatatcaaacctgattggcttgacaaagctatgagggaagcttggactttaagataccctatcagctttactgaatatcactctggtctttttcttgctcattttgggtgtga

SEQ ID NO: 397533 - DNA, 1849 bp, Cannabis indica
aatagctttctctaccattacttcattttgtattcataaaacattatggaatatcatttttctatatgtattactcttttagggatactgaatgttttactgcctcataagtgcatctgaatatacaaaagacaaaactctcattctattcaaaatggaatagagataaagcagtcaagaactttcttcagtttgaataactttctagtgtcttttaaaaacaacttagttatctagcttcactggtggaactaaattattatagattagttttactagttttacaccctttcagaataattccttcactcccaaagtaattaccatctcagatattaagttctgagttagtgtaaatataaagattctaaatacacccatattcatctaacatatatgtcacttttagagattctttcttgattgtttccctatgttcccttgttggattacatatttgatggctcccattcaatagtaggagcatgatttaatgcatacacaagtgtacatttaacctcttactattggtacttagggacatcctgttgtgacattttatctttatctggaaacaataaattctttatagactgagtcatcaatataacattctagtattaacattaatgtaaaatacttgcttaagattaagtaatcactagagatactataaaacacttcataaggaccaggaattgtgcttaagtcttcgaatagacattgcaagatttcctatcttattctcatacttctgataagttacaactatccatatgaatggttagattaacttttcttagctttatctcaaaagttcctttcttgaacatatcattgtaactcatcactagtgtcatccaaataataacaagctggatttgttaaaatcctcccactacgataaggtaatgtgattctatttccagggactttagtggtatctattactattgtatgagatattggaacatatataggatcaagaataagttatactagtttgttagcttaagtagtatattatatctatgtcttatcaaaatatgtgtgttatagatattttgtggtattttgaatatagtttagagttcattgtaaaagatctttgaattatatatatattactaacttctccacccctatcggatcataagatcttttattaaacaaaattttaacaatttcttaagaaatgacaattattcataaacggatataacttcaagtgtttatgtagtattatctatttgctgagattattataccatagattttgtatcaataataaatgtgaaacacataaaatcttgataaacagacaaatataatttggtattggcatacaagttacataatataatgttaaattcataaaaccaactcataaagaaatcttttaaagagaaaaatttaaattaatactctcaaaaatgtcacaatgaattgtctgtaataatataaaataggaaataaaatttccaaactaaattgaaacaaattattcaaaaataaaacaattaattcaaaataacaaaaattcgagcttcatcttcaagcttggacaatcttcaccccttgccgaactatccatctcaagtcactaggataataatccaagactaagcagttggagctgaaataagaagaacataaaggcaaaatcctaagattaagaatatggattagcgaatcctaactagataaatgtgtgtttattatggaattatattattatataatttattgtatatgaattactttcataaatgacaagttaagaccccgttgggaagccaggggcatttttgtaattttgacccaagaagggtaaaattataaatttaat

SEQ ID NO: 397534 - DNA, 655 bp, Cannabis indica
ttctctctctctctctctctctctctctctctctctctctctctctctttcttaatttttaaatgttttttgtgtatagcccatattgcttttgagcccgcaaatggcccgatagccatgagcccaattacctctcatgacaatctctctcttttaaaatcacaccaaacataacatttattaaattactaaaagcacatatacaagttttttttttttttgataaaatcacaccaaatatacatatgtccaattaccaaaaccctatcacgagttaaagcttagtagctactaggtgtaatataaacaccataaattaagattattcgcggtgcgattggtgtaatttttaactattttttaaaccaaccagcacatagagtttttctaattttccaaaccgcactcgcaccgcaaaaaatagtgcggtgcagtacggtgcgattttctgcaatttgaactatcactaaatcattaaactatcacaaatacaacaaagtttgaacaacatttgtcaaaaatatcataagccttaaaaataaatatgaaaaaaaatttcaagtttcaacaatacaataattagtaggctttagactgggccttcacatattggacctaaataaatgtaaaaattggtattttataatatgcggtg

SEQ ID NO: 397535 - DNA, 1088 bp, Cannabis indica
gaaaggagtcggctagtggtggactccgcttggaagtcggttagttacaactgggcaccggcccggatcttcaagaaaattggggctactagagtcgctctcttacactggaacaggtcccaatttggaaaaattgacactatgattcgtgatctggaaaggagactggatcatattcaaaagctcccggtgggctctagagattgggagactgaaagaaatctcaggagctctcttaatgaggcccgtgttcggaaggacctaactggaagcaaagggccagggtctcttggctgaaagaaggtgataagtgttctaagttcttctttctttctgcctctatcagagggagaaggaatgccattgagtgcattctcaacaaaaacaatatgtggatcaataagagattggatataggcaatgaattcatggaatttttccaaggaattttcacggggttggaaactaacattgagatgaattgcactgacttaatccacgatagactttctttggaagaccaggctgagctcattagacaaccctcacgcgaggaaattaaggccactctgttttccatgagtaataacaaagctccggggccagatggaatgtctgtattgttcttcaaacactattggggatctgttgagaatgatttctacgaagcggtcttggatttcttccactcaggacgtatgcacaaaggtgtcaatgctaccaatattgtccttatccctaaggttcagaacccgaagagaccaagccagtatcgtccaatctctctctgcaatgtggtttacaaggtaatatcaaagattattgctaacagaatcaaaccagtgttacctaaactcatctgccctactcaagcagcttttgttcctgggaggaatatccaagataataatgtgattgcccaggaaattattcactcatttaataggaagagaggaagagaaggtctgtttgctattaagattgaccttatgaaagcctatgataagatgagttggagatttattgatcatgttatagactgttttggggtgccatcggaatttcggaattgggtttctcagtgtata

SEQ ID NO: 397536 - DNA, 1458 bp, Cannabis indica
tgacatagaaatccctattgcaactaacagatcaatctaaaatcacaaccaaaaatcgtataacaatccacataaaaatcaccggaaaaactactttagaaactcaaaaggtaatttatattttatgattcatttttataattatatctatttttcacatttttgattgtcctttcttctacttcttcctcctcctagttactctccaccatgaaaattgaagctttgtttcttccaaaatcagaattgaacttgcaacttataaccacgatcaaaccatatagtagtctcaacccctttctttttactctaggttatattatcatctctctgtaattattcgagaccaaccaccatatgaagcttccattaatttctataatgaaactaaagtggtaatcaatattgcaaccttaaattaacatcaaatcatatcacaatctcagccacatcccaatcacaatctaaatcgcaagaccaccatatgaagcttccatgatctccataacaaaactgaagttgcaaccggtatgtcaacccaaattgcaacctaaatcaccatctaactatattgccatctctgaattatgccgaattgcaattacaatcttaaattaccatcaaaccatgtcacaatctcagctatgttctagccgcaactcaaattgcaacatttcttcttccttctcttaagttattcccaatcactctttgattgatcattgtaattttgtaaaaaaaaaaatcttatataccaattaggtactgtatttgttaaaaaaaagattaattaaaattctcttgaagtttgacatgtattaaattatggcaattaacttttttagccattaaaaattcccatgaactattgagattgttgcatttaagaacatttgtccagtttcattcaattttactaactctgtgtgattatccatgtactaaatcatgctccctaaagtttgatatctactaaatcatatccctcgaactttcacatataccaaatcaagttccttgaactttcattcatgttagactttctttattaaaattggaaaaaatccttaaatccaacaatctcaatgggaatttttaacgcccataaaagtttagagagcataatttggtacatgttaaaatttaaaaaacaaaaatcctaattagccaaaaaaaagaaaaattaagagcatagaattcttattaataaaaaaagagaaatgctaaaaggcaccggtggtgcctaacactctcgtatgtatcaatatcgctattggtccaactaagtatcaagttctatttagtttagggatattggcggctaaaccacctgaactttacggtttgtaacacttaaccacaaaaaccgaatttttggcggctaaactacctaaaccctggttctgttttgctctgcacacctccgtccaaaaattacagttaagtgccacggtggac

SEQ ID NO: 397537 - DNA, 786 bp, Cannabis indica
ctttaaaaaataattaatgacacatttttcgtgtcgtgtatcatgccaatttatagcattatcgtattgaaattagtattttttcgggcataatcgtactcgtgcctttcagactcatgtcgatttcatgtcgtgtcaaaagatctggcacgtatttacaacactagttggagagatgctctaagtcatcattgctaaaaattcttttatagtatgtcttttttcttttttaagtaattggctttcgttttagagtgtgggaaatagagaagaaataggtgagcatgtgagaaatagaaaaaaaagtaagtgagcacgtgagaaatgtgacgagaagtaggtaacgattttttaatggacccttatacccgacggtttaaagccaatctggcgagatggcgagaagtaggcttcaaagccaatttggcagtgattctagatcttcggaggtgtcgtctgacatccaattcaaggtcatgagcaaggtcatgggtgacaggagtgactatattcgaggagtcggttacaacatagcaaagaaggagaaaagatcaacaacaacatctagctcttcgagccaaagtcaaactcaatctcaagcagggtctactctttctcaagacgttggtattatggctgagatgtttcaaagattgcgtgaacgctttccaccgagacaggacacttctaatctgtataagccgcgatttgacaaattccttcagcaatatttacctaccaaacctcaaggtagtgcaacatatccaaggccgcaacaacaacctt

SEQ ID NO: 397538 - DNA, 449 bp, Cannabis indica
cctttgacgtttttacaattacctaacatcgaagttgacgtgagatgtcaatctgggcgatgggatgcatgggcacaagatgtaaacctcagcgttgggtcatgaactgtcttcagtaaacagtcataactcagtgaatattgattcgattgatgcgattcaacttgcatttcaaagctaattcaatgctctatcaagtcatgtgccacacttcaatcgcaattctgaagctgtcatcatcaaatttcacatcaagggagttacgaaaataagctccaagttacctgcagcgggacccttgggcagcaaaaaattgttatttaattttcaccgttagattatcatctacggtcaaaattttctaatttgtatcttttcctatttttgtaggcctccttcatctataaaaagagagtttcattagctcattttttacatttagaaaacta

SEQ ID NO: 397539 - DNA, 672 bp, Cannabis indica
ggccaagggagagaactgccccggactaattccaaaataatcagccacatctttgaaaaaattatgaagggggagtgccccccataagtaatatggcgatgggaccatgcacacagtccctctccaggatcatgtgccaactgatttggggaggggagtgttaactggcaatccttgccattcacagtcatctcctccacatattggaattgggtctcgctaagactgctagagggggccacggagggggtctgctttgttttgcaacgagaagtgcgaacctccttaatcactctcggggcaaactctctgattttgagagtggctggttgggaaccctcggctggttctttctctttggtggctttgtggagggtattcttagcctcctcttccacccacttctcaaactctctgactatctcctccatggctccatcgtcggaaccagtctcaagatcgtcagataccccccgtttagtgatgacctctgccatatgaggactgtcagaaagccaacccgactcttctttttaatgcgagccatagcgttcaacatggtatgtagttttgcggtggttatagcagtctcgaccaaggggagctcccctgacgggccgatgggcacccctacgggaatgttgacctaacaaaaaggaagagtgtatgtcc

SEQ ID NO: 397540 - DNA, 519 bp, Cannabis indica
gcaatactaaatagaattttttatttaagaaaacaataaatcacaatggtttataactgttgggaataattagtattccaacaatttataattgttagaaaagattctttttagcatgttatttcacattaaattttattttattttaaataaataaatataaatatttttttgagaacattagaagttacatattattttatgttgaaacaaaattgttgagctatttaacattatctaggagtcttgtcttttgacatgggtagagttttttctctagtttgttaaggtgtgtcttgtttgctttgtattttcaaaatggcgtccagtagttactatgtcaaagatttggaagatgattatgatagtatacagatcgaagatgaggaggaaactgaattggcttttgatcttgatgaaaatatcacacaagggacggatgatcggttatgtattgttgggagatttctaacaggaagagccatcgattttgatgcgatgcgacatgtaatggcctct

SEQ ID NO: 397541 - DNA, 689 bp, Cannabis indica
actaccctcgaatcactctcaatgataataaacttaacgccacgtgccttcgccgtctctagggccaaacagcaagccaccgcttccccacaaagagcatcggaaaactccagcttagaggtagtaacccagatcaccctgccaaaatgatcccttacgaccacagctgcacacatgctgtctaaccccagtctaatatcacaattcagcttcaacctatcttgggggggaggggggacgccagacatcctccgagctcaaaatagggcaagggagcaaataagcatgatgatctacaaaaaaaaaacgaatagagtcaatacatttaataacattagcgggacaattgttgtgtaccttgtcattgtgagtatgcctgatggtgtcaataattaatgaagcataaaggaaagcctcatccgtgttaatgcctttgtttttaaggtcccagaagaattttacccaatcccacattcgaataccagtatcacatatgggtaaaataccctaaggagaggaccgctacaagtgaaaagccacattacaagaaaggaacgggtgttccatagtttcaactccagtttcgcaaaggggcaactgtcatcccctattggaaatcttttgtgacagtcagtagtcccgagatccgtaaggggaaataccgggtaagctgtgcaatcccacaccgc

SEQ ID NO: 397542 - DNA, 786 bp, Cannabis indica
gtctataaaaccgtcccctatacgagcgttgtgaatacttgatagaataggtgacgatagaaaaatgtcggtataaaagaatacttgacggtttaaaatcgtcggctatagtcgatactataggtcatgatttaaaaccatcactatcgtggattgccccaaaaaaatattatcgtcttcatcctcctttaaaccacttctcgcatatgtcgtagccgctccaaaacctttgcaagcttcatcctcctccactgtcgttgtgctcatcttcatcctcaaaattttctttcgcaagtttcaaattgcttttcacttgatgatcctcaaaattttcttcgatttgcaagcttcagatttattttgaacatacacaaattaaaatcaaaaaaccaaatcatcacgtcttctcgagaaacaagtgggctatttctttgcaaaattgtgctcaatttcatatgtggcaattccgccaagatctcttctttagttgggggaagaatccgcacgaatcggatttttatagaaatttaaacaataaataagagaatattgtgcttacctttgtgttgccacgagagagcagaggagagtgacatagcgagagagagagggtggaggagagggatgacgtggctcgtgatcgcagagaagagagagtctggaaatgaaatgaaatttacaaatgactttgaaaaaataatatataattttttcgaggagtttatatcttaagaggagggaaatgaaacttaagatgggaaaaataaaattttgaaatttaagatg

SEQ ID NO: 397543 - DNA, 569 bp, Cannabis indica
aaatatgtgttgttgctatgcaacatgtattttttgtgtaataaaagcttacaaatcaaagtctgcctttaaaaccacgttttggctactcctgcacggaataccggtgagacgttataagaaccactactgaagagtagtgttttgtacaagtgggctactggtagtactttttgagatgttctctgttccaatatcttggtaggaaagccaattccatcttctcattgtaccggccaagtttgtaaacacctttgcttgtaatttctgtcatttggtacggtccttcctagtttggttcaaacactcttgctacagaatctttagcattcaggaatactcttcacagtagtaagtctcctacaaagaatttcctctccttgacttgcttattgaagtacttaacaacttttttgcttataggaatgtagttttaagttggcttggtctcttctttcttctatttcatcaatggattttgctaacaaagtgtggtttgttccttggccataggttatcctcctgtgagacggtgatttcaattcaacgggcagcattgcttcatagcc

SEQ ID NO: 397544 - DNA, 721 bp, Cannabis indica
ttttaatatttttctataaaattgtaaaatgttattgtaactaaaattaaattagtgacaacttgtatctaaatgtactatgttttaatcacaaatatttttttgttatgactaaaaatcacatttagtcacaaaaaatttatgttgtaattaaaaaattataacttaaataacttctttttatagtaccttataattaattaacaatatttcatataaattattatattaaattatataaattccaatacttattaatgccaatgatgtaacattcttttaacatttatctataaaaattgcaaaatattgatgatgatgatgatgatgaatgagtgagctattgttagtttgtgtgccacaaaattatgaatgggaaatttgattttttatgcttacatttggttaaattttttttctaaacaaataataactaatatttgtaaaatatgacaatttttatgatatccctaaaataccctcatttacatcaccccatttacaccatcggaccacccatcgggccacccatcggaccatccatcgggccaccccatcgggctaccatcggaccacccatcgggccacctatcggacccatcggaccacccatcggaccaaatctgctaccaatttttttttttatgttttggtacatacaaagtagcatcaggtgaccatcggaccaccatcggactaccatcggaccccactcgaacta

SEQ ID NO: 397545 - DNA, 577 bp, Cannabis indica
aatttaaaaataaaagtgttacctaaccaatttcattaatattttcgttagaaacacgattaagattaaaattttcactagtgactaaaaacaatccgtactatgcaatgatatatattggaaaattataaaatataagtttccaccttaattaccatttgctttataaaattaaaaccatgcctcttattctttttcttcttaattttctttgtgtgtcaaactactattgttcatgcattgtacaaaaataatataatatatatgtagatacaaagtttctcaggtagggtgattatttatgttgttaatgcaagatctactacaaaaaaatatacttttagtcacaacaaaacttataattaaaaataaaaaaattatgattaattttaaatttttattctatgttgtgactaaaagtttcgtgactaaaagtattagtcgccaaaattataatttattgtgactaaaattaaattagtgacaacttatatgtaaatattatgtttaatcactagcaactttttattatgactaaaagtcacatttagtcacaaaaaatttatgttatgactaa

SEQ ID NO: 397546 - DNA, 655 bp, Cannabis indica
atacgccttttcagaggcttagcgaggtcaatggtgaccctaatcctcatgtaatcacgccatacacccaaaaaattcttgggacaagcttccacaaacactcccacataattgccaacagcctttaacacagttgaagtcataaaaccagtctttagatcatgtaattgaacccatacatccagagtgtttagagtcaaacatcgtggattcgactcttctttcatacgagagatgatcaaagccttcctattgaaataccaaggactaccagccacaacacgtttgatgtctatttcgtggtaaaattgaaataggaagcgattaacatcaagctccttaatgtaaactccctttcctggtttccataatgccgccagagtttgctgcatagatgggaaatcaattgcaccagttgagatgaaacggcccaccagacacagtctccagtcatacacgaactcatcctctcccccttcaccaagatcctgtagcacaagcccttcctctaactcttcttcgataactaattcttccataatatgagaaggattactcgatgaagccatcagtttcaaaacgacaagaaaacactttttagaaaataccaatgaaacagagagaaaacaaacaaaccatgacagatgtcaagact

SEQ ID NO: 397547 - DNA, 883 bp, Cannabis indica
ttttattttctaaaaaaaaaagtaacaattacggacagtgattttaaaaagtcactattgaacaatttttcatataaatatatatatatatatagaataattctatcataggaacactagttttgttctcatagtatacatacattttttttaacccttgatacatgtgacttttgaggatacatcctatttaatataggcttatgtgtattagattattttttttttttgagaaaagattattagattaaatatttaataaactgctgtttaaaaattctgacacctcttttttttcctgctgaataaaaaacttcattaagataagagaaaaaagagaagaaaaacgtcaacaccagtccatggctgcaacaggggtgcaagctccccaacagtgagaaataaaaaatattaaaagaaaatgttcaagtagcaatcatatgagcagctcaagcgacaatcctatgagtagctcaattgttactacaaggaacccaaaacaaactatctcaggaaccaagaacaaactatcccaaaaatctaaattcagaatggaaaacaaagataaaacctttttgaaagtttccaatctgaaatccgatggttcaaaaattctgacatttcaaaatataaaaagatatggcctttaatataaaatattgaagaaaacaaatgtttattaaaacattacatttttttttttaaagcaatgacattaaaacattacattgatacttagatagaagcttctttggtggagatctttcttttcccttttattttattttattttttgtttttgaagaaggttacggcatgaattgtattcccattgtagttgtttgggaataagcatgtttcaagatagctgaacccattcttt

SEQ ID NO: 397548 - DNA, 693 bp, Cannabis indica
catgtgcatgtcgtttactataatacctacttaatatcataacgatgatcaatagaagatcagcttaaatctcgagtaattgtgaactcatgttcatgttattagtttctttgattcactcgttaaagattctcaaagaagataattcttacaatttttattttgggaatctaataatgtggatggatgtggacataatctacaattatgaaatcctgactttcctaacgaattaaatgttgattctctttaagtgttaattttgggactcgaaagttgtgcacaaatttagataagatctaaaatatacttccactagttaattaatggtactaaaagataaagaagtaataagaaaggtaaaacgataatttgaccaaaattaattataaaccaacatatggagggctaatcattggaattggacactacagtcaaactcaataagtaaattctataattactaagagttcaattctatatttatagtggagtaatcatggaattaataagtaaagattatttagtcgatgaaactcaataaataatttagtttattagagcttagaattgtaagtctatggtccccgaattgccactttgaaacattatcaagagaagggataaagagttctataatgttgttcaaaaaaatctattttgatttggtgaaataggaatatttattttttt

SEQ ID NO: 397549 - DNA, 1258 bp, Cannabis indica
caacctggttaggaagtgaccgagcattgttcacccaaggtctgtcaagccagggaccccaatactgtgttttcttggggcttacagtctgttcatgtgatgactcaattgatccttgagggctcaacgactcttttgcagggcgatgattggttttctcatgaggattaattcttcagcgtcatccattacttttatatcagggggctttttctcagctatttaacagaggctgtcaatgaaagcagcagactgttaacgcagattttcgttaacaaaatttgagcctcacagtaatgattttacacattctgcatagtccacgagtccatcttattcaaatttttgactgtttttcaaggccactcttgtattagttttttcgtccctttccctttttttgatcttgtctgcccctatttataattactacaaaagttgactaagatctttacagtaattatttcctcgaatcatgggatttgattacaaatcacgataaataaatgtggtttttatttagaattcacacaactgtgagtatcccgcttttattgggccgagatgaacacatattaaagatatacggtaagccttatctcatggggatgcctcgctagaaatgaagctgagttaactttgatggtgagcttgtgctcgtcatatgacttcccgagattgatactgctttaattctgaactatagtttctggtgtcgagatgatctttctcacgtgcatgccatcttgcagcgagataaacgtctcgatgtctgtcatcttgacctaccaaactgtttatacttattttgtacactgcaccatatacgccaagtatttttattgttattatatctcctccacgcgacgaggttaatgcctcatcatacatacttgcgtttgcaaatagtgtcgctacacaagttaacagttaacagttagtacatttttgtctcgcacaagattgttcagccagccgagttatgaacatactctgcaaattgtgtttttaacgagttatcccatgccaagtgtacttacgattgcgtctttgagtgcttagttcttcttggctcgacacgtgtcttcctttgatgtgcttaccgaattttgagtataacacctataattatgatagcaacgtttaagcgcttataaggttacacactataagaaaacatatgtagcccaagtgggagattgttggattaaaatctctaatgtgggctcatatgtatttatgtgtattgctatataaa

SEQ ID NO: 397550 - DNA, 1002 bp, Cannabis indica
actggatgacagctttgggccattaatgccagtacttgattatcctcatcagattcttcattggtagtggagttcttttcttcttcattatcactccaggttgctgcaagggccttcttcttttttagtgtgttggcgcactcagcctggatgtggccatatcaatcacactctctgcacttaattcctcgaccttttggatcagtaggagcttgtccttgtttgaaatttacacctttcttttttttgagaaaattttctttgtcagctgggaatttcttctgtagttctttttcaagaatttttcatagtttctcgtcaacaaggcaacagtttcgtcagtaatgccattcaattcttctagaactggtttcttatttcttggtgaataagtgcaatactcgcatctgatttttctttcaccacctccttctgtttcttggttttcttccacctggacagtgacagctcataattttgcaaggacccgatgagttcatcaagatcgagttcctcaatgtttctcatttcttcgattgaggtaactttggacatgaatcttctggggagaacaccaagaacctttcgaaccaattttgaatttgagtaagttttccccagagcataggattcattggagatatcacacaattttgcatgaaattcagctacggactcatcctcctccatggtcagattttcaaaggccttggccaaggcacgcaatcttgatttcttgacagcatcagttccctcatttttaattttcagcttctcccatgcttcctttgcaatttcacaattggcaatgaccttcaactgattagtggagacagcattaaacagagcatgaagggccttcgagttgaaattagctctttccatttcaactgtggtccattggctcataggtttggggataacgatttcattctccatcatcgttggtttccaccacccttcttctatggacatccatactctttcatctacagctctcaa

SEQ ID NO: 397551 - DNA, 700 bp, Cannabis indica
cctcataaaattagaaaaagaaccaaaaagaaaaacacttttttattaataagatcaaagtattacaaaggatataccatgcccttccttttgatctttttctaactttgcaagatcaaagcgttgctgtcattatcttccaaactgccaaagcaatcaaaagtaataaggaaaacatattgaataatggaaactctagcctcactttggtatgctaaggttctctaatcattaatagaaataagttacctcaacatatcttgttcacatgacaagttccgagactgtcttcttctctccacatccaaattgctttttttgctcaatttttaacttatgcagcagcccttgtaccaaataacaggcgacaatcttacctattatatgcaagccaatctaacgtcaattgacaagtacatatctaaatttctctacttgtgtttcagttgatatccatttttgtcagatcaagctaaaattgtctatgcattttcagttgacatccaatcttatcattagtaccactatttatcattaccaaaccaatgtgcttcattagaagtctcctataaaagtagaaatcagtttatagacattgaaacaacattagtactactatttatcattacagcaaacaaaaaatatataaaaaagtgagaataaatctgtaatctcagaataaataagaatatatctcact

SEQ ID NO: 397552 - DNA, 636 bp, Cannabis indica
ataaaatttctgagagcaatcctggaaattttttcctggtcacgtgaggatatggtcggaatcgatccttttgtaatttttcacgtgttaaatattgatcccaacttccgaccagttaaccaaaagcgaagactgttggacaaggagcaagctctagccctgaaggaagaagtagaaaagctacgaaacaataatttcataattgaagctttctacccggcttgggttgcaaatcccgtactggtacccaagccaaacaagaaatggcgagtttgtattgatttcacggacctcaatagggcatgcccgaaagactgttttccacttccaagaatcgatcagcttgtgggcgcaacagcagggcacgaaatattgagcctcatggatgcctattcagggtacaatcaaatcaaaatgcatcaaccagactaagaacatacaagttttcgaacagatatgggtatgtatagctataaagtcatgtcgtttgatcttaaaaacgctggagccacataccaacgattgataaataagatgtttaaagaccagatttgatgacacatggaagtttacgtggatgacatgctcgtcaaatccaggaaggctggggggaacatatatgacctggacgaatgc

SEQ ID NO: 397553 - DNA, 630 bp, Cannabis indica
gaaatttttgaagtctgctgcctttgatcgatgccaagacctgatgcttccatggtaaaaaattgtgttcatcaagcttgatagacagagaatggttgaaagaaacaaggtacgattttggtaaatgtacatcctggttcttctgtggctgagcattgttcagtcttgatgttgcgccaatggacgagataggaatctccattgatgaacgaaatcaagcttcgataccatgtgaagatgcagtcatgaaagaggtgcaattgagagaaagagaagaagagaagaggaattggaaaatgcaatctgttattattacactactgcaaaaagtataattcccgtcgatttttaaatgtcatttaaagaaattacatcggttaaaaaaaccgacttatatactgtagtcgcaaatagttttttattggcgtcgttttaacaaaacaattgtctacttttataaaccgacgcaaaatattcacttttttattttatcttcagcgtcggtttagaaatgacgcaaaattgttgatgacattttaaaactgtcacaaaaaacttattacgtcagttcaaaaatgccatatccattgcgaaaatacattttttttacatattgcgtcgcttataaaa

SEQ ID NO: 397554 - DNA, 646 bp, Cannabis indica
gtttcttcttcttcctcaacctcctcattgtcctcttccatcttggtcttctcgcagagagctaaagtctcctcttccttttcctccaagctggtatccatgttagggttccaaagccaggcccggtatacagcgtgaaaaccaactttgtcgaaccgttctacggtctctacttctttctcggtaagtttctcagcaaccttctcctcaaaaattcattaactcggactttgagggctttctcggcctcctcttttgccttcttgacttccttctttgctgtctctgcttcctccttcgcttttttggcttcctacttgaggcaagtaatctcctgttgggcgttgtctcgttactcacacacatccttgcattgggatattaatttatgagtctcgcccttcaaatactcaagtcgctcagagagtagtcaattggaagcaaaagaagcaaaggaagcctggagaattgcaaacagatgagtataaaagaggtataaaaagatagtataattatattaacaaagccaacgtaccatgaagtgacagtacaaggtccttaaaagcatctcctctggattcctaagattgagaaaatccaaatctgggatggagagtttgaagtttgcaccaacaagtgaccccgt

SEQ ID NO: 397555 - DNA, 904 bp, Cannabis indica
ttttttaaaaaaaaaaccatatggattgaatttaaatagtccgactttagttggattgaataggtttccccatgattaagtcaaaatttaatttaaaattgattcaatataataattacatatacttcatatataaaatataattatttgttgatttaacagaatattttaagaatttaagaatattctgtttaatttaacggtattagtagggttattagttttataaatatatataaatattaatattatttattttaaattaatttaatatatataaatattaatattatttattttaggttaattaaatttatattcattttaaattaatttatatacataaatattaatatattatttgtaatattattatgtattattattatttttaatattgagagtatattcaattttaatattctttgactttatatttattttttaaaaaatttaaaaactttaaatactttttttaaaaaaacccaaaattaaaaaattaattaattttctttaatttataaattttaaaaatatatgaataaaataaaaattaaaaaatatagctaaatatatgtgcaatttttgtaacaataacctagtaacctagtatattaaaaaatatctatatctttatatattaaaagtgtctatctaacggcaattcttggtttaacgattctttttttatttagattaacttaacagactgttaacgttaaacgttaacaaataaataaacccaataattaaaccaaaaaattaaacaatcttttttaaaattaaaaaaaatatcttaaaaatttttttacacggctaaattcaaatttcaaaaaataaatccaataataaacccaaaaaaattaaataatttttacgattaacttacatatctctctaacaa

SEQ ID NO: 397556 - DNA, 762 bp, Cannabis indica
ataataattcatactaaaatatataataaacatttatcttttaataaaaaaaaataacttatttatttttataaaactgtttaattaattttaagaatttgtttattttgagttttaataaacatagtttattatttaatgattaaaatgtatggtttcatgtaataagttttcaaaatatataagtttttaaaataatttttttttgcacattttttgtaattatgttgtttttgttgtacatttatgaaaaaagccctaaaaagtacggataattatagtaggaaaattttatagggataattacataaaaacactaatttttgtaaaatttttacattcttacgtgcaaagattttttttatatatatttttatggtattctataaaaatacaagaaaacaacaaaacaaccacatgaaagtagcaagaaaacaacataaaaataacatcaaaactacataaaaaaaataatatacaaacaataaaaaatcaacaacaaaataacaagagtacaatataaaagatcatattttatgtaaataaaatctaaaaaaactgtaaaaatattgaaaattttatacacaccgtatttttgtaattttttttttttgaaattatcccaagtttataatccatacttaaaaaatcacacaattactaaaacaacaccccgtaattatactatactattttatcctaataatttttactcttacccaaactaccccacccatttaatttttttcaaaaatctcaaaa

SEQ ID NO: 397557 - DNA, 390 bp, Cannabis indica
tagctttattgtctaaaattttgagggtagttttgtctcatgtggctggcgttaagaattctacaactcatagtttggcaaaacataccttttggttagacaataggttaacctggttagaggaggttctactaccgattgtaatttgttacattgttaatcatgtataactttgttcactgcgtcaaaaaaaaaaaaaaaaagaacaaccaactagtatgcaaatagatcatgagcctaatgtatacgattatgaaaaaatttgaactaaaattttttattgatgaggaagttatcagagcaaaaatgacacatccctactattatcccatagttactaaataatgagttactttagtaacatttttgttttttaattttttaatcata

SEQ ID NO: 397558 - DNA, 626 bp, Cannabis indica
gtcttagaagtgaggggaaggacgggatatgtaaagacaaaacaaaaaaattgataataataataacgaaggagataagcaaatgacttaattggcccgataaggaagacgaggacccctccgctcctccaacgctgcatccagcctcttattcttctcccagaatcgagcaagaacctctttaggcttgggataaaagctgagattaagattctgaccgttggatggccagaccatgaagactccatcatcgaagcgcttcttgcagtgctgacaagtgactggggcgaggagagcatctctctttgccttggccgcctccttttgagcctgctccttaaactcacaaagccccttcacttcaatagttaggttggtgcagctcctctagagacttcaacgttgcggtcaattcctgcactgcctccttagaatcatgaaggtcccgcctcactgtggccacgaccgcatccttggccttcaatgccttgtccttagccttcagtgccttctggtggctccgctccataagggcctctttctgctaggcttcctctcggataactctcttctgcgccttcgaatcctgagactcttcatggcctcctccatgccccccgaactcg

SEQ ID NO: 397559 - DNA, 719 bp, Cannabis indica
aagtccccgaaaagtgatttagcccgtcacttactagttttgcgaataatgtgatttaggggcctgtaattcgtcgagcagctgttccactcaggttggtcggcacacctgaattcgaaagtgaggtaagattagtataatagttgcatatatgtatgtatacatgtttagcgtacatgttagttgccatcagactaggaaaatctatagccatcagattgtcatattaggacatcggtgaagtgtacatagagttgcacctagttgccaacagatatatgctaggctatgagatagtatgagttatctgctaccacatcagtacgattagattactgagtataggctggattcgcagttagtcgtactttgtagagaacgttctatactcaattaggattatggttgggtgtatgggtgcctgattataatcaaggttcactactacaaaattcactattcacgtcagtttttaagtgtcacttaaagaatttacgtcggtttataaaaccgacgtatataccttagacacaaatagttttttattagcatcattttcaaaacgatgcaaaaaaacattttcgacatttataaaccgacgctaaatacgtagttttctgttttacttttagcgtcggttaaaaaatgacgctaaatgtttcatggtattttaaaactgtcacaaaaaacttatttcgtcggtttaaaaatgccatatc

SEQ ID NO: 397560 - DNA, 725 bp, Cannabis indica
caagaacatacaagctttcgaacggacgtcgacttgtattgctacaaagtgatgccgtttggcttgaaaaacgctggagccacctatcagaggttggtcaaccggatgtttaaagagcaaataggcagaaacatggaggtctacgtcgatgacatgctggtcaagtctaagaaagcccaagggcacattgaagacttaaaagaatgctttgagatcctaagacaataccgaatgaagctcaatcctcttaagtgttctttcggagtaagctcgggaaagttccttggattcatagtgaactctaggggcatcgaggctaacccagaaaagataaaggcactgatcgacatgaagtccccaactaaagttaaagacgtccaaagcttaacaggccgaatcgccgccttgagtagattcgtctccaagtcaaccgacaaatgtgtccctttcttcaacatcctaaggggtaacaaaaaattcgaatggactgaggaatgcgaaaatgcctttcaagctttaaagcaacaattatcccagcctccggtcctttcaaaacccctagatggtgaagggttaagcttatacctagcagtaacagaacatgcagttagtgcagtcttggtaagggaggaagatagagcacaacacccagtctactatgtgagcaaaaggctgattggggcagagtgtagataccccctccctcatagaaaaattgacctact

SEQ ID NO: 397561 - DNA, 510 bp, Cannabis indica
ttctctagctggcaccttctcctgcctcaccgcctcaagatctctttgtttggggagtctggcccgagctgtcacttactctcttcttcaaagcttggagtactttttacgacatgactacacgtaaacaagataaaaaagttaaaacgcaagtatgatgcaaaacatgttatgaattaaataaatgcatgtaaaaaataccatgcacgtgggcaggagcattggcccgaacaagtaaagacggagcatcatcatccgaagagtctttctcctactccgtcaggacgattttcccctttccctccactggggtaaaaggccagacaggcatattaggttccctaatcctgatagcacgttccactagtgcctagtcattaggaggagccttctgttgggttttgtgccctaaataaaactcatttcaatataatcagttttacttattaataaagatcagaaataatattttatgttgcatggttcacatgatttatttcatcattttat

SEQ ID NO: 397562 - DNA, 505 bp, Cannabis indica
cttagggaaccaaataccaatgtagtctagtagaagaattagaagaaatcagaatcgacctaaatgttctaaccaagaaactcaaaattggaaaaggtttgttgctcaaagtaaaatcaacattgataaaatttctgataccaaacctagacatttttgcatggtcagatgaggatatcgtcggaatcgatccttctataatttcacatgtcttgaatattgatcataatttctcgccatttcaacaaaaaagaagattgttggagaaggaccgggccctagcgctaaaagaagaggtagaaaagctgcgaagtaataatttcataattgaagctttatacccgacaagggttgctaatcccttactgaataagaaatggcaagtacgcattgatttcaccgacctcaacaaggtgtgcccaaaagactgttttccacttccaagaacgaatcaacttgtggacgcaactacagaacacgaaatattaagcttcatggatgctta

SEQ ID NO: 397563 - DNA, 787 bp, Cannabis indica
caggctgttcagattagtatggaagccaggcaaaacaccaagggccagggtaattccgttggatcaaatgaaggtcagggagctcagttttccctaaatgtccgtggctctggtagaggtctcaggggcagggcacgtggtggggtgatgctaacccgccacaggttggccaagctgcccaagctgctcaagatgccccgaattgggaaaataggcttccagaaatgcaaactagaatcaatgaacaagaggaagtgattcggcaatcaaggcagcatggtgctcctgcagtgcctgttccagaaatgccagtggcatctgcccctgctgtgcaggccgaaccggtggttgcaatgaaccggatggaacccctgtgtgaaaggttccgtaagcaggcacctccagttttcctgaaggccctaatgttatgaaagtcgagcaatggctaactgtgatcaccaggattttgaattttatgggcgtcacaggtaatgatagagtggtctatgccctttccaatttcaagaagacgctttagtttggtgggacatggtgtccatgattcatgacgttaccacaatgacctaggagaatttccaggaactgtttaatgccaagtagtataatgaggcggtcaaaagtgcgaagagaaaagaattcacccatttgactcagaaagaaaacattagtgttactgagtacacgactcagtttgatcgcttggcaaggttggcctcgggaattgtgccaaccaatttcagtaaaaaggagaagtacctggatggat

SEQ ID NO: 397564 - DNA, 525 bp, Cannabis indica
aacaccaacatgaacctcatgtaggtggagattcaacagaatctagacaagaagcttgaagaattgatgggccaaatgattgttgatgcacagatcagcaagatcacttaccgatggtataactgccatccccgagtggatgaaggagtagattcacccctggctgcgtcaaaaattcgttcaggccagccaccaccaccatcccagccaaccttgttcttctctgcgcagttgcccaacttggatttccgatgtccaagaatggatcttgtactatttaatggagacaaccccaacaactagattttcagagctaaacaatattttctcttgagccaattaacatattccatcatacttgaaacatccatcattagaccatctctaatggaagatgcaaaagttaatctatatttagcacaaaatataattttgtgacatttttacatcaacttttactattgtatttcaatgcataaatgtaaatcttgatgcaaaattcaatgtcatttaatgttcatctaa

SEQ ID NO: 397565 - DNA, 579 bp, Cannabis indica
caataactatgtgtgtctgacgacttgctccctactcgtcactattgagtcacattataaaaatagataaggtggccctattaggtggtgacacatgtcatcccaatcaccacctaatgaaagtgaacaaatggagataaactaaattagagtttcagtaaaggcattgttattggacacttgtggtgtctaacaccttctataggcagtgttacacgattggttagcaatatactttagaaattattttcttaagttatatgagatttaatacttgattacactaatatcgagaagaaaccgaagagggtgctaggcaccaatagtactttttagcaattctctttaaataattttaggtacgaagttttgcggctaaaaactcattcatttttatcatttacaaatataaaattttgggtggttatgtagcaaattaatatccctatacctctcataggcaggcccggccctgggcagaggcaggctaggcctgtgcatagggcccacttagcccaggggcctaaaaaaaattccctttaaaaattataccattttttttttctgattttgaaaaat

SEQ ID NO: 397566 - DNA, 568 bp, Cannabis indica
gaaaaaatatgtagttgttatgcaataaaatttgtatatatatttttttgccattataactattacaattttttttaaaaataaaatttacaaatagtcataaatgattattacgtatacgattataagaaaaaaaattaagtaaaaaaactcttctacatgctgaaacagatagaaaatctactgaaacacctatttagaaaatatatttaaccaatcaaaaagtatcatatttaagtaatgctagtgtctaattataatacttattaattaattattatatattatgcatggctatatataaaaatatacataggttggagtgtgtagtagtatagtatagtagtaaattaatgttgtttattttattttatttgaggtatgtcacatgcatgatgttctatacattattctgtaaattaattataataataataagagaaatgctaaagggtaccagtggtgcctagcaccttcttatgtgtcaatatcgctattagtacaactaagtatcgggtcccatataatttaatataatagtttttagggagtatcgctagccaatcgc

SEQ ID NO: 397567 - DNA, 1835 bp, Cannabis indica
gtatgtatagattttaccaatctcaataaggcctgcccgaaagactgcttccttataccttggattgaccagatggtagacgtcacctctgggttcaggctacatctttcatggatgcctactccgaatacaaccagattaagatgcacattgcagatcaagaatgttctagcttcacgaccgataagggggtatactgctacctggttatgcctttcggattaaaaaatgctgatgcaacatatcagagaatggtgaactgaatgttcaaaggcctcctaggaagaaatatagaggtttacgtggacgacatgctagtcaaatccaaagcatgcgtgagccatgcagacgacctcgcagaatgtttcgaagtagtccggaggtatggaatgaaacttaacccgaagaagtgcacttttagagtcaagtgagggaaatttttgggattcatcgtcagacaaaggggaatagaggcaaaccccgaaaaaattcaagctttattgaacatgccttcccccaagaagcacaaagatgtgcaaagcttgactagaaaggttcctgccttaagccgattcatttcccgatcaactaataagtgcatcctttttttcaacattttaaagaaatgtcagaaatttgaatggactgaagaatgcgagaaggcattaaggaaactaaaagaacacatggctaaatcgctaattctatcaaagccagtccacggagaagacttgttactatacttggctatctccgagaacgctgtcaccgcagccctcgtccgggaagaggacaaagtccaacatccagtgtattacgttagcaagcgcgtgataggggctgagatacgatatcctctgatcgagaagttagttttttgcctcctgatggcttcaaaaaagttgagaccctactttcaggctcaccccattaaggtactcacgaaccacccacttcgacaagtcttacagaagccgaaagcgtcaagaagactcctcaaatgggccatggaattgagccagtttgacatacactatgtaccgtgcatctccataaaaggaatggctctagcagacttcataacagagtgtaatgaagcgaaagctacttcaagtgtgccattaccgcgaaccgcggcatggaaggtattcgttgatggagcatcaaacgaaaacggattcggtgctgggatagcaatgatatcgccagatggacttcggctccaggtagccctacattttgcattcccagcttctaataacgaagtcgaatatgaaccctaatcgcaggattaaagttggcaaaagctgtaggggccgcaagagtagaagtcttcagcgattcgcaactggttgtcaatcaagtctcaagagaataccaaccatgcagagagaaaatggtcgcgtacatggctattgtctgagaattcctgcatgagttcacatagtacaaagtggaaagaattctcagagataagaacactcacgcagactgtttggccaagttggcatcgggcagtgagatagggagactgggggtagtacctgttgaacacctcgcggagctgagcatcagaatcaaagatacgggggctgcaatcgagcaagaatcatgttgcatggaccctatcatcagatacataacaaaaggtgagttgcctcaagaaagggccctatccagaaggctaaagtatcaggaacatcggtatgtgatgatggataatattctctatcgaagaggacttagcatgccatacttaaggtgtgtatcagaccctgaagctagtcatatcatgcaggaggtccatgagaggtttgttaggttttgtgccctaa

SEQ ID NO: 397568 - DNA, 992 bp, Cannabis indica
gacctgccttacttgggagtagagttcaagttaaaaagccagctaacctcgtgcgaagaaggcatatcccatttctgggtggcgtagaggacgaacagggcagaccgatacttgatgcccttgaaaggaaactgggtcggacagagacggaagaagtctgccaccttcctaaagtacgggtgcaaaggtagcattgccccttatttggaatgagcacccgaccaggcacacatccccttcttcgggtttgtggctcggtggtttgaggcaagcacataacattccagttcccccagatagccagattggtccaagtcacttaagcgtgctgtagtgaccttggacggaggactcacccacctggtagctaaggcatctttcctcctgtgaggaacaggagtagtaagctcctcggtgacgtagtccactgcttgaaccaggagatcgccatccgcatctactagctccccagcctcgttgtatcccctaaaatttagaggtgcagcctcctcctcttctccacctcggaagggctgctaggacgaatatcgtcctgttcctctatctcatggacttcagcatccccttcatgatccccctcctcctggacgggcggatcctgttcggtgctgggaaaagtggcgtgctaggccacatgagggttggacacgtttaccttacgcatcatttgctttgttcgatccatcatcctatggctggatggaaaatttgaaatggaaagcccgtcaattgaagagtttggactggcacgaagacgagaataatcctcgtactggagttgaagcaaatcctgatcaattcggtgtttgcttccccataactcaacagggttaatctataaaagacaacacacgagatgagtgtttggtcgggatatcgaacaataaacaggcaaatatgccgacatggagtactcaacagattaaaagaatgaaagtgttcaaaaaaaagtcaaaacccaaaagtttgaa

SEQ ID NO: 397569 - DNA, 698 bp, Cannabis indica
ttttttaaaaaaataaatctatattagaaaactttaaagaattacaaaaagaaaaaaagttatcatacaatattttatataaatgaaaaataacgtatttttttttaaaatgttatacattataatgaaaaaaattagaaactgaacaatccttacacaaaatagagatctaaaacagaaagaaggtaacaaatcatataattttaaaataactatcatcgtatctcatttctagtcaccaactgtatttaaaattgatgtcaccaccgtatctcacttgtaatcatcattaatatcctttctaataagttcgctctatccataaaaattagagagattttagagtgtcatatcaccgctttatttttctcctttatatatatatatatatatatagaatatatagatgagataattacatcaaatattattttatgtaaaagaattatacttttacatctagatatatttttttcttacggttttttcataaaaaaaataacatgaaaataataagatgattacataaaagtaacagtaaaataacatcaaaacaacaataaaaaataacatacaaataatgaaaaatcaataacaaattaacaagtgtataacataaaaatacaccgtttacaaaaaaaaaaatatataaaaatagatcaaaaaaatcatattttcggtaaataaaatcataaaaa

SEQ ID NO: 397570 - DNA, 559 bp, Cannabis indica
cagctcttgtttcttgataatgctcttttgctttgtgaaaattagcatccacatcaccaattgaatccctgttaaacctcttgagggtgtgttttagtctcataagcttcaaataaatagctttgagaccagcacttctcaccggtaaagtccaattatccataacagtttctttaaacctagcatgataagaccagaaattaaagaaacgaatttttttaacaccaatgttctgaggttgagtagacgagactacacaagagcaatgatccaaagtagtttcccattgaaaagtagccgaagaattggggaaagcatctaaccaatcttcatttttgaacacatgatcgattctagaacaaattatttcttgaccatcctgattattagtccaagtaaaatgagatcctgaactagacaaccagtcaactaaacccaaagcaagccagttattagaatcctcgatctccttctttgaaacttgtttgactccacttctatttgaatagtaaaaaactgagttaaaatcccccaatataagccacggcttcacatgaag

SEQ ID NO: 397571 - DNA, 664 bp, Cannabis indica
tgatacatttttgtggttcttgagtgcaacgaataggtatagtatgagcttcatcaagtatttctattctgagctcaaccctattttgaacacaaactcgagctttgtaaagtaacattctgttattcgagactgaaaagtccttaggtcgacaggccaatacctcatctcaaattttaactaactcagcatcttccaattgtgtttttctgatcctttccaacaaatctgattgaagtatcatgttatgtaacttttcaaccacaaattcaatttcagacttaaccatttctgaggctaactaaggagctatcattacagtatttaagacatgtccgagacttcatctgttcaaagcattcgcccaacattgaccttcctgagaggatttagaatctcacaataataatccttgactaattccagccaccgcctctaactcatattcaaatccttttgagtgaagaaatacttgagactcttgtgatccgtgtaaatctcacatttttctccatacaagtagtgtcgccatatctttagagtgaatactaaagtagcaagctctaaattatgcgttgggtaatgttgttcatattcctttagtggccaggaagaatatgctataagcatgtcagcttgcatcagaacacatcccagaccctgt

SEQ ID NO: 397572 - DNA, 562 bp, Cannabis indica
tgcacaagcacctatccctctttattaaaataaaaatttgtgcggataatttgacaaagtggcgttcctctggtaatttcaagggtcgtattgctacaagtaaaaagaaaatggcacaactaaagcagcaccataatttcccttgaatgccgagtttgttaatgaacaaaataattactttgaacttttagctcaacaagagatctattggaaacagaggtcaaagcaattttggttacacaacggggacaaaaacaccaaatactttcatgccacttctagtccccagaaaaaggaaacaaatcaaatcttacacttaaaaaattctaaatggagcttggaccgattggggaaatgatcttgaccaagttatcacttcttacttttctagatttattcactgctaattgttccttgcaaaataactgttgtcgctgatgtcagatgctctataaccaaactagctcaaaagaaaagaaacttttagtaaaccaagttgccgaagaaagggaaagttaattaactaacccctacttccctagatgcatccacgacaaaagac

SEQ ID NO: 397573 - DNA, 513 bp, Cannabis indica
aaagaaaaaaaattacactatctaatttcatagtcacatttaatataacacaattatatatagtgtagatatgagcaattggttggagatactcataacgaacagtgtagtatcgtaaacgtctaataaataaaataacctagttttcaactcaacctaaattttattttttttggaacaactattgcaccaatatatataatacaaaatttacaaatcaattgataagtattgatttggttcgatgtatatgttaattattaattacaccatgatcaaagagcatcaacgtgaaaaatatgcatggttgaaaatatatataaaacttcatatacaatcattgtgatcagaacgataacttaacccaaattattacgtggcaagaaagttattattaataatatatttaaatttctaggtcaatagtcaaaattatcattcaacaatttttgtactcatttcttcaagaatcatcatccccattctatagagttttaattagataaatttatt

SEQ ID NO: 397574 - DNA, 596 bp, Cannabis indica
cttcaagggaagcttaaggaaggtctctatcaattcaactctcactgtgtcaagtcatccaccaaaaatcctgccactacccgtgttcagcaacccaagtctacttgtttttctgctttatcatccaatttaagttccaatgtaactcagtcagtgactgagagtgtgtctagtttcaattcaatcaaggatagatggcataggaaacttggccatccatccagtcatgtcatgaatcttgttttaaatcaaatgaatattaaaagttccaaaactgatgaacttcatttctgtgaggcttgtcaatatggcaagtcacatgcacttccttttaaattaaatcatgacaaagccaagtatcctcttgagttaattcacactgacatttggggtcctgcacccattatgtcaaataccaacttcaaattttatattcacttcatagatgactttagtaggtacacttggctttatcctttaaaagccaaatctgatgcttttcaagcattcactcaattcaaaagccttgtagaaaaccagtttgacagaaaaataaaaaagctaaagtctgactatggtggtgagtatcaaccttt

SEQ ID NO: 397575 - DNA, 1371 bp, Cannabis indica
cataagatagcaaaatagcatataaagatgcataaaacaaaccaaattgaaaaaccatactaacccaaataagaacaccatctacaccatcaaaaacatgcataataactccgatggaactatatttcagattctaatcctgataaagcaataaactttccactaacctagctaaaaatctttcaacaccagcaatatagtccaaaaattaaaatttgtcatagttcaaccagcaaaaacgtgcatagattatataataatatatttatctcagttaagaatacaattgtacacagcaaaaacgtcataaaaaaacaaattagagattcaacccaggttaaagcaatcacctttactatcaaaatctataaattaataagttattcaaacaaaactatgtgatactacagatctgaaaacaacccatcaaacactagatccatagctaaagatttaacacccatatcaaatcaaaaacctattataatgatttaaacgatatacaatcgtaaccagagagcataattcacccataaaaaaaaaaaaaaaaaaaaaggatagagaatcgattcgtgattgaaacaccaaagtgaaagattgtaaaagaaacttaccactgagaaggtcctggtacaccaacatgtttgcagaaaaatctctcggatctctccaacaaagggtttttgcgataaagaggagagagagagactacgaacgagagagacgctgcggtgagagagcgagagagggtttgcgaaaggagtcgaaagctgtatttatggacgagggtttgggtatgtgttgaagacaaattgtttcgaattgcatttataggtctccactttatctttaattgctttggagtccttatcacactacgattagaacttatgtttttattttaaaaaattaaaaaattagaaactcgtttaattatcttttactttttatattaatattttttatctttatatattaaaagtaattatttaacaataattattggtttaattttttttcttctcctaaacttaatgatacattttaactcttatgttagctcaaaaatataaaaataaaaaaaacaatatgatcaagcctaaaacccaaaaatcaagttatcctctttctctaactgaaaaatccctagtttttctttctctacttctttccatttttgtttgagatttttacacaaaatgactattttgaccaatttttaacatttatattatccttttaatttttaacatttttacttttaaaattttctttaatacttttaaaagttttataattatatatttaccttttgttcttcttcctcatatctaacctcattcagatctaggttcaacaaatcatctctta

SEQ ID NO: 397576 - DNA, 545 bp, Cannabis indica
acatattgatattgaaatttgtatgagctctaaatggttgaaagatgtggattaaatgtatcatatgttatgcagccaaggcaatcaaacagtttgattaacgagctgtctgggctcgggatggatggtaaggaagtaaatcctctaccgcctcaacactggaaacaagtaataactactatgcaggatacgattagacaacaaggggaagagatctgagatctgagagaacaagaggctcgtcttgtgtttattcctgtaccaccgacacttcttgttgtgccactagatatggtgaaacatatggaacctattggatgttgttttaccaagatctagatttactaacatgtatgtttgattatattctatataacatcctaaacatttctaaaataatgaaataaatacatataaagttctagaaaaccttacaatggtggtagcagaatattatggctccttccgttcagatctttaacccttgttcctttctttcgtagagtaataacaagattcgaacctggatcttcttcaggtgttgg

SEQ ID NO: 397577 - DNA, 1291 bp, Cannabis indica
tcagatcgcgctctcctaattttatttttctgactgaactgaaagtggatgcaactcacctggtacgtattctaaagaccctccaccactattttaatattaatgtgccgcctcttggtactggggggtattattttggcttgaaaatttgattttatttttgaatgtgtctcttgttctcgtaaccacatctcgggtttggtctacttggatcccctactcacccttggtttttatcttgtgtgtatggtcctccttaccttcatgctaaggaaaaattttggactgatctcatggtgttaggggataggtttgggggtccctagttaatctttggtgataccaattttgtgcttagtcattctgaacgtgaagggtcgtcaggtagggatccttttgtccctttcatttctaatctggttaactctagaggtctgattaatttgaatatccaaggtgatcagatgacctgggataaccaccgttcaggtagtagccatgtcaaatcagcccttgataaaggaattgttaatggtgattggcttcatttgtttcctaaagttgttctttgctcttctccaacgagcaattcggaccataggccgttatgtcttgattctgggaggactccccctaagtttaagagatgtttcaagtttgaagaggggtggacgagagatgagaggagtaaactagttgtggcaaatgcttggaaaacggttgagcatccttgggcccctgctagtgcctttaagaaaattggagctactcatgtggctcttcttcagtggaatagaacacaatatggtaaattggactggatcattaaagatgtggaacagaaacttgacagactccagaagttacctgctggagtccaggactggaaggaggaatgtgatattcgtcagtcgttgaatgaatcattgactagaaagacgatttattggaagcaaagggcgagaattgattggctcaagaatggcgataaatgctctaaattcttcttcctcttagctgctattagaggaagaagaaatgccattgagagcattctgagtagtaacaatgtctggatcaatgaccgggagtcaattggtcgagagttcattgagtttttcaacggaatcttctcggggtctgatcctggttaggctatggactgtagtcatctatttttggatagaatttctcaggaggttcaggacgggaccaccctgtgtccttctcgagatgaaatcaaaagtacgttattttccatgaataaccacaaggctcctgggccggatgg

SEQ ID NO: 397578 - DNA, 798 bp, Cannabis indica
tctctctctctctcttttggccccccttagagaagctagggtttggcttatttttcaacatttcaagctggttttagcaaggtttttgtggtctcaagttctttgtaagcttcttgtagctttctcttaatttccttaagttgtaagaaatgaaattttgcatgctttgaagttttgtttgctgtggctgctgtagttagttgttattgtgttctgaggtttaaatatgagttattatgttgatttatgattgaattagaggctgtttgaagggttagtcaagttttgaatttttgaactcaatcttgaagctttaatggtgaaatttgtgtgtgtgaatggatgattgttttatcacttggaatatgttcagtatggtctaaataacaggtctggaaagtttggattgaattggagttgatttgcatgagttatgaaatttttagtaattcctgcactaaacctgaattccggttgagagaggcctgtaggaaccggaattctggttggcttctaggaatttttcccagaatcagaattccggttggggaaccggtctaccggttggggcaattttgggaaccctagtttttcccatttttgtgttatttagggtattgtaatgttatttattgataggaaaacttttagtttcaagtttaagtccccgggaagtgattgagcatgtcgtttattagtattgtgattgatatgatttaggaacctataattcgccgagtagttgctccactcaggttgaccggcacacttaaattcggaatcgaggtaagattagta

SEQ ID NO: 397579 - DNA, 563 bp, Cannabis indica
gtcttattattttggattgtatttatcttatacggtcctttactagttttcatatttcagttcagtttgttaaacgatctgggaaccaagcggctaactagttagctcgttcttctggttcatgtcctgatcgtattttcagtaggagatctctcccttctgatttgaaaactattttgttagctgatttgctttaatgaaagttgcaatctttgtttaaaaaactttaagactctttaattgcatcatcaactaattaaaacttccactaaatcccataaattataaatattgtagagaaactccttatacaataattaatttgccaaaactttaattaaacgatatctaagtagttgccgtttgtacaattataatattaggttacaataaactatcaccaacctacccaataaatgtatgtcattgaaaactaatagggcacacattccaacccctcacaaaaaacggcttgatgacattcaaatttttttaaattgtaataattaaaaaatatatatatatataattttacactttaaaattgttttttttttttttct

SEQ ID NO: 397580 - DNA, 195 bp, Cannabis indica
tcttgtttctcgtctggtcatgcacttcagttagaagactgttcttctaaaaaacgttctattattctaaatgattgttatctttgataaaaagttgctatttttctgccctttctcaaggcatttctttagacaaagaccccattttttcctcttttcggatggtaaatatttctcagaacatggagtgtgaat

SEQ ID NO: 397581 - DNA, 588 bp, Cannabis indica
tttgtaattaaaaattttagaccttaaaattacaaataaaatatatatatatatataaaaaaaaataaaaaaaaaaatattttgaaaattctcctattaaaaagtcatactttacatgtaagcatactaaattaaatttttatttcaataatgttctaaatatattataattaattataatgtaccaccaaagttgccattattatacaagctacttaattttccttttattattattattcatttattcgggcgaagaactgtctctttacataattaaattgcaaaagtaagcctatggcaataatctcaaatattttcctatcttaagaaaggagcaaaatttgtaggcttttttttttcttcaaaattttaatttagagctgatggtatattattatgttttaatatatccaataagaacataatatgtaggttaattaggatttttgtccctgaactttaatatgcattaaatcatgccctctgaacttttctggccgttaaaaattctctataaattattggattgttagatttaaggacttttgtataatttaattcaattttattatttcagtgattgtt

SEQ ID NO: 397582 - DNA, 732 bp, Cannabis indica
tgtggctctgttgtcaatggtattcgccactcggttacagctaaacaaaatgacaacctgctctgtccaattacaactgatgaagttaagcaagctctcttccaaatgcatcctgacaaagctccaggacctgatggcattagtcccgagttttaccaaaaacattgggacacggttggtactgatcttatcaaacttgttatggacttcttcaacaatgaatgcatgtcgattggtcttaatgacactcatctagtgttgattcaaaagaaaaagaacttctcctctatgggtgacttgcggcctattgctctctgtaatgtctcctacaagattctctctaaggtccttgccaataggatgagagtgctaattgatcatgttatctctcctactcagagtgtgtttattccaggcaggcttatctcagataatataatgatagccttcgaaatttatgcactatctcaagcggaaaacaaaaggcaaaaaagggttcatggctatgaagttagatatgagtaaggcttatgaccgagttgaatgggactatctgtctacagtcatgcatcgtatggggtttgctggtaaatggatcaatcttattatgaaatgcgttacttctgttcaatattctatttttcatgatggtcatatgctggggctgattattccctctcgtggaatccgccaaggagatcctttatcaacttatctgttcatcatttgtgc

SEQ ID NO: 397583 - DNA, 556 bp, Cannabis indica
agagcacagaattgaagaaagaaagaacatgaagctaaaagacttgcatattattgatgtgaaccacaatttatatacacaattattacaagatcaaactgttaaagaaatagttataatagaaaagatttaactaactgtaacacctttaactaacacctaatcaactaactaagtaatagcaacatccttcctcaaacgaaaagaggagcaagcatttgaagtttggctttaagatagttaaaccgatctgtaggcaatgattttgtgagaagatcaactacttgattatgagcaggcacatatctgactgataattgcttggcacggatttgagctctcacaaagtgcaagtctatttcgatgtgtttcgagcgtgcatgaaacactgagttggcagcaagtgcagcagcactctggttatcaacccagataattggatagtggttcaatgtgatgtgtagctcagtgagaaggaaagtgatccttctaagttctgcaatactgtttgcaagtgagcgaaactcactttcagtacttgagcaagcaaccacct

SEQ ID NO: 397584 - DNA, 671 bp, Cannabis indica
gatatcgcaaaaaactagtaaaccagaaaaaaaaatgcagaaaacgagagaggccgtgagagaagatgacggcgaggccttgcgactgaagttctgggtctgtgtgttcgacggtaggggttctaggtcggggttaacgccggagaaagagagagagacatggatgtttgtatttttatttgtttaagggtaaaattggatagaaaaatagtgtgagtatattttgcatgatgcaaaatatgctagcatatttttagtggataaattaattttaagcatataatatcaaatttcccatttatttttatatcagcaatgctattagagcatctccaatgcacatgtggcaaaggcaactccaaagtcaaatctcattggagatgctcgatgtccaataccatacatactgatgtggtgcgttacgatggttagcgatctcctatattatttattaaattaaaatttgtgggatccgatattgatttgcactaacaaaagtataccaccttttgtggtgcttgacaccataaatgtaccccttaacatttctctttttatataagtggtgtagtgtatatcttaggaaaaatttctacaatgcaatgctaaaataggagtaccttttattgtttccgatattttagaaagaaaatttattttaattttttttt

SEQ ID NO: 397585 - DNA, 745 bp, Cannabis indica
cttgggcaaggatgttgaaaatgtattccttgatctgctaggaagcgtgcaaaaggtctatattcaccccccaatcggcctgaacacttttgattggcaaattgaattgtttttcaaaaagactcttaaactttatgaacacatcaaaggcttggtttttttgtgttaaggggaaaatccaacagtacctactataatcatcaaggaaatggacataatatttaaatccatctttagacacaacatgggaaggaccccatagatcagtatgaaggagtgctaaaggttgattgtccctattgtctgatatagaaaaatgggagcttgtgacttttaccttggtgacaagcactacaaaattgtaatgcctttattgagccagtgtagggaatgtgtggtaacagtttgaccaaagtattttcagcagggtgcccaagtttagagtgccaaaagttaatgtcattgaacttagagacagaaaaaacttgtggagaaacatcagacaaatcaaaagttgttttatttatctcttgaagattacaagattcagatttacactagaatgacaatggcaaaaatagttacaacgagaattatattccctagaagtggtggaaagatacattgtaaagttggactggacgcatccccaagctggtataaaccatcttttgctctgcctttaagaagcactgtccctgttagcttgtcctttacaaaacaacaagatttatggaattcaaga

SEQ ID NO: 397586 - DNA, 579 bp, Cannabis indica
tttaattacttttaattgcttgaatggccaattaaatagtttatgattttaatgcaaaatttgataagcgagtattgattatgatatagtaaaatcgacatagatttcgataaggacgagagtacttatatggttcatgcagcatttatgaattttatgcttaatgtctcctatgtgtttaaatttatcacgagaatagaaaatttgcatgtaggttgagatttatatgtcctagcatgtacataaatttctttgttaaatctgctatcacacgaaaattagactttaagaattaaattatgttaaactaagtaaaatagattcaattaacattaattaccctaaactttaatcattgttaatttcccattaagtatttatttttttattttctttttagtagaaattgaatatcatttcttaatttttattatcaccaaatagaattaggaatttaattgtttggtaattaactacagtccttgtgagatcgacctcactcttgtgagtctattacttatgaacgatacatatacttgttaggttttatgccctaaataaaacttcatttcaatgtaa

SEQ ID NO: 397587 - DNA, 974 bp, Cannabis indica
agctcatcccttttcaccttcttcaagacctgatctttgaaatctctgagctccttcacctcaacggtcaagttggtcgtcgtctgcaagtcaacctgatccagctcctccatagacttcagcctggcagtcagatcttcaactgcctcgttggcctccctcagcccgcgcctcgcctaagccacgacctcatcccaggtcttcagctcctccgccttggccttcagtgcctccttatgcttcatctccgactgagcctccctctgttgggcctcttcccgaaatgctttcctctcagctgccagatctctcagactcttcatggcctcgtccatgcccccgaactcggacatgacgtacccatgatcaattaaagtctttgagaggcgaccggtctctgcagcgatctggcaaaataagaaaaaagagttaagtatgagagatcatatgccacaaagtgaagtacaaaagaaaagaaaaaaccattaataaagacttaccgcggtcatagcagcgctgatatcctgaatctgatagatagagttcgtggaatcgcaggctgcgtatcttttggccgggagttgggtcaggttggagacaaaatggctcgtcaactcgaaagcgaagggagcaagggtaggaccgacgaagcggttgaaccagtccgtcagagggccatgtttaggtcccaagcgttcctaaaggcctcttcgcgtaaggaattttactgagcctcctataacaccttttttagggcttccaccttggcattcccccttgtgtactcggccatggcatagttatgcttggcaatccaaagttgctgcctctcctcatcagcggggacgggagtaaggatgatgctgggaggtacagtgtatttctcggcttcaggcggaatccctgaatcagagctgacggccggagtgtccaccctcctaggttttttggaagactcagcctccaccatcttg

SEQ ID NO: 397588 - DNA, 421 bp, Cannabis indica
attgtgcttcgaagtttagaggttagttcttctcttcagcccctttaattatgaatttgttgttgagtttggatttgaaagcatgtttttttaaggtttgagtgttcttaaatatttaatgaatgaatttatgtttgatttggatgaattggaactctattgcatgaaattgttgtggattttattgtgaagttgtggatgtgtgttttaggggattttctaggttgaattcaggtattaattggataatttgctgctggaaattaaatgttttgggtgtgcttgaagcacaaattattaagcttgagattttgatgagttgagcatgatttttaagtcatttatgtaatctgaattttgggatttgatgcatgagataggtgtttttgatcctttgatttatgctagcagctctatttgg

SEQ ID NO: 397589 - DNA, 851 bp, Cannabis indica
atagttagacattgggaagtgtcgggaatagttgggactttagaaatgacccaaaatacccttaagtgatttttatgactttagtgtggggatgggcaaaatggtcattttgcctaattaacttttgtcctttagcggactttatctaagtttattattctaattttggttgaggttaattgataaaagctttattttatttcatttgatgaaaaaaaaaaagaaattaaaagaaaaaaacacactctctctccaaacctctctctctctttcgaaccctcttagaacccagctagggtttgagtttttcttcaacaattcaatgtgttttacagtaagttgttagttatctcaattcaaggtaagttcctagcatcatccttttagtttcttgaactttaagttagagaattttgcatgaattgttagtttagggttctgtggttgttgttgaagtttgatattgttttctggagtttatttataatgtattatgttgaattagttttggtggctgctagtaggtttgaggaagctttgagttttagaactcaagcttgactctttaatggtgaagattgattctgagattgtttagttgttttgttgcttggaatatgttttttggggtataatatgcaggtctggaaggtttggtaaggtttggaatcgaactggttaggttttcgaatttttggggttacctggtgtaaaccggttaatcggttttataggccctgtaaaatcggttaaccggatcagctgttgggttccccgagttttacgtgttgtcgatttgtgttagttttagagctttggttggttaaatccctgttagtttagggtattgc

SEQ ID NO: 397590 - DNA, 973 bp, Cannabis indica
gcactcgtgaccagacgatacgtggcaagctggactgctacactccccgcccacaacaatcgcgccacaaaccctgataaggggatgtgcgcctggtcgggggctcacggccagcaaggggcgctgatgcccttgcacaagtacttccgggatgtggcagacttcttcggcctctgcccggctcagattactcccaagggcattaagtatttgtccgctctcttcgtcctctatgcttcccagggatgggatgctccttctccccacgaggtcgcttggttcttcgacctgaagtctacccccaagcaaggcaggtcggggtatttttacttctctcagccaggcttcaagtggttgagcgggacggaccacaaggccatcagcaaaatagggcgttttgttgatgagtacttcatggtgaaggatccgaacatcacccggactcggtttcagcagattccgacatatcaccgtcctcccctcacccttactcttagggatagggctcaaaagcttgcccggttgccggcggaagacagggatatcatccagttgacctccgatgcaaatctggtgcagtacgggctttacccagaggacttttcttctaagtccgtgacggggaagaaggggaaatctgctgctgcccggcctgaacgagctcatccggaggatgagttgattcaactgaagcgtgaagctaagttgaagggaggtgctcgggcaaagcagtatgctcaggagtctatgaatcctaaagatgaggctgaggctgaggctgaggctgagcaggtggctcctttgaggaggaagaagaaactcctggccacgcccaggcccgttgaacatgccattcgcataagggagcccatttcacctgttcggccatctcatccttatgctggaaaagggaaggccgttatggctgagataaagccgatgtcaggtgatgatggacttctgactttctggg

SEQ ID NO: 397591 - DNA, 720 bp, Cannabis indica
aaagattagataacagagaactattttgtgtgttaactgtacactgatttggacatttatttcagtattggggatacaaccgacaggattttaatacataaaaatattttatccaaaatttgttcaacttctattgttattgtatgtgatggttcttgcttaatgtggactttacagcctgcagattctttcaatgaaaattttgggtcatcacaaaactgatgtcatgttttgggatgtaacagaagttgatataccagcaggaaagtggtcttttcgatttcagaaggacagaaatttctcctttgttattggtgcttgatagaagagatgaccctgtgacaccgttgttgaatcaatggacgtatcaggtatgatattggggcttttttttttttgctaatatatgagagttgcctttttaatttttattttctctttaaaagaatgtgatgactaaatcaatgagttgatccgtaattcaacaaattagtgtaattcaacaaattagtatcttagtcaagctcatgtattacatttgttttgtaggctatggttcatgagttgattggtattcaagataataaagtggacttaagagcagtcgacaaacttcctaaggatcaacaggttgagttgcatatggccttttaacactcatgtgatttgaacttccgttatttatagtctactttttcttacaggaggttgtgctatcat

SEQ ID NO: 397592 - DNA, 1447 bp, Cannabis indica
atgctttttcatggaattaacctagattgggaccaaaaaccagaccagaactgagacgtggacccagaatcgggatagagacctaggcaacagaactaggaccgggacccaagagccgaccccaaacccagacttgaacataggacccagctcgtgacctggcacccgaaatggaaccagacctgaacccagagcaggaaccaaacttagacccggacccaaacccagtcctagacacaaacatggacccaaaacccgtaccctgtgacccaaaattggaactgaaaccacaagtagatcgagacccaggaacgggaccggaacaaggagttggacctcgaaccgtaaccaaacatagagctagacctaaaaccgtaaccggaccaggccccggactccaacacagacctaggcccgaacctggatcccaacccatacctcgactcggtgccaaacctggacccgaactaagacccaaacatggaacctaactcgggatacagaattggggtcgggacctagaaccgcaccccagtcttggtcccgaagccaaactcagaactgggtcccatgacttgaaccggaaccagaccgggacaagtgacaaggatccagatctgggactcagaccaggacccgaacccggactaggacccaaacccggaccctgatctaaacctaagacccaaaactggaacctgaacaagaactgcaagaccaggaccctcgaacaagactaggaccgtgacaaggacccaggcccattcctagaaacgaactcagacctagccccaaacccaaactgagaccagaactcgagcccagaaacggtcgtgtacccagaccgagaccgagacgcgaacccgaaccttgacctagatttgggacacgatcccaaacccaaacttggacctagattggtatctgaatacaaacctggactcaaacccaaaccgagatcaaaactcgggacctagatccggacagagaccctatcccagaacaagacctaaacctgcacttgggacccaaacccagacatagacccgaacataaacccacaccgggatttatacctagactcagacccggacccaaacttagaccaggattcaaacctcaacccagactcagacccaaacccgaacccaaacactgaatggaaattgaaactggcactaggacccaaacacgaacatggacccagaccaagacctatgacccaaacctggatgggagacctggaccttggcctcggaacccaaacccagaccaaaacttaggacttggacctgaacttggagctagactcgaaccctgatctggacccagaccgagatcggaacctgaatctagactcgaaccaagacttgaaccccgatcgggtcctggactcggaccgagacctaggactcagacctagacccgggacacgggcatcagaact

SEQ ID NO: 397593 - DNA, 500 bp, Cannabis indica
cgaatacaccttggagtttgatccgctgtctaagtttgttggtattctggtccccatagatttcactaggaaacaagagtatgtgagaggactaaatgccgggtagagctagccttgattgcttaggaggctgagcaacatgttgtgaaagagcagactgcaaaggatgccgtcacgacatggaaccctcctgctagtggtaatgttagtaaggggaccgacagtggcaaccctgatcacaaaaggaaggcgaaggcttccagagtatcaaggaatagaaagttttgaggaaacaaaggtggtcgtcagtgtcgcgggtcctaattctaatcacatcctgagtgtcctaaatgtaagaaacaccatccgggtgaatgtcgggccaaggcatgtttctaatgtggcgttgtgggccactgtatcagagattgacctcaggccaagaaataggagcctaagaagaatactacacagaatccgagacgactttttaccatgac

SEQ ID NO: 397594 - DNA, 683 bp, Cannabis indica
ccgtatgggctaggttcccttgacttatgcttttgagtgcttggtgacgactctttcggcgtttccttgagtcctgcggggatggccttagggtgtatgtggatccctgctgtctccatggctttttgcatggcgaccatcacctcttgcatctttttgttttgttctttttgggttgcgatctcagcttcatgatcagcagccttttgccttaagagcagtagttccgtgtaactaccttcgttgtaggcgtcatactcgttaaagttttcctcgtactcgtcatcgttggcctcctctcgttcctcaaaatccacgttgactcttgaagccacttcctcatcttcaagattttgagcgtcttgaggaggacggggctgacgtgtgtcgcgagtttccaccattgttgctttggcttataaggttgttgtctatttgaagacgcttccttcagctctcaatgaaagcaccaaaatgttgactgaggttttcgacaaccaattaaataatatgtataagaaagctgtaaggagtttaatgcatggaatttttacgtggttggggcattaacgagccttagtccacgagtccttattatttatgagagtatttattacagagaatgttcttggtggatatctctcctattttctctcttttattcctttgaacccagaattctc

SEQ ID NO: 397595 - DNA, 590 bp, Cannabis indica
atgtaatccttgaagtagtcacgaagagggtgtatggcccccacactgatatgttcaatgctctaggcgcccatgccagttgagccactggtatttggtctcaccactggctcctagggtatcgcctaaaagacgcgcaacggggtaacaactaaactcaccctcttgcactgacctaacttggcatgctcgcccaagtttgattccacaggtcctcaatatatcacctgtgtagcctgagatagatcgcaccttcgattctattaactcagcttcaaaggtgacgctaggatcctggggagtctttgatgtacgtggcttgggagacattatttcaaagtccaagtcacctggttcaaaagcaatcatgactttgggtaaaaaaaaaggcttagccaaaggaataaagaacacactaggaggttctggccaagctgcatcttgcaagaaacggcgtttgccttcgatgatttcttgcaagaaatgcatgtggcaactagcattatcttcctgataggttcttactaaatgttccctaatcctagcatcatttaactctaatttggatgtgggttttgaaggattgggtt

SEQ ID NO: 397596 - DNA, 1192 bp, Cannabis indica
aaacattggagatataaggttagttatgttagagagatatgtggctaggattattttttttaatttaaaaaaagattgtttaattttttaaatttaattatttggtttaaacgcttaaaaaaagattgtttaattttttgggtttaattatttatatattttttaaagttaacgggagatcaaacctatcgttaaatttaacagaatattcttttatttttaaagtatattctgttaaaccaagaaataccgttagataagcacttttaatatataaagatattatatgctctagtgttataggagaaaaaaaaaaaaaaaagcaaccatagttttttgtattttatgcaatttatataaatgatattaggtgcttttacaatgcacccctcagaaagaatgtactgatgtatcatttatttgtttcgatattttaaaaaaattaggtccaatttttttcatattcgtgcacatttataattatttaagatattttacaaaattttaaaaaatttaaaaataatttataatatagaaattagtgttcaaatagtctatttcacatgcttataagaaaatatagtcatacgtgcatcacaatgtttgaacagcgtgttgaatttttctaaatttttaaaaattttgtaggatgtttgaaataattataacgtataggaccatgagaaaaaattatttcggataccaaaacagataatcagtacatcccctttataagagagtacattgtaaaattttattataatatatatacttatcttcctaaataattatattatattttaatgatttaagtaacaataagactattatatttatctataggagacttttaaaatgtaaatataaataaataaagttatcatgcagaaaattaattaagcatatattataattaattaagtaaatattattttggattttgtgctttacaaaagttattaattagactatttattttgttaaatgatataatggactcctgtattttctaaaatgataaaaataggatcctgaactaattttttatcaaaataaaatttagtaataatttgatttaaatgtgttatgacaaaataatttatattttctgtatctattcgtgttaggaattatcttcaagttggttatattgaaaaaaaagttgtcaaaaattaagctcagagtcctattt

SEQ ID NO: 397597 - DNA, 487 bp, Cannabis indica
ttatggtgaaccaacgaggaatcaaggctaatcccgcaaaaaatcagagctttggtggaaatgtgatctccaaccaaaccaaaagaagtccaaagccttacaggtaaagtcactactttaaatcgcttcatatcacattcctctgataaatgtaaggagtgtttttagattttgaagggaaataaaaagtttcaatggaccaaaaagtgtgaagaagcttttcaggccctcaaagcgcacttggggcatccccaatactttccaagccaatgcttggagaagttttatctatctacctcacagtgtcggaatacgcgattagttcagtactaatttccgaagaccagggtagacaacatctggtgtactatgtgagcaagcgtctcctggatgtcgagacccattatccacaaatggagaaattagcattcgtattagtaattgcatcaagaaagttaagaccttacttcctgttggaaatatttta

SEQ ID NO: 397598 - DNA, 912 bp, Cannabis indica
cttttatttgcttattgtttacagtacatataaatattaataatcttacagttaatgatatttatgtgatgatatttcagttaattcggattagtatgttatatttttattatttttaattaaaaaaaaaaagaaaaaaaagaaaaaaagccaagtaagaaatcaagaaaaagaatatactgtagctatactacaattatattagctgttgacctcgcttttagccaacgacagtaagtcaattaataagcgattagaaatataataaaaatagagcaaaaatcaataagcaataaagaacactaaattttaaagaggttcgaccctttaatttggtaatagcctactcctcttagattgtattgacttgagaacaaagaacacaatgtttcctctctcctctcataataaaatctctgagtgtttcctcttagatctctctctgaagcaattctttcgatcccttttacactgaagctagatcactatttataggggctaaatgcatgagggaaggtttcccttttgcttacaatatctataattcgtaagaacatttattacataattagaaaacatgaaatgggggattgagactgtaaagaccgcttagctttaatttgaaaattagtagataattaggatttaattatgaaaattatttaagtctaaattattaatttatagtgatttatttgaattgagaatgcattttatatgccatatatagaaatttcataattttgcatattcagtgtccggcaacattggaacgccatgtttggctattaaaatcacatcctagtatttttagtataacgaggcggtatagttagacatggagatgtcgggaatatttgggatctagaatttcccaaaaataccccttagtgacctttagtggcttttagt

SEQ ID NO: 397599 - DNA, 739 bp, Cannabis indica
caactccagagaaggctcgttgttagcttcggccagttgctcattcactttagggaccaaccgattcatgtaatgggagagcatctctttgcctcttttggtctccgggtgcagtgatggaggtggggtaggagcccaaatctacttagatgcgcccttcgactgttcgggcctgtccgaacatcctcctcgagagaccttgaacttagaagtttttggagtagaagggtccacaatggttagctcatcggatagatcaataacagcttcaaccggtgccttctctctaaatggcgttgtctcaccgcccctagacttcttggccgaaggagacgagcttgagcttcccccaactctcttcttcagagcttcgagcatcttctgagacatgtctgcacgaaataaaagcaacatggttaagagaaaagcactagaagtatgaaagcataataattaagaagattaaaaacaagacggagtattttgcgaagcatttgcccgagcaagacttgaaggctcatcatcacctgacaagtctcttatctccgccaggacggctttcccctttcctagtacaggagtggatggccgagtaggtagactgggctccctgattcgaattgcatgttcaacatgcctgtgcttcagtaagtttcttcctccttttgaacagagccacctgctcttcctcagcctcatctttaggatccagaggctcatgagcatattgttttgcccc

SEQ ID NO: 397600 - DNA, 1274 bp, Cannabis indica
ttagatacgttactcgacccaacgaaaaggtccttcacatgacatagtactattgctactccattcactagagtagagggctccataattccactttcagggtgaaggcttctaaacatttcttggtatacgtcgtgtgggcactggactgccactgcctctaacacaatgagcgacacactatatgttgttctccctcaaaatgcacacactttttccatgcctacatatacagagataatcaatgcttattactattgggagtctgttggtgatgatttctgcaatgcggtatccgacttctttgaatctggcataatgcatagaggtattaactcgacaaatgtggttctcatcccaaaaattcagaacccgaaaagacctaacgacttcaggcctatatctttgtgtaatgtgctgtacaaggttatatccaaaatagttgcaaatagaattaaacctatccttccttcgataatatgccttactcaagcggcctttgtcccgggtcggaacatacaggataacaatgtgattgtgcaagagatcatccactccttcaacaggaaaagaggaaaagaaggatattttgcaattaaaattgatcttgttaaagcttatgataggttaaactgggagtccattgatcgtgctctcgattggttcggtttcccccagaaactttgtaatagggtttctcagtgcatttccaccacctcactgaatgtttgccttaacggtggaatggtgggaaagattaagccctcgtgtgggcttcgcctaggcgaccctctttctccctacctcttcatttgtgctgctgaaattctgtctagactattggaagagggcctgaggaagggcgactttaagggcataaagttaagcacgggagggccgatcctatcgcacttattctttgctgatgacttaattctggttggacgggccaatgtgaatgaagccaaatgcttttggaattgtttggaaaaggtttcctcctggtcgggtcaacaagtgaacaagctcaaaacgtcaatcttcttcagcaagaatactcccaatggaatgagaagaggcatcaaggatatgttgggtattggctctcaggagggtgtcattaattatttgtgtttgcctcttttcagatcaagacaaaaggatgcagatttcaatttcatccttgatagacttacatccaaattgcagggatggaaagcaaagaccctgattaaatctgttggcctatcgcttccgatttatgccatgcaaac

SEQ ID NO: 397601 - DNA, 618 bp, Cannabis indica
aaaaaatgaagatgaagaggaagcgggtactgaatattttttttaacaagatgaagatgagattgcagccaagaaagatgtagcctatccactcctacccacgctgatgctagtgaacacaagaaaccctgtcttacaatatatggcgaagtcctcgcagttgttcttgaaaagattataaacaccaaaccctttttcaagtaggtaagaggcacggtagagaatatcttatgctagatcagatgaggctagtgtgcaggtccctcctccatactcgaatcgatacagttctccaccccagaagaaacaatctaagcaagaagagatgacaccgttcagccaacgactggagacgacgcggagatccctgcactggagagacgaggcgaagacgatgacaaattgacgaggcggagcttcgatgttgttcgccggaggctggctggtcaccagcagcgaagaaggagaagaggaagctttcacgcctactcgtactcgcttagcgtttctgagggagaagaagaaacgacatgccttgttttagcatctgatagggttttgtgtaaagcctttattttacttttttttttttatttgttaaatttattaaatatatta

SEQ ID NO: 397602 - DNA, 512 bp, Cannabis indica
gtccttcacatgcaatagtactattgctactccatctctagagtagagggctccataattccactttcagggtggaaggcttctaaacatttcttggtatactcgtgtgggcactggactgccactgcctctaacacaatgagcgacacactatatgttgttctccctcaaaatgcacacacttttcctatgcctacatatacagagataatcaatgcttattactattgggagtctgttggtgatgatttctgcaatgcggtatccgacttctttgaatctggcataatgcatagaggtattaactcgacaaatgtggttctcatcccaaaaattcagaacccgaaaagacctaacgacttcaggcctatatctttgtgtaatgtgctgtacaaggttatatccaaaatagttgcaaatagaattaaacctatccttccttcgataatatgccttactcaagcggcctttgtcccgggtcggaacatacaggataacaatgtgattgtgca

SEQ ID NO: 397603 - DNA, 555 bp, Cannabis indica
tatattcttcagaaacaataacaaccattatagaaagtcatattttatataaaaaaagtaaggcatcaatatatttaatcgaaaagatagaagggaatactgaattgaaactgaataataatatataaaattgtaataaataatattaacaataacaataataatattttgaagataggatagcattatatatacctaattgaatgtggagttagttcgagtggaggtgaagagaagttggtccgttgctaggtagggggctagaggaagtagtgagaagctagctgatatacgatgacagagctgacattggaactcatattaacttcatagctagaattaaattaaattaacgcttacattggagcacttcaatgttcaatctccatctctcccgttcactgcttcagcaaaatttgtgtcttaatgcattgactttatttatttatttatttatttttcatttttacaatttagggtgtacgcggttcggtttggtcggtttattttatatttttttcaaaaaaaaaatagggttataaaaattaagtgcaa

SEQ ID NO: 397604 - DNA, 1679 bp, Cannabis indica
aattatgtgtggtatttttgaaaaaatgttgagatcttgttttggtgtaaaaatattttttaaaattagattgtgttatatttgtcaaataaatatgtagtttgcttatttagaatatcttatcttgactttttatgtttaagaaatgtattaatattttatttattttaattgatgtgatttctttgtcaaggaaccgtgtacaacttgtgtctttaatgtatattttgttttcttatttatataaggaaactatgttgaaaatctatctaggtacagtgaatatgtttaaatagattgatagtctgcttgaacagattctataaagatcgcttagctttaatttggaaattagcagataattaggatttaagttggaaaattatatattagcattgaattaattatttatgataatttattagaattcagaatgcatttttatgtcacatatagaaatttcataatttatgcatattttgtgtctggcaacattagaacgcggtgtttggctattagaatcacatcctggtatttttagtatagcaggacaataaagttagacattgggaatgtcaggaatagtcgggattttagaattctccaaaatatcccttagtgaccttttataccttttagtgtggaaggggcaaaatggtcattttgccccattagctctttgtcttatatgttaatacatgttttagcgtacatgttgtttatgcctgttagattacattgatagcagtagtagtatacatagagttatgctgaaaactgataaatgtatgttggctaaaatactgatcgatgctgtcacatcaatatggctagagtatgactagcatattgagtataggctgacattatggttgatagtattgttgtatgaacgttctagactcagtaccgtgtgggacacggggattagggttatgatcgggtgtatgggcgccaggttataacctgggatattagtatgttatatgttatgcttttctaactgagtttgtcgactcacagtgctatttccatgtgtaggtaagggcaaggctaaagctgaggagccgtgagaatgagcaggtgaagattgtacatgtcggggcagttaggcctggagcgtacgatcttaggggggcatcaaggcttttgctgacagtcgctaggcgacaaaacttttatgccaatctagcaaacttttgtaaatgtattttttaacggttgtctttcgaagatcgtcacgacatgtacaatcatcatcaaaagtcagctcatttcactgttcagtaagcttttattgctttagtagtttatttttattgtattatttaagaaaagcctattaggaagcatgtagtagcctaatagtagaataggtgcatgattttaatttccaaataagcgacattagtaagtttttctttgatcacggtctgaccaaactagctcttggttacgctggttgttctaattagtatggacgccaggcgaaataccaggagttagggcaattcggttgggtccagtggtggtcagggagctcaaattctcctaaataatcgtggtcgtggtagaggtcctagaggcagggcacgtggccggggtgatgttaacccgccacaggctgcccaagctgcccatgattgggaaaataggtttgcagcgatgcaagccaggat

SEQ ID NO: 397605 - DNA, 572 bp, Cannabis indica
cctttcgaagagatattgtatctgttgaggttcaacttgctaagtactgcaagttgttcactatagagcgtctctatttcttctctgggtaaacaaattgggtcatcttcaaggagattgactcatctttatatatgagcaaatttatctatgagcatagttatcaacgagcagatttatctgtgatcatagttttctacgagcatagttatctacaagcatatctatgagtagatttatctttgatcacatttatctatgagcacaattacgtacaagcagatttatctgtgatcatagttatctatgagtacagttatctgtgatcatagttatcgataagcatagtttttatgagccaatttatctgtgatcatagttatctacgagcatggtgagtagacttatctgcgatcatagttatctatgagcatagttttctacgatcaaatttatctatgatcaaagctatctatgagcacagttatgtacaagtagatttatttgtgatcatagttatctatgagcacatttatctctgatcacagttatctacgagtagatttatctgt

SEQ ID NO: 397606 - DNA, 1632 bp, Cannabis indica
atacatgccagaacaatgcgagccgttaaattatttaggtcgcatatagcttcttgttattttatgagataatctcacttacaactattattttggtttttcttcttaaagaaaaggttttttaatttcttgactttatattgtcaaaagataattttaggtttgcaatacagtatatatttctaggtggactctaattattatacacacatatatatatgccaccatgtaattttaaagaaaagaaactttgtaattacttgaacaaattttaattttatttataacaagcattaatcattacagagataaatacaacatttacatattaaattcactggtaataagatcgtaaatgttcacttttctagtggttttttattagcgagccgttaagccaagctaatttgtaaacatcagttcctacgatagcttcaataacatacggaccttcccaatttgggttaaacactcatgcagcaggatctcgcgtacttgcaatacacgtcttaacaccaaatctctaactttaaaaagcctttttcggactcttttattaaaatatcttgttattcggtgttgataagatacattggttatctgcgactcattgtgtctttcctcaagtagatctaaggataaattcaaaagctcttagttttcctcttaattataaaatttgcatctgtgggtcgcaatattaacttctactggtaacattgcttctaagccgaatgccaatgaaaatggaatgtgtctcgtcactgttttctctgtcgttctatgggcccaaagcacctgtggtagttcatctacctatctttctttagtagcatcgaacttcttcttaatagtatctcttaaggttttattaacagcttctacttgtctgtttgcttgaggtctcgatactgatgagaagcttttaataattttattcctttcacagaattcagtgaacaattcaccatcaaactgagttttgttgtcagatactatttcgattggaattccaaacttgcaaatgatgttcttgataacaaagttgagaacttttttgcatgttatgtaaactagaggttcatcctctgtccattttgtgaagaagtcgactgctgccactacgtattttgctcctcctcgccctgtgggtaatgcccatatcagatcaatcccccatactgcaaataggtagggcgaggtcatcattctcaactctgttggtggtacgcgaggtatatgtgaaaatctttggcatttgtcgcatctcataacaaattcatgtgtgtctttattgattgttggacagttatatccttgacaaatgatctttttggatagactttgccaacctgtatggtcccgcaaaagcctttatgaatttccttgataattttattggcttctactggtaacacacattgtaagagaggcatggaataattcctcttgtataatttgccctcaactaatgtatagtgaggtattgagtacaagagtttacgtgcctcgattttgtctgtaggaagttgtttattgactagatacttgacaataggtgttgtccatgttggtgaagtatctatcatctcgatttcttcctcttcatatatgcttgggtcactcaagact

SEQ ID NO: 397607 - DNA, 568 bp, Cannabis indica
tttcccgagtccttaaaccattcgttgagacaaacaggccaatcaataccactaaactaggtggaaatcacaaccaacaccctttacgaataaacacagctaaagaaaagatgatgatgataatgatgagattcgaaaactagctcacaaacaaggcaaagactagaatccatagtgatgaatctagctaactgatcttgggttaaaagattctcattgacagattgccaaagaataaaatggtgttttagaaccattttgtgctaagctatcttgtggtaagtcactttctcagttgaaatgagcgagagataaaaaattttagcttttaatttcccagaacaatcagcttgtgtcagctcctgggttgaatggccataagtcgtggttctttatatagatgcaattaatccatttgaccaaatgacagtcttgttaagtagctatggcctaaatgtacttagccatgagagcaacattctacttttttaccttccataaaaccaatacgtaactccatagtccttgtaaagcccgcttagttaatttggaaattagcagttgttta

SEQ ID NO: 397608 - DNA, 1213 bp, Cannabis indica
aaaagttaatatacaatgtaaatctccaagataatattagtctcactatagtattccatcaaatgaaataagccgacaaagcccatgatgaaaacatatcattttaggggttttttcaataaatagatatttttgtgttaattttataatttcaattctaacttttttcaatataaaatatcaaccaaattaaaacagtataaaaataagaagaagcaaagcatgtactcaatttgtatcagtaaaaaataaattataaaataataacacatgcacaacaagtgatcaaactcaaattataacactacaataaacgaaaacaaaacaaaaaatgaacaagacatctaagctgaaatttatcaaataaaaattaaaattcgcaacaacaatataataacacaaaagcaactaagtcatacacatcaaattatattaatcaattcaatatatacatctaccattgtactcacaatgcgctggcgaagtggggtcttactcacaagtgtaatgggtttgttaacctgtaggaagtgaacccttcggttgtcactaccattttacttaaataattggttggagggaggagcgttcccttgtgcgcttcttcgtctttcttggtttaatgaaatttcttttcttagcaaaaatcaatatatacatctataaaggaaagtatgtaaaagagtttaggtgattttttttttattagtccattttttttttatgttgtgacacattctcttatttatttatttattttaattttttttgaaaaatacattatacttataaattaaaaattccacattatttaaaaattgtttaggtattatttatataggttacaaataatagctttattatttactttcttttgtctaagaaatattatttttattttagatgattgattaatatcttacctaataaattttttatatatttatataaatagttatttattttctaacagttaaatttataataataattttaaattttaaatttgatcaacttagttttatctgttaaaaaataataaaatagataagaagaaaagaagaagaagataaagagagaaagggaaactgaatgagaatttctcagttgtttattccaatggagtgaacccctatttatacaaaagtattgactaaagaaatggaaaactaaattaatatgtaataaataaaaatacaatcaagcattaatg

SEQ ID NO: 397609 - DNA, 673 bp, Cannabis indica
gttaaattaagtaagtacctacctaggttccccggtaccccttactttacgtttaggttaggaaccgaacctaacttacgtcgttcgtttcgtacgaacgtacctaactaaaatttaagttagtttaattttagttttaagttttaactaacttaaatttaaatttaactttaacggtttaaaaacggtttaaaacttagttcgttacgttttaggttttggtaagttttaacttttacctaaacgtaacgacggggacggggaaaacttaaaagtttaaaggtaaaaaaaggaaaaaggaagttactttacggttttaaggttttttaatttttaaattttaaaatttaaagtaacgtaccttacttaattagttcgttaactttaaaatttaaaatttaaatttagtttaaagtttaaagtacgaactaattattttaatttaaatactatttagttttagttaattaaatactagtttttggcatttaaatggttagaattggaaaatttgcgtttttgagaaaatagaaatgaaaattgtgaaaactgcaaaattccaagtgaggcccattaacaccatggccggccacttgaatagctttttcccattattattttcattattttaatgccaattaatgactaacctaaacctagtagttgcctataa

SEQ ID NO: 397610 - DNA, 723 bp, Cannabis indica
aacttagggagatcaatacaagattttcgccaaaaaattgcgtagaagaataaagcaacttccaagcaagctcaaaaaattgtatgtgtacttgaacttttctctgtttttgtttttgtttttttctgttttgtttaaatgatatttgaatttgagctccaatggttgggtcatgggtgtgggaatttgagagtaatgtaagattcaaataatggtctatagttttcagtattgaagtaagattataattcattgaagggattacctcttgggttgattaaagagattcaggtcatgaaaggtgataatagtacaattagaaatgacctgctatctatcctttggtacttttaactttatttcattttgtgccccagtgtaccattatctttgcttccttgaaattgcacatgcccattttattgataaatgattcttatattgagaaaatcattgtgcagatttttattttgttagagacaagacaatgattgtaatttttttttcttaattttattgttactttgttggaatgggattggattggattagtttatgcttgaatgtgttagtgagctttatatattgatatccaacacttgttgccaacacttgattatgcttcattagtttgcattagtttgtaactttttaaattaattttattgttttttttacataagttttagaattagttttataattacatgtagattgaataga

SEQ ID NO: 397611 - DNA, 743 bp, Cannabis indica
tatatgcatgttttatagccttacggtgaaatggtttttgacatttattgatttacttgaatacaagatgatttttggggaaaaacaaatgaatttgctggccttgtttcctccttgcccgatccctctctctctcaaaccatctcttgaatttcatcttttcaattggtgagaaattgcttggttggagcttagttcttgggggattaattaggcatagcttggaattgaaaattgaggtactttttacagcttttgattttgtttgtggttgctgaaattgttggttggaaaagcatggaatacatggatgatattgtgatgttgcatgttagtgttctagtgtgagttgaagcataatttagttgtgatatatgtttattgagcatggaatgtgagtttaggtcagaatttatgagttattgattgagtttgcaactctgattttagtgttgttcttgagtttgtgttttgggatttgatgattcaaggtgtgaggttgaattttgttgattttgctcaagctttggagctttgattggatgttgttgattaatgttagaattgatgttgtttgctctctattgtggtgactttttatctgtaagaagttaattttgggtatggtttgattaaggttcgaatatatggtaaagtgggcatgtttagaccttaaaatctggttttctgggtttttcgaacccagtggccgcggccagatctatggtcgccgcggccataaa

SEQ ID NO: 397612 - DNA, 1390 bp, Cannabis indica
attgagagtacaatccatttaactcttcaacagataacaataaggatgatatgagaaatatatatttatttcatcaaatataaatactacaagacaaaacatttaggtgacgtttagttgggaggaatgaaaacatacaaataagaatgggaatgagaataggaatatgaatggaatgatataaaatttaaaatgcataaaaattgatagaaaaattattaaattttttctcatcatccattagaatggtctttccttccatttcaaaatggaatagtcattccaccaaaatggtggaaaggccatttcattggaataacattccaatactttaatatacaaccaaacaaaagaatggaatgaaaattttttccattctattccatttcattacctccaaccaaacaccacctaatagaaatgcataatacacaaaacatcacaagtactgtaataaactgaagaaaaggcttaatatatcaaacataataattaatgctaaattatatttaattttctctggtatcacagtcattagactcattattatcattgaaattacttacgaacttggaagcatctagatgagttgaatcattcacaggatcatattgtttaattaagtttacttccttctccttctttcatagaaatttgatacaaatcacggttaggctatttttagcctacattctgggtcactttttatagttattttccttctttattattatatttggaatagaattacgcttgttttctttggttttagatttcacacttggaatatatcaattgatcgaatttcagaaaacaatctatagaatagagaaaattttgcaagaaaataaagctataaatttgactatgttctgatcagattttagaaaaagtcaaaatataaaagctttagatttctttttcttctttccaacgcatctcgaatcaactcatttggagtttgtatgtgaaagttattcatattttactgaaagatgctgaagttgtcaaatttgcttcagtagttgcgaccaccattttccatggtcgcgaccctttttcatggtcgcgactaggaggccaggcagagagcatggactttccaattttcctatggtcgcgactaggctttatgtagtcgtgaccaacgacaaaagacaagatttttgggcagttttgtaatttcaccattcaaagatatctgcattattttctatataagggttgcgtgttttagaggcaaggaaggcataaattaaacctagaactgaagaaggaggcaaaggaagtaattgtggtgacccggagtaagttcaccaactagttctttcttctccctttcatgtcgttatgttaatttctgttttaatttttatggatgtgaacatga

SEQ ID NO: 397613 - DNA, 1158 bp, Cannabis indica
tttattaataaaaagaaaaaaaagatatataagatttaatgttatagtttatagttttagaggtagaaaaagagagcaattataatgtgatgtcggcatgcagatagagactcattccaaccaaatgtatggtttctatttaaagcttaattagttataattttttcaatcgctacaaaaagtcttacacttttagttacaattaaatttattataaatacaaaaaaaaaaaaaaaaaaattgtaactaattataaattattattcataaattgtgactaaaaatttcgtgactaaatgtattaattacaaaaataaaaatttattgtaactaaatatgtttttaatcacaatatacttgttgtgactaaaattatattagcgacaacttatatctaaatactatatttttagtcacaaatagttttttattatgattaaaggttatataaaatttatattgtgactaaaaatttattactaaaaatagtatttttttggtagtgtatattcgaataataatcttatcttattattattattattttttaatttattaagttattatatgttacaactgaattatataatatacacacaacatgctaatgaatctcttttatacataaactttaatctaactaatctgtcgaagtatttataagaagaagaagtgtagaacttcaacgatattaaagggaatataaagagtaacgatactattacttctgtcttacatatatatagataaaaatttatgtagtacattctttaaaaggatattctggtagactccttatttatttttcgacattcaaaaaaagtttttgatctagttttcttataattaatcacatttgttgtagctatttaagattgtctataaatttataaatattgaaccttgattgatctaactaacccatcagaatatctataaaaggaagaagtgtagaacttcaaccatattaaaggagataagattcataggagcaagaatactactatttctatcttacacgcatatatggaagtttatgtagtacaccctctcagagtactccctatccttttctcacaaaaaaaaaaaaaattaaatcttaatttttttttttattaatcacgtacgttgtagctatttatacatttctaaatattg

SEQ ID NO: 397614 - DNA, 523 bp, Cannabis indica
ccttgaaaatgcatggaaacaatggacttctgatatcccagctggaaaaatcttcctaggcctccctgcatcttctcaagccgccggtagcggtttcattccggctaatgatcttatctccaaggtccttcctgccattaaggaatcttccaaatatggaggagtcatgctttggtccaagtactatgatgaccaaactggatacagttcttctatcaagagccatgtctagaaattatactattttataatttgattagaaatcattactacttctgctgtctatcttctattttacgttgtatgctacatatttatatctaagtaagtaatacatatctttttgttcaattctgtctttatttatgtctttttcctttaactctgctttaaggtcatgatctatttgaaatgagttgtcgcaagttaacagcacatatacaaacgtggaccccgattatatttctctagtaattattatgagtttcaatagaaagattaaaaatggtgaataataatcaga

SEQ ID NO: 397615 - DNA, 524 bp, Cannabis indica
aactaaaaagaaactactctatattattcatcataatcaaaatcataattaaaaagcaaatagatagaaaaacaaaagaactaaattgatgaacaattgatgaagcaatcttcctcttctcctatttctttgagtttctctcttaaaaacgcaatctaaaagtctctaaaaatgaaccttaaaagtcctatttataccccataaaaatcttatgatttaaaaaagataaaatttagaaaaatctggaatcgtgctctcgcagcggcgaaagttgaggctcacctcaaccatgactttgttgggttttgtgtcctaaataaaatctatttcaatataattagatttactaattaataaagatcagaaatcgcattttatgttgcatagttcacatgatttatttcatgattttttataatgtataaattctattaagtccagaacatatgtatttgttcatgattatagtgttgtcagcacaatggaatataatcatgattatatgttcaaaagtttaattccct

SEQ ID NO: 397616 - DNA, 502 bp, Cannabis indica
aaacttgactattgtttcatgtttacagacacagtttcatcaattgaattttttgagttctatttgcactatttctcgtaatggatttcaattatgtgttgcttacatggaacaagggctttatgttttaagaccggaaatacaaatcgcgcttaacaacgaacttttcaatgttgctaaacctagaaaccataaaagaaaagagatcgataataatgatgaaacatatctatgacatttacgattaggtcatataggctatgatagacttcacaggttaaccaaagacggtccattgaaaatgtcgtcttgggtgaattaccagtttgtgaatcttgcctagaaggaaaaatgaccaagcgttctttctctgcaaagggagagcgtgccaaacaacctcttgggttagtacattcagatgtctgtggacctctaaatgtcaaggccagaggaggttatgagtattttgtcactttcattgacgatttctctagatatagtt

SEQ ID NO: 397617 - DNA, 543 bp, Cannabis indica
tacttggtttgtgcaattttttttatcttaataattaaggattcatattataagataataatttagtagaggtattaaaaataattttatttagagttattttttttaatatatgatggtttgagaataattttgtattagtttagatttaaatatatggatatgaggaataagtactgtttaatggttgttatggtaatagaagtaatgatgttgatgagtaattgttgatttagtatatgagaagaagagatgattgtatgataaggtagtaagctttattgatagtttggatgttagttatactagctcctcaatccaagcatggtatttatagggagctaagattgatactacaagtttataaatttttcttattttgaattacaatttaactttttaagaaattttaaaaaaatttaagtgtcttagtttacaaatatagtttctaagtaattctagttttctctaatttttgtagctttgtatagttaatactagaattttctagataaaaaagtgtagaaatgtgtagcacttttc

SEQ ID NO: 397618 - DNA, 542 bp, Cannabis indica
ttaatgactagaacaaattaaagttaaaaaaagtaaaaaatatttcaagattttttttaaataactaattaattaaataaattttaaaaaaaaaaaaacctaattttagtctctttctctcatttcttcctctcttcctctggatcaataccaactacttcatcggtgaaaatttcttcatgcttccaatcatcacatgcaacaaatgaacaccactaccaccatcaccattgccaccacccaaccatgcaccaccaccacaatcatcaccattataacaccaccaccatcatcgcaataaaaaataccatcaacaccaaaacacatccaaaacaagatctttattttttttttgccaaaagaaaagccactacaaaaaactgttacttttagtgacaactttttagtcacaacataatttttttgtgactaaatgtggcttttagtcacaacaaaatgttacttgtgactaaaacatagtatttagttacaagttatcattaatttagttttagtcacaacaagtattgtgactaaaaata

SEQ ID NO: 397619 - DNA, 1296 bp, Cannabis indica
actaccgaaggtgcatcgccacatgtaatgatctccatagcaatgagaaacacgattcttacgatgagatcgacgggagctagtatactccgagctacgaaaggataaggattgggggattcggggttccaaaaggaattaagaccattctcccaatacttggcacggaagacccttgtccataatgactcttccccattagctaatttccatccaagtttggctaccaaagccagattcatatcttcaaattttttaaaattgaggccgccatcctccagaggcatacacaaggaattccagttggcaagggcaagatagcgatctttctcggtgctaccagtccaccagaatttcctaatggcctgatccatttcgtggcacaaagtttttgggagaaggaatgtcgacatggaatacacaggagtgctagcagccacagaccgaatgagggtagaccgccccgcttgggagagaagtttacatcgccaaccttcaattctagcacagagtcgctctttaatgaacttaaaatccttcaccttgctttttgaccaaagaatcgggtttcccaggaacttatcatctctattcatacacctgaatcccagcatactaacgatctcaaccttactctgctcctccacattcttagaaaaaacataggccgacttcctcacattcagactctgcccagaccagaacataggttcgatgcaattttgcactgtctcaacttcctctgtattcgctttacagaaaataaacgtatcatcagcatacattaaatgagatataggaggactgcatcggctaaccttaaaccccgtgatatgaccccgaccttcctcccgcatcaagagacgagacaaaacttcgctacaaaggatgaacaagtatggcgagagcggatcaccttggcgaagtcctcttgtaggattgaattgcttgaggggtcctccattcaagaggatcgagaaagagacagaactcacacatttcattataaggtggataaatttctccccgaaaccaaatgcgccaagaacatgctccaggaatccccattctatgcggtcataagccttcgacatatccaattttaaaccaacaaatccgttcctaccgttgcatttccgaaaagaatccatgatttcatgagccaaaatggaattctccgcaatccatctgccaggagcaaaggccgattgtgttggggagataatatccgagaggagcggcttaattctgttggccagaagcttagcaataattttgtaagtaaaattgcacaag

SEQ ID NO: 397620 - DNA, 282 bp, Cannabis indica
ttaaaaaatttaaaattcaagtgatctagtcgtcaatatctcatttataaaacactaggtaatatatgtatgttgtttagttttatttagatcttttattattttatttttattaaaaacttaatctctcttatattatatataactatctaagtcttataaaaaatgtgattatttaacagaaattgttggttaattgttttttatttttatttttccattaaaattaacagttaaagctcacaccgttaaatcaatcaattaattatttttaaaaaaata

SEQ ID NO: 397621 - DNA, 685 bp, Cannabis indica
gtattgactgagagttggaggagaatgttgttggggaagtggggaagaaggcggagtgcagccaggccgtggaggagtccctgtcgaagacacctgtccgttcaaagaataatgctgttggtaaatccgaggaaaatgtggtggaatcagtatcaacgcctttactatctgctatgaaatcggttgaagatgaatgttatccagataagaccattgaggatgacgactttgatatagtcgaagtggcgtctttttggaataaaggcaaatctctcgtcaaatcaaagaagacataatctgagaatgtgcctgtaacgccctaaataattaggcacgctacccaagatacttacgaaatcctaatcccctaattgggattactaataagattagcgaggaaattaaactttaattataaacgaaattaaaataaaacttgtaataatttaaactttacaatctaaaagttacagaagttgggatcccaaaaacatttacaaaatattattacaagtcccttttctttcagtcggcctaagcggcaaaacagagtctcaaaaatacaacactggtagaccccaacccgcttggtctgatatggctcggacatgtacattcttcgcccagctcctgcactcatggctgatcagcaatagtcttaccctttcctgcacagtagagcacc

SEQ ID NO: 397622 - DNA, 1498 bp, Cannabis indica
ttaataaaagatcagaaatcattgtaggttgcatggttcacttgatttatttcttgactatatattccatgtataaattttattaaatctagaatatatggttattcatgattatagtgttgtcaacacagtagaatataatcatgattatatattcaaagtttatatcccatgatttgtgagtgtacttgatttagactaacatgataatcagtaataaagcttacttgcaccttggataagtgttatgtcctttctagggcattaaaaaagtatgctaggatctgatgtatggagtatacatcagacatgacccatatggaacataaataagatatcataaacttcccgttatatctatttaagtcaatatcaattagtcgatcttaggtcaatagatcttaatcttgatatggttaggtcctgctttaatgtattatctaggttcttagagttgttcgttaaatctcgatcaacaaaatacttacatcttgggaatatgatagtgcaattaagtgggaacactaaccatagatatagaatctgttgtaaattcagcaacaacaaaaacaagattctacaataatatctgcactaacaatgaacaacacaaagcaatatgacaaaaataaacaaggaaggagagaacaaaatttatcctggtttcggtcttagagaacaatttgatccctggccatactctagctaagaaacaccattaaagctttcattaatatggagaataagagagtttacaccatcgccaataccagagcaaacaatgctcttctacactcgaaaaacacaccagagatatagtatcagtaacaccctactagtttaaccgttttatagtgatttttaacttaactgtgcagctcgttgctaatcaacgagtttattgaaaatcgtgattaattaaaattttactttattaattataaacactaaaataatatacttataataaaccgggatcccgtttacaaaagtttcacgttgcatatacaaaagtttgtcgcttagcgactataaaaaataagccctgatgtcccaaagaccgtatgctccaggcctaaccgccctgacatgtacaatatccatctgctcgcactcacgactcctcaaccttagccttgcccttacctacacatgcaaacaataagtgtgttagtgtcattactttgtgacagtgtttgttctgttcaatgtctagtcgtatctgaatttttagtctgttatatctgcactagcattctgttacgtgagttttagttaagtattagttagtgccaggtggacttattttgtggatatataaatagtcgggttctgttagtaaagttttcatcaataaaatcgtcatacaattatttcggttgtgtgtggagatagagttgtatcttgtttcttgttgttgtgattacaggttagatcttggagcttgaggatgttcatcaatggcggaatgatctgaatctggaattgctgagttcaa

SEQ ID NO: 397623 - DNA, 640 bp, Cannabis indica
tttaaatgtgttttttcctctggaattatatcattttggttatggaattttcttgaatactttttatttattataaattaattaatttattcaataaattaatttggaaaaattgttaggttgctcaaaaaattataaaataattttaaatggcttattattatggattataaattgttctagaaggattaaattcaatttttaatcgtttttttagttttaatgaatttatttggttatttagttatttgtagacctcacacttgtatccaaaactgtacaagattggctttcacactctaattatagagggagttaagaaacctcttagcccaagatatgtttcctaactaatttcataaatttaaaaactccaaatacaattcatgcaaatattcaagtttaatgcaataacaaacataatgacaagtataaacaaataataaacttaaaatgtaaagactttagggataaaaattgcaaactcttgatttttacaaggttcggtagaacgaagccacctacgtctttggtcttcaaagttatggacctagctttgagttccactatcgagccaagtttaattaattcattttctaattaaatatattttacttcatttattttaattaatcattaa

SEQ ID NO: 397624 - DNA, 659 bp, Cannabis indica
aacaccctaactagcataggcgtattacgtgatttttaaacatactgtgcaactcgttgctcatcaacgaggtttatggaaaacgtgattaattaaaatttttgctttttaattaaacttgtaaaatatttatacaaaagtctcgggatcccgattacaaaaccatttacaaaagtttactgtatatacaaaatacttgtcgcctagcgactaattacaaaatagccttgctgtcccgatgatcgtacgctccaggcgtaaccgccccgacatgtacaatcttcaccggctcgctcacggtccatcagctctagccttgcctttacctacacataaacgtagcactgtgagtcgacagactcagtaagataagcataataatattcatacataaaacccgatcatgatcagacgcccatacccctgatcataaccctaactgccgtgtccaacaagatactgagtccccctaactgtcgtgtccaacacggtactgagttctgaacgttcatagggacggtactattgacaagtaacagcctgatcggtcgaaccggtcatactccggctgctggtcatactccagcctgtaccgacgtgttacagtatcagcctgatcggtcaacctgactggatcttaactgcgcggcggattacag

SEQ ID NO: 397625 - DNA, 578 bp, Cannabis indica
tattaggatgcaaaatcagtagttgttccaaaaaattatcaagaggaagggatgtcttaataagtagagatttacaaggcatcaagatgagtatatattaatggatagaagtaaggaaggaatgatacaattaaatatctattagaaataaatatttagcttgttaataagctaaatcaatacatccacttagaagattctataggaagaataggaagacatgattatgaattatgtacttttggatcttatgattttgatcaagtagtaacggttggacataccgagttaatatactgtctattagtgtagatgatttatacaataaatgaggatatggagttcatatgaaagaatagtttaatcttatgaaattgcaaagttgatatctttggctatgatgttaagagttaaagaaagttattgaaaaccatggagattaaagagaaaatagtatgatgctttattcttgaaagatgggtaacttggaggatcaatagaatattagaaacatgttgtgggtataattgataaaagttagattatcttagaataatggagtgtttgtcgaaaagtga

SEQ ID NO: 397626 - DNA, 528 bp, Cannabis indica
tttttttttttatttatttctagaaaatctgtttctattttaaagttatgttatttctatcttcagattatactattttttttattttataaaaattattttcattttaagttctcatttcaaaatcatattgtttctatttttataaatgagcaaaaaaaatcatttataaaataataaatgaaaaaatcgttaatttatttgactgtataaagtattaaaattttctctagtagactccttcaaaagattatttttacagattttttatttgttttggcatctaaaaaagtttttaaatttttttttttttaactatcacttacattataattatttaagatcatttttaaattttcagtaatttactgtactaaaaacaaaatttaaacagttgtgcgaacaacaaaatatataaattttattttcgaaattgtaaattatttcaaattttattttattatatataaatttatagatatattattgttattaataatagtaataataataatatttatttagtta

SEQ ID NO: 397627 - DNA, 960 bp, Cannabis indica
aattacgctccacgttaataaatatacttattataaaaaaatcaaacaactgtgatttaaactgcttttaaagagtcaacgctggggtggattaagacacggtggaaagtgtatctcaccggggcatctcgcttggtacttgaacaacttggcttgttcataagtcttccagcaatggcatgagcactctagtgtactgagcaaacttaagatctgctcttggaccataaggccttgcagactgaacaatcatgtccttggggttctcaatagaaccaataaccctggtagggagttggagcttaccaagagtatgccttcctatagcgagatggatgtctcgctatttgctatctatgtccttcaagaaagtacacttacttagtataatttatattatacgctaagtattttaacaacccatttgccttgtcatcaattctctacgtatcccaaggtagatgccttgttacgtattatcgatgtcttccttacaactgtgtcctcttatgcgaaatagtttctcgttaatatgtgaatcgatagttcgtacatcctcatctcgctgaagactgtgcagtttgcgagttataaatattccctatttactctgcatttaatgaattattctatttaacatcttttaatataattaccattatatttgttaattcatattctctaaggttgacacgtgtcatcttctgaagtacaagctggatttcaggtataacaattaatatttaagtttatttgttctagacacttaaatatttgatatttttcttaagagatttaattaaataggaaaattatatttatgttgaaaattaatatattaattttatataaacataaattagaataatttttccagttttattttatttatttattttttgatgaattttgaaaatgtattatttttaatacattggatttcgaattctgccatatata

SEQ ID NO: 397628 - DNA, 570 bp, Cannabis indica
ttattataattgttattatttgaattgaataatttattatttattaattttttaaacttacatttcgaatgaaattatacatccatatattcattgaatattgattgactaataatgagtatgaaaatcttaccaaataaatatggtagattgaagaaaatatatgataataaaaagattggtaattttcttttttgagtttaaaaaaaataatgtaaaataaatgtgaagagaagaggaaaggttaagaaatgtgaataaaagagataaaaataattaaattaaaagtagataagttacacttaacacaatttaaaaagaaacaaataattaaaaaagtaaaaaataaagtattagagattataagaagacttaagtatgccacatcatctccttaaaaccattcctttatatagatatatagatagatagatatatagatagatatataaatatagctatatgtatatatttttttgcaatataaatatctatgcatatattttgaattgttaaagattaatcaattatataggtttacaaaattactatacatatatcatatttttt

SEQ ID NO: 397629 - DNA, 713 bp, Cannabis indica
acttatttattgatgtggaacgttagtattaagtaattatttgtgttaaggttatttttgtaaatagtttgataataatgtataatattgaaaaaatcccttgtttttttttgtataaatgttgtaattattgagataaaaattcaatatccatattttcatataaaagaaagtacaatggtgtgacatgctaaaaaagtttaaatataaatattttttaaagtaatagcgattttactctttagtgagttatttaaaataaatctcacattgtttagaaatcaatgtcatgttgtacctttttttttttttttttttttttttttattaaataatgtcatgttgtacttagaggctatataaacatcactattttttttgactttggtttgtgccaaatgccaattaatattgcatagtcattgtatgggtagttgataactcttgcccaattagttgtaatcttttagatgaatgcaacacattttcttttatttttcaaattctgtcaaaatttaacatttaaaatttaaatatttatctatatttatatcaaagagaagtgggacatttgaaagaaatttattgtttgttgttttttcttaaattaagaaaataataactgtaaaataaataaaaactatccataacatagttatttaacaccttagtaaaaaaaagtagcataatattatttctgttataaaataata

SEQ ID NO: 397630 - DNA, 500 bp, Cannabis indica
ttccttttcagatatagttggctcgtttagcatcttcactaaaaccaagtttagttcatccaagtcattctgtgaggccagtttttttaaggcatcaacgttagagttttggtctcttgggatttgcttgattttaaaacaatcgaatctttccaagttcttccgaaccctctctagatacttagtcattttcaggcccttagcctggtattccccgaggacctgatttacaatcagttgcgaatcactatgacatatgagattcttgaccttcagcgcttctgctatcctcaaaccagggatcaaggcttcatattcaactttgttgtttgatgcgtcacattgaaatctcaaagcataatgaaacttaaagccttttggcaaaattaatatcacccctgcacccgagccctgctcgttggatgcaccatccacgaataacttccaagtgtccgcgtctcgctaaacaagaaaattttcttctggagttattccttcta

SEQ ID NO: 397631 - DNA, 608 bp, Cannabis indica
taatggctgccatggatatatggtaagaaggacacagagtgaaatggtaagaagctgagttcgccatagagagagtgaacgagagcgagagagaacgagagcgagagagagaggcggaatggcaaagaatgaaagagaaaggattagggttttcatagttagttttctttcttatcattttctatttatatttttcaaattttacccacaaaattatgttattttaataaataaaaatctgatataattttttttaaaatgttaaatctgatataatattaaggatcctaaattaaagaccataaatgccacaatttttaattaaagatcccaaattaagtctctaattaaattttaattaaaaataataaattatccaataatattttagtcctctttcacaataatatttttttaaataactttcacaataaatttttaagtacaactaatttctaaaattatcctattattgaaaatatataaattctaaattttccaattttataaattctcaaattataaatttattaaaaaaatttcttttatatttataaaatttgaagttttttttttggtattttattttattaaatacaatttttttt

SEQ ID NO: 397632 - DNA, 756 bp, Cannabis indica
gggatagctggatcgatctagatctcttctaattattccacaggtccaagtcgaggatccacatcttcatcctcgccttgggaagtttcctacttgggaatgatttttcccttgtctgggctctggctggaggatatttccttcttagccttggccacttcaaggttgtaacattcccgagcagattgctggttccctctaagacaccctaccccattatttcttgggaacttcaggcacaaattaaatattgatatgacagcttttaagtcatacagggctggtcggccaagcattacgttaaaggctgaatgaacatccaatattaagaactgtgcaataatagttatgctcgtcgaagcttgtccaacagtgagaggtagctagatttgtcctacaggtgcaactccttgaccggagaaaccatagacaggctggaggcatggagttagatccttgagctggagtgccatcctttcgtaagtagccttgaacaaaatgtttgaagaagctccattgtcgatcatggttctagccaccattttattctatctggacttccacgaccagcgggtcgttgggtggaaatctaatttggacagcgtcttcatcgttgaaagttatggttggctctcctgctcgtggaactttgggcttcctttcttctacgaccaggatgacttcttcttactcgtgctgtgctgtccgggcacacctctcgcgagctttgcccgaatcttcagcaatgtgcgggcc

SEQ ID NO: 397633 - DNA, 838 bp, Cannabis indica
ataaatattaatattaattataactaataatatataaactttattatctataattataataatatgctttacttaatagttaaataatgtatataataataatataataaattatatataagtgtactgtaaactaaacttatatattataataataatatatagtaatattaataataataaattaagttatatgtaacgtcctattgcctaggcacgccacagtgattttctacttatggtacattcatttgtcaattaaaaggtttctcaaaaatcgtatcaaatttaaattttaattagactttaaacctttataattatatatacactttataaatatgttgcaaagcgactacaaaaatatggcccaagtcatcttgagaccgaactctccaggtttaaccatcttgacatgtacaatcatcctcgatctctagactcactggtgctcagccttatcctttaatttacctacacatgtaaataatatctgtgagtcgacaaactcagtaagaaaaaacatataacacataacatattaccgacttgtatttaggtgcccgtacacctatctataaggcttaacagatgatcaagaacgttctttacagaagcatgaattatgtaccacatgcactaagtactcatcttgtactagtgttggtagggttgaaccgtaccccgagtaccactgagtgttgtaccacatgcactacatacttgattgtactagtgttggtaacaccaaatcataccctttgaacatcatatattgtaccaatacactccatactgctaccgtactagtgttggtagtatatgaatcacatacaca

SEQ ID NO: 397634 - DNA, 766 bp, Cannabis indica
tcccgaggcttctgaatcaagttcttcaacaatatcgtgccccggttgtctccttagtttcgtgacttgatgccttttgaacttattctccaactcatccattcgcaaatggagtgaatccttttgctttggaccgagtcgttgacgaaggtcaggctttttcaagttcagatgttcttgtagatcactcttgtcatgactgcggtcagaccttgcccttcctctcaaggtttgattcacctttttctccctataagggtttgtgggagtttctttcttttaagcctgaagagagggttggcgatttccatccgatgttctacgtatctcaggttgtgtctctaggttttcctcaattcccgcaggttgcctcttttgagagtttcgagtatatctctgggttgtccactgccccttggtctgcgagctacgaggttttgcctcgtgaatctcttttcccaaggtcaggttgattttgggtaccatcctcctgcgctgcctttactgtagctatttcacgttctaactcggcattatgccggtttacttcctccaattgacgcctaagatggcgattttctaattccacaattggtatgtatcttgttgggtcgtaggcaccatcctcatcaatctggttaagaagtggccgattgttgtttatccaaggtccgttaagccaggagccccaatactaggtcttcttggggcttgcagtttgttcatgcgatgactcaatagatccctgaggactcaatggttcttt

SEQ ID NO: 397635 - DNA, 519 bp, Cannabis indica
caaaacactcgacgtcctatcccacgtgaagctcaaaactgggtaagacccacaaaaatagtgggatattaccaaaagaatcaagtttcaactaactctaagaattaagggaacgattaagatagagttggggttcaaccgaaccctaggttaggcctcctgaagagaggtgcaccaaccccttccctatataagggtgttaacgcagatttttgttaatcaaaattaattagcctttcagtaataaatactttacagaaactaataaataataaaagattaataactctagatatttttacgtagttttgcagtttaaagatctgcttactccatgagtctttcttattagggatatttattgagtacagaatacaatagaatttgaataataatatattctatctcaattttactgtccctttttctgtggaatctgcccctatttataggagtataggttgaaaattattcttttgggatcaattcaaatataattgtttataaaacgtggacaat

SEQ ID NO: 397636 - DNA, 1268 bp, Cannabis indica
cctccgcatacctctcgatcttggtctattccagatcagtgaagcttctctatgacttggttttattgaggagttttaattagtgagatcattatctcttcccttttatgccacgtgtcacctatctagaaacatggataacatttaccccaaccttttgagactcttcgagttgtgagaacttgcagtcttctttcaaatcttaaagataaatttacaacacatggtgatttttgggatcacagatgtattccttaagttgtcatcaattaaaggaccaagaaccaaaggtgccacggacgtggcacgcatgttgcgtatttaatacatttgttgataacacgcgcgtgcagggggcgcatctttcaaaagaagttgtaatgatggcaggtcgattgaaataacccttcttgaatgcatgcgggacttgaggcaggcaatgatgaaaatcgaatgccctgagcaagttttagatgtcatatttttcaacttcccatctgacaataagatgaaacacatacctgattcatgatgttggatacgagattagattgtgggtatattgtcttccacaaactaatccttctctctataggttctcactcgtgaagagtgattgagattagtcttgggaaccaaactctaatgttctttatatagcaaactaattagagcctcataaattctaattaggtttactattgtgtattacacattatacaaagctcataccaaataagatgtttattgagttcattttattagatcacttatttaacctaatttaaaaaagtagcttaaataaattatcttaatttgtgagccaacatattaaattattaaaaataatccaaaaacatatagaaaaaaaaatgacactaataagagtatctccaatgatagcattttagagaatgcttgatgaagtagaaagtttgtaaaatataaggatgctatatcattgaagataaaataatattattcttgaaatctgtattgatgtcacacaataacattgatgttatatttttttttaaatataaaattaatggtgcaatatatatattatatatataatagtttaatatagaaaaatatttttatatatataataacgtatgagataattgcataatatcgccaaaaaatacagaaccaaggaaaccaaaaaatcaagatcctgtcagctaacatcgcacaaaaatcgcataatatcgccaaaaaatacagaacaaaacaaactaaaaaatcaagatcctgtcagctaa

SEQ ID NO: 397637 - DNA, 683 bp, Cannabis indica
caaataattttactagcaaccttgactcgattggaggctagaaatgtcataacgggcttaattgatagaattgatactacaaatatcagaattcgcgacggtcctaaaatcaattttttcagggaccgtcgctaaaaagattaagtaactatttaaaactgttgagaaaaatttagtattctcaacggtttaaaatcgtagtaaacaaaacaagcaacgtttttttttaataaaatacgattttttaatggacccttatacccgatggtttaaaactgtcgggtatagtataggtgacagtttaaaatcgtcgcctataagggtccattaaaaaatcggcacttacttctcgcaatattttccacgtacccacctactttttttctatttcctacatgtccacctatttcttttccatttcccacaccctaaaacgaaaagtcttaactctcctaaaccccacccacgcctccgcaccatcactctcgtctctttccgtgttcctccctctctgatctccctttcttcttgtctctctcgtccatgaatctccacccacccctcctcccttcggcctccctctactctctgtcgcatacgtcggaccaccaccacctctcgttagtgtccctttcatctccgtctcatacgtcagaccagcaccaccacctcccatccgtctc

SEQ ID NO: 397638 - DNA, 967 bp, Cannabis indica
atatatatatatggtagtaaatcaaaattatgttaaaatatattccctaacaggtacaactgtagctcataaaataagagacttttttttcttctaattaaatactaaaattaaacatcgaaactcaagcacaaataaaatataagtaatatttaaatatacagtaataattacataaaaaaatctcagtttcatgtttatcaaacgcaatatatatatatttgaaaagtcattgtctaattggaatcaagtgtgattcaaagtaattactagaattggtaatataaaataaagtaagaatttgaggataagatgaatgaggttccatcccaaaactaattggcaatgggaggagtagcccattcatcttatatatctcaatttatttccacaaattagcaatgtgggactaactctaatacaccgtcctcacgtttggacttggaaagtgtgggtataacgaacgacctttaagaaaccacagggccgaacgtgacatttgaaagaagcccacaaggccaaatatcgcgaaatttgtgggtgtacacatcgggataattgtggattttgaaataggtcaaagaccccaacactggaaattggcacacattggccgaaaggtcccaaatggaggttaaaggggagacagcgaaagtatctgtttggaccggcggcactttagctaacaacggatcacaaacggatttttggaccggtggcaatttgggctcacaacggatcacaaatggctatgataccatgttaagaatcatggggttccatctcaaaaccaattggcaatgagtggagtagcccatgttcgtatatatggctcaattctctaccatttattccatgtgggacaatgtccacaatattccccctcaagatgatgactattttttgctcatcaatcttgaaccgtattagagtggacatggtcactatctgtataggtgcggatcgg

SEQ ID NO: 397639 - DNA, 802 bp, Cannabis indica
gctgagagaaaatcatcatgggggaagtaacgagctttataaatcctggatacaagagagtctggataacacaacaatctccaaccttgcttagctagcatagctaagttaaaatcatggagaaggcgaaagcctaaaccaccttcatcctttgaacgagagagacggtcccagttcatccaaataataccatttcctttgctacttgtagttttccaccaaaaacgagccattaatttttcaatttcatcgcaagtgcccagagggatgaggaagacactcatagcataagtggggagagattggaccacagttttcaagaggatttccttgcccgcatttgacaacaacttaccagtccagctgttaattcgattcaaaactttgttcttgagaaagcctagaatagccttcttgttcctcccaattatattagggaggcccaaatacaggctgttttcagaggcttcgggcatgtgaagcagcgaacatatattgtgacgaagttgctcattcacattaggactgaagaaaactgatgacttggacagattaatttgttgacccgatgcagtttcaaattgacgaagcaaggacaagacactaccggcagccccagcattggcttgacaaaaaacataactatcatcagcgaacaacagatgagagaccaagtgtaaagcccgcttagctaattcggaaattatcagttaattgggattaattatgaaattatttatagctatttaaataatttatggtactgttatttatggaattcagatatgcatgattatgtcat

SEQ ID NO: 397640 - DNA, 841 bp, Cannabis indica
aaaaatattttaaatttttatttcgagtaaaatatagaatcttttaaattagtaaaaaaaatatgtaatttttaaaggaaatttataggtctttaagttgagtggctctaaggacaaacctaacttacttatattcagagaagggtcgtcttaaggtgatgagaggcctaggacaaaatttgaaacgaggccttttattttaataaaaattaaaaataaattttaattaaattttgacataatattaattttaattcttttatctctatgtaataaatatttttttacaacgtaagctaactcgatcaaagtaatatttaattactaagaacatctatattgaagtgctatatattttagcacatttgaaaaaaaataatgtgtttaaattatatatatttttaaaaaaatagataataaatataaattttatttattattaatattttaaaattaaaagtacagtaatatatattttttttatacaattacaaatatttaagttataatattattatttatcacaaataattaaaagtataaaaagtggtgagggatggatcaaacttgaacctgaagtccaataaaagctccacttaccatttgtgctgcatgtgttttcatgtaatttgttgagttaaatatttatatattatacatttttatatgaatatatattaattttaattttttcggtgcctccaaaattgtggggcctagggccgaggccccggctgccccaccctctggccgaccctgacatcttatttttgagtggattgcattgcaacagggaaatttgattttctatacttaaaaaaccttaatattttattcttaa

SEQ ID NO: 397641 - DNA, 576 bp, Cannabis indica
aatatgacacattttataatatctctaaaatacttccatttacatcacctccctctctctcttcttctctcttttatttcaccacattgtcaagccatcgggcccatcaggctataccaaattctatttttttacacaggcatcgggtcccatcgggcccaccatcggacccatcgggccatatcaaattctatttcttttacacaagcatcgggcacactatcgggcccatcggaccatgtcaaattctattttttttacacaggaatcgggccccatcgaacccatcgggcctttgtcttccttaattttcctgtgataccatcggaccggtgtcgggcctacatcgggcccgacaaaatcaaaccccaaacccaaattttttccaaatcacatccgacaaaaattaaaaaaaaaaaagaatctgaaggttttccttcgacatctccgttcaaagctcggtggtagagggttggagtcgcgtctcacggtggtcagtggtctggggtaggcggtgattcggtgctcgggtggtggtgattttgggtgatttggtgagggtcagatgatgagaga

SEQ ID NO: 397642 - DNA, 664 bp, Cannabis indica
gataaggggattacttgcttgctggacgactgctaagaacaccatatctcttccttcatcttttttctaagtcctccatatgatgtcgacaccaagtctctacaactcaaacaccatttacatacacagtttccaagaatagggaccattccattttcttacttttattggttcattatttcaagaaccttacaaccaccatctttatcagatttgtgaacattgagtctcccatgagccttgtgttcataagtcttgatacagattttacctaaaaatctgttgttgtattattgtcctgacactcttgagaatataactctggtgtgttagatctaattaataaaagagtaatttgcagcataaatacctaagtttaactcccagttgcaaataaatacctaagtttaactcccaattgcaaataaatacctaagtttaagttttagcggtaataatacctaaattataattttggaacttctgtaggtacctaattaaataaattaccatgtggcaatccctgattggtccaagtcattaaatttttattatttaaaaaaaattagctcaaatataccaataagaaaatgacacatagatataatggcttaacatttaacagttaagtacctacagagtttcagaaatataacttagatat

SEQ ID NO: 397643 - DNA, 638 bp, Cannabis indica
atatgccctcgttgtttgcagtttgaacactggttggtttgtggcgttttcttcaatttagttgcacctgctggaggttcatccctttctctgttccttgatttttttggcctcccaggcaatatagtttcaggtggaggaaggattggacttttccctttgttctcccattcatcaggactaggcattggtgcaataccctttgcatagatagctttgaaggcttccttcttgtagcaaggatccacaaattggtattcatcaagattagaaaaccatatacaagctatgccatgaccacatggtatacctgttagatcaaatgatctacatgtacatgttcttgtctccaaatcaacagataatacttggcctgttatgtaagtaacttgaaatgatccaccaattgactttgtgcaaatgcattgttgtgctacctttttgttcttctcaatgatatcaaagatcctctttccaacagaaaaattccatttagagacactatctctttgcttgcacatcctttccatcaaccagaaacgtattgactctaaaagagtgattatcattttgtctctgctatctaagattgctgaattgaagctctcacacagattgttaaggagcatatcacactt

SEQ ID NO: 397644 - DNA, 539 bp, Cannabis indica
gtaacatgcctgccaagacaataaaagaggctagacgaagccatttggagaacactctttttagcttttattttctttatcaagattgagcaatgttattagttttttaattgttaagtgccatttcaagagcacaatatttaattttttttagacaattggtcgtttattttttaataaatgtttgcactttttgtaaaaatatttcttttataatgttacgtcctcacccaaacaaattacaaaagtaactcaatacttttataacttgggggcatatatggtatagtccataactatactccaccactccacaagataaatctcaaagtcattgccgacatgtcactttacgagcatgggattttaaaattttttaccatgaatattttttcaaaatgtcatctcagacaggggccaaagtcggtatatcaacgagataaaaataaatctcaatgtcattactaacacgccactttaagagaatggaattttaaaaaaaaaatgccatgaatattttttcaatatttcatctcgga

SEQ ID NO: 397645 - DNA, 1911 bp, Cannabis indica
ctccaaccagtcacggttctagttgggatcaattcatcgttcttattagccaccaccgtgactcctcctttcttaggcgcacattgaacatggctaatccatgaactatttgaaatcgggtacacaataccataatctagccactttatcacttcttttcaaaccacttccttcatgacaggattcaacctttgttgatgctcaatggagttactacagccagcttctaagagtatcttgtgcgtgcaaatcatcggactaatgccttttatgtctgccatagtccacccaattgctcttttatgtttcttcaacacttctagcaacaaaccttcaccttcagcctctaaccacgctaaaataattactaacagcgtttcattctcccccaaataggcgtattttaagtgacttggcaaaggtttcagctctagctttggtggttcttggatggaaggttttgcaggcttgaaattgctttccttcaactctaaagactcaaaaggtctcttgaatttagggaaaggctgcattggctctacccatgaaacctagatttcttcatcgtcgctcaaagcttcaagctcttcaagagaacttatcaacctttcatctttctacacttccttgtgaaatctttcagccacaatagaatcaattacactcaaacgggagcattcttcgatctcatccagaaatctcatagcattgaacacattaaaagtgactttttgatcattcactctcatagcgagttccccattttgcacatcaatcaaggttcttccggtagcaaggaatgaccgccccaaaatagtaggaacttctctatcggcctcataatcaaggataatgaaatcggctggaaaaatgaacttatccacttgcaccaacacatcttcaattttcccttccaaatgagccatggaacgatccgctaattgcaaagtgacggtaggtggccttgcttctccaattcccaacttccaaaaaatagacctaggcatgagattaatactagctcccaaatcacaaagagctcttccaacatctcgacttccaataaaaaattggaattgtaaagctgcccaaatctttcaatttgggtagaattttactcttcaacatagcaatacatccctctgtcaaagcaactgtttcaaactcgccaagcatccttttctttgtaaaaatatcctttaaaaactttacataggttggcatttgctccaaagcttccactaatggtacattgatgtggagatgctttagaacatcaagaaatctttggaatcgaccatcatcttgctgcttcttgaatcgttgaggaaatggtggaggtggcttttgcaaaggcttttccgcagcagaatgctgacatgatgctgtaacatctaggggaattttagcagctgaaattgttggtttttttttcgtttccccctccttttggattgaagagggctccttactgccttttgttgtagtcacatttaactccagaatttgtccacttctcaaggttaccgatttacaatgctctttgtcatctcttctttggtttttgatgtcactaggcgaagggccttgtggtctattgttcaaatcattagccaattgccccaattgaatttcaagattccgaagagaggctgcctacaaaaaaacccattttcgccgactagttttttggtcattaaaactcattaattagtcacccaaaattttttgcgactaattatttttagtcaccatttagtcgttgaaagtcgatcgtagaagagatttagtgactaatatatttagtcacaaaatatattaaagttaatcaccataagattgatgtattaatcacatgaataccaatatgcactttcaacaaccaaaaaagtaaactttaacaactaaaat

SEQ ID NO: 397646 - DNA, 551 bp, Cannabis indica
tttcaatgggatgacggcatattagatttaattcaaggggataatgcccaatacttggacagttggaagaataaggagagaatatatatggccctcttctttgatagtgcaaagcattaggtgacattagaggcagaccttgatcgttggacgttgagcatatttgactctagccttggatcgatttctccaaaggaattgaagagtcacgtgacattctgggaagagatattcccaactttgatgctacagtctagcctattcgagaatcatgaaatgatcgtcatgcctcaactgaccgtctcagagagccaggttagaaattttagttcaaaagtcatcgacgggagcattgtatgacagacgaaatcaaggtaacttaattacaattgattttttattatttaacttgaatttaaattgcatacttttatttatttactttttattgtctcatacaacggtgattgtgggatgtatgtgatactggatcttccgtttgataatgtaaatgatgacaatatgaagaaatttagagagcggtggtgtgt

SEQ ID NO: 397647 - DNA, 533 bp, Cannabis indica
gtaattgaaagttttcataaaccttgtgatgcatatgcttcggggttcggtaccttgctaccttcgggagaccttatagtgtccacaaggtggattcgatccttgtctttctggattgacagttgtgaattaaccgccaatctaatagaattgcaactgtcttattttgatgtaatcctgggaatggattttccatccaagtatggggcaatgatcgactgcaaacggaagatggtggtgtttgagcccgatagtgctaacccagcagtgtttgtgggtaaatttcagggggcacgtataccaagaataacacttttgaaagctaaggtcctgatgagcagaggttgtctgggattcatcttcactgtagtggataccagccgacctgtgacatcttgacttgaaaatacaagattagtgtgcgagttctttaacgtctttccaaaacatttagtgggatcgccacctacctgggagattgaatttgtaattgagttggttccgggagcagaactagtatcaaaagcaccgta

SEQ ID NO: 397648 - DNA, 532 bp, Cannabis indica
atagtgaaaagccaactaatgctaagctaattgaaatctaagaagctaataccttgtagtttcagcaagactttcaaaaaattgtgcaaagcacacaaaaatctttacaaaagttagagaatcttgcagagctaatggaaacatcaatgtatgggtatgaaactcaaagttcaaatactttacctggacaaatagaaagtaactaaatgaagaatgtcaaggccataaaccttcaaagtggtacacaacttgaattaccaccacaccaagaagttaatgatttgattccaactaaaggagtcaacaatttatcccttgaaggattatctccaccaatggttgagtctcctactttagttgctccactatcacagaaaaaagccatacaaatcaattgtaccaacttatgtcatcctccaccttttccaagaaatataagaaagaggagcccatctaggcgatttatgaaactcttccaaaagttgaggtaaaaattccatgtcttgagaaaatcaaagaagagcctcattgt

SEQ ID NO: 397649 - DNA, 989 bp, Cannabis indica
tatattattttatataaatataagttattagtgtggatattttataatatttattaaattatattttataatgctgaataatttatttaaccaatagtgatatgaggttgacactgtcattaaattttagctaggggtgagcaaaaaattcaagaaaccgaccaaaccgagtacaccgactgtccgaacaccgaaaaaaccaacaccgaaaaaaccaaaaaccgaaaaaaccactttcgcttaaaaccacctttgcacggttgattttagtgttaatggcaaaccgaccaattaaaccgaaaacttaccgaacatatgtattatacactatatgttgcccctattttcgcccaaaatacgtggaccagtatgacgacgacacgtggatctaagaggcgcaactcttagatcaattgactaagttttttagcttcaagagtgtcataaagaatataccctccaagaggaaaggtaaaagctccacgtactcccggagaccaaaggaacgccaagggacctccggggggaacatgacattatttgaacagtaacctcgcatttaatgccgcatgggagaaaacgtattggaactgccataagcaataagtctgacggtgtaacccctcttatgcagctattacgctatgattaataaggctagtgacggctactgtatgagggatcacatcaatcaagaagtgataaaaggctttatccacctaaccccaaagatacctaaggtataggtcatatatttcctatgttgtatctgctgggaatatgtgcccctactgaaactacacagaaagacaagtgctccagttctagggatcactccagaaaaacactataaataccccccaaataaactgagataggggttgagaattctgggtttataagaattaaagagagcaactaagagagaaaactaccaaggacattctctgtaataaatactctcataaataagaaagactcgtggacta

SEQ ID NO: 397650 - DNA, 592 bp, Cannabis indica
agtttatgtggttaagtgtcactgatcatagagattaggtagttttgctgctaatatctcttactgtattaactttgaagttttattttcttgtatacacatgtgtacacagtggttatttatttagtatttaacaatgatatttaactgatgcttcaaatttataaaaaaataaataaataaacttaaggagattttgccaaaaagaaaaaaataaaaatattaagtgtataaaaaaataaaatataaggggttaagtgtataaaaactaaaatataaaagagttttaccgcaattactctaatgaaaaactaaatttataaaaatttaattttgtttaaacaaccacattattattttgtttgttatctatgacaaaatttgacagaaatattaatttataacactgtaaatagtttgtggagattattttcaataagctaaaaaattcataaagcacaataatacataatttatagttaagagacaaaaatagtaaataatctaaaataaatattaattaaaaataaaagaagaattaccctatatactattttcttaactttttatttaaatttacggtttgggtttc

SEQ ID NO: 397651 - DNA, 1066 bp, Cannabis indica
gggtccaagtccctcatctggctttggatccttagtacatgtctgggtccaggtttaggtctggggcccaggtcccccatctaggttcggatccttggtccaggtctaggtccaaattcatattcgggtttggatctcgagttttggtgcgagtctaggtcctagtacgagttcaagtttgagtttgggtctgggtgttggtcgaagtccaagtccctgttcgggtacgggtcggggtcccgatctgagtcctagtcaatgtctaggtccaagaccaggttctggtctgggtttgggtccgggttcaggtccttagtttgggtctcggttcgggtctcaattcgggtcttggtctggcttctaggttctgatctcgatatgggtatgggtctaggcgcgtgtccaggttagggtttagggatttaggtttagtgtttatggatttagggcttagggtttaggggtaagtgtaaagattttaggatttaaggtttaaggtttagtgtttagggtcacagggtacgatttaaggttcaggtgtgggtctgggtttgagtccatgtttgggtttaggtctgtattcgggttcaggtctgagtcttggtcacaaatccaaacaccaccacatgtcgcgtctagttcgagttctagtacgggtacgagttttggtctgggtctgggttcgggtcaaggtccaattcccaaatttaaacaccgactatggggtcggatccaagcctctggtcttggtcctgggtcccaggtccaaatccagatcctggtcaagatctagctcatgtcttgggtcgcagtttgggtctcaaaccaaggtttaggtctaggtttaggtcttgggtcctgggtcatgggtccgggtccctaattcatgttaaggtcttaggtccttgtctgggttagggtcccagtcccagtgcaggtcccggtccgtgtttggtactggtccttgtctcgggtcttggcctggtctcagccttggtcacggttccattctcaggtcctaggtccgagtatcaggtcaaaggtcccactcccggtcccggttcca

SEQ ID NO: 397652 - DNA, 735 bp, Cannabis indica
acaagtttgaaactaatttgtgttttacgtaattaaactttaaattttatttcttcttttgttattttaggaaactagtttcactttgtaaaattttaaactagctgataagtgaaattgatttctgataatttaattttctaagctatttgttgaaagaaataatgtgtaatatttttttttactaactcaattttgtgtttcaattttttttattgctcagttgttttatgtctatttaattttttacgtaattggtttctctatttaaatttttaattggttgttaatgtaactgatttttttgtgttagaattttaattatttattcaatgtaactggtttctttttattcgatattcaattggttgtataacgtatgtaaaaaaatggttgtttaatgtaactagcttctttgtgtcaaaaattttatctggttagttaatgcaagttgtttaaatgatttaagtattcccttatggtgatatgcttttttttttaattaattagtttttctgctttaatatatcttttattattttaagtttcttatatttttgttttaatgattaattaattgtattaagtaactggtttctatattttgttttaattttagttatttaggtaattggtttatgtgagttaatttttaatatagttatttcacgtaactagtttttctatattaaatttttgctaagttgtttaatgtaacgagtttttgttatttag

SEQ ID NO: 397653 - DNA, 478 bp, Cannabis indica
tcaacagctccagggaaggctcgatgtcagctccggctagctgctcattcacctcagggaccaaccgattcatgtagttggtgagcatctccttacctcttttggtctccggatgcagtgatggaggttggtaggagcctgcatctgctcagatccgcccttccactgttcaggcctgtccgagctccctcctcgagagaccttgaacttagcagttttcagagcagaagggtccacaacggtttgctcctcgaacagatcgatatcagcttcaaccggtgccttctctctggacgacgttgtctaactgcccctagacttcttggatggaggagatgagcttcagcttcctcccactctcttcttcaaagcttcgaccatcttctgagacatgtctgcacgaaataaaagcaacatggttataaaaaagaccttagaagtaatgaaaagaataaataatcaaagaagattaaaaaca

SEQ ID NO: 397654 - DNA, 1188 bp, Cannabis indica
tgagatttataaatagttatctattttgtaatatttttttactcaaagtatttcttttttttttctaattttttatttaagatttttttaaccttttcattaatataaactaaattcgtaagtgagtaattaaaatatataatatatataaattaattttattataattatataggtaacttgttataaacaaaattcgactagcacttcagagtagaacacgtgtcaacctaagagaatacgaatccataaataaaatgataattatattagagatatcaaaatggaataactcattaaatacagagctgatagagtatatctataactcgttgactgaaaagtcttgagcgagacacggatgtacgaactatttcctcatatattgacgagaaattatttcttatgtgaagacacgatcataaggacggagtcaataatgcaaagcgaggcatcaacctcactacgcatgaagagacatcatgattgtcaaaatacttagcgtataatattcattatacaaactaagcataatagtttcatgaatctgagcaacggatagcgaggcatccatctcgctataggaagacatactcatggtacctttactaatcagcttcagacatctttcaatgagatccactactccgtcgagtcagctctctcagatagaacctgacattcaaatggtgttgactgctgaagttcaccttgtcaccaagaattgcgattgtcagatggagtgttatgccttcaatagccgaaacgacagtatttatattatcaacctcgaaaagacatgggaaacgcttcagctcgctgttagggttattgttgctatcccagcgcggtaactctatgagatacaatttggagcgtgtttattgacctggtaatagccgataaatcacaggtgtgtgattttcaaataataaccgcatttaatttacgtgggacacaatcaaatcccacaatttcaagggattattgttgtgggaaatcaatctgattgtaattaatttccctcctttgtaactataaataggggcaggatacacttaaaaagggacaaaaaatcttttagagaaagagacctagtgttgtatcaaaaatctaataagatagactcatggactatgcagaattttaacttcaaaaccacgtaaaaaaagctttgtgttatttctt

SEQ ID NO: 397655 - DNA, 1003 bp, Cannabis indica
caaacaaagcaaccaactcccctgagttaaacacaactcctcctccagagtagttgccaacaatgtatataaacacttctccctctttttgtctattaaagaagccaataacaaaagtaaagcaacttctcccctattagaagatcattcacactcaagaaaacaagaagaatgagagagtgagaaagtgaagaaagtggttgaggatattttcaagggaagagagatgaggatagttagatataaatagcaaatagaaatcaatacccacaaaatcttaaaaaaagaagaaaaagaaacctttaccttcttatcttgagcaccacatgtggataaaaaaggaaacacaaagatttttcaatttttggtcaaaggttaccaaagatgggaaaagaaaaaaccaacttaaccccacaaaatctgaaaaaataagaaacaatacactaacccacaatcaatgccttattcgaaaataccaccaaaaaagaaaccaacaaaatgattattttaaaaacacaagtttcctaaaaatacacaaataaaaataatgaaatgaaacacaataaaatgccataaacacatgtttccataaaagaaaacattaaagaaaaactgctcaaaaatcgaaagatatgccccccttgatcacaaatttgacttatgctaattagattagctttcagtccttcaacaagcagaacattttctaattttggtaatccaacaacattgagggtaccttttccaagaatagtgtcaatcataccattaccaaaggttacaacaccacatttcaaagatttgaaactagtgagtaaactagcatcacctgtcatatgctttgaacatccactatcaaaataatatacaattgattcttgagtggagcagggtttgtttggcttggagtatacatctgaaagagttgtgaatttcattcaattttactaatttagtgattatttatgtactaaaccatgctccccagactttgatatctacc

SEQ ID NO: 397656 - DNA, 848 bp, Cannabis indica
aaaaaattgtagatcctatcgaggatgtcgaagaagtgccagatgcgaccttgaccctaccaaggtcctctagctgggaaagagcatagagccggaggaaaaagaaaaaataattaaagcactaagggcagccacagatgtttttgcgtggtgccaaggagacatgaccggcataagtccccatgtcataaccaatgtcctcaacgttaacccggatatgccaccagttcagcagaagtgacgtcccctgacctagtgaaggcagaagccctagagaaagaggtggacaaactactaactagtggcatgatccgagatgtgtattatccagaatggctggccaatctagtgttggtgcctaaaccaaatgggacatggcgggtatctatagattttacacagctaaacaaggcctgcccaaaagactacttccccctaccgcggatcgaccaaatggtggacgccacctccagattcaagctattgtcattcatggatgcctatgccggctacaacaagatcaagatgcacattgcagatcaagaatgcactagcttcatgaccgataagggggtatgctgctacctggtcatgccttttggactaaaaaacgctggggcaacctataaacggatggttaatcggatgtttaaaggccttctaggacgaaacatggaggtgtacgtggacgacatgttggtcaagtaaaaggcatgtgcaagccatgcagatgacctcgaggaatgctttgaagtggttcggagatacggaatgaaacttaacccgaagaagtgcacttttggggttaaattaggaaagtttcttggatttattgtcagctagcgggg

SEQ ID NO: 397657 - DNA, 733 bp, Cannabis indica
cgctgtcacttgcggtgtttacgtgccctgtgtcacagagtatgtagtcaagtaagctttggtgtaccggagtcactatcctcctaacgaactcactgaatccagttcgacctagggttgtacggagtgacactcaaccattcgtagtactgacgctgtcacttgcggtgtttacgggccctgtgacacagagtatgtagtcaagttagctttggtgtaccggagtcactatcctcctaacaaactcactgaatccagttcgagctagggttgtacggcgcgacagtcaaccattcgtagtactgacgttgtcactcgcggtgtttacatgcgtggtgacacagtatgtagtgaagtttgctgttgggtaccggagtcactcctcttctaacgaactcaccgaatcaagttcgacctagggttgtacagagtgacaccgatgcagtatggcagaagtcgcactatgaatttaggttgtttgggctgagtgtgtactcagttcatcatgaagcgtaccggattcactattctcctgattttattactagagtcacttcttgtcttaaactactattgtattcataacattaaacagttttgttattaaatatctatatttatatagtattcaaaaaattattgtaatcttgattccaacgattgatacgttaatgtaatcttacaaaaattattgcaatatttactccaacgaataatattttaatgaaatatt

SEQ ID NO: 397658 - DNA, 514 bp, Cannabis indica
agtatatatatatatatatatatatatatatatgagcattttgtttttttctttctcagtccatgtcgtaaactttaacataagtatatatagatcagcataattagcttcttatatttgaggaaattgtttgtttctacggccgattgatcgtgcaaactctcataattagctcattagtattacattatatcaactatcatctacttatctatgtactctaccttaatcactacagaattatataaacaggtggtgaacatgatgctttcttaattggtagagaaattttgtatattatatgtagttaatatattcgtatagctacaggttccgtttttagttattggctgatattgaaactaaagtaattataacgccaacagtaaaaaaaaaaaaaaaaaaaaaactctgaagttttaaaaatatttgctacttatatgatcttacaaataaatttgtaaggtagatcttataattaataccgcatatatatattagtctatttttattg

SEQ ID NO: 397659 - DNA, 1013 bp, Cannabis indica
attagggttccaaagccaggcgcgatatacagtgcaaaaacaaactttatcgcactgttctacgatctctacttctttctcagtaagtttttcagcaaccttctcctcaaacacatcaacttggactttgatggtcttctcggcctcttcttttacctctcagcttcattttttgccttcttgacttccttctttgccttctcagcttcctccttcactttctcggcttcttgctttaggcggatattctcctattgggtgttgtctcattgctcactcacaaccttgcaatgagataacaatttgtgagcctcgccctccaaatactcgagccactcagagagttgtagattgaaagcaaaagaagcaaaagaagcctggagaattacgaataggtaaatataaaagaggtataaatgaataacataattataataacaaagccaacgtaccatgaagtgacagtccaagctccttgaaagcatctcttttggattcttaagattgagaaaatcccaatcaggggaaagaagagtttgaagtttgcgccaacaggtgactccatatgcttgggaaaatttagatccaacctcccctgctgcgacaaacaaggtctcaatggccttgctcgaagaggcggtagcgagagttgcctcaaggtgaggagcattgacgtcggagacaattggaggaggaacttgttcttggagctcgttgtcagagactgttgggttttgtgccctaaataaaatccattacaatctgattagttatcaatttaaaattttgaagtgatttatgattacatgtatgttacatgtttatggtttaatatatatatttaatatatgcacaaaattagttaaatccagaacatatagtcattcacaattacaacattgtcaatacagtgaaatgtgattgtgattatatgattcaaaagacttagtccctgttcatccgtattttggatttacactgatgtgataatcagcgataaattatacttacac

SEQ ID NO: 397660 - DNA, 813 bp, Cannabis indica
ttttaatctttaaccaagttgtactacataaattacactatacatgagaaaattataagagtttacctttttatggcttaaataaataatgttaaggggttatgagttttttttttgtttttttttttttacatttatatgggctttttttatgctatgttcttataaaaaaagatggaaatcccatatttgtaaacaataataagttttgccagaaaagtcgccggttgctaacgtcggaaaaataccagaatagttagtgtcactggaaaagttaccggaaaagtcaccgaaaaagccactgtcgtcagaaaagtcaacctcaccggaatcccaacatcgacgaaaaagtcattgtcgccggaaaagtcaccgttgccggaaaaaaccactgaaaaagtcaccagaggtagatgtctcaactataaacaaaaatagaaccagttctataatataatgaatgaaaataaataacaccaaataactcaaatcggttataattgaaataaaaccggttctgtaacatagtgaataataaataaataaaataaaataaatcaaactaattataattaaattagaaccgattctataacaatgttataatgaataaaaataaataacacgaaataactcaaaccaattataactaaaatagaaccggttatataacataatgaatgagtatttttgaggtagatatggtatgtgtgtaactattttgtgggttgaagcatgttgaatgaatatttttgtttgaactattttatttaactagtttttgtgtgtcagtttttatcatagttgctttac

SEQ ID NO: 397661 - DNA, 609 bp, Cannabis indica
ttccccactgcatacaatgttattttaggacgactgatcctagtcaattttagagtagtaacttccacccgacatttatgtatgaagttttcaagtgataatggaagcatcaaagcagtaaaagatgatcagagaagtgccatgaaatgttacaatgtcttagccaagtcaatcttcatggtgagagaagaaatttaagaagaaggtcccaacgaatctgttcaaccagcacaagagataatatgggaagaagacgagttagatcctcgagtggggggtagaaagaatgattgaaccattggaggaagttgaaaaaatatgcattaatgaagcaaatcctaccaaagtcatcaaagtaggacaaaattcacctctagcaatcaaagagcaaattgtgtccacggtgaaaacgaatcaagatgtattggtgtggagtcattctaacatgactaggattaatccaaaagaaatcctccataacaaaatattgaggcataaatatgaaaagaactggttccataccaaaataaataaacacaaataataacacataataactcaaatataatataaaaaaaacaattatatttatcaactaattaaaaattt

SEQ ID NO: 397662 - DNA, 687 bp, Cannabis indica
cttccagtccagagagcattcttcatatctgaatctccctgaaggactgtaggttcatttatccaaattttctcatgcaatgatcccacttggttatcagccatactatgctctgctggtaataccgaattgagaatgcctggcatatgaggtaaagatagtacaggaaacctttgttgtttcaacctctgaatctcctcatcgtgtcgttgaatcatagcttccatttctgcgaatctttgctccaactcccacggagcctgtgacgaacgaccatcactcccatcagaagccatccaaaggctttcaccttggttgcggggagaactcaaactccattctctccaaccgttactagccctgaccacactatccagactccccatattgcaccaggtgtccatactataggacaaacctgccaattagtaagtcagtctggtcaggcaacgaccccattacaaactttctaccgcacttatggattctaaggcaacgcactttaaaataattaattaaaatctaatatgcttcctaacatgctctcacattcacaattatttaaaatactaaacaagtacgggcttactgaaccgtgaaccgagctttctctgatgaagattgtacatgtcatagcaagcttcggtagacaaacctggcggctctgataccaaaattgtaacgccc

SEQ ID NO: 397663 - DNA, 665 bp, Cannabis indica
tattctattaccttagaaaaaaaaagggaagtattcttctgctattactgtgaattttgctacaacagattgccttttttgatgattctattcaatctttataccataaattctgcaaatccaagtcaatgaaattaaagatggctcacatccatactgctcacccaatagcgcattatatcataggcttgcaaattccttattctaagccttggtatgaagtcgaccatgtcctattcattataaatcttaggaaagaaagtcattgagtttttggtcgtcttgatttgaatgagggaattatatttccttataattcttttaggactgccaaaaagaattctgcagcaaaaaaatgcaatgaaggcttattttgttcttctccctttgttttttgctgtccttggattttggaagaataggtctcacgttcctgatttaggttctgactcgaaagctcctctaagagttgtggagatttctagtcttctatctcaggagaaaaagtgagttgttgttattgagttttctttatgttgtataataggtgtttaactgttttgtttccttttttgaaaatagtgattgcggagcatttgtggctacttttgcgaagttcttcattcacgggaaagatgtccttgctgactttaacattgaagttt

SEQ ID NO: 397664 - DNA, 612 bp, Cannabis indica
  modified_base (172)..(172): a, c, t, g, unknown or other
cacccccattattgttgacgaggaaggagataagatcaagaaatccagtgaatggacgactgatgaaatggaatgagaaaatttcaattccaaagcgttgcatgctctcttcaatgctgtctctacaaaccagctaaaagtaatttcaaatgtgaagttgccaaagatgctngggaatctttagcaaaatcctttgagaatctgtcaatcgaggaagatgaatctatctcagaatttcatgttaagctgtgtgatatttctaatgaatcctatgcactcggtaagacctactctaacaagaaactggtgagaaagctacttggagttcttcctaagagattcacgtccaaagtgacgtctatcgaaaaaagccaggatattgaagctcttgatctagatgaattgattgggtctctccaaaattatgagttaactctagagagatgggaaaaagggaagaaaacgaagagttctgagaaggagaaaactgaaatgggtgttgcgtttatccacaaggaagagaactccaaaaaagttgatctctctaattcttttacagattcaaatctggcccttctggcgaagaattatgctcgattcctaaagaagaac

SEQ ID NO: 397665 - DNA, 771 bp, Cannabis indica
aaaacatatatttattttaattggcataaaggtctattctcatgaactcttattaaaaagggaaaaaaaacattttgggtcgtaatcggagttcattgaacaaatgggcccatttacatttacatgctatatggtagagtagctaggccgaagttagggccttgaatcacgcctatgatttgatgagatagaaaaggccaagcccaatttgtcatttatagtctagaacaagacccgtgttaagaccttacctcaagcctaatgcctactgcctacaccctaggttaatttggaaagaagaataagatcatatcaatatattaaagggaaacttacaaaaatactgaaatatggattaatttttacaaaaacactgtcaaacagaaatcttttcaaaaatactatgtttttataaaacaccaatagaacacaaaacagattaactcaaaacaatagtagaaaaactaaaaaacaccagtagaacaccagtaaaagcttaagtatactgcagtatgaaacttataaaaaaacacagtaaaaaagtaaaaaatattgcctgacagtattttttgtagaaaatggcaaaagttagtatatcatgtaaatttccctatattaaaaggtgtaaatagtggcataagtactcaaagttttaagtttgtaagtggtataatctcaatgtttatttttagcagcataagtacccaatgtttgtaaaactgtaattttttttctgatttcgtcagtacagactctattattttcttaaac

SEQ ID NO: 397666 - DNA, 509 bp, Cannabis indica
atttaatttattaattttatattaaggcttaattttgtcaaccacaaaaatactaacttcataatcaactctcaactacaacaagcaacaacaataaaaaaatagtaatttctcaaataaatataattacttatattatagaataaataaaatttaaaaaaataacaaaaaaataattaattataataacaatatattattttaacatttcttagggcagacaagaataaataaaaaataaaaattataattataaaaagttgtacatatccatttgcctcttcatcaccacttggagttatagaaattgttaagatggggaatatttaatatttaatgacaacattacaaccaacagaggtaaatatttgtatttttaatttttttttcaaatccatttaagataaattcaattttattactttacgtaaattaatctaaactaaaaattatttctaactgttgaccgaggttttcggcaaccagtaaaataataagagtttagagag

SEQ ID NO: 397667 - DNA, 627 bp, Cannabis indica
aaaaatccgaagttgtgctcacgttgacggcgcatggcggaggcgagttcgacccagccaatcgacgacgagcccacccacgccgaacagacaccatgtcaaaggtatgttttcattttttttatttttttagaaagtttagatttattgtgtttgtgattttgtttagaattgtttgtgaaacctattatttgttagatctaagaaattttgggtggaatgggtggattcggatttgtgaaatttttttggggaagaagcagtccgatggggtcggtccgatggtccgatgggtccagtccgatggtccgatgttatggggtccgatggtttagtttctttatggtccgattttcatctacctatcggaccaatcgaacccatcagacccgatgcccttttttttaagggtttttttttctattttaggttaaaattactcaaaataaacatttataccatcttaaggaaaaataaacatttatacttttactaattacaaaaataatatttataaactttctttattacaaaaatacaatagagagataaataccaagtggaaaatgagagagtgagatacacatgtaaatagaataggagagtgagactcacacgcgagtgggg

SEQ ID NO: 397668 - DNA, 773 bp, Cannabis indica
ttgatgatgatcaaacggtgaaaattagctgatggtggtgatggccaatttttggtgcttggtgggtcccgctgcgggtaaccgaaagcttatttttgaaactctattgggggtgaattttgacaatgataacaccagaattacatttggggtgtgagagataactttatagagtatttaaatagcttcaaaatgcaagttgtaccgcatcaatcgaatcaatattgagtaaattatggccatttcattgaagacaattcaggtcccaacgcctaggttgacatctaacccccaggttgacatcccagcacccaggctaacatctgacgtcaacctagacgttgggtaagtaaaaaaaatgtccaaggaatgtcctttaagatgcctaagtgatattttgacatcatctagtttgtttttgtattctggcaaagttggtcaccagttttcggaaatattgttattctgcgaaaacgtaactcaaaattctaatttccgtgtaagtcactttgtcataaaagtgaaaatatgaagttgtgaatttgattgttctaacttcatggctctccgttattataaaaaactagacaagcagtcaaaacagaatcaaaattggataagcagaacccaatgcagtaggccatttgtaatgccctaaataattaggcacgctacccaaaatgtttatgaaaccctaatcccctaatcgggattactgatcaaaatagcgtagaatttaaacttttatattaaacagaatgaaaataaacttg

SEQ ID NO: 397669 - DNA, 578 bp, Cannabis indica
ggggattggacgactgaccattgttttcctgggaagcattcactgttgggtcatcctcggtttctccaaggggaatgacgctcggcgcctgctggcctacagtttgataggcttttcatattagcacagtggcttgccgactacgatctttgatttctgcatggtgagcccttaatgcctccatctctttgtccctccactcggcgaacaaacgcctctgttcgtcaaacgcgaggtttactgcagcacgtaattcctcctgatcgtgatgtcgggtattgttgtgaccctgcatgagtccaagcgtagcacggaggttttgcaattcagttgcatctccgatggtcgtctgggcgttgatgctttgtggaacagccatgttatgaacgtcctgggtgtgtgcgaacattgtttctggtctcttgcacaccaggcgcagtttcagcaataggagttgttccatcattcaccacgcttcccatctttccaggattgacagcgggtggaaccctcgaactccctgagtcccgcaacatcagatctagcctctgtgagtttgctgggtcggacaagcctct

SEQ ID NO: 397670 - DNA, 620 bp, Cannabis indica
ggtttgggttgggattccggtccagctcccatttcgagtctaggtcttatttggactccgggtcctggtctggttacggttcttgataaaggtccaatttcagttattattccaagtccaagtgttagttccaatcccggtgaactttcagttttggttccaattttttgtcacagggtacgggttctggttcacttttgggtttgggactgggttcatgtccgagtgtgggttcggttccttgttagggtttgggtgcagggctgggtcccaaatccagacaacgactacgggttttgtccaagccctgagtccagatccagatcccaatcaaaggtcgtcatctggttccatttcttgtggcacgagctgggtcctcggttcaagttcgggtctgggttgggtactaggtcccggtcctagttctgtttcccaggtccctatcttgattctgggtccaggtccgggttattgtgtgggtttgggtccctagtctaggttcgggttcgattcctagtctcggttcgggtttaggtctctgtctgggttttgatctgggttcgggtttgggtttaggtcttggtcctggtcctagtcctagttcggttctagttccattt

SEQ ID NO: 397671 - DNA, 1199 bp, Cannabis indica
attactatttttgtgatatatttcttacgtaaaggtttattatatttagttaacgaaaatctgcgttaacagtttggtgctttcattgaaagcctaagtgataaaactcaaaaaaatccccccttacaaaccgaaatctatccatggctaatcacaattaaaacgatggaaaatgtcctgaggaaactacacatcaccctgggaaagagccaatgggttctcaaagaccccatacttctagaacaacacgttcaagaagaaattatggtggtgataatcaaaacccagaaggaaggaatgaagaaactaatacttctacaggatatgtacctagaagtgaggatacttaatatctaactaggtatgtaccattagtagaattagaaaatagacaactttggcaatgcttagccaaatctaaccgacaaaatgttgagttagatagagaggctgcagcggctaaagtgactatagggactaatactcagaatcaacctgatcctggggtaagaagaccacgaggtggacctcagggttcaagagccaagagacaagaagtgaatcaaggaaatccccaaaacacctaggaggagcaacttgggggtactagggatgttccagtggatgaacaacaaaataaccaagaataacatcgagaagttcctcaaagatctcaaggacttatgaatcaagggaatgaacgtaatggtgtaccagaggcttctcgcaggaatgaggacacaaggtagccccgaactagggaacaggaaatcccctgtaataacgagagaaatcctgggactcaacctaggataagtgggctaccactgagacaccctcaacgtccttctcgatccgagatggaaggtgtatacacgtacctaaatagaggacgtgtatctaatctctttcgaaggagaaggccagtacaagacgaggcaagttctagcttgagacactcaagatctcaagaacacagtcgatcaggaaggcaaacacgagaaggaaacaggcctcgatgttatgttgatcaagaaagaatgagcaatacacgaagctatcaatctgagagttactcaaagacgagatctgtgagcaattatgagcaaagacaacctgaccttcgtgaacatttgaaatgaagacaacccgatcttcgcgagcgactaaatcagaatgcacctgacttacgccatcaa

SEQ ID NO: 397672 - DNA, 1088 bp, Cannabis indica
aaacccgaagtccgagagaacagcttaagaccctgcaacaagtaaatgatactcttgaaatcaccattgcaaaataacaagacatcatccgcaaacataaggtgattcaaagccagatctttgcatctatggtgaaaagtgaagtcagttttctgcccaagtttcctcatgatccttgttaaatattccatacccagcacaaaaagcaaaggagacataggatcgccttgtcttagtcccctttttgcctcaaagtatccatgtagggatccattaatcatcaatgagaacctgggagatcggatgcatagcattacaagttgaatgaattgagcagggaagtgcaatccaaacaacatttcttcaataaaattccattcaatcgtgtcataggctttttgcaagtcaagcttaataacacaactaggctttgtcaacttccttccataatgacgaattagatcttggcatatcattacattgtgtgctatgaatctcccttgtacaaagcctccctgattacctgctatcaagtgtggaagtatattgttgagtcgcgagcaaattaatttggtggctgccttatatatcacattgcaacaagcgataggcctgtaatctctcactgtgttaggacattttaatttaggaacaagggttagaacaatgttgtttatttccttgagcagtttccctgttttaagtaagctaataattgcttcagctacttcagtacctataatgctccaatttttttgaaaaaatgaactcccaaaaccatcaggtcctggagccttgttaccaggaatagcaaatattacctccttaacttcctcttggttgtattctctcaaaaggaaatctgcttgctgctgggaaaggaaatccccttccctgagaacactctccttaacttcctttattaatgttaacgttgtttgagtttagtcattgcaattcaatgtgtaaataatggattaacaataaatgtgatcctcatgtaaccgattggacacctacttagtatataaaggggtgatccaccatgaaaatggacctacgaatcctttgctacagtggactaagca

SEQ ID NO: 397673 - DNA, 707 bp, Cannabis indica
tggatgtttttgacatgcctatctcaccctacgatgttgaactcgattgagaacccccattgtcgaacccaaacttgaaacccagtcatgtccctatcatcttctctcacggtctctctccaagtttagttttttttttaattttttttttttgcgatatttagcaatatatttgcaataataaacaaaatctgaggctaaggatgaaattaagtgataatttagcgatgcattctgatataaaactaaaaaatacaaagcacatcgcgaaatatcgctaatcatcgtaaaaacttaaatgtgatttagcgacatttagcgatatgcttagcgagattgcaatttagcgatatttagcgatttagtgatgtttaacaacatcgtgaaaactaaaaaaaaaaatgtaaaaaatgaacgatgggttgagaacttcggtgatgggtggaaatttggtagttttggggtggttgagctcagagctttgaggtagagacagggagacttagttagagtgagagagttagagagaggtttttttaaaaaaatgtaagagtatttttgggaagaaaagattttaaaagtatagataccctatttcttttaaaaaatatatatataaactttttaatttgccaaatagctaaaagacaagactgtacctcaacaggaatatcacccttgttgaacactcgatctggaatagaaca

SEQ ID NO: 397674 - DNA, 864 bp, Cannabis indica
gtttaaattgataaatgtttattgtgaaagagaaatagtgggtttaagttagggttaaggcaataagtgcgtaagtgtggacttggtgcctgattcgctggggttgttggttttaggactatttgaaaaagaatggaccctactaaatttctgaccacagggcgagcacgtagagtcgggtaatgaccaaatcaatccaccgggaccacctgcacctctgcagaatcggggggataatgcaagggttagtaatgctaatccacctgccgattggcaacaaatgttcctagaaatgcgaagctcgagtacaacaagtgttacaaccggcaccgaagctcgagtacaacaagtgttacaaccagctcctgttaaagtggcgagtaacccatgatttattctgccacatcaagatttagtgtttgaacgttttgtcaagttataacctccaacatttttgggaggtaccgatgtcatcaaggttgagcagtggatacgcattattacgcgcatcctaaataacatgggggtgacagggacaaaacgcttcccaaactctgaacggtcagccgtccaatccccggtcacaggttccacctgtggtcaaagcggtaggcagccagaccttatctggtaattcgtcaagaggggttattgttggaatatattttactaggatctagatttactaacaagtatgtttttaacatcctaatatgaatttctaaaatgatgaaaataaacacataaaaggtatgagaaaccttacagtggttgcagcggaattaaatgaatcctcccactcagatctctaacccttgtatcctttctgtagcaaagtatcaccaagatctgagcccgattctc

SEQ ID NO: 397675 - DNA, 543 bp, Cannabis indica
taataattactatctcttcaataaaaattataagacttatcaattctctattcttcttatcagtatttaagtcggtaagaaaataacatttcaaagagacaacgtaagttaaaatatatatatatatagagagaagtaaaaaaaatttagtaagtgaataaaaaatgattaattttttaaataatttaaaaaaaaaaagacaaaagccaaaatatgatgatagattttcaagttatctaattttttaagacatatcattttttaaatatcttaattttttttaaaaaaaaaaatcaaaagcacaaaaatatgataaccaaaaattttggagttataattttttttaaaaatcttaattaaaaataaaagtaaaaaaccaaaaacacgaacataaaaacacatcattcacgtgatgaaaaacaacaataagctaaaaaaagagttattgttttttaaatataataaaaaaaagaaaattttagagaaaataaataaaagagataattgcggcaaaagttccccaaaatttagagttgatgcaga

SEQ ID NO: 397676 - DNA, 697 bp, Cannabis indica
ccgtccaatccccagtcataggtttcacctatggaccaagtggtaggcgtccagaccctatccgataattctttaggtggagttatacctaataactccatccaaactaacaattttggccaacaaaccggcaacaccagtcaatcactgaggcaacctggtgtttcagtatttaactgattgggtacggcccatgatctcaagattgatttgaatagaaggagaggtctggacgaactatatgttcaaccagctgcttagtccggtatccgcatccaggacccaactctaagagatcctggcatgacacaggtcgaccaagaggttgaactagttcacccatctatgcaagcacagttagatgaattaaaaaatatgttccaaggcctggccgaccaaaaactcactgatcttgaactagatcaagcacgcggatcgccctttactctcgagatcaatgtcctggagctacccctcaagttcaaaatgtcgacctggaagatgtacacaggaaaggaggatcccttgtcacatcttaaatattttgaaatgcaaatggattggcaaggggtacgaggtgatgtgcggtgtagagtattctctgctacactttcaaaagccgcacaacagtggtcttttaagttaccaccaggaaggtttaattcatggaaagccttatcctcggagttccatgcac

SEQ ID NO: 397677 - DNA, 977 bp, Cannabis indica
gtggttggtgttttgatttgggagcaagagtcagacctgaacccaaacacaaacctagacccagaccaggacttgaacccagacccacacccgaaccttaaatcgtaccctgtgacccgaaattagaagcagaaccctaaacgctaaaccttaaaccctaaatcttaaattccttacacttccccaaaccttaaactctaaacaataaatccctaaacactaaaccaaaaaccctaaaccctaaaccttaacgtggagacgggcccagacccatgttggaataattttaccatgatctagatttaccaccatgtatgttgtttaacatcctaatttggatttctaaaacaatgtaaattaacacatataaagtttgagaaaccttacaatgggtgcactgaaattaaatgagtcattccactcagatctctaacccttgtatcctttctgtagcagagtatcaccacgatctgagctcgattctccttcttgttgattggattcttcacagtcttacatactatgattgaggatcaacttgatgtgtgtgggcacttactctatcactcaaggtatgaaaatatgaagagaagaagaagaagagaatgtggttcaaaattaatagaaaagaaggctcaggaaaaatttgactaaaggtgaattttcatcatcttttgatgtgagccatcactatctatttataggtaaccacctagttttaggttaagatttataaggcattaaaataatgaagaaattaaatggaaattcctttcctagtggtcggcaataggatgtttgggccctactttgaatttttccattttatcataatctttccttattttctcagaaatgccatttttccaattctaaccacttaaatgccaaaactatttatttaataattaaaataactatcaaataatattgtcatttaatatatttattaattagacttaataaagtctcttaat

SEQ ID NO: 397678 - DNA, 604 bp, Cannabis indica
attaaacaatctttacgattatcgattaaacaatctatcagtatcagtattcaggtatatgttcttaagttttactataaatatattttcattaatctgctatgcacatttggtcggctaagaaatttacaaatgtatttaaccttacatagattcatcatcattatcgattattaatacgatgaaaaacatgtaactaatatataattattagttcttgatcgaataaatgtttattataatgtgtgtatattaattggtttatgtttttataatgtaataactatcaataattccaattagtattgaaaaaaaaactacatttattacagtatctttatatataaaatgtggctatctaacgtcaattgttggtttaacggtattttattttttattctgttaaacttaacagatgttaactcttacattaagttccaaataaataaataaatccctaaaatataaattaaacgttaaactctaacagattaaacactaagtgatcaattctataaaataaacactaaaaataataaattccttccaccgattacattatttcttattgatattttactttttttattgatatttttctaga

SEQ ID NO: 397679 - DNA, 937 bp, Cannabis indica
gatttggtttggggcgttatggacaaatgctaaaagaatcatagaaaaaatagaaactagaagacctcttgggttgaggaaccttcaacaacaagtccgccgatgccctacccctaagaacttctccgagtaagcagcataatataaaagggatttttataaaatattgaattttgggcaacagtttacaattttactaccacacagattttttttactaaagtactgtgtttttctaaaacaaccgtaaaataacaaaacaaaacaattaaaaataacagtggaacaactaaaaaataaccgtagaacagcagtgaaaacttaatacaatacacagtataaaaaatacacagtatttatgaaaaaaaaaaatatagtattttcaaaaaaaattctaccctacagtaaaaagattaaaaattttagtatgtggtataaaaaacctatataaaatccttttttttttgttttcaaggagacactattaatttattaaacaccccatttcaaaattaatgttccagtgcacggtatatatgtggttgatatatttttttttaatttaattatatttatatatatttatattatttgatttatttatgaaattaagaatttaattttgggaaattttagaggagatctttctaaaagtaatgtattgatgtattgctatctgcttttgcaccaaacaaacttttttagttcaatttttcttttcatggtcgtgtacattataattatttaagatatcttgtaaaaaattaaaaaaataaaaaataaaattaatatgcagaaaataaaattcaaactgtctgttgcacgtgtgacttttttatttagatggtgcattgtggtgtattttagttaattaatatgatatttaattttttaaaattttaatttaaaaataatataataataagaaattattttt

SEQ ID NO: 397680 - DNA, 918 bp, Cannabis indica
tgacagtctatttccacaagttaccagtgacctcttctgctcaaggaggcaaaaagaattgctatctgacgacattctctattgattgggcacccatttcatgtagggtactcgaactggaagagaatgtgaagacacctataccagttaaaagggctggaagaggaaaaggtgtgaaggaagtccctaacgtccctaagactgtgcaggccttgagaagcaaggcagcaaagggcttcaaaaagacgcaagctcgggcaatgaaaggtccgctgcaaaggttgtcaagatagaagggaggccaacaaagattggctcccccataacgatccaaaaggaatgggggccatgagtgtatcttgattggttccattcctattttcttgcccactatcgcctcagtgatggttatctccacaaaggaaactgaggcaacaccaacttctcaatctcggagaggtaggaaggcaacaaaaggcaggagggggacaaaaacttcaccctcaccaaaccctcttgaaataagggaattagtaggagacacaccgattaggcctccgattgtaatccctatcaattgccaaggtcaacagggggcatctgctgagattaatgaacaccctttattagatgaggggtgcaggatgcctttctccttcccaaggaaagctagaagtgacagtgtaagggttcccaaagcaaaccctaactcgttccgaaaacagcatggtgattgaatgttcctccaaggataccgaccaaaggatcacttcaactgttaagcctacttcctacacgggacctgtaactcgatcaagagctcgtgccatgcgtacaatttctgttcaggaatcagcgaacccatttgttcaaaaagttcaggaagaggggtgttactgttgggtattatgccctaaa

SEQ ID NO: 397681 - DNA, 682 bp, Cannabis indica
ttttttttaaaaaaaattaagttgttgttgtgtttatgaatctttcaccttttgaaataaatcaaaataaattattacagatatatgtaatggtccatggcatgtgatacacgagtacaacacatttcaacccacctaattataaactaatataaaaaacgtgggacatgtttaataaagggggcaaaaagccaactaaaaccataagcatgtgagatgcgctttcacacaaatgtgaacattctatggtgagttctatttacacgcgaaaaaatatcaatacaatactattttatattttattttcgataaagtataaatattttttattaaaatttattttataattacaatactattaaaaaaagatgaaattacacttattatgggattttaaaagtttttatgataaatatggtatatttaagtttgaccaatttatatcgtatttttttatttttaggtctttttatggtatttgatatgccatatatatgtaattaggtttttaaatcccatatttgatgtttttatttgtttaggaagtttatttgttattgatactggaaaagtcaccgtactttgctgccagtcccgaaaaagtcgccagagtagcggtcggtgccggaaaagtcgccggagttgctgtcggcgccggaaaatacgtcggaattggcattgt

SEQ ID NO: 397682 - DNA, 702 bp, Cannabis indica
ttatgtcagagagagaatgatttaggttattatatgtttagaaatctcagaaagtagaactttacggcctattagtgttttgtcggtcttatttgtaaagatgtaatggttaggtttttaattgttggcttgttacgtattagatacaagtccccaaagaatgtgaaccttcaacttataaccaacagtttcctttccttgttaaatcctcttttgttgaataaactactagcaaaaataaaagaggaacgatattaccgaatgaaaaattctaggttgagtcgtagactaggtcactctctttaagacgtttgcggcactacccaggagtgtggaagcagttagaatttaccgctcgtccccaggataaaacaacccagtcgtactatactggagctccactgcactatagagcaccatcgaatacacccaaatatttttgatatcacatgtaaagcccgcttagttaatttggaaattagcagttgtttatgttaattatgaaattattagtatgttagtagtttggggacgggttttagacattgggaatgtcaggaatggccagggatttagaatgtcccaaaaatacccctttagtatggtttatgtgattttatggtggaggattagtgttttgtcttttagtggcctttttatttgaaaaataaataattatttaattgattacttggctgaaat

SEQ ID NO: 397683 - DNA, 668 bp, Cannabis indica
atgttggatctgttcaaggttctcaaatatcgattatttcagttttaaaggctaaatatttattacagagtggatgtgtaggatttttagcgattgtaattgactccagcagacctaaaacattttggcctgaggatgtcagagttataagagaatttcttgatatttcccaaggagttaccgggattgccgccacaacgagagatagactttgtaattggtttggcacttggggcagaacctgtttcgaaggcaccatacaggatggatccaacagaacttaaggaacttaaaatacaactttaggggatgctggatttagggtttacctgacccagtgtatcaccttggggagcttcggttttgtttgtgagaaagaaggatggatccctccaaatgtgcattgattaccaggaattaaacaagttgacaattaagaacaaggatttattgcccgagattgatgatttgttcgatcaactccagggaaagactgtattctcaaagattgattggtgttccggttatcatcagttgagaatttgagaggaagatatttcaaagactgcatttcggaccaagtatggtcattacatgttgttggtgatgttgttcgggttgacaaatgctccagcaacctttatggatctcatgaacagagtgttcaa

SEQ ID NO: 397684 - DNA, 511 bp, Cannabis indica
ggacccgagaccaagatctagatttagagctggggcttggacctgacccatagtcagtgtatggatctaagacaaagactcggatatgtacccgaacccagacatggaccgggatccaaactcgaaccgaaaccagaatcaaattcgaactgagacctgaactccgacctgaacccgaacccaaactcgtatacagaattagaatcgaaccaggaacgagactaggaaccagacctgtgatcgaaagaggagcctaacccaaacctcaacccaaacttggaccagaactcataccggaacttggaggcatcctgggactcgaatcacgggaccaggcctgggacctagactaggaccgccacctagacccatacccgtactaggatcgggacccggactcgaatccaaacccagggcagggcctgggaccccaaccctaacttggaccctgaccgagacctaggacccaaacatagataggggaccgggacctaagacttgggcccccaaa

SEQ ID NO: 397685 - DNA, 504 bp, Cannabis indica
agttaaaaaatatagaaaaaccaaataagaataacaataggagtaactagttaataagtaaaaggtaactattacctttttttttcatatcttttgattttattttgaatttttttagaaaaaatttcccatcaaattacttttctagaaaaaaaaaaatatttttttaaatttatactttaaaaaaaacatacaaatactaattctctaatattacatttgtgacatttataaataatatttgttattgattattaattaaaatattatatgtgatatcaaaattgtaaaattatatataatttattttaataataataataatatattttataatttattgatttcataaatttaataatttagtagttttaaacttctctaatctacaactattataaaaatgagaatgtttatgggcttctcctaattgaattaccaaaataacctttattaattatgaaattacaaaaaagaaaattctcttttaacaaatatatatat

SEQ ID NO: 397686 - DNA, 759 bp, Cannabis indica
actccatgaactttcaaaaatccattacacatgctcataacatgtcctctaatatctaaattatttttttcaaaatggccatctgtctgaaggtgtaaagatgtactaaactttagctttgtatccatagttttttggagactctcccaaaagttggaactaaactttggatctctatttgaaacaatggacttcaaagccctatcgagataaactatttctttcacatataactctgcaaattgatccactaacaaagttgttttctccaatagaaaatgtgttgatttggtgaaactattcattattaccaaatcaaatcatacaatctcctggttctaggtaatccaaccataaatccacactaatatcttcccaaatccacttggtaagagtcaaaggctgcaacaaacctgcaagcttctgatgtttaaccttaatatgctgacaagtgaaaaaacttggatacataatctgccatatacttttcaaaccgaaccactaatagtagggtttcaagtcttgatacgtcttggtggtacccagatgcaacaagtaagaagtggtgtgagcttcatctaaagtctcttttctaagctcactattgttcggaacacaaacttgattcttgtaaagtagcatcaaatatctcatactgagaagtcttttgcccgaccaactaaaacttcctcccgagacttatctttaaatatttttttgagttatttttatgccagctttttatttttacaataatct

SEQ ID NO: 397687 - DNA, 1406 bp, Cannabis indica
cttggtgtggtggagagagagaatgacgaagagagagcaaaggaagaaagagatagttagggagggaaaattaaataaaagagtattttgagtagtttaggaaaataatgacattgttttgtacaaattaatgaaaagtataaattttaatattagagttttatcatatattattaatgaaatttcccttttcaaatcacttattcacaaaaaaaatcttcaaatattcctttgcttatttgttttgaacttatcaactaatcaccattcaaagtttttaaaactaatatataatgaatatcattgcaatcaatcataaacaaaattataatttactcttcgaaaacataattctccatcacatatcaaagtatcaatagcttcttaacttttcttagtacctacctaatacgaaggctcaatcaaaattacatatttgggccgaaacaaaaatggtgagagattgaaatttgagtggatttgggcccatttttatgtgttatagaagcccatgcattaatggtctaatttactcatctttacactgaaaataaagaagggataacacgtgtcatccctataattgggccattttcaggttatgacggctctcttaactactaatttttaatttactccctaagtaatcattaaatagtgcatgccaaactaaatgaaaatgatgaatataaaatgtgaatgcaaaatcattcttatcataatcggaattaacaccatcattatattaattagggtgcctttattcccctttaacctcgttaatcgttatgtaacttcctctcattaaactattccatttccttcaattaatatgtatatatagtaatactattagacactcctagtacctctagacacgtcgttttacaattcgttagcgatattctttaaaaattattacattaaactatatgagacctgatatttaattggatcaataacgatattgatacatagaatatgtgctaaataccacgggtgtcttttaacatttctcatatattgttatgtatggatataatggacgaggagtactaattataatcttttattataattttttagccatcaaatgttagttatttttttttttttttttttttttattaaacggtattctttatagttacaataacattcttgtgaattttttaaaacttatgtaccgaaaatagagtttctgatatttcaatttatcacgcgtgttcaaaaaacttcaaacttatttttgatactgtaaattatttaaattttttaaaaatttaccataataatattataactataataaatactgttatgaaaaaaaatattctgacatgtgatttttggacacaaaaaataactacgagttgtaatagtgaattatatatagagaattgttt

SEQ ID NO: 397688 - DNA, 972 bp, Cannabis indica
taaaataataaatacatattgttaacttgaaagctttccctgatgacatggacattaatgtttgacacgtggcaagagggatgatgtcacggagttgagtagacccgagtcaaaacagtcgacttgggatgggactctaaccctgtgcccatgttgactttaggatcttcgggatggaagttcagactttaataacttgaattcaactcactatctttcaatattatgtatcatgaagacataaaacaacataatccaaaccccgagagctgaaatcacacgaacatacaacccgtaagccaacctgagcagctagggttttacctcgcgcccaagttgacattctaaactagggtttcagttttcgggaccgtctcagtacaaaagggtcaaaacttgtattaggacatcaactagacataccacagatatatttgaggcatcataatcagaatcgaagtaagttcattttttagcgcccggggcccagggccccaagcacccagtgccaggatgcctaggttaacaatttgtcaatctgggccccttccaagtatcacatcagagatttgactttttcatcttcttcgtcttcatcaaaaatggggaaagaggtccttcagggaagaaacaacacttcataggtgccagaagcaaggcacagggcccaggttgataccttgggctagcctagtgccgaggttgacattttgtcaacttgggccactttcaatgaagttttttaggaactcttctgagcatcttctttgttttcagaaaatattgagattcaactatttttggggactaaacaaaacttccaaaggggcagaactgggacccagcgcccatgttaacacttggggttgggctcagcacccaggttgacataatgtccacttgggttgttttcgatcaagttcaccaaaaagtgttcggggaattttttccatcatcagaaataatgaagat

SEQ ID NO: 397689 - DNA, 839 bp, Cannabis indica
cgagaaggttggactagtggcattatgtgtagctctacctccagccctttttgcagtttactatttcatgtttccatgttacgaaaatacgtttcagaccctgctcatgtgttgagtcatgaaaatcttgagctgcaaccaaacctatcttacaaagaacagccagttcagatcctagacagaaaagataaggttcttcaaaacaagaccatagctttggtcaaacatgaggtctcatatcaggagttgttcaggttagattttaaggacgaaatccttttaacgggggaataattgtaaagaccgcttaactttgttttgaaaattagcagataattagggcttaattatgaaacttgcatattagttatgaattattattttgcggagttttatttcaattcagaatgccttttatatgtcatatatgaaatctcatatttttgcatgttttttgcccgggaacattggaatgcggcgtttggctattagaatcacattttagtatttttagtatagcggggcaatatagtgagacattgggaatgtcgggaatagttgagattttagaagtgaccaaattacccttaagtgattttatgacttttagtgtgggcaagggccttatggtttgtttacctaatgagatttttcttcagtggaattctaattgactaattaaacctgattttttatgttgaagttaagttaataaaacctaaattatttatattattttcattttattaaaaaaatcaagaaaaacccacttatctctctcttcaaatctttctctctcgaactccctagagcagctagggtttgattttgttcttcaa

SEQ ID NO: 397690 - DNA, 1233 bp, Cannabis indica
gacaggcgggtccaggtgggacacgtgtcgaaattctggtggctggcggattggagctgctggagagagaggggacaggcgggtcccacgcggctggcgctggcacgctgggcaggagaagacaggcgcctcacgcgccctatctggagtgggaaacacgcgcgcgactggggccattggatcagcaatccgatggctcggatggggagcacgctgttggcgcgagtgggctttttcttcagccgaaaaatctgattttctttttaaaaatattactcattttttcttaaattcttcatttctcttcaaagcaccaaataattttaattcctaccataaaaacacaataaattaaatctaaattaaatattttcaacataaaaatatatctcattaatttcatgaaaatattaatttatttttaatttatattaaactttaagcttattaaatgtatatttttcactattaatcaatactcaatctctatgggtgtgggacaaccccaattaataattttgtacaagactttcaaactagcgagaatcctgtaggagatgggagtcagctggaatggggcaaccccagtgtgatttatgtagtctttgaagtagtcccgaagagggaggatggcccctgcacaaatatgctcaaggctccaggcacccatactagttgaaccaccagtgctagtctcaccactggtttctgggttattgctggcaaagcgtgtagggggtaacaactgaattcaccctcttgtattgacctaacctggcatgattgcccaagtgcaattccataggtcttcaacatgtcgcccgtattgccttagatagatcgcacctttaattctattaactcagccttgaaggtgacgctaggatcctgaggagttttagacgtatgtggcttgggaggcataatctcgaaatccaagtcacttggttcaaaagcaattgtgacgttaggtgaaaacaaaggctttgccacaggaataaaggacacgctgggtggttctggcaagactgcttcttggaagaatcgtcgtctgccttcggatagcgactagaagtatcttcctgttgggttctcaccgtgtgttccctagccctagcatcgtttagctctaatttggaggtgggtttttagggattggtttatatgggatgaccaattctgtaggaaactcaaactctaaaacttctggacgataaattcctgaaccagagt

SEQ ID NO: 397691 - DNA, 534 bp, Cannabis indica
gggcataaaacccaacatgattagccaatcgaatgactaaacaaaattatttgttagatattctaccttcacatttgggtcgaacttgctcattgtccaatgcttgaagtcaatatgcttagccagtcatgggcctcctggttgaatttcttaattcgctctattattatcttgaaatcggttgtctcaactattacccaaaagaaaccttaaaggtgtgatgtgccatattttcttaccatgttattttcaaatgaaaacaacaaaaatgatgccttgcacccaaaatgcttgtcacagcttcaattaaactctacaaatatttaaaataaattgtttgattaagcatccactaaaagcatttatcatacaacaaaataatacataaaataatttaaaagaattaattaatcttttgtctgttactcataatacactatggttggtgttgtgaaaattatattgctttataattgcgcaagtgtacacaatcacaaacaagtaatacaatgataagtaatcaaagttcgtctc

SEQ ID NO: 397692 - DNA, 564 bp, Cannabis indica
gttttaatttcttattggaaatataaaacaataatataatttattttatattgtttctagtgaggtgaaagagtatactttttaataaatattttattgttattattattattattattttattggtgtttatatatatcgtatatacttaaagaaattctatggtagagcatgtcattttcccttgtatagaaacaattttgtttttaacatggggacaaattatatagaatggtgtacatgatagtatttattaggctgccaaaaatatatttcaaaataatttatcagatcttcatataaaataaatttcaaaataattcataaaatactattttgaaaataataattattttaaatttttttttcaatattgtaaaattattataattttcacctaaacttataaaaaatcttaaataactatatgtataatgtactaaaaaattcaattattataagaactctaaggtgacgtttggttgggaggaatgaaaacataaaatgggaatgggaataagaatggaatggaaaaatttaaaatgaataaaaaatagaaaaaaa

SEQ ID NO: 397693 - DNA, 574 bp, Cannabis indica
attaagatattactttttttttttaaacttatcgttctgtacaataagtttatatatataaatatatattataagttatgtcaataaacagtttaacgaaagaatgaacaaaaccctcttccttctcttttgataatattttcttcttttatccattttctttgattttcaacatgaaacctaacgatttaagccctggtagtagcgggatagcaaatctttgaagaaggaaaacttaaggtatggtttaattacgttttaagctaaaaacaattggttttatatagaaatttcgtgaattagaatagttatggagattctaacttcgtagaattgttctttggtacctatgggactagtatcgatgtttacttgttgaatttgaggtgatttcgagttagaaatcgagttttgaactttttaaagcttagtctgaacgttaatgtcgtttttcatttaagggttcaattttaatttctgttacgcaaggatggtaatatttatggtatatatgcgtcttgtggagtttgaagtgttttggataagttttggtagtgtttcgatgagtgcaaaa

SEQ ID NO: 397694 - DNA, 556 bp, Cannabis indica
aaataaacagtgtccccactgtgtaataaaattaaatgagagaaaatgatccagagcagctaggactacgggtccatagctctaccacggccatcattagcaggtggatcatcatcattacccctaggtggttgatatggtcgtcggagctcatcagtgcatgcctttagtttacgcttgtgaacctttagaatctcacctttctcacttttaatacttacaaggccacaaggaagtaactctttgaatttaaaaggatctttccatcttgagataacgttacttgtcaaagatttaaattttgaatgaatcaccaacacttgtttccctattaaaaactcctcctttagtttcttttatctcgaggcttctttgtcttttcattatgattagtctctctattatcttcattggaattacaagactcaaccatattgcatgtattctcagtatcggcttgattagaagacttataaatatcaaacttaatttcttcatcattacactcaaggttaagtggcctcttcgaacatctataagtgcaccaccagttgct

SEQ ID NO: 397695 - DNA, 578 bp, Cannabis indica
attaaattaaattagatcctacagttaatttggatcaactattttataaatatcctacgtatttgtgtcttgtattccagcgaacgtatacgctcttattattatttttttttaaaagaaaaaactcatcatttcttgtttatcagctattagaggcaaaaatcctggtagacatgtaccctttgttcagataaactgaacgctagctactgtcaaagtaaactgtattttttgccctttacagctgtatcgtactggcattgccttcggacaatcaatatgtacctattctttcatcaaaaacgagataattaatattcatttatgatactcataactttattgttgtacgaagatttagagggtaccatctttgaatggtaaaaatttaaacatgttttgaaaatataatattttattttatttttaaaaacattttaatatataatatttttcaaaaatattataattaagatttcacgtattattatttaatatatactttaatttttagttacaataattttttaactttaatttttactaaaaaaaataaatatcatcaatgccacaacata

SEQ ID NO: 397696 - DNA, 726 bp, Cannabis indica
ttgcataagagttttttcgccccctttttgatcttgtcagccactatttacaattgcatagtggcagttaattacaaagctgaccaaaatacatttacagccattatccctaaaattgtgggatctgattcaaatcaagccaaataaatgcagtttttacacagctgtgaatatcccgcctttattgggtcgagatgaacgtgtaattaaagatatacggtaagccgtgtctcatagggatgcctcgccgaggagggagccaagataactttgatagtgagcagctgcttgtcattttggcttctcgagactaatattgtcttaactttgatagctatactctctggggtcgagaggatcttccttgtatgcataccatcttctagtgagataaacgcctcgctatctgttatctcggctcatcatactatctatactcagtttatatcgtataatcttcgctaagtatttttagtgttatcgctttctctttcacgcagcgacgttgaggcctcgtcatgaacgtgtgcacccacatggtttctcgtcaatacataagttagcagttcatacgtttctgtctcgcagaaggctattcagccagccgagttataaacataccctgcgaattatatttccaacgagttgttccatgctaagcatacttgtcgtttgcgtgttgtagttcttcccagctcgacacgtgtcctcctctgatgtgcttac

SEQ ID NO: 397697 - DNA, 1575 bp, Cannabis indica
ttagaatttgatttgggagatatcctaactaattttttcgtgtactaagcaggtgaaattgaccaacacctatgtgttagtaccaagttttgaatccgctacagttgggcaaccaacaaatgatgcaatatacaaagttgtctgtgagttgaaagatgaggtcttctgccttgatttgaaggtgaacaacacaaaagagctgttactgaaggtagtctcaagttaccttggcaagggtaatatgaatgaagtgttcgagatacctgagacgagcaaagttcagcgctcgctttctttcaagggggagaccgagaagaaggatgatgtgggtgtggaccaaaaggatggtgaagggacgaaggataaatccaaagaggatgtcgatgatgcactgagtgtcccttcacttaatctatcaaaagataatgtcgttgttccaattgagaaggttgtttctgaagagtcgtttgaagatatcaacttttggggagaagaagtcccagttattggaaaagaggaagttgagcagaccgtcaaggatgattttgatgctgctgccttcgaaagattcaaagactctggaggaaaggtgattgggccgttcactgtgaacaaggtttattcgaatcaacagtacgagttctttcgttacattttctctagcgtcaatgatccgaggtaatctcctgtttgatgattattgtttatgtagttgatattagtacatttattgtatttgattatttgttttgtgttttagtgaagtggtagcccattttgggaaggttgaggtcgagcgtaggaatttcaaatgcatgagaccggagtccaatatctaaaacagtgtatgtagaaattgccatttggttgctttcaaatttttagttcattagtttagttattgtaatttggtgtgttatggtctagactcgattgtttggtggtggtggctttaaggcacattccctatttattattgactaactattttgtgagttgtgacagtttggttagttaggttagttatgtttgttatgtacataaatagacataaccatacttgaaagttgggttaaccgttttttgctcaccgcatttgatttggaatgcttcgctcatgaatcttgttactgtagttcttaatttttgtactgtgagtgtatgaatcacaacataatggatactatttgtgtaaatggcagttcattgattgctttgctcaaataatgaattttcgagagaggaagcgcaatggcattggatcaaagagaacttggtttatgcccacaagaatttctgtacaaactttgatatttaaaaatcgacatgaaccttttgtatttgtgctttaatacaatgtcgactatgcttttattttaaatgtactctattgtatgtgcttattgtgcagagggagttacatggaagaacgatgactgtggagaggatggcgagggagcaagaagtgtccactctttattacgatgaacatttgaatttatgtcacaatgtaatttgcattttcttgatacttttgtgttttatcaaatttttttagttaactttttttatgac

SEQ ID NO: 397698 - DNA, 1002 bp, Cannabis indica
aaacagaatttctcgagggccaaaacttggatccaacgcccaggttgccaatatgccaacctaggctttttctgatcaagttcaccaaaaagtgttcttgacatcttttttcatcatcacaaataatgaagattcaataaaactatgggaaaaaacaaaaaacccaagcccctagaaataagtaccagtgcctaagttgacctagtgttgggcccaacccccaggttgacaatcaacctgggatgctatctttaattgatcaaatgccaaatctgatatgaccattgaatccaaaattgtcaaaaacaggttaggagaccttgtcctcatgttccgaacccttggaagtatcaaaaacgagatcccaggagctcgaaagtaagtacccagtgcccaggttgacaaatggcttggtgcgatgggttctacttatccaattttgatgttgttttgcctgcctgtctagtttttcacaataacaaacatccatgaagtcaaataattcaaattcataacttttcatttctcatttctggctcactcaaaaataaagagttttgagtctctcatttttgcaaaaacagcaacatctctgagaactggtgactaacttcgctagaacacagaaactgactaagtgattttaaatatcacttaggcatcttaatgtacatcatccaggttgacgccatatttcaacctaggcgctgggatgtcaacctgggcgttggatgtcgacttgggcacttggtcatgaactgccctcagtaaaacaggcataactcactcaattttgatctgattgatgtgattaaacttgcgttttgaagctaattcaatgatatatcaagtcatgtatcatattccaattgtaattctgaagctattgtcattaaattcacccaaagggagttacgaaaataagcatcgagttactcatagtaggacgcatcgggctccaaaaaatggccatcaccaccaagagctaattttcactgttag

SEQ ID NO: 397699 - DNA, 1664 bp, Cannabis indica
tggcccattcccattctcattcccattccccggcccattcccatccattctcattcccattctcatttgcattcgcattcctattcccattccctggcccaatcccatttcttttcccattcccattcctatttccattctcatttctattcccattcccattctctagcccattcccatccccattccaatcgcattcccatttctattagcattggcattccccttaaccgacccatccccattcctattccttgacccattcccatgcatattcctatttgcattcgctttcacattcccattcccattcctattctcattcccattcccatcccctagcccattcccattcccatttccattcccattcccattccccggccgatttccattcccatttctcggcccatttccattcccattcccattccccagcccattcccatttccattctcgttcccattcctatttcctggcccattcccattcccaatccccattcccattcccattcccattccccgacccatgcccattcccattccaattctaattcctattcacattctcattcccataacgattccccaaaccccaaaccccaaacgcaaaaactgcaaaacccaaaaccccaaatcctaaaccttaaaccccaaatcccaaaccccaacccccaaaacccctaaacctcaaaaccccaaacttcaaaaccccaaacctcaaaaccccaaacatcaaaccctaatggcatgtttactaaactgtaattggaatcagaataatcaatggaagaaatcaatcgggttaaaatataaaataatcggaaacaatattttattttgttgtttactaaactgaccagaaaggaaatcagaatcattttattttgtttacataatcaggataggtaatcggaatgactttatttgactaaattatcattgttagaacatgtagttattttttatttatatatttttgaagggcatatttgtcttttttatttttaattaataaaaatataattaatataaagtaagttaaggaaagggaaaggtattccttatgaaaatggggggagaacctttccctttgttttctccttaatttgtgtggggcccactaatttctcccattccaaaatttagtaaacaaatgaatgggaatgaatcctatacaattgattcccattcccctttagtaaacatgccataaatgtaacgccctaactattaggcacgctacgctaatcaataataaaaccctaatcccctaaaataggattacaagatacataagcgcaggaaatttaaacttttatataaaacagaatgaaaataaaacttgtaataactttaaactttacaaacaaaagagacataatttgggatcccaaaaatattttacaaaatattacaagtccttttcactagtccacctaagcggcaaatcagagttacaaaagtacatcactggtagaccccaacccgcttggtctagtgtggcccgaacatgtacaagaatcgccaagatcccgcactcatggttgatcacaaaccaatttaccctttctgcacaatagagcactcgtgagccaagcccagcaagacagtaaatactattagcaattataataaacatatcacatatataaataatg

SEQ ID NO: 397700 - DNA, 1213 bp, Cannabis indica
cccagacaactggaattccagttatttagcgctgttccaatcggaattccggttggactgtgtcggggatttctgaattttttttggccataacttttgactcaagaccctattttggatgttctttatatcgttcgaaaactcctttcgagctctatatgttaatctgtaagtgtaatgctaattacgtgaatattgaaagtgaattttgggattaaccctatttgtgaaatcccaggaatgtgtgactaggactaccaacgcttgctcgagaacacctgggggtttggaatctccacatttgtgggacgtcaagtaagacagtagttgtacgtagagatatgcgcggtggcgattatgttgaatattatatttttaattaattagaaactgggattagggttattactctaaagtgagcagtttaatggcctagggttattaccctagtaaatgttaaagtttaaatgctatgccatactatatataattgagattaagaattgtgtgttcaaggcataatttggttggactcgataattaaaactgagatgaactattctaaggccttattgtaattagacgtgtgagcgtaacacgtgggtctatgccacatagacataaataggcgtgtgagcgtaacacactagtctatgctaactagacaataagtgtaatggcatgatcataatgtatgtgaaatgtataattttgattattgatatttatactgtcttgtcgggcttggctcacgggtgctctactgtgcaagaaagggtaaatttgtcactgatcaaccatgagtgtgagggcttggtgatgcttgtacatgttcgggccatactagaccaagcgggttagggctaccagtgttgtatttgtaatcttgattttgtcgcttaggttgacacataaaatagacttgtaatattttgtgaaaatatttacgggatcccaaagcatgtatcttttggttgtaaagtttaaagttgttataagtttaattttcattctgtttcaaacaaagtttaaattttctacgcttatccttttagtaatcccaattttaggggattaaggtttcataaccggttagcgtagcgtgtgtaatttttagggcattacatatgcttttttgtctgtttggggttttgggtacgaccagaccttttgtacgcactggatggtaaattggtaacatgctaatgaactc

SEQ ID NO: 397701 - DNA, 695 bp, Cannabis indica
attttttttattttttttctattcttttgtatcttgattatttgagatatttttattacaaaaaaattatacttttagtgacttttcataatataaatttcttgtgactaaatataacttttacttacaataaaaacacaagttgtcactaatttagttttagtaacttcatgtgtattgtgactaataaaatatttagtcacaacaaattgtattgcaatttatatgactaataccttcacctatgaactttttagttactacataggaatgaaatttataattagtcacaatagttttacttttagtcacaaattttattgtgattaaaagtattttttttttattgttttaagttacttttatttttagtaacattattcttaccttcaaaactaaattaagaatttaatgataaggtacaataaagtatattcacttatcatataacttattaataaaactagtaaaaaatctgcgttttgcaacgaatgtttaaaaaaaatttgaattatatatacaaaataaattatatacaaaataaattataacttttatttaacgatactaagtaataaattgtataaattttaatcttattgatttttcatataattttgtatgaaaaattaaatgtacaaaagtcacacataacctgtactgtaacaccccgatttcccgagatgtcacatagg

SEQ ID NO: 397702 - DNA, 590 bp, Cannabis indica
agcaccttttcccgaacaaagtataagtcaagttcaatgtgtttggtcctagcatgaaggaccggattttgagtcaacattactgtactcaaattgtcacaccaaattgtgggaggttgaggttgctgaattttaagctccgagaataggtagtgcagccatgttaattcagcagttacattggccacacttcgatactctgcttctgtgcttgaccgagagactgttggttgctttttacttttccaagtgatcaagttcgagccaaagaagatggcaaagccagtggtggaacgtctatcatcagggtctgaagcccaatcagcatcacagaatgcaaccaaatcatatgagctaggtcttttcaagtgaagaccaaagtttatagtgccactaatgtacctgagaattcgtttaacagccatccaatgtgtggttaagggcttctgcataaattggcagactttattcacactaaaggagagttcaggacgagtgatagtgaggtattgcagagcacctactatggaacgatagtgttgaacatctgccaatggttccccctggtgagctgataaacgaatggtact

SEQ ID NO: 397703 - DNA, 612 bp, Cannabis indica
attggagagagaagatatcgtgttttggctgggacgtcgagaagattccgttcggttcagtcggccagcgtcgccgattaacgacggccagtcgtctgagagtggtttcaacagcagtcgtctgagagtgaaatcaacagcagtcgtcttcggtcgtctgtgaggggttcaagagcagtcgtctgagagtggttcggtttggctcatcgacgtcctccgtttcagatttttgtttttgtttattaatttactattattagtttaattctaattaatgtttttatggggttagaattataaggagttcattccttaattaattttaatgttgtgattgtgtttatgtgctgaaactaatttaatttttcccattagtcttgtcttttgatatggttctttagtttttccttttagtttttctcattggtcttgtcttttgacacggttctttaggcttttccttttagttttttctggtttgaatcttatcttttggcatgggttgtgtagttcggaatcaccatggtgctatggtagaagcattcaagaaggggaagattggatgtgttcaacctgaaattgctgggataataggcattaaagaagccttga

SEQ ID NO: 397704 - DNA, 637 bp, Cannabis indica
gtgttatgctattttaagcctaatttccagaatgatttcataagcgttttctcatttaatgttgccttttggaatggttttatgcttggttttccttgtttctggttcccaatgcattacagttcaaatttccaattggtgaaaagacaggacattttagagaaaaatctactgaagttgccaatttgagcttcagtagtcgcgaccaggtgaagccaatgtcgcgacccttttctatggtcgccaccatggtcgagactaggggattaggcagaaagcggtttttttccaattggcctatggtcgcgactagccctttatgtagtcccgaccaggggcgaaacacgggatttttgaccagtttcgaaattttgccattcagaggtagcaacccaaattcctatataagggactcaacttttatgatgaaaattatcagaaatcagccccgaaaagtgaatgaaggaggagaggaagctattgtgacgatctggagcgaaatcaccaactagttgtttcttaactcttgaatttccttatgttaatttatgttgtagatttaattatggatgttaatgtggtttttatgaactaaatttccaatttggggaagacaatgaatgttgattgaagtttt

SEQ ID NO: 397705 - DNA, 1051 bp, Cannabis indica
ttttatgccttcacatattttatatttcctctaactgcgttgttttatatgtgaggagatgtcttagaagatgattcaagccttgaagaaaagagtaggggacagctcgggctcgtctcctctagccaagaggtctaagggtggtgagactccgtctaaggagaaggcgctagtggacgaggtcattgaccttttcaaggagcgagctcggacggtctcaaagtccaagagttccagaggagagagctcggacggacctgaataagttagggctggatccgaacaaattagggctggatctaaataagttaaggccccttcgacaaccctggcgctgtgcacggaggctaggagaggcaaagacatgcttcaacactatttgacccagtcacttcctgaagtgaacgaccagctgttcggagtggaaaacgagttatccttggaactggtcttaggaggagttttgaaggaagttactcaggtaaaattccttctttttatttcattctcttttggatagctcgggttttaacacatttgtcgtgcaagttgatgtgaaaatggcttatgcttactcttgagccaaatcagttactgtcaagaaccttgccaccaccaacacgatgcagagggatctggacttggccaagaaggaaactgaggatatgcggaaccagctcgatgtcgtgaggaaagaactcagggaggtaaataagaagcttctttctgccaacaccaaagttgatgagctgactaaagagttgcaagatatgccttcgaccgagcaacaggaggctgacaatgtttctctatcccaagaggtcaatcgtctcaaggatgagagggagagtctccaaaatcttcttaacaaactggaggaggatgttaagaataaaaagaccagggaggaggaacttgtgaaggaggtcagagataagaagtccagggtggaggagctcgagaaggaggtggacgttttggagacaactgcccttgaggttttctatgacttttggaaggccgatcccgaaggaaactttgattacctttg

SEQ ID NO: 397706 - DNA, 961 bp, Cannabis indica
tcagcctcacatcaaatcgcgaataggcgcgcctaacacttgtaaccgattcaaatgcaagggcagctcagatgaagtctacacgctttggaagtcctgtacagacttcgggggaaaatgttatcctaatttttgcactctgacgtggcatcacacgatggtgacacgtggaatcaactttgtgtatctgctagcaagagatatgccgaatagggcaccacatatattcgctcagatgaagccttcttaaccgggcagtgagcagtcctaatagcacaccaacacttagcaattttagctttcgcatcatgagtcaccaaagaaatccctatgattttgggatcagatcacagagatatggcaagctgtctgaatcccttgattagtgtattctgtatttaatatgcaatctttccacttatatcaattataatcagaagggaaattcctccctcccaagcttatacccctataaatagtgattcatacttactgggcaaagggtcgaaaaacttatctaagaaatcatatttagagataccattgtaagagctctaagaaaagggattattttccttattcttaagtcaatacaaaccaagaggattaggctatgaactactcacggctgaacctctataaaattctcgtgtctttatttgatttattacattacatacacattatactacttgtcgcttacaatttagactcactgtcgttggctaaaagcgaggtcaagaaaatggttgatcttaggtctatggatcttaatccagatatggttagtttcaacttagttgtattatttatgttcttcaatttgttcgttaaagtcgaccaattgaatcttctcgtgacatacgtattaaggacatggtagttcaattgagtggaagcactgatcatagatatggaatctataacttctaaaagtatctagaagtgaaacaataatttc

SEQ ID NO: 397707 - DNA, 913 bp, Cannabis indica
acaagaagaacatcaaagaggcaatcagtcgagcaccatcaaccagaattctgctatggccttcgcttttcaaaggaaacaaaaatactggtacaaaagactgctaatcccacctccaagaatcagcctcccaaaaggaatagacccttttgtactcactgcaacatctttggacacactatcgaaaggtgctataaaattcacgggtatccaccaggttttaacaagaataaatccaaagaggccagtgcaaatcaaattcaaaccacaaatgacagtagtaacagccagcaagaaaaccaggctctccttcctcaactttccacaactcagtatcaacaattgcttaatttgcttgctgcacagtaaactagtatcaatatctccgaaccatctacctcttatggtaacacaggtatcttactatcccataacacacaatctattttacataattcttggattatggattctggagctacaagacatatctggtccaatataaaactttttcagtgtatatgcaaaataccagctacaaaactcattttgcctaacaataattgtttttatgttaatcaaagtggcactattgttctcaacaacaacatcatacttactgatgttctttatgcccccaattttaaatataacatcatttctactagctatatgacaaagaatactgctgtcactatacttttttgaatctgatagcttttttatccaggacaaagccaaccggaggatgattggaaaaggtagcaatatcaatgatctctatatccttgatgaggcaccagatcctttccaagttctgtccatttcagctgaaacttggcattctcgacttgggcatttgtctcataagcgattagatcttctcaaggaaactttgcattgtaacacttct

SEQ ID NO: 397708 - DNA, 623 bp, Cannabis indica
aaaaaataatacatatcatactccaatttaaatttaagtatgctatgttttatattaagtattatattatgagttcggaatgaaataaatgaataaaaaataaataatatttaatttagagagatttgaataataaatttaaattaaacttatatgtccagtaaaaacatattggaaacaataataataaggttataatatatgttgcatttgttccaattcttaaaataatagcaacaagaacatctttgacttgaaaaaacaaatattacaaaattaagaataagcaaagcgtgtgtaaattagataaagaaggaaccctcaattctcaaagtcttgattataaagtaacaaagaagtattaaaatttcatctgctcattataaagccaccttcactcaaaatagcacaacaaaagtaataaagaagtattaaaggggtaaattttaccaaaagcaatgagaattaacaactgatgattgcatttcagtaggtgaaattgagatagagagaggcttttattgtgtttgcctgtatgggtgatgaatgggttaatcataaagattgtttaattttttggtttaattattgagtttattttttgaaatttgaatgaagcagtg

SEQ ID NO: 397709 - DNA, 1078 bp, Cannabis indica
gttccagattgaaacatgtcctttctgagttagtggaacataatcaggggggctttgtacaggggagatttatagcgcacaatattatgatttgtcaagatctaatcaggcactatgggaggagaaacacaaagcctagttgtatgattaagctggatttacaaaaggcagatgataccattgagtgggatttcttagaagagatgtcgagggcttttaagtttcctattcagttgataaatctcatcatgaactgtgttaggcctccaaagttctcattgatgttcaatggaacaatgcatggattttttgagtctaaaagaggattaaggtagggggtccactatcccctctgctttttgtgcttgaaatggagtatctctcaaggattatgagcaagattgggcgaaagcaggaatttaaattccatgaaagatgtgaaagcttacaactcaaccacttgagctttgcagatgatgtgcttctcttttgtcatggtgatttgaagagtgtgtacttcacgatataaggtttaaaattgttctctttcacatccagacttcaaccgaacccatcaaaatcaacttttattgtagtggtatgcaagaaactaaaattcagacgataatcaatgcaactggatttaacaggcaactccttcccttcaagtacttgggaattctaatttgtgctaagaagatatcaggaacagagtgtactctacttgcggaaaatatggcagctagaataaaaacatggagttctagaaatatttcatttgcaggaagagccatactcatcaactcggtcctgctctctatacacacttattggagtcagatcatgaagctaccaaagaaagtaattacagaacttgaagcaatatggcgagcctttctttggaagggtcaaagtatgatgcaaggtgcaggactagtggcatgggagcaggtttgttcaccaaagaagagaaaggggtgtggttcaggaaataccagaatggaatcaagctactctctacaagtacgtgtgggcattagcaaataaagaagataatctgtgggttcgatggatacat

SEQ ID NO: 397710 - DNA, 506 bp, Cannabis indica
tgatacaccacctatacatcacgtgtataagaggaggaaaaaccaactacttagataaataattattttatacgaagtatataatctgtattagttaatctatatattttggtctaggtaaggttgctgtcatattttattattatttacttttacatagtccagctgtcataatattacagagacagctggcacatttatttgggaggggaaactataaattagagagggataatcattgtaaagggggtcagaaaaatagaaaggaattattggagagtaacaccctctcgaaaggtgaattaggagagtagagcctctcgaacaagctcaacccagtttgtaattgttttcttctgaaattcaataaaacagcaaccatttggttctcacctttgttatttgataagaatagaatcaactaaccaaggaggttctatcatattatcaagatctgagcctgattctccttcagttgtttggattcttcacagtcttacacacta

SEQ ID NO: 397711 - DNA, 537 bp, Cannabis indica
cttaaggggtatttgtgtatgataaaccagaatccatctggaaatacatggtataatgcaaactcaccatttcaaaaatgaaaatatttttgaattttaacggttctcgaataaacctctttgacgtaagaggggtcaaactgttataacttcctgaccaaacctttttgacgagagagaggtcgaatggttatagccttatgatcaaacctttttgacgaagaagggatcaaacaattataatttgcgcgagctaagaaagtgctaaatgagacatcaagatgtctttatagaagtacttgaacatagaaaatggatagattgcctaactattcatacgtgcaaataaaaatatacaaagtaatgaaaccattaaaagtatattcaaattttcttacggtagattataactgccatagcgaggtaaaattgacaactgctcgaaaataaaaaagtttggtagataactaactacttaaacaggaagattacaagcaatggaaaaacccaaaagtactttacatttgatcaaaatat

SEQ ID NO: 397712 - DNA, 540 bp, Cannabis indica
agttgcgatttgaattgctatgtagagggacgaagctcccactaacaaaaatattatcttttaaaaaattaaatgtattttttttaatttgataattatagaccaaaatagtaaaaaaaaatacctcacaaaattaaataaatttattaaaaattgattatactataagcataaatatttttttaatgataaataagcccccacaaagtaaaattcgtcactggctgtgtgggttgcgattagaacatttactgtaaagtatcatatatttgtaaattatatcaggttactgtataaatgaaaaaaaaaaaaaaagtaactttgaatgcataaatgaataaacccaaatatgaaatagtaaaaatatatatacagccacacaattgtcactacaaaaaattgtacttttagtcacaactaaaagtaaaaaagttgtgactaattgtatattattatttttatgttgtgactaaacagtccgtggctaaaggtattagtcacaaaaattataatttgttgtgactaaatgtgtttttagtc

SEQ ID NO: 397713 - DNA, 1322 bp, Cannabis indica
aagacctggacacagacccaaaattgtaaccgtattaggacctggacctagacccagacctgggacccgaaattgaaacatgaacgagaacaggactaggaccctagaacaggaccgggaacgtgacaaggacccacacctggactgggacccagaactagaccagaacccaaccccggaactcctgctcgaacccaatcctggacctagtctcgaacacagaataggacttagactagaacctaaacccgaactcgggactcgatcgcggaaccaaatcaagcccctgacctaaattgggatttggacctggacatggacatgaactcaaacctgccccagacgcatacccagacccaaacctgggaccagacccaatacccgaacctagatccggactcagacttggaccaagataggaatccaaaaaacccgtactcggactaggactaagacttgaactctgacccccacttggacctagacccgaacccggaacaaaacccagaactaaaatcaaaacttgaactatgactaggacccgaacctgagaccagaacagaacccaaaacataacccaaacttataccaaaacctggaccgagaccttgactaggactgggacatgagacctagaccaggatccaaaccctgataaggacccaaacatgaacccagaccaaggctaggaccgagacctggacccgaactcggactaggacctggactaaaaccaagactcgggacccgaacatgaacctttacctagaccaggagctaggaactagacttggatgggggacctagaccagggacctaggccccggaacctagacccagatctaaaccgggactcaaacccgaattaggacctgacctagacccgagaatctgaagtcagacctagacctagacccgaaaccttccctggacaggaacctggacacgaacccataccaggaacgaacctggactcgaattaaaaatcaaacccgaactcaggacccgaactcagaccgagacccagaatcagacccaaacgcagacctgcacctagacccaaacacgaacccaaactgtgatcgaaaccaaggacttagacccagaactaaaccctagctcagctcgagatccaaacctgggacctggacctaaaccaggacccagaccaaggccccacacccatgaccctaacccacacccggagcccgatccagacctagatcgatatccgaacccgaaccgaaactcaggccaggactcgaaccccggccagaactcaaaccccaacccgaactcgaacccaaactcgaacttggaat

SEQ ID NO: 397714 - DNA, 619 bp, Cannabis indica
tatatagaaaaacattatttttacattgttgatattaaaaataatataaaacaaccctctatattattaaaaacaaaatacccaatatattattttttttatttttatttttttttaaatttaccgtttgagtttttaaagtggttgcagttgcaatagggggttgtgtacgattttttgttgcaatttaggttgcagcgcaaattgcaataagagtttctatgtaaaattccgtaaaaatacaaaaaaaaaaaaaaatatttttgaagtataaaaatgaaaaaaccccaaattaaaatccgtaaaaatataaaattccatttattttaagtaccaatatagtttttgattatgtgcgtatattttcactagtgtaaataatgaaataaatgtgtttttgttttatagatcatattatggctgaagatcaaaattctaaagacaaacctgttcatcatcaaatcataatagacataagacactgggaatcagagtgttcagatcgtataatttacaaaattcccagaaaaattcgcaaggtaaacgaatcagcttacactcctcaacttgtttcaattggtccttatcactatgccaatgaagatttgagtgaaatgga

SEQ ID NO: 397715 - DNA, 872 bp, Cannabis indica
ttccactcctctttcgaattctacccataggattaatcatctttctgatctaacggagattgacccaagagtagataaagggaaaaagaaaaacctttgcattactttcgccatttaaaaacttctggaaattttttgagtttttctacaaaaaatcgtatccagattattttgaaaccttgcatggcatttttcctacgagtttcattcgatttaattttcgacttcaagcattcgaagagatcttcaagacgttcagaggttgcagattgcagagccattcatcgtcccaaaccccaactttaaacagtaagtggcttttctccttattatgtcacatgctcattatgttgtatttctgggttcaattactatcttcttggtcagtatcgttattatctcatttgtttttagcaatttttagggccaaactgtatctggtaaatattaggttttagacagtacgtaggttttctagaatctccaatttaccaacttctggtttgataaatttcttccaagaattgggtttgctttctccttgtagcaatgtcccaatttggttaagaagtttatcgtctagaagacttagaaattgagtaccctactgagatttccatcccttgcaaacccaaaatttatgaaccccaatcaaaactagaggtaaatgatgcaagaattagagaacacttagtgaaaattcatcaggaagacactgctagttgccacagacgcttcttgcacgtaatttctgaaggcaaatgtcatttcttgcgagatgctacttggcccgaacctcccagtgtgtcttctattcctttggtcaaacccccgtttttacccaaagtcacaattgcttttgaaccaggtga

SEQ ID NO: 397716 - DNA, 653 bp, Cannabis indica
aagtatcatactattatccaatatcatatatttagtttaataaatattacaaaaaaatatattaataatttactagtatttttatttagtgataattttttaattataacataaattttttgtgattaaatgtgacttacgataataataaaaaattacatgtaacctaaatataatattaaaattatgaaatctttaatcaactattgttagtacggttcactactgcccgttattcggtgcaagcaatctccattcagatcgctgatgtaatatggcatctcagtgaaggtattgtatataatagatatttatagtgtttaagatcacacactttgaaattcaaactcataaccctcatggatgatatgtaactcatgcacacaccttaactcccatagcattaagaatttcaaattaaaatgtgtaacacctttttacacacttaatattggtgataattgtggaggttacaaaatgtaagtaactccacctcttatgttacaatttatgtgaatattagatgtatgtaactctcaaacacattatatacattaatctcatatcaatatataatatgttacattttaatattttaatctatcttatattataacaatataatataacatagtgctcaccatcagatcgac

SEQ ID NO: 397717 - DNA, 1167 bp, Cannabis indica
aaaattccaagagagagaatacaactgctgatgccctggcacgacacgcgagcagcacagtgacaataaggccaacttagtccaaatcatattcttagaagagcctagcataaactgtgcagaagaaatcaaaaatgatagacacaacaccaaattggaggacacccatagctgcttacctcaataacggagaacttccaaatgaccggaacaaagctcaaaaaatgatgagaaaagttgcacggtatatcatagttgaaggtgtaatgtataaaagaggtttctcgatgccattacttagatgtctaacaaaataagaggctgcacagctcctgtccgaggtacatgatggattctgtggcaatcatgcagcgggatagagcctatcaaagaaaatactaaggtaaggatatttttagccaaccatgatggaagattaaaaggcctatgtaaagaaatgtgataaatgccagaaattttcaaagatcccccatccactgcccaatgagctaatacagatgcaaagtccttggtctttttctacatcgggaataaacctgatcgaacagttgcccaaaggtaagggcggggtacaatatgcagttgtcgtagtagattatttcacaaagtggacagaagctgagccattagcaacgatcacatctaaaaaagtgttggaattcgtggtgaaaaacatcatatgtcaatttggacttccgtacaagattgtttcggacaatggcaaacagttttgatagccagatgtttacagatttttgtgcgacacatggaatcataagaagtttctccacagtggcacaccctcaaacaaatggtcaggtcaaggcaatcaacacgacactcaaagacaccatgaaaaaatggctcgaacaaggcaaaggtaattggctagaggaattacctgaagtattgtggtcgtaccgaacaacgaagaaaacaacaaccaagcaaacatcaattgcagtggcttatggttatgaagcaatgttgtctgtagagttagaacctccatcccacaggagactaacctacacccaagaagctaatcatgctctcctggcagaatcacttgacaaaattaagaaaaacaaacatcagcaaacctaaagtgtaatgaccgctgtagtaatgtggattagaaaaggc

SEQ ID NO: 397718 - DNA, 1075 bp, Cannabis indica
gttggcctcacccaactcatggctaaaagctgcagtctctgccctggcctcctcagcttccttcttggtcaagtccgcttccgccctcaaggtgtcggatagagccgtactcttagaagtagcagatttagccctggagtaggtataagccaacttcaaactggcctgcataaaggaaaaagtcagtacaagaagctcagtatgaaaagctaaaagggaagtgtcgaaaagaaaagcctaaccctcgtaagctccttcaagactccgcccaccaacacatccagagaagagtcgtcagcaccagccaactgctcactgacctcaggaaccagctggttcatggatgagccatcatctccctgcccttcttgacctcaggcagcacgggcatgggtggagttggtgcttgcacccattcaggaatcctactgactagtttggacccagatgttggtgacccagatgttggtgcttgcacctctccagaaggcctcttctctaaagagtcgtctcctgccttggacttcttggccggaggggaggcactagagcctccgctcatcctcttccttaaggcgttcatcatctaccgagacatgtctgcacagagcaaaaataacgtggttagcaaaaactaacaaaaaatacaaagtatgaaagtcaggaagctgaaaaagaagtaaagcatagagtgactgtccgccaagaaagtcagaagtccatcatcacctcacatcgagtttatctcagccataacgaccttcccatttccagcatatggatgggatggccgaacaagtgaaatgggctcccttatgcgaatgccatgttccacgagcctgggcgtggctgggagtttcttcttcctcttcaaaggagccacctgctcagcctcaacctcagcctcagcttcatctttaggattcatagactcgtgagcatactgctttaccagagcacctcccttcaacttagcttcacgctaaagttgaatcagctcattctccttatgagctcattcaggcccagcagcaacatatttccccttcttccccgtcacggacttagaagaaaa

SEQ ID NO: 397719 - DNA, 1679 bp, Cannabis indica
gttcataatttattaatttaggtaccttccaagtactagatcgacaatctgactttttcatcttcttcttcttcttcaaaaacaaggaaataggtacttttagggaaaaaaatagcacttcctggttgccaaaaacaaggccctgcatccaggttgacacttgggccttgcctagcgcccaagttgacattttgtcaacctaggccgattccagtggtgttttttaagaactcttccaagcatcttctctgttttcataaaagaataagattcaactatttttgggctaggttgacatattgtcaacctgggctatttccaatcaagttctcaaaaatatgttctaggaatggtttccatcatcagaaataatgaagattcaaggaaactcagggagaaaacgataaacccgagaccctgaaaataagacccagtgcaaaggttgacaatcaacatggtggctcaaatacccaatctgattcgatcaatgaatccagaatggtcaaaatggggtaggagaccttgtcctcaagttcaagaatcttggaagtataaaaaaatcccgagagctcgagaatgagtacccaacacacaggttgacaaatggcctagtgcgttgggttttgcttatctgcttctgattctgttttgaccgtccatctagtttttcctaataactaagacccatgaagttagagaagtaaaattaacatctttgcatttttcatttccatcatgggaaactcactcaaaaatgaagagtttcaactctctcatttcccaagaatagcaacatcactgagaattggtgaccagcttcgccagaacacaaaagtagactaaccacttaaaaatcttaaagtacaccccttggacatttttttcacttacccagcatccagttgatgtcatatgtcaacctaggtgctgagatgtcaacctgggcgctggatgtcaacttgggtgttgggttatgaactgccttcaataaaactaccataactcaatattgatccgattaacgtgattcaacttgtattttgaagataatttaatgctttatcaatttatgtctcacacttcaattgcaatttttaagctatcgacaccaaattttaccctcaagggagttacaaaaataagcttcaagtttcttattcagaaaactacccataaggtcaaagtatctctctctagaaactagagcttaaacacttagtcttttttttgtaattaccatcttgtgagaaataaaatctcgaagtggatgtagctccattaccatcgggacatggggagtgaactactataaattgtgtgtgtctctcttatttttttttttttacttaaactcatcattcatctcaccaatctattgagctggttttggccacttttcagcgtcaatattttggtgctttcattgagagccacaactcgagttccctaactacagttcaatatctctaccaagagctttgttctgaaaggagttgcaatatcccgataagcctaatgttaaataattagggtttatatttatattataggttaatcaggtaataagtgggattatgatcctactaatctatttaagcataaaatttaaatttactataagtgagtaaataaacataatttataattcagagatttatatagcacgtgtgaatgtaata

SEQ ID NO: 397720 - DNA, 409 bp, Cannabis indica
tgaaacttggttttcttgctttgcaaatgttgtttagggtctaaatagcaggtctggaagttttggtgtgatttgggattgttttgagaaagttatgaaaaaaaatttatttcctactcagaaccggaattccggatggtgttccaggattcctagaaccggaattccgattgtagaaccggtctgccggttgggtgatttttgggaaccctagtttttcccatttttatgttgtttagggtattgccatgctttttatcgatagggaaataagtccctgggaagtgatttattgtatcacttatccgtgttgtggttgttatgctttaggagcctgtaaatcgccgtgtagttcgttccactcacgttgaccggcacacctaaattcggaatcgaggtaagattagta

SEQ ID NO: 397721 - DNA, 851 bp, Cannabis indica
gtttgcagcaagaagaattagaagagaaagaggggctgttgtagtttaggttgaaagagtaacaagcttggttgctagggtttcaaaggaagaagaagagaagaaaaagagaggctgaagtgtatagttcggctgttaggttttgaggaaaagaaaggctttatactaccattaaatggagtagggttttgagggaaacacattgttatccgcacaaaggggaaaggtcgatttcgcccttggttttttgaacgttgggtgttggtgtagggggcaatctgggcagtttggattgcattgatttcctacagtggtatcagagctcggggaagcaagaagattcaacaacacctggaaacatcaagaaacaagaaagatcatcaaaacattgaataagccaaatatgaaattatcaagaaattgataaagaggaaaactctaacctaaactttgtcttgttacattcttgcttttattatcttgttctaataattaaacatgagtaatattagagtggatgttgacaagtttgatggatcgggagactataggatttggaggaagaagattagagctcttcttgctcataacaaattacttagggttcttagtgaacctatagaatggccagaaaatactttaaaaccaaaaaaaaaaaaactccttaaactgctactggtttaatcatttttaatttgtctaatgctattatcaggttagttgacaaagaagatacaccagcaaaaataaggaaaaagcttgaagatcagtttcaaaagaaaatctttaatcaacaagatctttcttaaagaaaggatctttggtttcaaagatgagcactagcaagactc

SEQ ID NO: 397722 - DNA, 662 bp, Cannabis indica
agtagaaccctagttctagtatcgtattagtgtattctaattacggtaataggtgactcggagtacccgtacacataacttgattacatactttgtgtcacgggacctctaaacatctacagtgacagtgtcacgactacgagtgtacatcggcaccactaattagaatcctatttcggtatcggttagtgattttgttacggtattgatgactatgatacactaaacctaacttgattacatactttgtgtcacgaggccctaaaaaactataatcatggtgtcattactgcgagtgtacatcagcaccactaagtagaaccctatttcggtatcgttagtgatttcgttacgaaactagtgacgctgataccctacatctaactagattgcatactttgtgtcactaggacccctaaacatgtatagtgatagtgtcactgttgacgtagtgtacatcagaaccactaagtagaaccctatttcggaatggattagtgatttcgttacaaaacttgtgactctgatacacttcacctaactcgatttcatacttgtgtcacgggacccctagacatctaaactcatagtgttactagtgtgagtctacatcggcaccactaagtagaaccctatttcggtattgattagtgatttcgaaa

SEQ ID NO: 397723 - DNA, 979 bp, Cannabis indica
aataaataaacataatttacatagtcctgaaatcccattaaaatcttacaattatttctaaaatatgttttatacaaaagctgtcgcccagcggctaacaaaatgtgagcataaactgtcccaaagacccgaacactccaagtctaacctgttaggattttatgccttaaataaaactattttcaacatatttttattttttatcaatcgaatagcatgttattttcatgattatgctttaatatacaatttttaataaatccataacatattgttattcacaattacagtgatgttaacacagtggaaggtaattgtgattataagcttatgacctatgatgcatcaatgcactgaatttacactgatgtgataatctgcgataaaatttacttacacctcggataagggtcatgtccttttcatggtattagtaaagtatgctagtatcgaatgtatggagtatacattggactggaccgatattgaacttggtgaagatattgtaaacttaccattgtatctttctaagtcaacttaatcctgatatggttaggctcgatctcaagagtgttatttatgttcttacaaatattcgttatagcttactaattggttcgggccaagacatacatcttgggaacatgatagtgtaattgagtgagagtgctaatcataaatatagaatctatagcttctatctagacatagacgtaaaataataatttccttcgaacttgtcttaatagagataaatggaagatctcttatttcagtagttatattagtttactaaaatatcatttatagaaaactaaacggtaaatttatccctactcgatgtaaattatctatagaggatctttgattatttagattagaacgatgaaaaattaatggtgtatctatatcttagaacatatagagtgttctatataattaagaaagcaattccgaatctatagtgacgcaaggggga

SEQ ID NO: 397724 - DNA, 1132 bp, Cannabis indica
ttcgtagtgtttagactttagaggatgttctgcaacctccacaactttagctcttggttcatgttgaagtgatcttacatacatttctaaggccttcctcaaattcccagctaggtgagagcctccaattacgatctccagcctgcctgcaactggcacatgttggaaaggtgcattgttcctagctggagcttcaagtcatacataccagcatgatactgtctgatgagaaactctatctcatcccacaattgattacactcattagtgtcatgactgtaattgttgtggtagtgacagaattcgaaggaaagaggtttgtgatacgacattattgattgtgtagccgtataaatgtcctctcttggcaccaagagaatagagtaggtggcatactctcataagggcttgcccacaaccttgggcttctttcctcagttggcttaccaccgttgttggttctctttcctttgttctaacctcatttcttcccgttgccatgggcctcagtagcaggggcttcagagtctgatgacttcttcttgccacactttgagccattagcttgggtgatggcttcttctagtttgataaagccatatgctatatctaagaagtcattcatggtgtataccgctttgagacgaaggttggaccaatgaagacttatctccttgagcctggctgcgagtgccattacccttacatcctcgctaagactttaggtcttagcttttacctctaagaaccgttggatgtagtccttaaggggctcgtcttcctattacttgacatatatcaaatcatttagttccatctaatgttgttgggaaggagcgaattggttgccaaaagcatctttcactactttttggtgaacttgatcgaaacaacccatgttaacctgggcgctgggcccaaccctagatgtcaacatgggtgctgagtccagttctagcccttcgaaaattttagtttggtccccaaaaacggttagaatcttaatattttctaaaaacaaagaagattcttggaagagttgttgaaaaatagtcaacatgagcgttgggccttacttttagcacccaggaaatgatgtttcttgttgcgatatttagcacacgcaagtgta

SEQ ID NO: 397725 - DNA, 983 bp, Cannabis indica
gttattaggtgatctagagcttgtgttaaagtttggggtcgatttgggattgttttaaggctttgttgttttctgcaacaaaaaatggcaggtcttttctatggaaacggtctaccatttttacaagcagagaacccaaaaaaatagcttgccatttttacagaaacggcctgccgtttttcaaacagttttccctgaaagttatttttctcgtgttttctcgatatttaggcattgccatactatttatcgatagaaaaacttttagttttgaattaagaatcccataaaggtcttaaaaagttgtttactcgttttacatgattgtgacattgggcctccgttcaatgcataattttttattcaggtcgactgacacacttgaattcaaaaataagataagattagcatagaatatatatgtatatgtgtgtgtgtgtattatatgcatgctatttaagtgattcatatgttaccaacactagtacggcagtggaactgaatgcattgatatattatatgatgttcaaagagtacaattcgatgttactaacactagtatagttaagtacataatgcatttggtacaacactcggaattacccggggtacgattcagccctactgacactagtacaatagcgatttttagtgcatgtggtacagagatcgtacttttattaagaatgttcttaatcatctaataaaccttatggatgggtgtatgggctcttgaatacaagtcgacattattttatgtgttatatgcttttcttactaagtttgtcgactcacaaatacatttttgtgtgtaggtaaaggaaaggctaaggctgagtagcagtgagtctagagctcaaggatgattgtacatatctaaatagttcgacctagagagttcggtctcgagacgtcttgggctttattttgtagttgttgtgtcatattttgtaaaaagtgtattttaaatatatttattaatt

SEQ ID NO: 397726 - DNA, 798 bp, Cannabis indica
tatgatttttttgaaattattgtaagatgtaggaaaagttatagactgaggtggttgaattatttgaaggccgatatcaaatggggagaatttacatcgagagtgagttgagagagaggaagagagaggctgatgagattagggattttaaatgtgaggggtatttttgagaaattagtaatgtggtatatatgaccaattttaataactatgcatttaaggataaaattttagggtattgtaagtatggaaattcaaatttccctattaaaatgggtaaatcagcattattagccaaaattttaaatttgtatgcagcataaacttaatgatattagggttcaactaaattctttgcagagccttcccgctgggtcccgagattggaatcgggagtgtgacgtccgacgcgctttaaacgaatcccgggaaaggaaagcgatctattggaaacaaagagcaaggatctcttggctcaaagaaggggataagtgctcaaagtttttctttctgtctgccactatcaaaggaagaagaaatgcaattgagagtcttttgaataaggacaatatatggatctctggaagggagcttattggcagagaattcattgatttcttcaaaggtatcttcactagggaggatctcaggcaggactatgattgtagtcggttatttcaagagggtttatcgtcggaggagtcagagaatctcattcagtgccctagtgttgaagagattagaagtaccctttttgccatgaataagcataaggctcctgggcctgatgggatgtca

SEQ ID NO: 397727 - DNA, 695 bp, Cannabis indica
tatcaattgttcttttttttttaacttaattaccctagattattatgagcaccgcactaagaaatatacatattttattgtaactaagaaataataatttattatgaggattatatcgacatcccttcaactcttacctaatcctcggacgatcaaatcatgtagctgagccaatctatgggcggcggtgctacctgtaattttatttgggaaactttgtgatgttattttaaataagatgagactacctcaattatttttattttaatttcattctacaactttcactttcgtgtctaaaaaatatatatccaaatagtttttattaactaattaagattttgtccactaaattttaacatatatcaaataattttttttaatatattttttaagccattcaaaattctccaaaactattgagttctttattcaaaattttgtctaattttgttcaattttactaatgcagatattatccatatactaaatcgcgcctcccaaattttaatatctatcaaatcgtgccctcgaaatttaacatgtactaaattgtgttccctaaactaggggtgttcattgaatcacatccaatgtttttaggcctattcagatccgatccaatcatatattggatgttagattttaccatccgatccgatccaatccaattaatttcgtcatccaatcgatcc

SEQ ID NO: 397728 - DNA, 936 bp, Cannabis indica
tacgaaatttgaagagattcatttagtaagatggaatagtttgtaccactgccttgatcaaagtttcttacctccttaaaaaagaattatgttttccaatggaagaggttttgccaaactttatctctgacatgttggaagagagtcttcttggtccttcccatgaaacatgacaacccagatgtttctcatggcaggagactctcaaaatttgaagtatgctatctatctcccttatcaagtcctcggtattcccatggcttatatagaaagttgacttagcaaaattaaccacttgacttgaagctttagcataaatatatagtgtcatccaaaatgttgtccacctgacgtggcatgtccacgtaaatcaagatagattagaagtggaatacagccttgccaatagcaagacaaagtctccttacaaggtatggcaaaactatcaagtagcaagggaaaggggttaagtgagctgtcgaggagctataccaccatgtctggtcggtcaaggggagtctataggccgaccatgatgagtttatatggctggccaaggtttaagcacaagctagccagccaaaaagttatttttagaccaaggaaggatccgtttgaccaagaagcctgatctctggaaggcaaaggtgtacaaaggcgggcctccacctttaaaggttggcttctacctccgaggactggcctccatctatagaggcttgccaccactaaggttggccatcaccaaggcgagccatctcctactaaggctggctaacacctacaatggctggcctcctcttgccaaagctggcaggaacatgacctccaagatcccggcaagcacatggccagcccaaccttagcaggcacatggccggccagatcctggtaggagcatagccagccataggctgacacatgtgagccatattt

SEQ ID NO: 397729 - DNA, 837 bp, Cannabis indica
tgacataaagaacatgacagttaaattgcttattaagaagcaaccaataggatgacccaataagcaaaaggttggaagaattaagtcaatccaaaatacttataatggtgaaggattgtgataaaacaaacttgtagcaagtgtggtggcaaggggaaaatagaaagtcttgcacctacaaaggttaaaaatgactgttgaattttactaatcgtattgttatgtattgtaatgtttagtattcttgttgaactcttgttggacttcgttgaacattaatatttgtggcacgagtaggttttcatcaaaaaaaaaaaacattttcaacatttttttcctgtaaaaaaatggttggcccgatgttagtccgatgtaaatttgatgctggtgagatgcttggtagggttatgatgaaaattaataaaagcatcatgcatgcatcagaccaagcatcgggccagttttcactagcccaatattggaccgatccatagactaatagggttcgatgtatatgacaatcaaaccctatcgatccatacatcggactagtatcgacccttttagaaaaaaattaaaaagcaaggatttataattcaccattggaccctattggtccatgcatcggtccaatatcaggttagtaaaaacttttaaatagtttattcttttggttgtattttttgtccgatacttcttaaaaaaaaattaatcaggacaaattgctaagaacataactaaaccaataaaaaaaccaaatttcattattatcccgataaatacatatctatattaaaaaaagaagttcatgctaagttttggtagaataaatctaca

SEQ ID NO: 397730 - DNA, 550 bp, Cannabis indica
agttttattaagctcggtataaaagtatacactgacacgtatttttcatgcttcttggttttttctctcctttgacggttccttaaatctgtcctttcccttcggattaggagcccctgagttaacaattgtcgtggaagcagtacctgttgaaacattgctgggtttatttcccgagcttattttcaacaagttcatctcatttcaagcttcttccttccagagaaacacctgagcccttttgttgaactcagtgatgcttctcaccagacgcccttgtaagtcatcccataactcgccccctgcgattaatggatcagtagagatccccgcctgaagggctataagttgcgtgctttcatccaatttctaacactagcggcaatcgtgctaaaatgacttaagtacgccttaagtgtcttgctaggctgctgctttatattggttagcgaggccgctccgggtcacctatccctagtggcttgaaattgcttattcagatccctaaatagctgctcctaagaagttattgaatgatgagtaaatttgt

SEQ ID NO: 397731 - DNA, 875 bp, Cannabis indica
agagcactccccgctaattccccgccccgtgtgcatcactagttgggagtttcgggtggtcccaagtttgaagatggcatttatcataccatcgtgtggccagaaaaatctcgaccgaagttggggtggacagctcatgagaaagacaaagagagaatgggggaaagagagtgtgagcgagattaaaacgggagagagagatagagtgcgaggtggctagagaagggggtttggggtccgccagcgacagcgtgcggcttgtttggtatggcaagcgtgagctacaaagagaataaagtagggggaggcagaagaaagggtggaggagattagggtttttttttttaatgatttttgtttgttttaattttaatttctaattatttaaaagaaaaaaaaatgtttttcttatgatttattatattattttaagtttattttattttaatattttattaggtggaccaattgagttgtactatgtatacaatatatacacatggacattttaccatcactcttaacaaccaaaaataaagggaaatttacacagtttactgtgttttcccattttctttcttttatactgttacactcccaaaataacttttgtactgtttttttttttctaaattaacttttatactgtttttttttttttctcggctgccaacaattttatgttattgttttgtttttttttagattgattgggacatgggctcaattatttatttaattttttattttaatggatataaaagttattatttattatttttaatatttaataattattattttttgagataatttaataattattattttgatgaaaaggttgatgggatgtgtcataaaagtgacatgtttta

SEQ ID NO: 397732 - DNA, 566 bp, Cannabis indica
gttggtaaaatcactgttcactggacgaactacgatgtttcacatgcccaaattctgatttcggaaatgctgcaagaggatgttgaaatcccaatctcaattgaatggtgcagatatgtgagggacgcaacaaacatcttccttccttggcctaaacacttaattgtaacatctgaggtaacttctcttataaattaattattaattattagtggagtttgaatatcttcaatattcaaccatagtgaagtaggttctgcaaatatatgttctgcggtaggatggatgaacaaactactgttatatctgtgttatttgtcgttatacagtcatgtttaaaaattttgggggcattcaattacagtcgttatgctgctgaaatttccgtagaatttggatcaaatttgatatattatgttctattttgtttagggtccactcgctcaaccgccttcaagatgtgatgtgtcgaaggggaaagctctgatgctttctccacaaggcggtggtgcacgagaagatgaattattcttgaaaaagaagatggacaagatccctaaatcgct

SEQ ID NO: 397733 - DNA, 669 bp, Cannabis indica
gttttaagtggtagtttttgcattttttgagagattgagttcagtagctactgttagtgtttgatattgttttttgaagtttatttatgtttagatatgttaaattaagcatgttttgatggttggtttgttgattgagcaagctttgagttttggaactcaagcttggctctttaatggtgaaatttgattctgagcttgggtagttgttatatttcttggaatatgtctattggtgtataatatgcaggtttggaaggtttggcaaagtttggaatcgatttggttaggttttggaatttttggataaaccagctaaccggttttacaatgcctgtaaaaccggttacctggatttgttgctaggttccccgagaaatttgtgttgtcgattcgtgctagtttcagagttttggttggttaattccttgctagtttagggtattaccatgttaagttgcagtagataggattttagtttaaaacctaagtccccggttgtgatttagcgtatcacttatccatattgttatcgatgtgatttaagagcctgtaatttgccgagtagttgttccactcaggttggtcggcacacctgaattcagaattgaggtaagattagtataatattgtaacaccctaactatcataggcgtattacgtgatttt

SEQ ID NO: 397734 - DNA, 573 bp, Cannabis indica
catttgaatattgggttgaactcgatggcatccacttggattgtgttgagaatcatggggttcaatctcaaaaccaattggcaatgagtgtagtagtccatgttcttatatatgactcaattctattcttatatatggctcaattggcaatgatggctattttttgctcatcaatcttgaaccgtatcagagtggacatgtgtctatctgtataggcgcgaatcggataggatcacttgcccgcaagggatatggatctgataccatgttataaaaaccaattggcaataagtggagtagcccatgttattatatatgactcaattttctactatttattctatgtgggacaatgtccacaatagattgggtctgaagcaacgagtctttgacgggaccttatggtgatttctaagttgaccaacaaagtttgtgatttaagaattaggttatatattgcttttgtcatttgggatttgatttatggagtttgggtttgacatttagagatggctcatgaattggaataatttataatttattctgggtgaaatgggttcaagtggttctcat

SEQ ID NO: 397735 - DNA, 508 bp, Cannabis indica
tgtgtggaataggctttgtattccaaagtatcgcttcattgcttggcaagtcattattttgtttttgctacttaggtagctggtttgtattggttggtggttgatgaaataaattattcttctttgcttcaaaaaattaaaataataataatggtaatgataattaaaatacctgcattttatgaagaagtcaaaaaggaattgccagaacctcaaaagccaatccaattaaacaaaaattgaaaacaaatgactacccaaatactgaaattgagtcctaatacaatacaaactaagcaagaatcaaaactccaaataaatatacttacttggaaagaagcactgatgtacatacgaaatcacaaaagctacagtattttcaaaccaggctttatacagatcagaaatattacactaagcccctattttaggtgtcagtgccggggaaacagcttcagaattttgagcttttccctcaaatccttaatgtgttttttcttttctttcc

SEQ ID NO: 397736 - DNA, 525 bp, Cannabis indica
ttttttttttatttttattagatttatattttcatctttgaatgtttagtaattggtatattgcatatatatgtgtgtgtatgtgtaaatatatgtgtatgtgtaaatatatgtgtttggtattgtataaatatataattttatgtatgtgtatgtatgatatgtatatgtacgtgttttatgcaattgtataatttttaaataatgtattatatattatatattatatgtatatatgtatatacatatatatatacataatttttaaacagtgtatatattatattatatgtatatataatatattgttaaaaaaatttaaatgtgtaaatttataaaaatttaaattttaagtgtatatagtaatatatataatatattgtttaaaaattttaaatatgtaaatttgtatataataataatataatatatattatatatataatatattgcttaaaagttttaaatgtgtaaatttgtaaaactttagattttaagtgtatatagtaataagtgtattttata

SEQ ID NO: 397737 - DNA, 806 bp, Cannabis indica
tgtatttattatttggaggtaagttgaatttttttagtaaactccttagatttatttttttttattgtaagctgaataaaacaaagagttattgtggataaaaattagataccttctctctcttttgttcctctctttctcggccaaagaaaacctaaggggaaaaccagaaattcttcaccctttttagatcataaattcaagaggaatccaatagaaatcaaaggagtatcatagcctagtcaagtaacctcttctcctttgttttcttcaagtaagagttaagattttaagcaaaattttagggttttgtttttgttcagattgggatgagttgtgtttgttttctggagttaatatgatgttgtttgaattattttatgctggttttgttagttattgttgagtttgaccaaggtttgagcttcaagctcaagcttggtcctctaatgacaattttttattctgagctttgatgatgctaattcttgttggtttaggtctattttgttgtttttaggtattctggagctctatgtgtgatttggggtagatttaagttagaaatgagatttattaaaatgtatagtagaaaacaacatgccgtttttacataagcgttctaccgtttttagcaggcaagacccaaaaaaaacggtctgtcattttacgaaaacgacctgcttttatctggggtatttttcctgaagtctaatttttcagtgtctcctcaaaaattagggcatttccacactatttatcgataaggaaattttagtttttagtctaagtccctgaaaagtgat

SEQ ID NO: 397738 - DNA, 841 bp, Cannabis indica
gtttttattattcaatctaatttgtcttaactaattataattttttatttatttgttttatcaaaattttagtaatatgaaaataataaaacgtaaaaaaaaactactatttacaacatggttatttgacaccttaagttaaaaaaaatactcacatgtttaggactaagagtgggtatcataaatattatttttattcaacacttaatttttaatattaaactaaaaaaaaataggtaaatacaaatctatatgtgagttgggatttggtttaggaatttctttccttaggtgtaatagagtttatagaatattaataaacaacaaataaaataaaatttaaatatttttttgggaatatacttatttagtaccttgtgttttcatgaaaagcatatttggtaccttgtattttcaataatacttaattggtacctcatatttttaaattgtacatatttagtaccttgaagtaaaatttaatcaatacagttttattaatttaatcaaacagttctcagttatatgtaatcaaataattaaatttgaattcataattaataaaattttaaattgatgattgtattgataaaattttatcaaaaaaatttgaatttagggtactaattaggtatgattttaaaatacagggtactaaataagtattattaaaaatacagggtaccaaacttgtattttgataaaacacagggtaccaaatgtgtagacaccctatttttttattattatatatgaataaatataatatatttttaatagatcttacatgtaattagattaaatcggtttttaattggactttgaaagtttcttccaataa

SEQ ID NO: 397739 - DNA, 603 bp, Cannabis indica
tagtaatttattgataatttaataagttaatttactttttttagttctatacattgtaatacataaggggagcagggccgaccctaaaagagtgttatgggattcaaacccatggcattgtataatatgtcatacaccttaaccaactaagctatgatatttattatttacaatacacttaattttacttaaataaatgtctaataattttattattatttttattttaagcccccgaaaagtgtgggccctaggcacgagcctaacccgcttaggcttatgcctaggaccggccatgactattactacccaataacaataacaatgaatgatcatcttatatagcatgctcttcttgatcaaccgtacgttcaactattttgaccaaagaccaataatatgtactcttaagagcatctcgaataagaaagtatttatagttgttaaaatacacatatcattttaaaagattattttttttatactctaatggttgacaactttaaaagttatccactatggtcccacatcacattaaatttaaaaaatctaataaaaaaattaaaaaatatatcatgtgatcattgtctatattgagcaaca

SEQ ID NO: 397740 - DNA, 913 bp, Cannabis indica
gtaaatttcctaacttattactttctcttaactccactatggattcagaattgcactcctgattacatagaatactctatacaacaagtatattaacactataatttattcgttgtttcaatcacaacaatcattaatcctctatagactgttacattgagtaaggacaaaattatcattttacccttcaatgtattttatctttaaaacacttaactacttataaattatatttagagaaactaatataattaccgaaacattcaacaatttaacgcctttagctaagctcaaaggaaactatcatttcatttctaataaacatagaagctatagatgtccatatttatgattaacactcctaatcaattacactaccaagttcccaagatgtaagtatggactagtcctataggtaagctgttaatgaacaagttaaaaaactcgtgcaatacaattaagctagagctcaacaatctcaagtttgagattaaatgatctatgatcaactaagtgacattgacttagaaaagatataataataagtttatgatatcttttccactgttaatatcggtccagctccatgtatagccaatacattcattcctagtttactatactaatgccttagaaaagacattccactcaactaagtgtaattaaactttattgctgatatcacgtcagtgtaaactcagtgcaataataaactgtgaaaataaataatttgaagaatataatcacatttactttctattatgatgacatcgcagtaattgtaattaacaatatgtttggtgttgacgctaaaaagtgaacaacaccaactcgctagattggcgagatgaataatgaatgtaagtatttaatttagacagacacacaaaatttgtagtagttcactccccat

SEQ ID NO: 397741 - DNA, 551 bp, Cannabis indica
ttagtgttcttttctgtttcataaagtatttgaacattaacttcactgggaaatattattttcaatatatatatatatatgttaattagttagatcaacaaaaactggtttattatttattcttttcaatcgtattttataaattatctaaataaaaagaaataaaaataaataatatacgcattctttattcaaattggtttttggtcacaccatagtatttgaattttatttaaattactgttattttttttttttgaagaagaagaagaagaagaagctggatatttttaattttaaatatcatcatgaatatcatgaattaaggaagcagttttaattttaaaagcttttatacacattttttatatttaggtctccaaagatatttggtaatccttctctcgctctccctttctccctgtgcaagttgatctgtgatacaaggactgttatattatttataataatataatatatagattaaatatgtgtaataaactaataatatgtaacatatgactatattagttgtcatctttttgtaacat

SEQ ID NO: 397742 - DNA, 568 bp, Cannabis indica
actgacatacaattttcaagactctgctttttgtccatatggagaatattggagagagatcaggaaaatttgtgttcttgagctgttcagtgtgaagagggtaaattcataccgatcggttagagaagaagaatttactaagctcataaactccatatctcatcactcctcatcttgtcctggtgctcctgttgatcttactgagaagctttttactcttactgccagcataattttcaggactgcttttgggacaacttttcaagatgctaaattttctcatgagaattttcatggtatagttcaagaggtggaaaccatcatgggaactttctgtgcagctgagtactttccatatgtgggatggatcgttgacaagctttcgggtttagaacaaaggcgcgaaaggatttttcacaagatggatgatttctttcaaagggtgattgatgatcatcttagttcaggaagagaaaaaaaagagcatgaagacattgttgatgtgcttctcaaaatagtgaaagaccaagctggttttcaagctgcttctctaaccataaacaatgtc

SEQ ID NO: 397743 - DNA, 521 bp, Cannabis indica
tttgttgttgatgctcgtggtcatagtgggggtctggcgttattatggaaagatgtcaaggaggtggtaatacaaggcttctctttcaaccatgtggacgccatagttgagcttcaggggtttcttccttggcggtttacaggcatttatggcgagcctaaacgggagctaagatacttgacctggaatttatttcgctctcttaaaaatgattgtaatctcccatggtgccttatgggagacatgaacaacttgggttcgcatttggagaaaaaaggaggtaagaagtatcctgaccgtctaatagatggattcattcaagctttgggagactgtaatttgatagatttgcctcttgttggttaccctttcacttgggaaaaaggacggaatagcaatgactggatcgaagaaaggttggacaaagctttggttactaatgattggttgtctatcttccctatgccgattctatacaacatggagattaccaattcggaccactgtcctatcttgcttct

SEQ ID NO: 397744 - DNA, 770 bp, Cannabis indica
tcattgatgttcatgaggattctgttgatgaaggttggggcccttttttgagaattcgagttaaaatctctgtggacaaaccacttctccgtggccgaatgatcagtttaccaaggattcgggatgacttttgggtggattttcgttatgagcgattgcctgagttttgctttgaatgtggaagggttggacttccctttgaaaaatgtgttgctttcatggaaaggatggacaatggtaataatgatgatcttgaatatggcccttggatgaaaggggcaaaattacctacaactggctatgataaatatcggacagactttgccaagggtaatgcttggccacttttgactcgtttagcccgtaaatcgttgacttccacaatcccaactcttcataccagatcacagccccaaccaagagtgcttttccatggtgaaacttcgaatcccactcattctctcactcctcccacacatactttacctgccccaatataccaacctactcagcctccactttcattcactacaccagcatcgactttccccccaaacactaatactttttcgatttcctcatcatacacttccacttcaatacctgctactatcccctcttctcatcatctctcggcccttacctctactgcttcccttatgaccatctctgagtcttcaacatcacccaatttccctccctcttctaccagtactctctcaaagccttccaatctctccactactgccaacctaaaccatatatttatc

SEQ ID NO: 397745 - DNA, 527 bp, Cannabis indica
caagctagaagatagcattcactactacaaaacaagactttagaggcggtttttttagcaaattaataaagttttaatagaaacacctacggagcggttattacaaaggtatttttaattttaataaaaaaaaacgcctatggcgtcggttattttgtaataaccgatgccatatgtctttacataaccctctccagctatcgtcttcttcaaatcctaaaataaccagcacccccccttcttcctctagaacctacgaaaccctcgcccaaccacccacttcttccccctatttcttcatttttcatccgttttacccattttttttaaatcttgcatttttcatacccaaaaatatatccccggagtttgatcgttttttatttggttttttagggtaaatcgagcttagaggtggtggttgtggtggttgtagctccgactaccgcttttgatggagaaatcattgaatctcaatgttcattaaggtataaatctactctctaataattttattaatataaatt

SEQ ID NO: 397746 - DNA, 1122 bp, Cannabis indica
tgtttaatctacctagacaattggaattttagttggttcaaggctgttccaactggaattctgcttggactgtatcgaagaaggcagattttttgtatttttgccataacttttcactcggttgtccattttagacgttctatataccgttttaaagcttatgaagagctcttcaatatggtatatcagctagagccaaattctttattttatttcagggtgtcttaacaacaatgttaagtagaaaaactctaggttctgttcaggcattagagaagtgttctagactaaacacttatcaattttatgttgtgacatagggcctccattcagtgcgtaattttccattcagggcaactggcacgcttgaatttggaaatgaggtaagactggcataaaacatattatatatgcatgttgtgtctgtgattatatatgttttaggtgatatcataacggcacaaaaattgtgtcgattcggcagtacaggctccatactagttaagagtgatattcaacccataaagtattaattgaggctatcatggcggcacaaccattgtgtcgattcgccagtacatgcatagtactggttaagagtgatatcaaggcaaattatacttttgggtactattgatgctatcatagcagtacgaacatagtgtcaatcccgcagtgtgatcatagtgctggtagtgggtgatatcatggccaatagtgccaactgttaagaaggctcttacttatctaataagccttgtggataggtatatgggcgcctagatacaagtcggtagtatattttttgttatgtacttttcaaactgagtgtcgactcacaaatattatttctgtttataggttaagaaaaggcaaaggtagaacaggagtgagttttgagcttgggggatgattgtacatgtcgagacggcgcgacctggagtgttcggtctcgagacaacttgaattgtattttgtagtcgtcgtgtgacaagttaataaaagtattttgatatagattttaaaagtttaaacatgggatcccaatttatgtaaatatatatatatgttataaagtttaatagtattaaatcaaaaatttaatttggcacgattttcaaa

SEQ ID NO: 397747 - DNA, 974 bp, Cannabis indica
atggaaaaaaataatgtaatagtacaaaaagataaatcaagttgacaaaactaattataaaaaattcgtaatataaaaacatattgaagaattgatattattttgcttattgtaattaggtcaatattatgttatttttctgttactttgtagctatatttttgttgttttatagttgtttccatgttaattatttagttgttttatgattgtttttgagttgttttatttttgtaaattactattttctaaatgatttatttataagtcatagcttttaaaatcaagcttacaaatctggcattataaataccataaaaaaaacctaaaactcaaaaaatgctacaaaaatgtataataactaaacttaaaagtgacatattttataaaaaaattaaaaaaatcatatttagtgtaatttttactaaaagcaaagtacacttttagttagtaaatttcctaggtttttttttttcttagtcaatgtttggatgagagaaacttgatgggataagttgaaaaatattccaataaatatatttgtaatcttgtgacattttcctaggagtgcagatctctcatactcttaaatctgctaatacttatgcacataagcttgttaagtatgttctttcggtagacacaaattgtgtttagttgggggtaacacctcctctttgaactattgtattttattgaatcatctaatatataacagtttttattctaaaaaaaaatatcctaaagtaaaataaagaaataaagtgggtataccgtaatttcctcaaacaaacccgatgaaaatttacaagaagcccaagcccaatattagaagcccaacccaatcaaagtcagcaaacttcaacgactctctctctctctctctctctctctctctcggcttggtgtgagctgctagggctgggggattttctcatcaattcaatcatttttcaaccattttaagtgtaatt

SEQ ID NO: 397748 - DNA, 957 bp, Cannabis indica
atgtgtgcatggaagaaaccaatcgttttagttgaccattttatgaatagtagtaattattggctcttttaatatatgtaagatttgcatttgcactatgttataatttcttaataattaaatcgtttgttctattaaagtaaaaaaaatgggtttttttttttttcagttttaaaccgaaaaaagtaacaatattacaaaaaatatttctagctgaccaaataaacaaatacacagcccaaataaaaaaaaattacacaaatactacttacacacaccttcaacccaagatctatgcttcctggtcaactatctcgcaaccatcgtgcaaccacgtaacaacccaacgcaactgaaacgaaaattcaaccagaaagagagtcaccattaattctggcgacttcacctgagaagacaaccagaatcaatcaaaacaggggctgtttcgaatacatgaaaaaaagtagaaaaactactacgaaactaaaattcaaccagaaatccagtttaatttgcataaaactaatgtcctgactttaatttttaaatctatgaaaggcagatctcaaaaatttgaattagagttcccaaacaatccaactcaaatataatctaaaaagaattacattaatactatagtaaaatgtttattctggtgtattttccttattttctaaatttctaatggtgaatttgttcttattaaatcataaagagacatgtatatagagttacgtacgtggaaatacttttatgatttttaatgtttcataacagttgcattacaattgcattagagttgcataaacattttgttaacaattatttcgtctgatgcaaccaccacgcaaacacacaacaaccaccctgcaaccatcgtctgattgtgtaagtgatagtgtaagaggtattttagtaattaaaattacataaaagatataaatgttgtccacacct

SEQ ID NO: 397749 - DNA, 761 bp, Cannabis indica
attattgagcaagaaaatatatttcatatctcttaactttcaatctgacgtcttaagcccgtaagtcttgattaaaaattcgaaactttaagaataaatgacgaaaactaagaagaaatggaagggttgagatgagcaaccgtgaagaatgatgttttgactaattagtttgcagaggacaaaaaaattatgatagtttagggtttgataaagaaatcatgtactaaaatgtatgagatatcctattgcgattggcactacaaaaaatcttacttttagtcacaacaaaacttgtgattaaaagtgaaaaaaattgtgactaattataaatgattattcctatgttgtgactaaaaggtccgtgactaaaaatattagtcacaaaaattacaatttgttatgactaaatatatttttagtcacaatacttgttgtgactaaaaaaatttcactaaaggtagaagttttttgtagtgaggtataataataataataataataataataataataataataataataataataataaataaacaaatatttaatttttaaattttaattgttagtcctatatctcataactttagggctcaattttcacctagaaaaacttttcaattatatttatttttagggtaaataccattttagaccctgtgttttgcaaaagttaccgattggaccctctgttttgttaaatgacaaaatggaccatgtattttccaaaatagtaaaaataggaccctgagcttaat

SEQ ID NO: 397750 - DNA, 582 bp, Cannabis indica
atatatgttatacatctcatatatataaggtattcctcaggtgagagcatcacctttactttcatataaagtgttttttaagccattgagttttaatcaaggagttgtagtttcatcttaaaataggttatgtcacatgagaatataatagttgacattttttatgtatattttattttttaaaaagttagtggttaataaactatatatttatttaatgaattatttttagagctttttttttttattgtagggagttgttctattagagggagctttcctttgatgaggatttcaaatactagtgtgcagaaagtcatccaattcaattacaactgaccgatctaattactgttgggttttgtgccctaaactaaaacccacttacaatctgattagttatcaatctaagaagtttgaagtgatttatgtttgcatgaatttttctatgctttatggtttaatatatatttaatatatgcacaaaatcagttaagtccagaacatatatttattctacaattacagtattgtaaacacagtggaatgtgattgtgattatatgattcaaaagaactaagt

SEQ ID NO: 397751 - DNA, 588 bp, Cannabis indica
aagatattttgagagaaagaataacagacactcattgtgacagtcagtagttttatgatccgtaaggaaaaatactagctaggtaagttgtgcaatcccacatcgcctaggaaaggtcaagtgtgatgattctaagattgtgtaggtatgtgactatactatacctgacggttttaaactgtcgggtataagggcccaataaattcacaaattccaattaaaattgttgcatattcctataattaatgttataaactgtcgagaatactaatttttccgacgattttaaacagttacataattttttaagtgacggtccccccaaaaaagtatttttaggaccgtcgtgaattctgacttgtgtagtagtgaagttatagtagttttacacttctcctcacaaagaggaggtcccaagttcaactctctcctctcccaaaatcaacaaaaaacatatgtctacataaatacatttatattaaaatatatttaggtgtcgtttggttggagctaataaaatagaatagaatagaaaggaaaaaatcttctttccatttatttatttggttgcatattaaagtattggaa

SEQ ID NO: 397752 - DNA, 1224 bp, Cannabis indica
tattttaaaatggtttaccttaaaacgaaaatgtttattaatatcaacaataacaaaattctcattggttgtcatggcagttttagaacgtcttaaaattgttgagaatagttgttgtagaaaataaaaagatcaaatttaccaaatcaaaatttgagttgagtcgcggactaggttgctctctttaagacattcacggcactgcctagaattgtgcaagcagactatcagcctcgttgtcccaagttgaaaacactgtatcagagctctattgcacaatagagaaccgtcaaaataccacacccaataatcgtactactgctcggaatacatatgtaatataaaactaaatattatttttctaagaaaaatgggatatctttcgtttgctggttctaatgcattatataagaatgcacagaatgaagtagcaggaagaaagttattttttctaatcgtggggatcatgtgaacgatcatgtgaccgttactgaaaatacgaagttataagtcgtcatgcttcttggtctaaagttcgcttacctcactataagaaatgtcacttttactagcacagttcgctactgcgctgttaaaagtaacttttaccagcgcattttgccaattgtgctggcaaaaaggtcaaagatttaccagtgcacatttgtagtggctaaatctaacttttaccagcacattttcgcgttaggaaaagtcatttttgccagcgcttttcattttgtgcaggaaaaaattctaatgccaacgttaatctgccaatcccttttgccaacacatcagaagtaaattctattttaccagcgcaataccaaacttttaccagaacaaaaatgtgcaggcaaaagtgacattttttgtagtgtctaaagcttatgggggtttaggttttggtgaaggtgctaagtggaacaatgatatgatttcaaagtatgtttgggcaatcgatcatcaacaggagaccttgtgggtgaaatgggtaaaccatatctacttagaaggttaatatttttggcaataccaactcaagtcaaattcgagtaagtataagcgcaaaatctatcacattcgagatgcctttactcaaagtgacatagatatataatgcatgtcatgggagattcaagattagcgttctctacaagagtaacctctgctcgatttatgagaaggaagaagagaatcatgactatttattttttattt

SEQ ID NO: 397753 - DNA, 1427 bp, Cannabis indica
tggagagtttgatcaagtcagtcaccttcatgagtcgggaagggtcccaatcatctttcgggacaagagtagtcagggacagtgatcattcccagactacaaggagctatctattggttttagtggtaccaaatcaagtatgcagacgaaataaaagtttatgattatcattgtgccacatcctcagaatcactatatgtatatatatattaaatctaagagtaaaatagatgaaaagataaattacctctcgaagcctattagggtatccttgagtcttttcgtatgttgtatccttggaacggcgacattaaactcacaccttaatcttccagatctttcaccacacacattgactagtgtgggctagtagaataaaatgtatataaagctattattagattctcaacacatgagcaagaataattttagagtgtttgagagaaaagactaaattagattaatcctttttaggctttccaaaaggttacattataattttatatcaaaatttaatttatacgttatatttaaataaatccaataaaaattttatttaattaattattcaaatcatttattaaatcatatttaattatttgaataaataatataatcgaattttactatagatatttatttcaaatttaaatatttaatttaaactaaatatttaatgaccgattgagggaatctctcaaccacttgagggagtctctcaacgaccttgagagaatatctcaaccaacaaaaatatctataactactttttaaatttaaatttaaataaatatttatcttttgaattaattaacctaaaaacaaatatagtggggacaaccctatatgataggctcccatcactgtgtcaagacacagtatggcgccacctatgtcttaacaagatattggtggtatcttttgtccagataacttttatcttttctccaatttatttaattaataaatttaaaaaataaattattcagtacaaaataaataattactattttgacaaatcaaaatagatttttcgaacttccatctacaacttttattcctacccttgatagtgcttcaaggtggcgatttggggaccatggatcatggacctataattctaagctccaataaattaaattattttattgaatctcatcaatcaaataatcttgttcattaattccatgaccactccactataaatatagaattgaaatcttgttaattatagaattatattaatgagttttactccaatgtccattgatataatcaaatctagtgattacccctcctttagtcagttcgtaattagttttggtaaaattactattttatccttctaattacttttttatcttttagtaccattaattcactgataaaagtataatttagatccaatctaaatttgtgcacaactt

SEQ ID NO: 397754 - DNA, 582 bp, Cannabis indica
attgaggcatataagaaaacatcgtcagctcgaacccctctattgtttagatcccagataaacttgacccaatcccaaactcggatgccagtgtcacacactggatagattccccaaggagaggagcgccaaaaatgaaacgccacatcacaggacaggaagagatgttcagaagattcctcccccaacccacataaagggcaactagagtcctcaatttggaatcgtcttccgattaccgctctaatagggagagcactagaaaggatacaccaccacagaactttatgacgttccaagattttgctattccataacttgttccaaagtttgggggccacctcacagtgaggagctcgttccagagcctgagccaaatacgcagatttagacgagaaacgcccattgctttctagcgtccaaacccatctatccataccagctccagatgggtgccctcctttaagaatgtcagagaccgtttcttgatcaaaacagcctcgcagttttggcacatcccactaaccattgtctaacagtaagtcagccacactatttgttgcgatattttgcacacgcaag

SEQ ID NO: 397755 - DNA, 666 bp, Cannabis indica
gtttggttcaatgaatgttgtttgatattgatggcattcattgtactaaattgtatgatcatattcttagaattctgaattggtctaatgataatactccttatgtgtgtttgaagttgtttacctgttttatttttgtggtaacttaaagtgaagaatttatttccaattgaggaggaatcgttgagcttacatttggatggattctttgtggataagaatctagatgaaattgggaaagaaaaatctttggagattgatgatgttggtagtcaaggttctgtggatgaaaatagttcatttattaaatttgtagagtttcataggagattgacaaatatttctacaaagcaggaaacattcgctgctgaatttattattttaaaagaagattttaagaatatgatgtcttcttcggaatctgcgcataaaaaattaatttgttgttgttaagacctcctcccaaggtttgtttttattttgttattaatctttttatttttgttctttttttaagcattatttatttttgtttattttttatgtgaaggattctcatgaggtaaatgatgatgaagaatatgataatgagaaagatgttgagattgaggagacttctcgtggggatgataatgatgacaaagttatgagcaatgatgatgagga

SEQ ID NO: 397756 - DNA, 528 bp, Cannabis indica
atactagattaattaggggtatggtaaaataaaatccctccaaaattattgcattttccctttgtaatttttgggattttgaagtttcatgaactaatgaaaactgataatgtaagatttttttttttgctaaaagcaaacacacaagttatcatccgaactaataaaaaaaaaaatgaaaatttactaattgacattgatttccaactagcttaaaaaaataattggattttggtaaatttattcggattgtattaagctggttgtagggttattttatgggcaatttacattaatgtatacattatataattttattacaatatatgtacataataatttattttcatataattatacattttatctattatgaagaaaattatttttaatttattatacaatatataaatagtaagtatttgattatttgatttattatcactcattattatagttattgaatgatgatatatcaataatcattttatatttttatataattttaaataattttaaaaatcaacc

SEQ ID NO: 397757 - DNA, 536 bp, Cannabis indica
tttttttttcttctttttaaacaacaaaaaaaaatcatttattcttggatcttttattttggattgaattaatttttgggtcttttaaaaaataatactttattcttgggaattaagtatatccagggaagggaaggagccaggaggtagaaaattaatttatttaagagggaccaaaaatttaaggacactgacaaagaaaattgagaaggacgaatatcaatttatcaattttttttaaattactattgggagtattagtagtcttcaacattttctatatgttattaattagcgatattctttaattttttttttaatttatatgaaacacgctatttaattacaccaatagcgatataatattaaggagaatgctaggtaccaataatatccttcagcaattttttttttaagagaaaattacactctttatcctttttatattttcctcttttatttttactttttttttaaagtctatcatttttactttttttttttaaatattacattaattttgcccatgtcacttc

SEQ ID NO: 397758 - DNA, 661 bp, Cannabis indica
ttcatctgacttgtttttaaagtgccgttttgttcctatcacattcgcaccatctggtcgagggaccattatccagacaccaagtcttttaaagtttcccatttcatcctgcatcgcagccaaccaaaactcatccaacagggcatctctgacacttttgggctcaatttgtgatagatagcatgcaaatgctaacaagttctacagttttcgtctagtgaccatggtgtcatttggatctcctatgactgtggcctgaggatgagctttctgaacccaggagggcggtccaattttatacaatttggcttgttggggttctttggtcagggcactattaacttcatttcctctctctgggtcactggcattttcttgattgtcacctgatacacctggttctgcatttagagactctgtaggagtgtcaggatacacttgaggcagtctagtgtttacttgtctaggtccagagaggacaggggcatcatcctcgacacacacttcttcatgtccttctaagtcatcaaatttgacgttcattgattcgaccactgagagagtccttttattgaataccctgtacgcacgactgttgatggagtaccccagaaatgtcccttcatcgcttctgggatcaaacttggccaagtgatcacga

SEQ ID NO: 397759 - DNA, 386 bp, Cannabis indica
tccagcagatttcattcctcagcctgtgaaggggaggaagaaaaagtccagtgctggccgggctgagggagctgaacaagagaaggagctcattcaactgaagcgtgaggataagttgaagggagatgcaggagccaagcagcatgctcaggaatattctgagcaggagaaggagcttattcaacttaagcgtgaggctaagttgaagggaggagctggagccaaacaatgtgctcaagaatattctgagtaggaggatgaggctcaggaatattcagagcaagagaggccactccaaaggaagaaaaccctcacgaccgagcaaaggctaatcgaacataccatccatatcagggacgcccggtctacctgctcggccatccacc

SEQ ID NO: 397760 - DNA, 1108 bp, Cannabis indica
ggtctcggtggcaggccaggaatctgctgatgttctcccaggggagcgactggtgctaacgctccggacgcaccctgggctccttggggcaaaggtcctgatgctggaaccgggctgatataaggcaaccggttcttaatccactcgtagagatgacccaatcgaatcaagttcttgatctcatctttaaggcttttgcattcattggtgctacgtccaatgttgttatggtactcacatcttttgttggggtcccttcggaagctatctctgtacagaggaggcggtctccggtagtgcgtatttttcctagtggcaaaatatacacgttcctgggagtctgtcaattctatgtactgggtgtattgggagtgtaccccattttctgacgcttgtcctccgtccgggtgctaccttttgaggacctcttgcttcgagagccttgagaaggtcccactaggcttgcagcaggagcggagtgagatgggacttgtccacttatcccagaaggattcccgtaatgagaagatgcaggagccaatgcctgattctgatcatatcctggggtagcggaaaattgtattctgctcattggtggagtagctgttagtagggttcccgggagctggactctgggcacataccctgctattccggtcggatagtatcccccgtaagccactatttgggcttcttctaagttgatgtacttttggactctcttctggaagtcttgaaggttgtaggctccttcttgctgtaattcgttccaaaatggagtccctgtacggattcctgcttgaagaagtgcaagctgttgtccgtcgtcaactttcttagtcttcgaggcttcttccttaaacctctttatgaagttcttcaatgtttctgtgggcagctgcttgatgctagtcagggcgctgacctcaagattaacctttctcgcggcgaaaaactgtctccggaagctaacttgtagcttgttccagcagtccactgatcctggtcccagctttttgaaccatttctctgcgaacccactcaatgttagtgggaagcataaacatttggcgtcgttgctcactctcatgaccgtcattactcggtt

SEQ ID NO: 397761 - DNA, 635 bp, Cannabis indica
ctgtccaagatccattcatcacaattcttttgctgcagaatgttgcaggcatcaccacttttctcactagtgtagcaatcatttatcacagcaaagagatcaccatctgagctgtatgtttcatctaccacagcatttgagtcatttgacttctcttcttcatccttttgtttctttttcttgttcttgatttcccagcagttcttgatcagatgaccaactttgccacagtgatgacattttcttgtctccttaggtctagacttggatcttgagtgacctctaaactttgaattgtgccttcttggatttcttcctctggtaaataggctttcttcttgtcttgtctcttgtctagcagccttttgccaattcagttcagcatctctggacctgagagtgctcatgacatcttccaaggttagtgtgtctcgactgtacattatcacagtcctcatctccttgaattgatctggaaggccatttaatatgatcacagcttgatcttcttccttaattgtttcacccatattagtaagagacaacacaattctatttaactcatcaagattttgttctaaagaattaacaggattcattttaaaaccatagaacttccctttcaaaaaaatctt

SEQ ID NO: 397762 - DNA, 905 bp, Cannabis indica
acataataaaattgggtaaatcatatggtcaaaaccctaatctgggaaacccgaacccacaaccctatgttctgttatactctctagggattattctaactcaggaaatagggaaacacccaactaaggcacagaatggacgagaattgagaaacttattttcggggaaccctaccaaaactggtttaccggtttgacagatactggtaaagccggtaaactagtttttataccagtctccccaaaaattcaccaatttgctcaaaatttgtccaattgccaccaaactttccagagtacctaaacaatgtatacacaacatattccaaccagaaaatcatagaaaaacccaatgaaactcaacttgccattaaagaccaaagctttgagttcaaaactcaaacttgctcaaaactaataccatacaccaaaatcagctcccaaaacctttaactaacctatattgaccataaaaatcgaaccccaaacatttctaaacctaacagccaccaaaacaaaaaaatcacatacacaaccaaccataaaattcaataaataaggaaggatgttactagggcttaccttagcttcaagaacccttgaatctctactgaatttccagaaaaaaaaaacaaggaatcagctggtccctccctggtttggtgcagctcgaagggaaagggagaaagagaaagagtttctcttgacttttcttaatttctctgtatttccctaaaataaaattaaggttaaatgaattaaccttgttaaacaatacttgctaggtgtcccataactaggcaaccacctaaccatccaataaacaaaaagactaaagtgccccttagcttacaacttaagcatttttaagactaggggtaaaatggtcaaattccataaccccg

SEQ ID NO: 397763 - DNA, 596 bp, Cannabis indica
cttgatgttcctgagtagaaataggaatacattgctatagatttcgtgacgggattaccaaagaatagcaaacagcaagattctgtctgggtgattattgacagactcactaaatcaacacattttctgccggtgcacactaattacaatgctgaacaatatgctgaattgtatgtaaaaaaaattgtaaggctacatggagtcccaaagaccattgtatcagatagaggtttagtttttacctctaagatttaggaaagtgtgcaaagcgctttgggcacaaaactaaagttgagtacaatattccatcctcaaactgatggacaatcggaacgaactatacaaatactagaagataagctacgagcttgtgcgttggatttcccaagtaactggagtaactatttgccactaatggagttatcgtacaacaatagttatcaatctacaatagggatggcaccttatgaaatgttgtatgggaggaagtgtcaatcaccactaaactgggatgaggttggcaaaagacgatacttaggcctagacctagtaagagaggccactgaagcggttgaaaagattcaaaatagaatggt

SEQ ID NO: 397764 - DNA, 654 bp, Cannabis indica
ctacacagactcgtggactaaggctcattaacgccccaaccacgtaaaaatctctctcttaatttcttacagctctctaaactattattattttattggttgccgaaaacctcggtcaacagtacgtatatggtatagtatgtatatgggtattgattttcttggggaatagctaataatgatttaatgacaaatactaataaatacaaatctttaatatttgtaataatagttagcttttaaaattaactaaaatattataaagatataaaataattatgaatatatcatccttcattagttaaaataatgtgttataataaataaaaaaattaaatacttatattttttgacttgtcaaatatttattatatatattgtatgattaattgaaaatgattttttttttataatagataaaataatgtataattttatgaaagtaagttattacatatatattgtaataaacttataaaatagtttttttcttgggaaaaaaacagaaaaatacaaaaaaaggaaaaaaattacaaaaatactctgggctggcccattaaacatttatacagtccacatacaaatatttacaaaaataccacatggactaagccttcagttgtaaagagcgaacgttgaagatgaacatacctc

SEQ ID NO: 397765 - DNA, 537 bp, Cannabis indica
ctctattatacgttaatagtatagattttaaacttcttaagaaataaataataaaacaccctaattaactttttaacattcttaataataataattaataatataatgaatagatttaaactatatattttttttttggagctttatgttttaataaataaatttattagtaataatatgtaattagataatataattttactgttattatatattagaattttttttttgaagttttatatattatattattatattaataaatagttatttttttattataatattaagaaaattaaaatagtcgcgcgaagagcgactatgttaactagtcaatatcaatatatataaataaaggaaagcacaatagtgatgatatggcagtttctatgaaattcttttccttttctttgttttctcatattttcacatttttttttttaatttttacttttctttaataaaatctttcattttttttcatctcaccttatttaataataagacctttcatttttttctatctcaccttattta

SEQ ID NO: 397766 - DNA, 565 bp, Cannabis indica
aaaattacttagaatttagttaacaatttaggttaattgtttctgtgattttgtattaatttttttatttcagattttattataaatttattaaattaatttttatggaaatatttttttaaaaacaaacttaatttttactttaatgattaatattaggtggctaattaataagatgatatggcaatattttaaatgatgtgtcatgccatttggtgtctaatgtgcaagataacagtaaggtacctacggaatatctgaaagtgtaacagaaggtatttatgctgccaaaattttaacttaggtattaaattgcaactaaaagataaacttaggtatttataccgcaaattactcttttaatttatatcaaaatataatatatttatatataaataccaagttgaatcttaataaatatgatatatatatataataaaagaagcatgagagtacactacaaaaaactactacttttagtgacaattttttaattacaaaaaatttgtgtctaaatgctatgttttaatcacaaataattttttattgtgattaaaagtcatat

SEQ ID NO: 397767 - DNA, 972 bp, Cannabis indica
cagatattggaggatatgttacgagcctgtgttatggattttgaaggctcttggagtaaatatctaccgttgatagaatttcatacaacaacagttatcagagtacgatagggatggctccctatgagttgttatacggtaggaagtgtagatctcccattcattgggatgagacaggggaaaagaaatacctaggtccagaatcagtgcagcggaccaatgaggcaattgagaaaattaaagctagaatgcttgcctctcagagtagacaaaagagttatgcagatccgaaacgcagagatgttgagttccaagtaggggaccatgtgtttttacgagtatctccaatgaaggggatcaaacgtttcgggaaaagaggcaagttatgccctaggtttacaggacctttcgagattctcgagaaggttggtcaagtggcatatcggttagctttgcctccagctctttcagcagttcacaacgtattccatgtctctatgttgagaaaatacgtttcagacctactcataaactaagcgttctttacattaggtagaggtgccggtggcacctccatgttagtatttttttattttacaaataaaaataattaatagagaaaaatattacatgattataattaataaatattattttaaacgtaaaatgatgtagttaattcaaccaactataaataatgaaattgttagtatgtaaattttttttgctaatcaaataagtaaaatttcactatatatttatattttatattctaatgtattataatgcatttttataatagtagtttttttgaaacacgatttttaatgtattctttcatatttacagtagtatttgtataattataatatcatatcatagtgtatattttagctatacataatttgttaattttagaacttttcaataatttataatgtctaaatacgagttcaaaatgtttgtttcact

SEQ ID NO: 397768 - DNA, 878 bp, Cannabis indica
tttagggtttaatggtccacttctagttccggttccaattttgggtcacaaggtacgatttaaggtttgggtgtgggtcttagtccgagtcctggtttgggtctaggtccgtgttttggttcaggtctgagtattggtccccaatccaaacaccaaccacatgtcgagtctagttcgagttttggtatgggttcttgttttggtccgagtctaggtccaggtcaaggtcaaattccctaatttagacaccgactatgggtcgggtccaagcctcgggtcttgggtcctgtcccaggttaaaatctagatcctagtccagttctagctcatgtcttaggtcctggttcgggtcttaggtccaagtcatgggtcttggtccccgattcaagtcaagtggtagttcccggtcttaaggtcccagtccgcgtgtaggtcctggtctgtgttcagtaatggtccttctctcgggtcttggcctggtttaggtctaggtcatggttcggttctcatgtcccaggtctgagtatcgggtcctaggtcccagtctgagttctagtcctagtccaggttcaagtctaggtcctagtccgggtttgggtcccagtctgggtcctagtccgggtccaagtcttgggttcgagtacgagttatagaactagtccaggtttgtgtccgggtctaggtctgggtttgggtctgagtccgggtttcagtctgtttcttggtctaggtctgggtctgggtctgagttcatgtacgggtctaggttctggtccaagtctcgagtcacgggtcctaagtcacaagtcttggcgcaagtctgggtccgggtttgggcctgggtcctggtatcagtcccagtctgggtctgggtctgt

SEQ ID NO: 397769 - DNA, 1009 bp, Cannabis indica
gaacaaaaaaaaaaaaaaaaaaaagtagaaatcaaagctacatagttactttaaggggtcaattaagcttttaaagtttacactaaattaaagaagtgaacaacataataataataagaagaagaaaaagaaacaaattgccacttgaacaatgtgtgtactcatctaaaattagtccatttccatcatcatcatcatcatcatcatatattttgttctcttattcatcttgagatatccaattttggagagtatcctaattgttccatttcccagcttagcttagaagcaactatttcgtggcgcggaaaatactcctaaaaaaaatttagaaaaaaattagaaaaaataatttgaagcaaaatgaattagggaatttgttaattttggattaattaattaattaattaattaattacctccattttcttgactaattctttggctgaaggagaagagacaattatatggcgtgcagttgggctaatgaagccttcttacaacagctttatcaatgaatgacaacaatgagttgtagtatccatccacattcaacaatcccacctaatcaccacaccaaaacaccaccacatccttagtttttacttatttactatcgaataataatggccgactctgaaattttgtgggccatagaaaaaaaatttatttgaacgtttaaaaaatatggtatttttgaaaactactaaaaaatatgtgtatttttcaaaagagttttttaagccctttggctggcccaaggtaggccctatatcaaactaattgcaaaaataagaaatttgtaaacattttgtgacatgtttacaacaaatatttacaaaaataattatttttacaatctaatcgctcttttgattttgatagagtcccttgatgagtcttacctttctttccgaggtatatatttttcttattataatactttacttggactgtattgtactatgtatcatttgataacccaataaatcccctactctattttcag

SEQ ID NO: 397770 - DNA, 985 bp, Cannabis indica
attaaacttaaatatttatctaaaatcgaaagataaaccttaaatatttataccacaaattacaatattcattatctctaatatgcaatcaatttcaattagaaagtgtatagtagattccaattacctttaattatatgattattatagatttcaatgtgaacaattaattcaatgtgacaatccaaacaaaacgtgtcgttgaaataattagacagagtgatgataggtcattttcaacttcatcatcatctttctttgagttctttccaaccattaattatataaatatgtacacatagattatagatatataaaaccccattacgtgaaactactgttacatctaaactaaatagttaagagttagagaaatcaatgaaaccaagtttagtaattatagtataatagtagaatggaaattgttgaggatgttgtgattgtaggagctggaattgctggcctcactacatgcttgggacttcacaggtaatttcttaattaatctctctctgtttgtgtctccataattatatattatatatgatataaagaaaaaggttgatgtgtgtgaattaaggttgggtattagaagcttagtattggaatcagcagagtgtttgaggataacaggatatgctttgatgatatggaccaatgcttggaaggctttggatgccattggtgttggacactctcttcgccaacatcatcacactcttcttgggtaccctatttactctctctccctcttatatattctactcacatctcatactaatactggtaattttatagtaaatagtaaacctcctaaatgggttgtttcgggttttggtacattctacttatttaaaattaggctaattagcaatttttctccccgaattttgacgtgtactaaatcatgtcccctgaattttgttggcggttaaaaattcctcctgaactattgagattgttaaatttaaggacttttgtctaa

SEQ ID NO: 397771 - DNA, 1228 bp, Cannabis indica
tctatctcgagttcccaggttacttcataatactttactagtgcacttgtcttgtttctcaagactttcactcctctatatagtatttgcaccggttgtttctcatatgacaaatctgactgaagttccaatgcttcataactcatggtatgggacgagtctcagacataattctgaagcattgaaacatggaacacatcatgcacagctaccagcgctgagggcatacccaacgtgtacactactcgacctatcctcttgaggatttcaataggtccaaagaacctcgggctaagctttcctttcttaccaaagcgtttaatgactttcatcggtgatattcggagaaataccatgtctccgatctagaaatctatatcccgacgctttttatctgcataactcttctgtctactctgagctgcgagcatttatgctctgattttgtcaactgcctcactcgttctctgaacagcctcgggacccaagaactttctttcaaccacttcatccagtgaataggtgatctacattttcttccatataaaagctcataaggggccatcccgattgttgtctaatagttgttattatacgagaactcgttcaggggaaggtactttacccatgatccatcaaagtcaagcacacattcccgtagcatgtcctctaagatctgtattctcctcttggattccccatatgtctgagtatgaactgatgtgctgaaatttaactgaatacccatagctcgatgtagactctcccagaatcttgatgtaaacttcggatctctatctgaaataatggactttgggacaccatgaagacaaacaatttctctaacatataactcagcatactggtcaatggataaattcgtccgaacaggtaagaagtgcattgactttgtaaacctgtctactatgacccacactttcccgttgttctaggcaagcataccacgaagtccatcgaaatatcttcccatttccactttggtatgtttaatggctgtagcaatcctataggcctctaatgctcagcctttacctgctgacaaataagacactttgcaacataatcagcgatgtcattcttcatgcctggccactagaacatgactttgaggtcttgatacatcttcgttgaccctggatgaactgagtaaggagttgtatgagactcattcatgatctctcttttgatactctcatccataggcaca

SEQ ID NO: 397772 - DNA, 533 bp, Cannabis indica
ctagccttattgatcatagagtaatagatgaaaaaggggggttacgccatctgtcatgtcgtttatggagatttcaatacgtctttccccatgcggcattaaatgcgaagtgattgttcaatagattccagtacctcctggtactgccttagtatgtccctggccttcgggagcataaagatccttcttatgtctcctccgggagacaccttccctgagacactcctcttttgtctaagacttagttgatttctataagagctaatcctttcagctccacgtgtcatccttatctaggtccacgtattttgggcaaaatcaagggcaacatttaccctctaagcctcgtttggtggagaataaacgaggtttgtttggtgcctccggttggctcatcagtttaatggcacacgcttcaagtgcgtggagtgcatttatgatagtcatcattaacatgtatttgtttttgcaggcaacgattcgcttcccctccattaagaaatcagtgtatttaatcggtgtgtcagaaaagt

SEQ ID NO: 397773 - DNA, 863 bp, Cannabis indica
ccgaagatatatgcgcacttccttccaaaatgagactgtgaaaagtcttctcccaaagactcacacttgttcaaagcttctcttcagcttattctatgaatagtataagatcaaaacaagcactaaaacctagttgaacactctaaatttttacaaaaggaactctctcgtcacaaagataaaaatatgaaaaatgatactagaagaggtgagtatcgtttgaccgctctctaggtcctatttatagcacatagcaatcctagagacatccagaaaaataattttccatatgtacaaaactttcttaaaaaaaaaatatgatttgcagcatcagaatcggactctgcagcagcagatcagggtaagaaaggaaacttttcaaattggaccaagatcacgaatttggactttaaacctgcaaaatacagttttatttgatctgctcaagcaaaatcgaaattatcaattagaaaaatagaaagttaagtttcccaaaaataagcaattttccataagagaattttttctcttgcaagaaaagattcccaaacaaatacaaccagttgagaaaagaacttttcataaaagaaatgagcaattaaaggcacgaaattaacgcaataaaatcaatttaattgcttaataaaaaggcatattaattaaaaaatattttttcaactaatttgccaaattgaacttaacatcatgcataaggtgatcaaacttcaacatgtaataaatacaaaaatgaataaatcacacaatcaaagaagaaagaataattaactaatattaactcatgaaataatctcaaacaatatccatcacatccctaaatataaagtttatctcatataatcaaa

SEQ ID NO: 397774 - DNA, 705 bp, Cannabis indica
gtcgcacagcaactacaaaataacaaccccaaaagtcccgataacgaacacagcaggtcgcgccgccatgacatgtacaacctcatccctgcacagactcactctttttcacctttcgcctttcctttacctaaacatggaagcaggactgtgagttgacacactcagtaagaaaagcatataacatatcatataatacgtatctaggcgcccatacacctatttacaaggcttaacatatgagtaagagcgttctaactatgaaacgaccatgcaccactataccacatgcacttagtaccaccattgtaatagtgtaggtggggtatgaactgtaccccgagtattattaagtgttgtacaacatacaccttgtaccttccgtactagtgctggtaacatcgtgatgtactcttcagacatcatacactttaccagtgcagtctataccgctaccgtacaagtgttggtagtgtatgaatcacaacaagcatgcatatacattagcacatacatcacatattatacacagttcttacctcctttccagattcaagtgagttagctgacctgaacggaaagtgttgtgctagatggatgccctaatcacatattaaaaccgggtaaatcacatgtccaaaaccctaatcttggaaacccgaaccaacaactcatggttctgttataatcactagggactacact

SEQ ID NO: 397775 - DNA, 609 bp, Cannabis indica
tctgtgaatttattatttaaagacgccttcacggtaataggcctcagggaccgggatctctcgccaagtggttcccagctcacggtattcaatgggacaacacttatcccaatgggaaaagtaagatttccagtcaccttgtgcctggatacaccccaaagcacttttaaatactgcacattcgtggtggtagactgctcgactgcttacaacgtaatcctcggccgatcggccctggtggatttcgacgcagtaacgtcgatcaggcatttgtgtctaaatttccctactcaggaagctgggataaggaccgtgagggggaaacagggagaggccaggcaatgttataatgttgctgcccacctaccaatattgatggtccatgaagttattgagccaggaatggcagaagaagatgagttggatccccgtgtgggatccgaaaaaattgtagaacctatggaggacgtcgaggaagtatcggtatgtgaccttgaccccgccaaggtcctccggctggggaaaagtctagagccggaggaaaaagaaaaaataattaaagcactaagggcagcccctgatgttttagctgttggatattattttacc

SEQ ID NO: 397776 - DNA, 696 bp, Cannabis indica
aaaaaaggcctaagagttaaaaaaactctaaaaaacggggtcaaaaaatttagctattggttagataaagtaattttgagcattcgaatatttaaaggtaaacttgcgggtattgaagatgtacttcttaaaactcgcgaatattcgaagtgttcttcctgaaatccgcgagtattcaagtttcaggcaagtattttccagaataatatagtattttgcctaaactacgaaaagcaaataataaaccctattgtttcatgcattttctacccctaaaaacaccgaacgcttacgaattctcaagaaaaagaaaacggttacaaaaaaggtaaatcaccaaccttgaaatatagttcttccttggtgattttgtaagtagtgaagcctttgaaatcgttctcagttgaagggaattcaaaaaatctagaggaatttggaggatttgaaattctaagtaaggaaaggggagagacgaaaatgagagggaaatgtgtaaggattattttgtaacaagagatttaaatactaaaatccctcatttattgggatggagacacgtggcaaggaattcctaaggtctctcaatccaatgtttactagtaaacacactgcacaaacccaaaagggttctgatgatgtggcacctcaaaggataaaaaaaactaattacaaccatactttgtaaacctcgacaag

SEQ ID NO: 397777 - DNA, 1181 bp, Cannabis indica
taaaatggaggtttggttctctggttaatggggagcccgaatcccttcttcttggccaagcttttctttcccatgagtatttctttttcaccaccacaggttgcccctcactcctacaaccactgtcacctccgcgcaaccagcgtctgaatcgcctaaaaaacttcgaaccccaccagccacgttcgacccccaccggtgaccttcgacttcgaccccactagccaccttcgacttcgaccccaccagccaccttcgaccctcaaccccgatcagccgtagccccttcttctgaagtgacgttgtaaaaatagccctttttcaatttttttttttaaaagagttgaacagcccgttgaacagcccgttgaacaacacatttaattttccaactcaaacccacttttcattttattttagtttcctaaataatttttatttattaatatttttggaataatttgttatttgataattaaattgcaatgccatgtcattatatagtttctttacatgaaaaatgctacatcaattttaacaaaagtgaaacggagagtaactgaaggatgacatttaattagtttaaatagtttgaggagtatttttaacaagcagaatattataggggcaaaagttggtagggtaaaaagttcaggggcaaaaatactatttattctaatatttataataaaatatcataactaatatcataaattggttttcaacattaatggcagccatgatttcattaagagaaataattacaaccgtctttacggtaagttggcaaaaattgaacatgtaatagttggaatatgttttaccaggatctagatttactaccatgtatgttatttaacaccctaaatatgaatttctaaaacaatataaataaacacatataaagtttgagaaaccttacagtgggtgcagcggaatattaatggttctttccactcagatctctaacccttgtatcctgtctgtagcagggtatcactaagatctgagcccgaatgtccttctcttgattctaaattcttcacaggcttacaccctatgattgagttaccacttgatgtgtttgggcacttactctatcactcaaggtataaaatatgaagagaggaagagaaggttggttcgaaaataatagaagtgaaggctcaggaaaatttgac

SEQ ID NO: 397778 - DNA, 631 bp, Cannabis indica
taactcggcctagagagtgacaatcgtcactctaccattacattgaaagtcactcgacaaggagattcacaatgtcacttagcaatgacattgtgaaatgtcactcaacacacattcatgaatgtcacccaacaaggacattcatgatgtcattcgtcaagggcattcacaatgtcactcaataatgacattgtaaaatgtcactcaacacgcatccatgaatgtcactcggtaaggacattcatgatatcactcggcaagggcactcacaatgtcacttggcaatgacattatgaaatgtcactcaacacacatccatgaatgtcactcgacaaaagcattcacaattttactcggcaagggaattcacaatgtcactcgagaatgacattgtgaaatgtaacttggcacgcatccatgaatatcactctgcaaggacattcatgatgtcacttggcaagggaattcacaatgtcactcggtaatgacattgtgaaatgtcactcggcatgcatccatgaatgtcactcgacatgccactactacaaaaacaccctttagaggtggtttttaagccctttaggcgtcggttttcgcgaaattcgctaccgacgctgatcagggcgacgct

SEQ ID NO: 397779 - DNA, 544 bp, Cannabis indica
aaaccaaaaaaaaataattttttcatctccatgtcgcgctaattaaagaaatggttttttttttcagttttaacaaaagaaaagtaacaatattacaaaaatacttcaagctagccaaatcaataaatatacagcccaaattaaaacattacacaaataccacttacacacaccttcaatccaggatctatgcttcttgggcaaccatcgtgcaatcacgtagcaacccaatgcaaccgaaacgaaaaattcaaccagaaagagaaccactattaatttcggcgacttcacctgagaagacgattagaatcaatcaaaacaggggctatttcgaattcctaaaaaaaagtgtaaaaaaactactacgaaactaaaattcagccggaaatctagtttaatttgtataaaacaaatgtcatgacttcaattttcatatccataaaatgcagatctcaaaaagtttgaactagagttttcaaacaatctaagtcaagtataatccaaaaaaaaaaattacatcaatactatcgtaaaatgtttatcc

SEQ ID NO: 397780 - DNA, 1686 bp, Cannabis indica
agtaatgtgacgaaaaatttacgctgtactttgttcctcaactcgcttgtcggagcagcaagcagttggtttaacaagtttactcatcattcaataacttccagggagcagctctccagggatttcaaaaaatagttccaggctactagggatagacaatttgaagcggcctcgctaaccaatataaagcagcaacccgacaagacacttaaggcgtacttaagtcattttagcacggctacagctagggttaggaatttggatgatagtacacaacttacagcccttcaggtggggatctctactgatccatcaactgcagggggcgagctgtgggatgacttacaaggtcgtctagtaagaaacatcactgagtttgctgaaggggctcaagtatttgttcggaaagaagaagcccgaaaggaaatgaatttgttgaaaacaagctcgtgaggcaaacccaaaaatgcttcaacatgcactgtttccacgagaatggataacttgggggcttctggttcgaagagaaaggacggttctaaagaatcatcgaaggataaaaaagaaataaaagaagtacaataagtacgtgccagtgtatgctatttataccgagcttaatgaaactcgaaagaatatttacctctcacatgagtaaaaggttgccttcagtaagccagagcttatgaggaatgtgaggagcaaaagagatcctaacaggtattgtaaattccataaggatattgggcatacgaccgacgaatgtcgccaattgaaagatgagatagaaagtctcatcgctcgaggtcattttaaacagtacgtgaaaagatagcaccagggatacaaccagcccaatctgcccaataacccaaacaaccaggggttacaacctcttcctgttgaaggagaggacatcctggttatttcgagagggccacatatctcaggggaaaacaatagtgcccagaaaagatatgtgaaagagataaagaacgagcagtcgacattcaccccagaaccttccaagaaggtgaaaacagaagaacctcctattatattcacggagaaagacgagaaaaacgtgagatatcctcacgtcgattcaatggtgattaccattcaactcgccaataaaaggatcaagagagtgttaatagacaacgagagctcggtaaatatcctttataaggaaactctaaggaagacggggttcgaaaaagctaaactgaggccttgcaaggtgaatctttgcggattcaccgaagacagcatagcaactaataagttttttgaaggcgaaccaggatcaatacgcctggagccatggagatatgatagggattaaccctaatattatctgtcatcatttaaatgttgatccaaactacccagcgaagagacagaaaaggagacccttggattccaaggggcaaggggtactaaaaaaggaaatggacaagttgttagtcaatgactttatacgcgaggtgttttatccctcgtatatagccaatcatgttctcatcccgaagcctaacagaacctggagaacttgtactgatttctctggtctgaataaggcatgcccaaaagattattttcatcttcccattatcgaccagttagtgggtgcaactactgggcacgagcttatgtcatttatggacgcatattctagatata

SEQ ID NO: 397781 - DNA, 779 bp, Cannabis indica
ccaaccgtaaatcccagacagccgttaactgcgggtcatagtatgacgactcttgtgagtgaaatcatgccttgcgtgcaagagactgggaatacgagttcagtagccaactagggcattcataacacagccattccgccctctaccaatgttcaaacaaccattggagatgacactgaaatccagaccatccgtgctgctcttggagtcatgcagggtcatactaacaccctgcatcatgatcaggaggaacttcatgctgcggtgaatcttgcgtttgaagagcagaggcgcatgttcattgaatggagagataaggagatagaaacattaagggctcagcaagcagtcattgacgaccgtagtcggtaggccactgtgttgatacgaaaagcctatcagactaccataaaacagcctgtaatcatcatccccatggaggaaacagacgaagatccaacgatgaatacctcttagactataaatggtcagccgccaaaatccctggccacatgttccacctgtgggccaagttgtaggcaggtagacttatctagtaattcatcaggagaagtcatacccaataattccaacaaacttaatggttctggtcagcaaattggccaaaccaatcagtcgctaaggcagccatgcatttctgtatttaatagattagggacgactcatgatctcaacaatgatctaaacaggaggagggagtggaagatcagcttgatgcgccaatcgtgcaacccaaaacccgtgctcaaaatctctct

SEQ ID NO: 397782 - DNA, 611 bp, Cannabis indica
tcacatggatgactcccatagtcgcatacatggaaaagggcgttttacctgatgacaaggtagaagcaagaaagctgcgacagcgagccgcccgatatgtcatgtacgacaaaaggttatatcgcagaagttttagtcaaccgttactcaaatgcatcaacggtaaagattgcgactacatactacgtgaggtacatgggggaatttgtggcaatcatacagggggtaactcccttgcattaaaaatcatgtgacaaggatattagtggccaaccttgcgacaggatgctttcgcttttgcgaagaaatgcgacaagtgccagcgaatagccacatatacccatcaaccaccgagtaacctacattctatcacaagtccatggcctttcgcagtatggggaattgacttaataggcgagctacccaaaggaaaaggtggagtcaaatatgcagtagtcgcagtagactattttacaaaatgggctgaagccaaagcactagcaaccattacagcgactaagttgcacgagtttgtctacatttccataatttgtcgatttggtatcccttacaagctcatctcagacaatggaaagcagttcgattgtaaa

SEQ ID NO: 397783 - DNA, 697 bp, Cannabis indica
ttatcataagattgtatctcatcagtacattaagattatacagagaggtatttcccttaagggcgagtcgtcgtctagtcgatagggagacaacagtctgatagagaagctcgttggattcctatattaaaggatcgatatattattgaccagtatatatattttgacaaagtaaattgttcagtgtggcagttgtttctttggtttacacaactccgacgatgacatactcaatccaaatccactattagttcaagttttcacaagattcagttttctataatgtttttttcaatcttgagattaattttaattaattaaattttttaaatatttatgatagtatattaattgaacttgctattatgaaaaactcttatacaattttcttaagcttgattccatggagtctacaatagtattcaaatggacccctatacttgccaccattatctgcacgaatacacttcaactttcttccagattctctttcaatttttgcatgaagttctttgaaagcatcgagcactcagtctttagatttcaaggcaaaaacccaaacttttctagaatggtcatcaataaaagtaacaaaataaactgcacctccaagagttctagtttgcttagtacagacatcaatgtgaatcagatcaataacattagatcttctaaatggtggatgtgtatgaaaaga

SEQ ID NO: 397784 - DNA, 672 bp, Cannabis indica
ttataccaaatctgagatggaaaagattttatgcactatgtgggacatttggtttgataggaacaacatcattcataataaaccaccccaaaaatttgaggcaattgctgctaaggccacgactcatctctgcaactttcagtaggccgtgagtctctctaaacttgtccagcaaacctccccagttgctagtcatcaaccatggacaactcctcctccaacaaaattgaaaatgaatgttgatgctgcaattgactcggccagcaataagataggacttggagctattataagggactctcgtgggcatgtacaagctactctttctaaacctttgcctgggaatttaaaacctcatgaaatggaggctaaggctctctatcatggtctccaatgggcaaaaactttacatgttcaatttgatttggtggagtctgattctttactgctagtcactagtttaaatggtttagcatctacaaatttaggttttagtgatctcatttcagatgttagaaattgattgtcctatttccctaatgtttgtgtgtctcatgtgtcgaagagatgcaaatcaagctgctcatggcttggctaagcaagcattagtgtttgataattattgtatgtggtataaggatattcctcctactattttctctgttgttgtaa

SEQ ID NO: 397785 - DNA, 628 bp, Cannabis indica
taatgagcttaatgcaggttccatagagactaaccttgcaggtacatctattgggataacttagaatgagccaactgaaatcgaacctgatccagatcaggtggaaccagttcagatggaacctgaagcagcaccagaccaagtggaaccaaatcaggtggaacatgaagtccaagatgaaggggacaaaaactaggaggacttaacagaatatcaacttacaagagacatggccaattgatcgttaattaaagagagagaacatgatctttagtcaattgatctcaatcctaagatgattaggttctagcttaattgtaatatacatgctctttaacttgttcattaccaatttactcataagaatagtccaaacatacatcttgggaattcggtagtacaattgaataggagcgttagtcacaaatatagaatctataggttctataattatttaggagtaaaacgataatttccttagagcttgttaaatgccaaaatattacatattttatagtgtaaaaatacaaaataaaattaattctttataatattttcaagaaattaatgcaatatattattatattgaaaatattttatttaagattaattttatctttgtttataa

SEQ ID NO: 397786 - DNA, 1662 bp, Cannabis indica
accgccaaacattgaatattcaaatgttgatcgaattagattggatggcattgttaaagatccaattagattggatcgtatggtggatgggatgtccaaaaatctaatacatccaacatccaatcaaattaatcaatattttcatttactttgaatgagtacttaaattcatattgttatgcgtcaaatctatatgtatatataaaaattaacattaaaattttactctttttttcttggattggatggatccagtccaatccaatacatactagacctaaaatattggatggatccgatccgatccaaaaaatactagatgtgaaatattagatagacccaaattaccaataaataaatatgaaatcgatccaatggttagaaccgatctaatccaacatccaatggatgttggatcgattggatgactaaaattaattggatcagatcggatggtaaactctaacatccaatatataattcgatcggatctgaatatgcctaaaaacattggatgtggtccaataaacacccctagttttaaccatagtttttttttagattttcttcttagttccttattttaactatccattgtttgtttaaactaacaatgaattttatcataagtttcttacaagtcataacaaggtgggttccttgaaactctcccactacgacgaggtaccgtgactttctatctaggaacattaatggtattatcctcatcagttgtgtcaatacaaagaggcagtgggaccatcttatatagaataagatgataaaacactttagaattgaaaatatctcctctactttgctactttattttagatttagtcaagttcttagaaaagtagtatttgttgaaacaaaactttcttatcttaatgaccataagatggtccacccctaatcactttagaatagctatcaaacatgcaaactaaagttaatagctctagctttctttaagttcatgatcaggacatccatgaatctaggcttagcattttcctagagggactcaggtagctgctagtaacttactagtaacttatcatagacctttcactttcatcaatatgcgactctaaagttttagggaggtaagtttggatacaatttgaagttcaatttaatgatttttgaactacataaccaaatatttctctacccctgtcagtttgtaagatctttaaccacttatcttaatggttttcaccattttagaatttcatgaaatttctcaaacatttcaattttttttattcaaggtataatctagagtgattctcttaagaatttaacgataactcatattcactcctgaatgtacatccatatgcaaataaacatactttcaagtggatattgacatgttttcttttaacagagaataatcttatcaaaaccactacgaataagatgtaaaagccatagatatattactgtggatgtggtattttgatgattcctagtgttgaccgaggttttcggcaaccaatataataataatatttaagaaagctataaggaattaagagagagatttttacgtggttggggcattaatgagccttagtctacgagtctgtgtattcatgatagtatttattacagagaatgttcttggtggatttttcctcttctagttcttat

SEQ ID NO: 397787 - DNA, 1272 bp, Cannabis indica
gcactaaatatagatccgaacttttgacctgtagaacacaaaaagaggttactagataaggagctcgcagaagctctaaaggatgaagtcaaaaggatgagtgccaatgacttcatcattgaagccttctacccactttgggtatccaaccctgtattagtgcgcaaaccaaacaacaagtggagagtgtgcatagatttcaccgacttgaataaggcatgtccaaaagattgcttcctgcttctaaggatcgattagttatagattctacagctgatcatgaaatcctaagctttatgaatgcctatttaggttacaaccaaatcaaaatgcattcactagatcaagaacatacaagtttcatgacagacctaggcctgtactgctataaggtcatgccttttggactaaaaaatgcaggggccacctacagagacttgtaaataagatgttcaaagattttattggtcgtaatatagaggtttatgtgggcgacatgttggtcaagtccaaaaaggctagaggcatgtggaggatctaaatgaatgctttaagatcctctgagaatataacatgaagcttaacccccttaagtgttcattcgaagtagactcaggcaaattccttggcttcatattcaatgccaggggaatagaagcaaactcggacaagatccaagctcttttagacatgtagtcgccaaaataaataaaagaagtacaaagcctaactggatgcattacaactctaagcagatttgtgtctaaatccacggacaagtgtgttcctttcttcaacatactcagaggaaacaaaaaatttgaatggacggaggagtgcaaaactgttagaattattttaccaggatctagatttactaacaagtatgttgttaacatcataaacatgaacttataaaacgatatgaaataaacacatataaagtttcggaaaccttacagtggttgcagagaaatttaatgtctccttccactcagatctctaacccttgtatcctatctgtagcagagtatcaccaagatctgagtccgaatccccttctcttcaaactggattcttcacagccttacacactatgattgagtaccacatgatgtgtgtgggcacttactctaatcactctagggtttcagttttgaagagagaaagagaaagatgatttcgaaataggaagagtgaaggtggctcaaaattttactgaaggaaagagtttgcatcatcttttcctttgaggccatcactacctattta

SEQ ID NO: 397788 - DNA, 1009 bp, Cannabis indica
ataagctactcaaaacgaagacccgatgccaccactggtggcaggtcacctaggggtcataatatgtgaaccccacatagcaggcaaaacaagcaaagccagggagtgctatgctcgaacactttgtcacgagcagcatagcgacatcctagttatcgaagaaagagactccaagcaactcaagcttggagagcctacaatatcctttatagaaggagatgctgcccagtcaggttccttcataatgaccctctagtcataactgcacaaatagaaaacatgacagttgctaggtgcatggttaataatggagcctcctcccacatttttttcaaatcaacttatgaaaagatgggactccaattaacagacttagcaccttacatgcaactaatgtacgactttttttggccaaggccttgcacccttgggatacatctgactgcccctgaccattggagaaagttccacaacaaggacattgatgactcaatttgtagtaatcgacgtgccattgactttcaatgcaatgataggtcagtcagccttatacgacatgaaggcggtaacattaatttaccatatatgcctaaagtttccaacaaagcatatggtggaatgcctaaggggagatcaataatctgaccgacactgttacaacctggctttgtctaaagtgaagaaagaaaagattccttccaagaactctaatcaagagtccaacaaaagggcaataaagtccagcccaaagtggagaggtagacataaatcctcacttttgggatcctataaatagatttggaccagtggaggaactggaagaggtaaagatcgaccccactcttccaactagaaaactaaagattagaaagggtttagcactagaaataaaatcaaccatgataaaatttctaagggcaaacctcgacctcttcatatgatcacatgaggacatggtgggaatagacccatctgtaatgactcatgcactaaatatagatccgaactt

SEQ ID NO: 397789 - DNA, 585 bp, Cannabis indica
caattccatataatataatacaacttagtgtaacgagcccttagtataaatatatgtagtttttttcttaatttttttagaatgtggagagcttagatttttgaaattttaaagggaaggtctccttccaactctcctctctctttctctttccatttcttaccaaagcaatgaacttcacatctcctttcacctttctctatccacccatctctctcctccctatcaaacactctcttaaattggtatgtaaaattacatatgataaattgtgataccaaaggtttaagagcactctcttcttttatgctcttgcactcattttcttttaaattttatagaatcaaacattttaatccctttaattgcttttttaaactctataattattttagagatcccttaaattattttactcattctctatatttataaaattagagatcctttaaatattttttattactttttattctttttcatgtttctctctttattagtatttttattattttaattaataaagtatttaaaaatataatacttataaaaaaatacgaaaaacttgctggtctaatataaaaa

SEQ ID NO: 397790 - DNA, 649 bp, Cannabis indica
atcttcgcagggtttgcctctataccccgcatctccaccacaactccaaagacacacttaagaggatttagccgcattttatatcgtcgtagtatttcgaacattgcttgtaaatggttgacatggtctcttgcgtgttgagattttacgagcatattgtcaacatatacttccatggtatctccaatcaaatctgcgaacatcatatttacaaacctctgatatgtcacacctacgtttatcaaaccgaaaggcattaccttataacaatacaaacctcgatctgtaatgaacgatgtatgttcttaatttggttcatacatcgggatttgattatatcccgagtatgcatccatgaagctgagaagctcatgacctgcagtggcatcgacaagttggtcaatgctaggaagtgggaagctgtctttaggacaagctttattcaaatcagtgaaatcaacgcatgtgcgccatgagtcgttaggcttgggcacgagtacggggtttgctaaccagtttgggtagaacgactcccttatgaagccgcttgccaagaggcggtcgactttttccttcaacgcttggtacctcacagggtccattttgtggcgcttctgtcgaacacctcgcacttcggggtcaatgttca

SEQ ID NO: 397791 - DNA, 726 bp, Cannabis indica
cccccatcagccccatttccccactttcctttttcttttcaaaattcaaaaacttaaaaactccttttccccctttctcagcccaacacttcccccttgctaccgaccaacaccccgacgcagcaccacctcgacgcagcaccaccccgatgcaccaccccgacgcactcccgacgtcgttgaattaccgaccggcttgaggtaagttttgttttttaattttagattttgatattatataattttaggttttagatttgtacgtacagtttttattgttgtatgcatattgttgatttataatcagtgtatatatttatatttagatcggattttttttgtttttgtgatagatctgtgtatatatatacacattatttcggttttgatataatattatttttgtatatatatatattttatttggatatttattattttattttgatatatatttattgtgtatatatataattgatttgggtatttattgttttatttgtgtatgtattcactgtgtatgtatatatattcactgtgtatgtatatatattctctatatataaatatattttattgttttattttggtatatatatatatattttatttgaatatttattatgttatttgggtatatatgtttagtgtacagtatatatatattaattggttatattttaaaatataatgtattatttgtatattatatatataatatatgtt

SEQ ID NO: 397792 - DNA, 842 bp, Cannabis indica
atgaaaacgatatacctgctctattgacttgtggctctaccatttgtagagaagaaaaaggtcacaagggaaagcttacaagaacaactacttgataaggtgtttctaagagacaatacaaagtcatacaacagctattccagtaacaaacctgctatgcaatgccagctatgatgtatgagtatgagtactagttttatattttatttaattaaataattaagtttattatctttagtataattattactatttattaattttattattatgaataataaacttaatgttgacagtaaaaacttgttgacaatgttattgtgctaaaactctatgtatgattgatagaagattagaagagaagtaagcttaatgaaacttaaagaaaatcatagtgcaacagtggtgaaaatttaattattgtactgataagttttgtgctagtaaagttttcaatccccttgaatgaggggctgggtcttatttataggtgagctctgatgacccaatgggtcaacttagtaccttttggaaatattctcattaaggattataatcaaaatacttaaaatataaataaatatagggtaaatactatttagaccatgtgttttgtaaaagttaccaattttgttttgttaaatgacaaaaaaaccctatttttcccaaattgtacaaataggactctgaactgattttttatcaaaataaaatttaataataatttgatctagagatgttatgacgaaactggttacattttctgtatctgttcatgttaaaaattgtcttaaagttgtttatattaaaaaataaaattgttaaaaattgagctcagagtc

SEQ ID NO: 397793 - DNA, 472 bp, Cannabis indica
acccaaacacaaacaataaccactgtagttaaaacaccttttcaccattaaaaccgaaagttttgagttcaaactccaaacttgaataaaaccaactaacaaccataagaaccttcttaaatcttcatatctaaacatttttaagctttagaaaaaaacataaaacataaacaacagtcacaaatcaaaatcaccaagcatgcaaaaattactttccttacatctcaagaaatcaagaacaagttacaagaagcttaccaataacttgagatcactaaaaccttgctaaaaccagcttaaaaatcacaaagaattataaaatgagattttttgcttcttttctaagttttgtaaaataagaattataaaatggttttactagacttaatatcagctaaagataaccataaaatcagattataaaatacaattaagtccactagaggacaaaatacatatggggcaaaatgac

SEQ ID NO: 397794 - DNA, 928 bp, Cannabis indica
ttttctttttctaagtttttatctctttgggatccaaacaattcatattatgtttgcatatatgtagctatcaactttcttaaatttgatatgtttacatttgtccgtgtgatatgccttagtaccccctaattgacatgaaaattaatttttacatcacttaggcttacaaaattaaattagaggttgcatatatttgtctggtacaaatttactttacaaaatataaattttatttttcgactattggtaatactttcggaggtgatcagcattccaggccctaggcaccatggatctgtccattctttttagcttgtaggtcccggagctcatttcatcctcaatttcatatggcccttcccaatttggcccaagtacccccactccaggttcctgagtggctggaaagacccttcttaagactagatcaccaatagtaataaagccaccttcttttgataagttgtttagccaccttcttttgataagctgccattcgtacttgagactcatcccagagttcgtcgatttgatccagtgcttcttgtaataaagccatgtttattactggatcatatgtcgtcctcctgtgcgatgggaacaaagtttccaccgggaccatagtttcacaattgtacgccattgagaatggcgagtggccggttgtggttcttgaggtggtccggtaggcccataacactcttggcaattcttcaggccagttgtttttgcaggccagcagcttcttctttagggtgacctttaggattttattgacgacttctgcttgcccatttgtttgtggccttgccaccgcggagaagcttttgatgactctgtgttggttgcagaagtcggtgaattcttcgcagtcaaactgctttctgttgtctaatactatcttatgaggcaggccatatcgaca

SEQ ID NO: 397795 - DNA, 622 bp, Cannabis indica
ggaacggtgaggggaaaccaaggagaggccaggcagtgttacaacgttgccacccacttgccagtacttatggtaagagtctagagccggaggaaaataagaaaaaataataaagacactaaaggctgccacggatgttttcgcatggtgtcaagaggacatgaccggcataagcccccacgtcataacccacgtccttaacgtcaacccggacatgccactggtccaacagaaaagatgccccctcgactcagtaaaggcgaaagccctagagaaagaggtggacaaattactaacgagtggcatgatccgagacgtgtattacccagaatgattggctaatccagtgctggtaccaaaaccaaacgggacatggcgtgtttgtatagattttaccaatctaaacaaaacctaccaaaaagactgctttcccttgccacgaatcgaccaaatggtggatgccacctccggattcaagttattgtccttcatggacgcatacgccggctacaaccagatcaagatgcacatcatggatcaagagtgcactagcttcaggaccgataaggggctatactgctacctggtcatgccttttaggctaaagaacgctggtgcaact

SEQ ID NO: 397796 - DNA, 808 bp, Cannabis indica
ccgccccgtttacatccctactcatgagttaaatacaacaaaaatgggagtaaactattaccaaataatggggctgaacctctataacatatcgtattcttacttttgcttaatattaattacattctcttcgaatcttattgattccttattgcttttaagactcagtattgttggctaaaagcgatgtcaatattttggtactttcaattttaaataagatttattatttacaataaataataattaattaattctctttaatctcttatttatcttggattaaataattattattttccacttaaataataagattctttctcataatattatttaacaataatgttatatataactaattaatatagttttatcaaataaaactaaatagttaaattatattttaattattcatttcataatataattatacaaaattattattttgcccttaagaattatttctcttaaaaattaattctttatcaattcaccttagaaattatatcttcccctatacagtgttgtatagagataatctagagaccgtgaacctatattccaaagctccaataaacacttaattactattgagtctcatcaataaaatattatagcttaataattctattattactctactttaaatatacaattacaatctttgacaatatagaattatatttacagaatttttaccagtagtccattgatattattgaggatcatggggttccatatctcaaaactaattggtaatgagtggagtagcccatgttcctatatatggctcaatacttttaca

SEQ ID NO: 397797 - DNA, 856 bp, Cannabis indica
aaacccgaaaaacctgaccacccgccccgatctgccgaccaaaaaactgaaaacccatgtggtcgggtcaggttcaacccaaaaatacctcactcgggcttcgaattcgggtatactgaatttttttttattcgggttgtaatccgtaactcgagcagtattaaaaaattaatttttttattttattaaaaacttaataatatttactttcagtttttagactttattatttaaaaaaatacatattcgaattctttagcttgccttacaaatagacacagtagtcagtacacgaagagtcaccctcaagcttcttcttctccaaaggcgtcgacgaacggacgacaactgcttctcttctctggtagggtcgcatccaagcggtgggctcagtccggcgtccctaacatcgtcatccaattccaaactagtcagaaaacttagagataaaaacagggaaagaggatttctgggtagcagagacttggacaggtaggcttctattgtattttttacagttttcagaaaatgagattttgatttttcaaagatgagtgatttgattctgaatgttttaacttctattttgataggccaagatcgagggatagatggtgaagaaatctctctggctccattgagtttacggtttacgttgacaaaccaaaacggaataatattttgtctcaccctttttgtttttataattcatttcagcctataaattaaacattcaggctcagcccaataggacctgaacccgaccatgcccaacctgactacacccaacccgatacctgacgcacctgaacacccaaaaaaatgtaatcacacccggttccaatcgactcccaac

SEQ ID NO: 397798 - DNA, 471 bp, Cannabis indica
attttcaaagatgcctctaaagcgatcgtccttgtttaagaaaatttgttaccttgtccaattcaactacaagtcttcaatggatacatatggattccaatggggaaaatacaacttccaatgatgatcaattgagaagtctctggaagcaatgcaatatcttctttcaagtacaacacctttgtagatgttgattgcacaaaaaattacaacgtcattctgggacaatcacttttggttaattttggagcagtgacatccatccgccatctatgcctaaacttcccaggtgataccggaagcattggaatgatcagaggcaccaggagattgccaaaagctgttacaatgtttcaaccaagactattcttatagtctgtgaagtaattattacaaaagctgaaacatcttcccagccagcactggggtggttcacgaaaaggatgaacttgattctgttgggttttatgc

SEQ ID NO: 397799 - DNA, 629 bp, Cannabis indica
gttatacactgatggtaatccacaactaggaaatcttgcattaaagttgtagtttgtagtcccatcttctttaacatatctcggtaaaggatgtttaccgagatttccacaacactctttttatccttttgtttgcgagttgtactataatcactagaggatcgacgtgtggatatctcatgtgttttatattttcctccgagaatacaattggaggttcttctattttttctttctttagtggttctggtgcaaacacttattgaatatttttgacttcattgacatatcgcttctgggtattactactttctccagcgagatgtggccctcctgagatgactaatatatcctcgccctcaacagggggaggttgcattctttggttatctgggttgttgggatgaacaggtcagttttgttcatttccttggcgcttcacatattgtccaaagtatccacgagatattaagctttctatctcgtcttttagttgccgacactcttcagtcgtatgccaaatgtttatgaaatcaataaaatctatttgggtcacatttgtgtctcgcatgtctcataggcttagatttgcggaatgcaaccctgtgctcatttgcgagaaagatgtt

SEQ ID NO: 397800 - DNA, 843 bp, Cannabis indica
gtccaaaaccaagcaggggcgatatcgagtagcagatttgttgttacccaatggatactgggacattaataaactgaaagaaagctttgatcaggaaacagtggcatctattttaaaaggaggacatccttcaggtcagggctctgaccgatggatttggactctgacaagtaatgggcgattctcgtgcaaatcggcttatctggttcaagccttggaaagagcgccccagtgtgaggtggctccgaatctttggaataaactttggaatagcaaagttatggaacgtcataaggtcttgtggtggtgtagcctgtctaatgccttacctataagatctgtgatcagtaagagatttcaaattgaggacactagctgccctctttgtggaacaagggaagaatccatggagcacctgttcctttcttgtgaggtggcttttcacttatggcggtcttccccttggggcatttatcctatttgtaatacaggcatccaagtttgggattgggttaagttcatttgggatctaaagcaccgaggaattcaagtcgaggatgttttcttatatgcttcgataattgtggatactgtttggagggttcggaatgatagagtccataataactgcccagttgatatgaaaaaatgtgttgatgatattagtacttcttattttgatctgcatgcttcgttattccctagtcctgctccgcatctcaaggaagcttggtcccctcccccaaggattggatcaagctgaattgtgatgtaagagtgggttttgacaatatgtgtattgcagtggttgctaggaatcatcttgtgttggaaattatttta

SEQ ID NO: 397801 - DNA, 435 bp, Cannabis indica
aacccaaacaaatgctggcggttctcctaggagtgagggtgcctatgaccccaccagatatgtaccgtttgttggattagaaaatcgccaactccgacgacgtttggaggagggaaaccaatgaaacgctaagttggaacgggaggcagcagcagctagggcgactcaataaaacaatgcacaaaaccaacctgatcatggagtgaggaggccacgaggtagacctcacagctcacgaaccaggaggaaggagacagcttaggaggaccctcagaacgctcaggaagaacaacctggggaaactgaggatgcacctgaagatgaacaaccagatgaccaggcacctcatcaagaagtgccatgtagacctcagggatttacaacccatgggaatgtaaattgtgatttaccagaatcctctcgcaggaatgcgag

SEQ ID NO: 397802 - DNA, 501 bp, Cannabis indica
ccttcaatgttgaatggaagtgcctatcaatagtttcaagtgaatgttgaaatcggtcagctacaaatctcatgcccatattttgcccaacaattataagaaagatagccattgcctcttcaactttaatctctcgcgtgtctttaatgtaatttttctgttttagacaagtacacaattcattaaatacatttttatccatccgcaataattcataacatgttctctcgtgaccacctaataactctttgacaaaatcttcaccacttaacacagatgttctttgaggcactttttcattaaatgtctcattgtaatcatttaaaaagtaaaacattaagaaatctgtgaagtcatcaaaatcgctatctgaagaagaagatgagctagagtcatccatttgattggtcctgcaaaaattatattgacatacataattacttagaaaaacgaagaaaaacttatatatgaaaattataacaaagtctttactagattatc

SEQ ID NO: 397803 - DNA, 719 bp, Cannabis indica
gagatccaacaacgccacctattatagtccagcgaccaagcagcaataccacaccaatcaaaaatcctcctcaccacttccctagagacacaacaagagaaaaaaaggtgatggtgactctcctcttcgctcccacatactggacagagagtagagactaaatcaatgtgaaacttatgaaaattgtctctagttaacaagtgtccatgaaccacctgccataagatgaatctatgcttgggcagagcaaaattacaccatatagaattgtaaaaactatcaatattcagagttattgatcccaaatacaatcttgcagcaacatatttacctttcctaaccgctgctgtcaccataggcttgctgaagtgatttctcagatgacaaagtttcctccaataccaacttacatcccctctcagctcataatcccaaaaatcagcacctttcagatagatattgttgacccatttgacccaaagaatgtcatgcttatccataatagcccaaacaaacttcccaagaatagaacgattccaagaggcaccattcttgaacccgagaccaccaaacgacttgggaagacaaaccttatcccaagaagccaaatgaattttacttcggtcccccttaactccccaaagaaagcccctacaaagcctctcaacctcctttataacactttgcggaaggataaaaatactcatccaatagttacg

SEQ ID NO: 397804 - DNA, 664 bp, Cannabis indica
acatattatatttcatatttttgctcacatactcgcatcttagacccagacccgaatgggttcatattatggtatgatgttaaaatattaatttttttaaaaaaattaaaaatagttttaaaaaacttgtgccaaacaccattaaatttttaaaatttaaaatgacaaaaaactgttttctattcttactttttaaaaacataattttaaaaactaaaaactgaaaatacaaccaaacaagctctaaaacgtttacttagacttctctataattcatcttcgacatacaatcaataaagttagttgtggttagaggaaatggtgaattagtttagattgaaaaatatttttttttttcgttgatggattaaactctgtttttaataagaattattacatagaaaatataaattgacactttatttataaaaatactttcataaggtgttgacaacatttattgattttaattaccaaaatacctcttacactataacttacacaatcagacgatagttgcaaggtggttgctgcgtggttgcatcagacgtttcaattagacgataattacatggtggttattgggtgattcatcatatgataaaacttttacttagactaattttaaattttatataaaaaaaaaaagaaaaaaaaactttta

SEQ ID NO: 397805 - DNA, 842 bp, Cannabis indica
cttgttccctctctttcagaaatccatgaaaaactcccataaattgcctagatttttgcttttctttgtgggttttttctcgattatccagtgctgtcgagggcaatggtgggaacagattacctgaactaaaggttagttttcaaaacccaatgcattttgttttctatttgagaagaaacactatttttttgggttttaacatgtatgagagggtttaggaataaatgtttgtagggaatacgtatgaagctacgttttttaggtaataaactgggtaatttcagaaaaaatgacctaaaattggcataaccgtgtattgtataaaaaatgcttgaacagacactgcttcatgttttgaatacatgcgggtattcggacgaacacttcgaatactcgcatgtctgtgagacttaacttcttctgattgtcgcttagatctttaggattttgtattctgtaaatctggttgtgagaatatcggctaagtctttcaaatggtggatgtatcacagtattctaatggtcatatgtgtggttatatgttccttgagatactgagatacacccagccatttgcgacatgcgctaatgttctagtaagcgtactctttggctggtagatatcctcgaaacggtgggagtacctcagtaactttagggtcatgcttgagaacgcatgtcccttgtgtcactgagtttctcccagccgtttttagaggtatatcgcttagctcaagatgcgtgacttattcgcatgttgcgattttagttgggctccttgaaatggtgggtgtctcctcattacctcagggtcatgccgaaagatgcatgtcgctgtg

SEQ ID NO: 397806 - DNA, 581 bp, Cannabis indica
ctatgaagccaaggaattttcccctccttaaaccaatatagcatttgagggggttgagcttcatgttgtagatgggaaggattttgaagcacttgcataggtcctccacatgccccacaacctttttggacttaaaaagcatgtgaacatcatgttcaccagcctttgatacgtggccccaacatttttagcccaaagtgcatgactttgtcacaggaaaggcctgggtctgtcatgaagctagtgtactcttgatctgatggatgcatctttatttgattataacctaaatacacgtccatgaaacttaggatttcatggccagttgtggaatctacaagcttgtcaagtaacataaaatttgctctagtgccacccaataatgaattgttggagaagacataatctgactaattacactagctgggaatgtaatatctggacgagtcacagttagataattcaactttccaaccaatctgtgatatttcttaagatcttcaaatggttccccgtcacgtgtaagatgcacagctagattcattggagcattacaaggttttgctcctaattttcttgtc

SEQ ID NO: 397807 - DNA, 606 bp, Cannabis indica
tttttttttaaatttaatttttttttcacgtttatagtttttagtttttaacttttgacgttttagtttttaaaatttttaattattatacattataaatctatataaaacaaaattattatatatcataaatatctttcacatatatacatttaattattatttctttcttttatactattaataaaaaactaaaatatctaatcagatagcattatttaattactttttttttatcaattaataagtgaaagacggtgaaatacaagtagatacagtaatgccaataattttgaatattcagatgactataaagtgaaatacggtgataattaacatgactttaaatgtaacgcactacattatcacatttttttgttgaaagaaaagaactaccttaacacatttttaataaactatagtgatttcttcttaaagatttttagtttaaggatttaatcggggtttaaaattaaatttacataaaaaatatctatatcaattattaatatatatatatatatatatgtagaagaggtgtcaatggttacatttaaccatcatggttacattttttttaagccattggattactattaaatggtt

SEQ ID NO: 397808 - DNA, 1068 bp, Cannabis indica
gcctactgcttggaagaatgcaaattactgcgacaattttattagtcgaagtgatgatgttgaagaggtgtgttcgccatcagacaacataagtagaagtctttccacgaatgatctttaaaggaaactaaataccaaaaaagaaaaggccataactaagaaagtcagtcctcacaatgatgaccatgtttagggaagagaactcttagatgttaaaactcaacatttagagcgtaagaatgaatagttaacaaatctcacagaaaagatatcccagaagtaaaatggaactgtgtctaactcagaagaagaggacatataatcatgtgtgaaaagaatcatagataaatggaattgtatgaaggaagaatggaccccaaggaccatttatccaaatatagccagatactgcaaagcaaaagctagtgacattgcacaattcctctacttttcattaactctatcaaagtctgcagaggactggtggaaaaagttatctccaggattggttcaaactggaaggagttacaggcaatgttcaagtaacaattcatagcagtaaagaattttgaccggtggaagatgcttatgctcaagacttatggagtacttccaagcaccatcagtaaacactttcatagcacaaacttagcagatgagtgctccaactatcctgcctccaacatcaatgctcacaacacccaccatttatggacctggtacttctgaacaatcaactgtacaaacaagtttttctagatatggagatgcgtaaattggatagagtgctattctcgaataagcaaaccaaaaaacgtaagttccagaattaaatgtaagtcattctcgaaacaaaaaagttctaaagctccaagctaaagtgaatctgcaaagaaaggaagaactcaagaaccaagatattctgattatactagcttagtggatacttaggagaatgtttataaagatacttgtaatatggttcattaaaaaagacctccacctatgtacaaaggtggaaaacaaaaaagggacccaaataaaatgtgtgaatatcacgatgatatt

SEQ ID NO: 397809 - DNA, 1719 bp, Cannabis indica
accggagttggagaagatgactctgatctgatgtattgaagttgttatgttgggtagttcttgatcgttttgaggttctaagcactgtggaaaactttcccaatcgaaaggactcgtcaagaggaatcggcgataagttacactttgttggcaacgaaaccgacgtgcgccggtgaccacgatctaggtagttctgaggtgttcctcatatcgttttttgtagatttcgattctacatattatttaagggtgtttggtaaagttacataattttcttgcaactatttgatttatttgttaaattaattaggaaaaatacttagattactcagaataatctaggtttattttatatgataagttatgagatataaactgttacaaaattgatagatttgaattttagtcaattttgtatttttcatgaattatttatgttgttcctaaactttattatgaaaaatatctaatgagctcagaaaattcaaaataaattatttgtggcttattacatattataaacggtgttacaattgttagatttggtttttgattatttttgtatgtgtcatgaatttatttagttaacacttaaaataattatgaaaaatagttaagtaacgctaaaacagtaaagtatatttttataatgctatttactaactatggtacgaaacaaaaagaattttatagtttattggttgttgtaggtatttattataattatttgtgactaattaactatttaattgagttttaaatgaagtaaatattaaaaattgtgttaactgtttgggaactgtcaatatgatgttacaatataattctagtctatgaaataaatttaagactaggttgagatgttttgtattttatttatttaattaattggtattttatatatagttcgaagtataaattagaacacaaatatggataataaattgtacgtgttctagatagattaaatatgtttttataatctgtataaatgattaaaaaatattctagcttctgatttcagtaaataattacatatttatatattttgttaataataaatggtatattagtgaaattttacgtaaaaagtgtttgtatgagttcatgttttacgttaaaaatatttgtttaagtgcatcatatgtgttggtgggaattatagtgataaatgattgtgtttggtgtgtcatgcaagtgaagttgacctacgtattgtgtaggttgacgtaagatttcactgttaatcttaggttatgcttgaatatattttaagtgttattgtgttattgaatttagggtcttcttctcaataaagaaactcgggaagaggttcaaggcagagaaaaggaagtacttagcaattgaggtaagaagagtggacatctgtgcacatggtgtcttttaaaacatacaactgtattatgggattgtatttacatgttttattctatggtggattgttattttatgctaatgttattgtgtgtgatagtgataagggttttgattatttgtgtgagaatagcacctataggataggttttctgctgctggtgtgagcatagcactgcaggatatattttttgctacttgtatgggtttacttgcaggttactctattcatggtgagtacaacttgtgataaggggttgccctattggatgtcgagtgtgagaacagcacgagacagggcaggttacacttcatgtctgatca

SEQ ID NO: 397810 - DNA, 683 bp, Cannabis indica
gggagtacctgttgttggaaacctgaattttccaacaaccattgaacttctctcctagacatgttgctgcagtagcaagctgttttgctaggattcggattcaagccagaagtacttgaaataatttcagtgcttgtaacatgtacttgatgctcctcgcatctccattacaaataacagaacatcatccacaaacgctaggtgattaagtttaacttcaagcagccactatgaaatttaaagtcatccttttccccaatccatctcattagcctagacaaatattccatacctaggacaaacagaagaggagacataggatcaccttgcctaagccccctcttagattcaaagaatccgtgcaaggatccattgaacataagagaaaacttaggagttcgaacacaattcataataagctgaatgaagttcttaggaaacttgagtccctctagcatttcttcaataaattcccactctacagtatcatatgcttttgaagatcaagcttaatcatgcaacttggtttattagctttccttccataatgtctctctaacgccctgaacctcaggaacgccacgtgtgtgcttttataatcttattatcaataatctattagtttaggaaaagtgtggtttaattcaaaaaaaaaaacatattatctttaattaaatttaaaa

SEQ ID NO: 397811 - DNA, 685 bp, Cannabis indica
ggtttggcactgtctaatttcgatatagagattcttcttggtatgagattcccaagacgcttagaagtaaatgggaataagtttaaagaaacaaagaaaagaaaacatgtgaagtcacgtgtgaattggatcaacaaataaaaaataaaaaaccttagtttggctatatttggtagaccatcactaatacatgggatcccatcataatttcacatagtagtattataatttcacattacttaaaactttttttaaaaaaaaattaacaaaaaaattgaaaagaggataaaaatatatataaaaaaaaacgaattggaagaattgatgatgatgaaactaaataattatccatttaaaaaaataaataattaaataaaaaatttatatatatggaacactttttaatgagtattacccattgatgggtactaaaaaatttttaatataaatattaattttaaaaatattaaacaattaaattttaatttgatagcgaataataaaaaataaattcaaatttctatgcttaagtaaagaaaatatcaaaaaatatatatttttatactatatcaaaaatatgtttatatgaaaaatatttaagttaaactcaactttttttatcatgtcttttttttttccaaaaaacttttatttttattatttttttctagctgatggaacaacc

SEQ ID NO: 397812 - DNA, 745 bp, Cannabis indica
atgttatgatgcaaaatgaggacaaatagtaaaaaatgagtaactaatgacaattatgctctaaaataaattacatcatttggatttatgtatatgatgatccaacacatattaataaatttttattaatggggtcccaaataaaaaaaatcccaacattaaattgatcccaataaagttgacagggatttcacgaggaaccctttctaggaatcattgctattatactttcatcagcaactgttttaccaaaatagttgtgtgaccaactgttttcctatgttctgcctctattctatttaggttctcttcctattctttgaatcttcatgggtttctagagtggatctttattggggagaatagctcttcagcagaagagtaaggatcttcactaaggtccggccgggaatgaatctagcttcttctttctcctgaaggataattcaaatcaagaagtggaggtttgaagcaaggtctcgaagagcctgaaacagacctcctcaacgaaatgaagactttttcttcttattgactaaggtgaggaaccatgtaatttgttattatgaaagacttaacaatatgctattaagtagtacaagtaccttatcatttagtataatatgttgttgttattgacatttcgaataatctctagagtgaactttcatatattaattattatgactagcctcaccataaaaaggaaaaataaaaactttgtcaaagtgatttaaaatacata

SEQ ID NO: 397813 - DNA, 927 bp, Cannabis indica
ttcttcattaatttagtcccggtgtttttgtgccacgcgctgctattcttgacatgtcattgtcgttaaaaattgggtaaaaaattgccccccaagtttctagtggtatggctatacggtagaaactttctggtgttgttcgggtctatcttttgttgttgacggcttggcatagcgacataaaaaatactatgcctatactaacattacgttgttttttaataaaaaaaatcaaacaaatatttcccactcagtacttttcacattttacaatatagcccaataataatttcccaagaaaaataaattacaagaaaataataaatttcaaagaaataaaactatttacaaagaaaatgaccaacaaaaatatgaaaattgctctttagccctcaatggtagtggagggttataatagcaattttgggttaaaaggccctcttttgcaaaaataaaattccatatgtaagaaaggaaagaagacaaaccctcacatttcaaaaaattcatcttctccattttgctcttcatttttgggttggacatcttatcaccattggaggagattttgaagctttgaagtgattcttggacacttggtggaacatttcttcactatgggtaaatttctaactcctccatagtcattttttacattgaaatcatgtttttggtggtatttttgaaactttttcttggttttcttgctatggccgaatttgacatgtttgattgggattcttggatttcttgatataatgtgattgtttgatgcttgggttttgtagtataggtgatgggcaatgtgtctttggctttgatttggttcaatttgatgaaaaaataagaaatttgaaacttttaggttggtggtgttcttgaatatgaagaacactatgaacataaaaagtttcaatttccctccat

SEQ ID NO: 397814 - DNA, 1269 bp, Cannabis indica
tgaagggacaaacggttccgccagaagttattaacgaagaacgcaaactgagaacgttcttagagatgagggcaacaatgttaaacatagagtttatgccattattcgtgaccaaggtgagaaaagttgggaattcagagcctacgccgcctactaatcctctccctcagagtgtggtagggtcttgcattctcgaaacagatattgggattggtgtgaatgaggaggttccgaccaatgtagatcaacagcaagaagcgacaggatttgatcagtttgaggagttcgatactaccttctataataacgatcctaatgtagatttgaaaatggacgatgaacatgatttggcagttaatgaagccgtagcgggaccttcttttaattcatattgaaggttattaccctggtttaagggaacccaagcaatagtcgcctgacatgagttttcagggtcggatgaagcttgtaaatctgtgtgttttcagtttagttacttgcaatctgagctaagaataagtatgttaaatctactatacagaaagtgacactgttagactttgcaagactaaataccaaaaaatatatttttaagtatacaaaatatataactgtatttttaattacacaaaacatacaatgtcaccataattacacatataatcagccgacattctggtaaaacaaatcaacacaccaccgttcacgaaacatcttcatccggtcttgcgtgacatcagctaatccacgtcgcattataagatgctccacatactcaatgcaataaacaccacaatcaccactaaatgcaacataaaatataaaattagtacaatgtaaagtatattttaatactatagtacttttctatcgttatgtaccttattgttgccttcagaactaagtcgtgagtggctcgactcgtatgcatattcggaagcacgttgatctccttcgtagttaatgccatgatctggttattatgtggaaaatccccagttgcatggattagtgagggcaacagttcttcccaagtcttcaagatgggtgccatggcggtccaatgacaaatgctggaatcacagtcgtacacgttaattttccacagctctatgtcaacttcaacagtcacccagtgtctatggtcgggaagatataaaatgaagcaaatgaactcattcccctcaatatcggaaagaattgggcttgtaattatgaagaaaagctaaacaattaacaaaccataataaacttataatcatagttcaa

SEQ ID NO: 397815 - DNA, 889 bp, Cannabis indica
acttttgactttttcatgtttggatgtttttctttggtgtttgctttctttcttttctctttcaatttttttttttttgctttcgagattatggcagagacaaaatcatacccaaaatcagtggttgtttctgatgtggtacccatgatgtctaaaatcacggaccataaattgattgattcaaattatttgaaatggggttagacaattcgactttatctgaggagtattgaccaaaatgatcacttgactgataatcctctcaaagaaaaagacgattcaagaaaaatatggctacgtgaggatgctcgcttgttttttcaaattcgaaattctatcgataatgagataattagtttgattaatcattgtgaattgtttaaagaattaatagattgcttggagtttttatattctagaaaagacaactaatctcatatgtatgatgtttgcaaagtcttttatcttgtagagaaacaagatcaatctcttattaattactttatggcatttaaaaaaacctatgaagagcttattgtgttaccgccatttagtcctgatgtgaaagttcaacagcgccaacaagaacagttggctatcatgagttttcttgtaggactcttatttgaattttacttttcaaagtaacaggttctttctgattctgatgtcacttctttacaagatgtgtttactcgtgttttttgcatagaaactacctcttcaactcctcttaatagcgtcttggtgagtcgtaacaattctgcatcatggaaaaactctactccaagtggatacaaatgaggtaatttaccaggacctaataatcgaacactagattccgggagcattatgtgcaattattgtaagaaaccaggtcacaccaagt

SEQ ID NO: 397816 - DNA, 640 bp, Cannabis indica
ccaattgtctttctcttggtcgcgaacatttttctcgaatgaatgataattaggaatgtcaatctgggccattttcgcgggccgggtcgggcccccggcccgaattattcgggctcttatcgggcttctggcccagcccgacccgatttcaaatattaaaaaaaaacctaaatccctaaaaaacaatcccaatttctaatttcttctcagttctcgacttctctctcgtttcctctttttctctctccgacgatgacagaacagtcttcacttcgatatcatctctgtcgagctggtcctctcgtctctaccctctctccacaaagtaatactcacttcgatctcttatctactcaatctctactctctgatgcaatccccagaaaagcttcttcttcttttttttaggtaaacttacataatctctacactttcaatgctcaatctctactctctaatacaatccccagaaaagctactcaatttctttttgaaccatctttgtttttcctgaagcatacacgaacaagcctacatttatatcctagagacatgtaactttgacctgaactataatcccaactgataaaaatgacaccggtgaaacaaaccttaaaatatacttgtatgtaaattacgt

SEQ ID NO: 397817 - DNA, 460 bp, Cannabis indica
gtagctcatgttcttatatataatctaatactctattttattccatgtgggacaatatccacaatatttcccctcaagatagttttggtgataagtggagtagctcatgttcttataaatgactcaatacaatgttgagaatacgaatttcggaaattttgctgccaaaatttaaattttgagaatttcttgctggcaaaataaaaaatattgaaaattttacactatttactcttaaaatatgtatatatattattatgcaaataaattaaataattattagaaaattaataaatattattaaatcgaagtatttctcttatatgagtattgttattgggtactagtgatctatctagcactttttataggtggtatctcataattagttagcgatattatctaaaagttataagttatatagaacttgatacttaattatactaataacaatataaca

SEQ ID NO: 397818 - DNA, 790 bp, Cannabis indica
aggacttggactgttgagcatattaaacttggggctatcattactctcaaacattactttaaggacttttgtaatatttcgaggttgcgcctttcaactcgtcccaaatagatacatgatcctagcctgcttaaagtctctttaccacatcttagggtgggagtgtaacaccccactagtttaggcatgttcacgtaatttttaactaattgtgcagcgttgctaatcaacgagtttattaaaaatcgtgattaattaaaattttacttaattaattataaacactaaaataatatacttatattaaaccagggtcccgttatgtgaaataattattttatgacaacaatttttccaaaattcgcataataatttgatgaataaattttagatttataacttgaaatatattttcaaagcaagattgactattgaattaagtacataagcttaatttttgttcacatttcctataagctatttttaatgtgcaatttttgaggacatttttgatatcaccaaataaaaaaatatgcatttttaattttttttttgcttgaggattagcaaaaatttaagtttgggtgtatgataactctagaaattagagttatttttcacatttttttaaactaaaattggtttagttcttaaatttttaattaatttgttaagtttttaattatttttgaatttattagctatatgtttattttatagtttattatgtgtttttatgattattttttgtaattgtattttaaattttctaattaattttatgtatttt

SEQ ID NO: 397819 - DNA, 900 bp, Cannabis indica
gcagccatgacatactctgcatattgtaatagtgcaaaccaatcattatatagtgattttcttgatgatttcacttatgcatactattatagtcttatagactatattagtaattacttttataataaagaaatattagtttaggatattataatgtatttattgattacctatcaacttatttcgaaaattcggtataaagcatctttacgaatatttattgccaatatgaacacaatataattggttgctagtaataaactccaaagacttaaattcattgacaaactcacctctataatctttgttgggaacgtcaagatatgaatccggtaaaacccaaagaataccaggttgtactatctaagcaaaataacagatcagacaaattctagaaaaaggtctatattgcaaagcttaaatcatcatataaaatgaaaggccaagagaaccaatacattcaataaaaatgataaaaataagatcaaagcacaactcaaaatcttatcagcagaataacatctcttgaaaaataaatggttaaatgaggtcattaataacaataaaaaaatacaaaattaacgcaatgtaggaatatcaatatacctttaagcttgatggaaaactcctttgaaatcaaaacaccaaaccagtatacgtagaagtagaaacagagtaaatcttcttcattgtctcctcctcactgaaacacagaaatcatacaaaaataaatccatttaaatttgtcctcgaatttcaatgataacaataaagttagcatagtaccttcacagaaccaaagcaagggttttgacgaaagaattgaccattgatcttcgaaggtaaaatttgtcaaaatagacttttgacaaattgcaattagcaaaatagatttttttt

SEQ ID NO: 397820 - DNA, 929 bp, Cannabis indica
aaaaataaattaaattagttattaattttttgaataaaaaaatgtaatatatatatataaaaaagtaataattactaaaaaatatatataaaaaattagatttgattaattaataatataatattttataaatgattaaataagtaatattataaataataatttaattttttaaaataataaaaatttaatatatcatttgaagtaataattaataataataaaaataattttgattaattaataaaataataatttataattaattaagtaatttatttttttgaataataaaattaataaatataaaaaataaagtaataataacttaaatacatataattaattaataatatgataactcttaaatgatgaagaactattttaaaaaataaacaatatgacatgattttattttaatttcataaaatgatatataaataagatatcataaaattgtgtcattaacatgaaatcttatatgcctttataaaattttagatgacaatcgagaagtcttgtaccacattgcgaaatcgtagatgtccacaatattggaattgtctaaatgcatttttagagatggcctcgaaatgtaaagattgtgatggtagaattaggtaaccttgtgtaagatgggtgaacaataggcttcaaactttacctattgtaaaagcacacatatttgattggggttttttaactggttacgagaagtagacttaccacggggaagcagaatctagcgccactaatgtaatgaatgaccatgatggcactgatgatgaccctgaaattgatgagatgattccgatagtggatgacttccttcacccgtcatttgaaatggatgataatcttgatgcaaatcaatggcgcgaagaattatttgaagagattgaggccgagttgtatcctggttgtgattg

SEQ ID NO: 397821 - DNA, 713 bp, Cannabis indica
ctgaaaaatagcaacgttaccctgtcatttccaacgacccccagaaaattcaaaattctctctatcaccgtgagccaattctcaacatctgaacctcccaaaaaaactggaggtgcttgcttgcaaaacttctcatacagtggctccgtacggttgccagcaataggttgttctgctggcaccgcaagaattaaagcagcctgaacttgtggtggaggcactgcaagggaccctactgccttaatgtcagaatttcttcatcttgttggcgaatatgatcttgcatttttgcaaatctatgttcccattctagaggagcttaaggtgggttttcatgtcaaccaccctaaaaccttccacagcctctaccacgtccacggggattctacggaatttgatttccctgaccgcctccggtgtcgaccctatttcccagactccttgtatttcgctgggcgtccatttattaggacttagtctgcgaagccatatgttaagcacgtcagacagcgatcacaaaacttagtaccgctctttataaattttagggcaacgcattaaaataaggaattataaactactatgcttcctaacatgcattaataatcacatacaatactaaacaagtaaaggcttactaaatcgtgagctgagcttttctctgatgatgatgattgtacatgtcttggcgatcttcggtagacaaatctggc

SEQ ID NO: 397822 - DNA, 724 bp, Cannabis indica
taaaattgttgaccatgtaagatgcaaccaatccattatactcaggtggaagactattcagaatgaattgaacccattgttctcttgacaaatcctttcccagcaaatttgctttctggaacttcagattcatcatcattaagtgtgaattaatgctcttaccaagacacattttcacactatagagttcatttacaaaggtctgtacaaggagaggttcgggtgtggattatccattttgacactacaaatattaataaagaaaaataaattatttggttcactcaaatttatacacaagttcagaaaataacaattgagtaaacatgtttgcaaaaataccaaaataaaacatatttaattattttccaaggtttccaacaaactgatacagtgtcccgtttaggcgagagtcaaagatatcatatattgaatagagtagtcaactcatctaaaaagaagaacattctagcaaccttttattcgatcgaaaaaagaatctgacgttctcccgtttaggcgagagtgaaggtcattcctatttcattagcttctaccattatgtcatacttttgtaaatcttactcttagcagccactattggggtggacgtttctaagaataaaacacttacaaataatacttatctttcgagatttgacggcgttaaattgctaatgaacgttcatccattagggatgattactcactaaaacaagaacta

SEQ ID NO: 397823 - DNA, 722 bp, Cannabis indica
agcaatttttggccactacacatagcactgatctacagtcttgtttcctgttaatacaacacacccattagttgaaactaagcactgagttttagaaaaacttacagagaagttgttatcacatagttgactaatactgatgagattggctttgagcctttttacatacaggatatctgttaaatgagccactcaatttaggtttacatcacctttgccaacaatctaccctttgtttccatcaccaaatgtcacggtcccctccttttcttctttgtaattaactagcaattttttatttccagccatgtgtcgagaacatctactgtaaaaataccactccccttcaacaaaagcaaacagagacagcttagccagcaatccaacatttggacttatgttagattttattttttgttctcgatgaggttcgcgcccttgaggtttatttggttgaggaaaactatttggtcgattaatcattgctttcaagtagttttgcaatttattgcacttggggcgaatgtgacctttcctgttgcagaaatgacaggttggaatgaatttgtcattttgtggcagatttccagcaccaatccttctcccttcaaacttcagtttagtgggtccagatggaacttgtctcctcttagagggatctggtttgttaacggtggtcggtcctttttactcagatctacagttgaggtgagtgaattctc

SEQ ID NO: 397824 - DNA, 622 bp, Cannabis indica
caattttaatatctaaaaatgcaagcgggaaaaatttcaacgaaatctttaatttttccctacctacagcaatgtgtcattttaaagctgacacaaaatgttaaaaaaattgtgtaaaattatgtgtcaagttgtaaccgacgcaataatctaattagcttcaattacaatttgaagctaattttcttgcttcattcaagaactgacgctaatagagcatactttttgcttctattctctattgaagcagaaaaaaaagtttgcgtcgctttggaaatgaagaaaataatttgactatttgcgtttgctgttataacgtcggtttgtacaaccgacacaaaatgttttgtgtcattttacaactgaagcaaaaagtcagttttgtagtactgaatgaatcactacttaaaagatattagtgacaataaaaaattgtggaaaagttgtgactaaaaaaatactagtcacaattttatgttgtgacttaatgttggatatttattttaccagtatattagatctactcataagtatgttgtttaacaccctaaatatgaactttctaaaacgataatttaacacatataaagttaagaaaaccttacaatggttgcagcggaat

SEQ ID NO: 397825 - DNA, 961 bp, Cannabis indica
ctttgttaaaataaaattttaaaaaataaaaaacagcaatcacttggatttttttcttttcgttttttattggatatttgtacgtaattaactactatatattaccaataaataaatcacaatttatcggtatattaataaaaattgcaattgtgcccatgccaataagaaatggtttgtactttgtatcaaccaatattttttttaaataataatatccatgtttaatcaaatggaatttaaaataatacattacaaaagttaagttgatttataaaaaaaatatataaatatatttatgtttgatctaattgtaaataaaacttttattggatattaagtaaccccgaaaaaaattaattttcatagttgatttcgttcaaattattagagtaattaatagtactattttattttcataaatgtatagtgaattacattattcgtataaataatatttattttagcacaaaatttagctaaatatatttgttgtatgataggacttaataatattttcatctagattgggaagatctgtctttttacttttaacaaatgtaatcaatttccatttttaatgaaaggatcatttccttataaaaaaaagaaagataagagagttttaagtagggtcagctagagaagaatttagaggattttgaccaaacatataattggcttgattggtcaccattcacatagacaatgtcaatggatgaggtgagttctactacaatataatatatatatatatatatatatttatataaccattaaataactacaaagcctataattatgtatatttctctaataccaaatcacttatcatgtcttttcttttcaccatggtccatatatgtgtatataattgatgtattatataagatactataattataattaattatttttaattttgtcatttaataaaagttattgattggactttctattt

SEQ ID NO: 397826 - DNA, 516 bp, Cannabis indica
gtatataaatattatattttagttaccaataacattttgttgtgacttaccaaaaaactatattgtgactaaaatgttgtcacaaaagataacagttttttataataaaagagtaatttacgacataaatacttaagtttaactttcagttataaataaatatttaagtttaatttttggcggtaataatacataagttatataattctagagcttctgtaggtacctgacggttaagtgttaagtaaattatcacgtgacaattttttaattgatctaagtcattaaatttttttatttattttttttttaaaaaattagtttaaatatactaataagaaaataacacgtggataaagacttgacatttaacggtcagttacctacagagttcaaaaaatataacttgaggaaattacattctataccctttttatattgtcctctttcatttttaccttcttttttaaagtctatcattttttacctctttttttaaacattgtaccaatttcg

SEQ ID NO: 397827 - DNA, 704 bp, Cannabis indica
ctttttctttttcttctgcattcttttttcttaatatcctgaccttttgaatctttattctttggtctctttactttttatttatttagtatacattgcctatataataaattctctctcacactctcttgtttttcataccattaatatcgaaggccctgcatctctccctctacttgctccctatttgatagattggcttgaatactttatttgtataatacttttctattccttattttattgtatagatgtttactaacagatttatctatatatatttaacttttttaaaattttagttgttgactttgacaatagaaatacaacatggttgtggacttttttcttagacattgaagccaagaaaccagtagattatcctgctgttcccagtcttcaaaggcaggatggatgacatttcgagcttcataagtgagaaatttaggaggaattcgagtagcatccaagaatatttgaaaatgacttcctttaattgatgcaagaacttgttatttccaaggtacataattatgctcatcaagcttaatggacagggaatgtgtaaacgaaaccgggtatgatctatggagaagagcatggttcgatcttgatgcgcctccattaccacttgcagcgaagatccattgaaaatcaaagctctgataccatgttatgtttgagagaaaagagaagaagaagaa

SEQ ID NO: 397828 - DNA, 1301 bp, Cannabis indica
gtgagagagagagagagaattagagtgaataatcaatttctattttatctacttgttacactctgagttgtgggtttattttaatatatatcatatatatatatataatgttataaataaatcattctagttagtcctttaaaataaaagaaaatatctaatatgatgtaaattcataattcaaattcaaatataaatatctcataactgattaatggaaatcagttaaatccttttattatattattatctttttaattaaataaattatactataatatatttaattcaattatcaaaagctaattaattaatttaatttgaattattttaactaataatataataaaaaaaaattaacatagacctttatatgtcaccctacacttgtggatcatgcttacacatgtgggtaatattttaaggtccaaaattagtttctcaattttaccataaataagatttattatttattcttccaataataataataataataattaattaatcgtcattaatttcatatttcacaaagattaaaataaatattattttctttaaaataatatatttctctctttaatattattttagaatagtattatatttaactaattaatatagttttatctaataaaacaaagtactattaattttacatttcataattgtcataattattcaaaacaataatttcataatttactattttgccttaagaatttatttctcatagaaattaattctcactcaaatttactcataaaataaaatcctcacatgtacaatattgtatagaggtgactcggggatcatgaacctataattcacaattccaataaacacttgattttgtcgatctcatcaatagaataactttgtaacgccctgaccctcacggacgctacgtgtgtgtggttttacaaacttatttcttactaatctattagtttagaaaaagtatggtttaattaaaaacttttaccttgattaaattgaaataaaacttatatactaagtacaccataatactggatcccttgtttataagaatttttttacaataggttacatttcaaaacatagaaaagaattcaatcctgtttcccagaagccaagaccccacggctgatatgtactttgctaggagacctctgactcatggccgaacacaacttctaacttccttacctgcaccacgaagcacccgtgagtcacaatgactcaacaagaaaagctactaaataaaattatagaaagtgctagcaaaattcattacaatgtaatatacataccattag

SEQ ID NO: 397829 - DNA, 1048 bp, Cannabis indica
gaaagagcaaaaagatacttgaattgcaaaagagagctttcattatggatcgaggtatcgaatatgatcgggaatcccaccccgaatagcccattattcgaaactatgaggcaacaaattccgacccgccaatgggaaaagtttgtgaatgttccagagaggattaatcaaactttggctcttgaatttctagcaaatttgcctgaggaggaaaacgcaagggtgagagtccgcaaaacaaatgtgcttctaaacattgacgccatccatagactgtttggtttagaaatggtgaatagcgcatattacaaaaggtttctgaaattaacgattgaccctgtggacttggcagagacagttggttttctggggttgagattgcatgaagtggataaggaacctcaaatgctttatcgctgtgaattgaaccaagttgctcgtgcttggatgttttttgtaagtggtaggcttatgcctagtaagcatttatcggattttccactggatatactcagtgttgtttatgcaattatgaaggggattactgtgccagttgggggtataattctgcaaagcttagataacatggtcgaaggatctacacatgcgggaattggcttcgcaggattgataacggagttgtgtattgccaatggtgtgccacaatatccttatgataatcaagtacaaccacaacggaatattgattggacaatggtgcgcaacctaaagccccctcatccatatggtcaaccgcctcctcctcgtcgtaaccagcagcaagaagttcatgtccccgaggaagaggacaatccaaatgaagaaatgcctcaagcggttcccacatccactcctcttgatgcggggatgcaacatatccatgctcaactcaactacattatccagcaaaacaatcatatccagagttacatggtgcaaagaagtgaatttgatgaaaatcaagtgaggcagttcaatcatttaattgattcgtggaatcttgcggtcgaggacccgattacttggcatactcctcctcgtctttcat

SEQ ID NO: 397830 - DNA, 469 bp, Cannabis indica
aagaaaaatttcatgttgaatctctctgcccaaacaagcttggatgtttctcgacgtcggtgagcaaacataggcacgaatagcttctcagccccctcaaaaccccatccccgatcctctcagagttctctctcactctcccttgtctcttctcgttctcctcttcgtgtttctccgtcaagaaatgaacaaagcaccatcgacttccccaaggcccaaaaatctcaatcccatctcttccccttaatctgccatcctccgccaccggctgccagtcacctgcaaagaagagggaaataactaaatttttgatatcaataaaagtattccacgtgtatatagatgtacactgtggcactcttagttggcatcctagttgacacttaactttaaaaattaactgttacatgagatttgcaaacagaattaaaataaaagaaaaaaaagataagggagttatgtatataca

SEQ ID NO: 397831 - DNA, 532 bp, Cannabis indica
ctatttctagtgtcatcctatagcggtgctaacccaatacccactctgtagcattctacacaaatcagaactttttggacgcatgaccaagtgggctgttgagctcagtgaatacgacataacatatcaattgaggacagccatcaagtcataggtactggtagattttattgctaaattttcttgtgttggataggtacaaccagaaaaggaattattatgtttaaatgagcaaacaaactcaacatggatgctagcagtagatggattaagcaatagcaaggggagtggcctaggaatcgtccttacctccccttaaggagatatcatccaataggcaatcagatgtgacttcaaacttaccaacaatgaggatgaatacgaggcattgatcgctgggctagacctatccattgatttgaatgccaaaaccattgaagtcatgtcagattctcaacttatcgtaaaccaactcaacgggtcataccaggccaaagattcaaaaatggcatcctacctccagattgttcaa

SEQ ID NO: 397832 - DNA, 1397 bp, Cannabis indica
aactgaagaagctcctgagcaccgaggtaagaatgaaaccaaggcagataatgaaaagttcaggtgttgtcagaatgctaacaataaagctcaatactttatgttgtctagcatggttgaaaccttgaaaacaaggtttgccaacactctcacggctgcagaaatcatgaaccagttaactgactgtttgggatagcatcagatcaagctcattttgaggcgactaagaattttatcaatgtgcagatgaaatctcatcagaacgtgcatgatcaccttctccaaatggctagttatttccaggaagctgagaatcatggagctattatagatcgagaaactcaagtgtgtttgatcttaaatagattgactgaagctttttttccctttacttcaaattatgtcatgaacaagttgacctttgactttcatgagttaatcaacaaccttaagacatttgaaaatttgattcgaggaccgcagaaaggaggaaacaaagctccaagttctagtactactacaaattgtatgccaaagcctgatgctaacattgcctctacattaaaacgcgaaaagaagaagaaatggaagaatagcaagaagcctcttaaagctattaacacaactataaaaagcctactaatccaaaggcaaaggaaaaaggaaagtgcttctattgcaatgaaaagggccactggaaaccccagtgtcctaagtttttgacaacaaaataaggtatttataactttattataaactcatgtgttttagagaattattatcccctcaggttattaattttggatctacagaccatgtttactttcttcttatttcagctccagctacttaaacttggattgctatcttagctagttgagtcagatgactggatagaagggtggagattttccaagttgaagatgaagctcgttatcttctttaatttttgaataaattgttttagctactgaacaatttagtttcaattattagtatggaaattctatttcctatttcatattattacagacaattcattatgacatttttgagagtattaataaaatttttctctttaagaagttttcatcatgaattgcttttatgaaattgagcttcatttttctttaacttgtatgccaataccgtattatatttatatatttatcatgtttgtatgtgtttttttatttattaatgatgccaaatctatggtattttttaaactaaaagataataccacataatcacttagaatttaaattgaatgtttatgaataattgacatttcttaagaaattcttaagatttcatttaattaaaagatctttagatttgataggggtggaagaagttaacaagtaatattttcagttcaaagatcttttatatct

SEQ ID NO: 397833 - DNA, 520 bp, Cannabis indica
ttaagcaaattgtcacgaggcaatctatgattgatccacattattaaatttttatttttttaaaaaaattagtttaaatataccaataagaaaataaaacgcggataatagtttaaaatttaacggtaaggtacatatgcatatccaaaaatataatttaagtattattaccacacttaagtatttatttacaactaaaagtttaacttaaatatttatttacaattaagagttaaatttaagtatttatttacaactaagagttaaatttaagtatttataactcaagttacttattaattttcagtcttacatacttaaaactgaccatatgacacaataatattagaattacaaatatattttaaattataaataacaaccaactattttgtttttaaaattttaagcaatatattttttttttcccaaattactattttatttttaggagtttttttttgtttttacactttctaaactattttttttttttgtcaatttttacagaattctacat

SEQ ID NO: 397834 - DNA, 730 bp, Cannabis indica
ataccattagagactcgcaggcgagcaaatcaagggccattgctacttacgcttgatcctgcaacgggaaaagttgttggcttggagaactaagctttcatccgacagttgggtgtcgaagtgagcacattattgtcggggaactacttagattttagtgatgtacctcaacattttaacgaacaagttgtgcagagaatgaaggtaatcaattgatgaacataataaattttattcataaataatcaaacaactaactaataatttaattcttcaatttttttaaaaaaaatcatatcatacattgttttgattcgtggagctccagatctatttgatacagatctacattgcatgaatctgggttttcgattttagagggagttattttgaacgattaaaaccgaaatcaaatgtttaatttcagtttcttctcagtttttctggtttctttttcgtaattttttgcttaaatcattgcagtttttctttttcagtaaatttttgccggaattgatggttgcattaccctcgttttggttttattttggttgtgttgctgatttgaatgatggacgtatgttcatctttttcgttcattccgtgcggcttaaggtttagaacatgtggtatttttgtaattatttggttctgggctgtataaatgtttaatgagccggcccatagtaattttgtaatgttttttccttttttgtattttcttgttttt

SEQ ID NO: 397835 - DNA, 512 bp, Cannabis indica
tgaatgtgaagaaagaaaaatctaaacgaagtctcttatcaaattttcacaaagtatatctttcaccatattttctaataatttttctttcttatatcttttagacgtttctgtctaaacaaggcccaattaggttttttttatctctaaggcccattaatcttatctgaattgttaaaatgcacaaaaatttaaacaaaatatatataaaaaaattcagaattttacatgtttgtaataagagaagtactgttgctattggtgaacattacaagaggtgaaatactgttatcattttaatatgggattttacatttcaatcattagcattaattactagttgtgtttaatactttagttaacaatattttttaaaaattattatctgaaagtaatatttaattacaccaataacattataacatctaagagagtactaggaactaggggtgggcatccgatccaatctaacatttttttcctcatccgatccgattcaatccaattagtaa

SEQ ID NO: 397836 - DNA, 679 bp, Cannabis indica
taaaacaaggtctggtttttttttttccttctaattgattacattggttacaatttactaaaccatgttgtatcccctattgaaccctttcttggccatatactttgtattctagttttacaaatattttttgtcatctgtacaatggtcttcgggtcttcttttgtctgcaaccacaaccttacgttccttgctctccaaatgtggtataataatgctgcacaggcagcagtaagaacctgtcttcggaaggaagatgtggttctcttctctataactcgcaccagatcatttcagttggttgatggagtcttccatcccagccaagtcttgacctggtttagatattcattagagaaagggcattgaaaaaacaaatgctcacaagtttctgcattccagagcagagcaaacaagaggcatcagttgcaatttgaatttgagcaaatggtctctggttttcaatctattttgaatagcaagccagaaaacaaaactgtgtttgggagtatttaaccgattccaaacttccttactccaattgaccctagataccgtgggacacagccacttgtagccatcagctactttatatttcgtttgagcgaaggtgataggatcaactaaattcagcaacataccttttagagctacaatcttctgttggaaatattttacc

SEQ ID NO: 397837 - DNA, 738 bp, Cannabis indica
tctttaaggagggaagaatgtaaggactcggtcaaaactgagaaaagaaaaaaaaatatatgtatatataatagtaagtgataaaggaagcccatccccctgtctttctctttctctttctctttctctctcatcaatacaccaaagaaaaacccacaaccactaccaccagcaaccactctctggccaccgtctgacctcatgcactagaccatttaaatccctaagcgttgatgacctcaacccccaagcggcaccgcctctttcgccgtcattggcccaagatcgcaagtcaaagtttagaggttcaaacttcgaatggattttttgtccacctttggtgtcggtttgacgagcgtcttcaccactagactcatctcatcaaggagaacaatctacactaaggcatttcaccaaacctgctactttttttggtgacgattttgtagctccgtccctttttgaaagctttccagcaatatcgtgtactattttgacaaataattagcataggtgtgttctactcttcaaggtggtcattttgataaatactatccttagttttgatgatgttttcattacaccgatttctactgccactgatagttaatgtgcaccgcttaggtgagatttcataattttaaaattttaagatattcttgctatatgtcattggactcggttttaaatgtagaataatgatgataattatttagccatttaatggtataggtgaga

SEQ ID NO: 397838 - DNA, 710 bp, Cannabis indica
tttttttttcttaagaatattgacaacaatactaactaaactatacaatgtgtgacactaactccacaaacctttcaaaactcatattcttttttgttatttacttttccattcaaaatactctattaatgacgcgtttattaaactataattaaaattagaatgatcaattgaagaaatatatcagtttaaaatagaaaataattagaaacaatattttattatgctatttactaaattgtttataaaaaaaaaccaaaatcatattattttgtttatataactatgaaagataattggaatgctttaatttgacaaaattaccattattagaacatatatttattttctgtttatagattatttttaaatgacatatttgtcttttttatttttaattaataaaattaaaattaaaataaattaacttaggaaatggaaaggtattccctataaaaatgggagaagaaccattccctttattttctccctaatttgtgttggtcccatactttcttcatttccaaaatttagtaaacaattgtataagattgtgtgtccctttattttctccctaatttgtgtgggtcccatacaaaatttattttcttcctaatttgtgtgggtcacaatggtatcagattatgatagtcagtagtcccgtaatccgtaagggaaaataccgggtaagctgtgcaatcccacaccgc

SEQ ID NO: 397839 - DNA, 1017 bp, Cannabis indica
cgggggcaagttgtgggatgattcacaaggacgcccggtaagaaacatcactgagttcaacgagagagctcaagtgtttttccggaaggaagaagcccgaaaggaaatgaacttgttaaaaactgactcgggaggtaaacccagcaatgtctcaacagggaccgcttacacgagaattaataactcgggggcttctggtccaaaaagaaaggacggaatcagggaactgtcgaaggatagaaagaaacaaaagaagtatgacaaatacgtaccactgtatactctttataccaagcttaatgaaactcgggaaaatatttacctcgcacatgagcagaaggtagcctttggcaaacccgagcctatgaggaattcgaggagcaaaagagatcctaacaaatattgtaaatttcataaagatatcgggcatacgaccgacaaatgttgccaattgaaagatgagatagagagtctcattgctcgaggccattttaaatagtatgtgaaaaaacagggtcggggatacaaccagccccgtcagcctaataacccacacaaccagaggtttccaaggagagaacatcctggttattttgggaggtccacatattgcaggagaaagcaataacgctcacaagagatatgtgaaggaaataaagaacgagcagtcagtctttgccccagaaccttccaagaaggtgaaaaccaaggaaccccacattacattcacagaggaagacgagaagaacgtgagataccctcacgtcgatctgctggtcataaccattcaactagccaataagaggatcaagagagtgttaatagataatggaagctcaataaatatcatttataaggagactctaaagaaaatggggctcgaaaaggccaagttaagaccttgtatggtgaatctttgtggattcaccggggatagcatcgctagccttggcataatcgagctcgcattaactttaggagagaaacctttaactgctactgttatgcaagaattct

SEQ ID NO: 397840 - DNA, 1314 bp, Cannabis indica
gaacttatttcctctttatttttttttaattataactggtttgagttattctgtgttatttgtttgtgctcattatgttatagttaccgatttttattttaattataactgggtttgaatttattacgcgtgtttgcttatttttattcatttatgttatagaaccgattctattttaatttatatctgagacatgtaacttcggtgactgtttcaacaatgacacaactctgttaactttttagataattttttcgaccacttttttgatgtcggtgtcttctctggtgactttctagtgatatttgttattagaagttttatcaaatttatctatggttctttttttttctcataatttaaagtttaattattttaatctcatatctttttgcattatttatttatgtcatataaaagtaaattccattaattttttcaatgaaaaaaaccttattaaaatgagcaataaatctccaaacaaatccacaatgagagattaaaaaagaaaaatttacactataaataaagttttttctaaactttacatttatatttgacaagtaaatttttacatttatactttctctacttaatttttttcttttttactgctttttacttattaaagcttcaaaaaaaattattgtaacaccctactagtttaggcgtgttaacgtgatttttaatttaattgtgcagctcattgctaatcatcgagtttattgaaaatcgtgaataattaaaactttatttaactatttataattatcaaaataacatacttatattgaaccgagatcctgttttacaaaatatttacaaaagtttcatagtccatagtacaaaagttgttgcctagcgactatacaaaatatgaccagctgtcctaaagaccgtacgctccaggcctaatcgccccgacatgtacaatcttcatctactcgctctcacggctgctcaaccttaaccttgcccttacctacacatgcaaacaatatatgtgagtcaatagactcagtaaaaaaaacataaataataacatagcaataagtcagattataatcaagcgctcatacacccaaccataaccctattcccgtgtctgacacagtactaagtctagaacgttcatacgacaatactattgaccataatatcagcctatactcagtacgttagtcatactctagccgtactgatgtgatagtgtcgataagtatctgagccaaacatacatctatcagtatccaatataactctacgtaatataggcttaataaacatgtacgctaaacatgtaaacatatatgc

SEQ ID NO: 397841 - DNA, 716 bp, Cannabis indica
ctggaagttttggtgtgttttgggattgttttgagcaagctatgaaattttgtttatttcttgctcagaaccggaattccggttgcagaaccggtctggcggttgggggatttttgggaaccctagtttttcccatttttatgttgtttaggatattgccatgctttttatcgatagggaaacttctagtttctagtttaagtccccgggaagtgatttagcgtatcacttatcagtgttgtggttgttatggtttaggagcctgaaaatcgccgtgcagttcgttccattcaggttgaccggcacacctgaattcggaatcgaggtaagattagtataatagtatgcatatgtattacatatttagcgtgcatgttaggaagcctgttagattacattagatatgtatgttggcttcgtaccatccaactgtatcacatcggtcaggctagagtatgactagcagctggagtatgaccagtgtaccgagtataggcttattctagggttggtggtactgtactgtctgaccgtatcaactcggtaaggctagagttcgactagcagctggagtatgaccagtgtaccgagtataggctgatcctgtaacacatcggtaaggctagagtatgactagcagctggagtatgaccagtgtatcgagtataggctgttactttgtgaaaagtaccatcgtacgaatgttcgggactcag

SEQ ID NO: 397842 - DNA, 704 bp, Cannabis indica
ctccaactttcttaggacaaatcatacaattgtttgaatcatactttctttaatatcccttataagctagataggatcctttcagcttcacctctccaaatttttagcatttcaggctactcaaatgttgtaaactaggctagccaaagcggctactaagacttatttcttgaatttattagccttagacctgcctatccatcgaataagattaggcaaagaagtagaacttgctctccactaaagccaattctttatctcctacagacaattgatagaaaattggcaatcacagaataggttctgtgatgtttctttttgtttattacataaggaaacattcttccacttgaaaacaaaatctgagaagtctatctctagtttttaatctgagctgcatagtcatccacaggacaaagctgtgtttgggggtgttgaatctctcccacacctcctagctccactggtttctactttgtgggggacagaacaatttatatcctgcagccactgtgtatgacaacaatggatgatcagactcatctgacaaggacttgaactgatcttttacagaaatcagtcttttctaataccagctgccatgtggtggagctttgtgttgggttttgtgccctaaataaaacccatttcatataatcagatttacttattaataaagatcagaaataacattttatgttgca

SEQ ID NO: 397843 - DNA, 863 bp, Cannabis indica
cattgagtggtatcctgttagcagtagcacacacaagcaaatcatgtttagaattggaaggatcagatttcctttaaggttggatttttaaagacctttctccagtgacaatcttcaactgaaactctttactcacgtgtttaatcggggttttcacaaacacgacaatattttgtcatttcttttgaaaacaatgtagaatttttattaatttgtcaaattagctaaaagataagattacttcatcaggaacgctcgatttaaaaaagatgttctagtaagattgtgagcaactatgttggcagatcgtttaataaaaaataaataaacattgtttaatgatggaagaagtttacgatgatcttctataataactccaaaagtagaaagcataggtaatgaatttcgaatagcttagattgctaccaaacaatttgactccaactccactttgagccatggttgaattttaatctagcttagctcttcctttataccaattgttttagtcaaatttggagtgcctatactagcaaaactacctgacttagccatcactactccttgagagtctcgagcgattatgttataaccaattgtagctcgatcacgaaaaattgcggcatcaacagttaccttaattgtattctcctgcggcttaatatcactagcttcaaaaattggaaaagaagcctttgaacctctattttgggttgactttcattgcacaagacaactcatagaagagataagaacacatatctactgtagcatatttttgcggcacgtttactaaagtgtaattggaatcagaataatcaatgcgaaaaataaatcggtttaaaatagaaaataattggaaa

SEQ ID NO: 397844 - DNA, 556 bp, Cannabis indica
aactgctggattttccttttttaaaatctcactatctttaagaaatgtctgtctctacatccggagctaaatcgtccagcaaaggatctactaccttggccaccttggaagaggtgatgaagggacccgtagtccaaaagaagtacacgtgttgatccaacagctgggaggcggacgagctacactcaaccttaacctgtgcccaccagttggaaaagatcgtaaccgtggccgggatcaagccttttgcttttggagtctttcaccgcctgcactgagatgaggaaacaccaaaccataactacggtggctttggggcttgaagccagactcacctcatgtttggggccatgctaccgcttcatgattacttcatcaactttttagtttttgtcggccttgcacgttaccaactcattcccccaaaatcaagtacttaaccaaaagctctaccctaccatgcaagtgaacaacaaaggtgaaaaggtacccagaaaacttacgtgagggttatgaactaatagttgatgacgatcggtgtagaatgtagtatggc

SEQ ID NO: 397845 - DNA, 513 bp, Cannabis indica
agtaacactagtagttgataaatattggtacgatgccaaaaatgtatagaactttcaataggcttattaagtatctttcctgcaactttagcattcagtctctctggaagagttagagatttcagattggttttacacttctccaaaatcactgctccacccccagaataatcaccatctcatcagtagactttctagcattaaggtgatgagtccatatttgtcttataaatatagctaatttatttattaacattcttaaattgattctttaaattattgaatagtgtgattttaatttgttaggctattttagagactattcatgtatttagagtcttttggagggattttagcatattttggtgaaaaatagtagaagtcggcgagctcgattgtactaggcggaaattaattgcaaattctgacgaccttagaggcataattggacttggagctcaacataaaagtttaagatctcgttcttagatttttagagcatcttgaattgtt

SEQ ID NO: 397846 - DNA, 585 bp, Cannabis indica
aaaagctcccaaattccaatacttctccttccccataacaaacacccccctaagttaccaattcaatccaacaaggactatctatcttatctagttaaaagttgaaacagtgcatgagtaatttcatatcataaatgaactgagaatcttgggtaggtatagtattaattagtaggcgtgggactcacccaggggcggaggcacatacaagcctacagtggccttggcccccctacccaaaatgtgttatatattcttttcatatttttcttttatatatgtgtcttttatattacttgtttgtggtgtggcccatccaatcaaattcaaaccgaaaagttaaaaaaaaatagtcagagaacaagaaaaataaatctacatatacatattgtactcatttagaatggtcaatataatgtaaattttaacaatactaataatatacctttcaaaaaaaaaaaaacaagactaataatattaaagtggcagttttcattttgtcagtttgcaaaccatttattactttccatttattattagattttaataagtaatataatataagttgttagcaaaactacagcc

SEQ ID NO: 397847 - DNA, 773 bp, Cannabis indica
gtgatgtgttggtcaaaaagggttggcaaatcaacgttggtattaaaacttttgccagcataaaatgaaaagtgctggcaaaaatgacttttcccaacgcgtaaatccgctggtaaaagttagattttagctactgcaaatgtacgccggtaaaattttgacctctttgccagtgcagtagcgaactgtgttggtaaaagtgacatttttgtagtaatataaataataatttataattagtcacaattttttcacctttagtcacaaattttattgtgactaaaaataaaatattttgtagtgatatcttacacttttatatgcacaaggtacactctatccatgtatatttattagtagttagccatttacatataattttgttaaattaaaatgtattaaaaccagtacaaaaatgtatcattaataatattaatatatcgaatacttctcatataacaccatataaattgatgttctataattagtctgttgtgtattttaattttgtgttctgcactgatattgtatatagtcttttgtaaacttttataacatgaatctctggaaacatttttctattgccgttattataatgaccatttttaatgttttattttagtcaaattttaatactatcacgatctttaataattaactaatttaataatattaaactaagttttataaattacaccagtgacggatccagaatttttgatttgtgggggtttaattgttataaaaatatttattatttactttacattaaa

SEQ ID NO: 397848 - DNA, 518 bp, Cannabis indica
aaaataaaaattcttaaaaaaaatgccgggtcggatcatatccgatctgaataaatcgggtcagatttgattcgatctgagtatctgatctagcagagcaaggcgaggcggattcttacagattttcaggtcggatcataacctgatcaaatccaactaacccatttacactccttgtatagtaataccataaaatacaattgagctatacataatgcattgctagaacaacactacttgatagagatacatttttcctaaatttatcattacagtgactactgattgctctaatttagcaacttctaactcctgctccctagattctagttttgaaatgaaaataaatgagcaggttttagtttgttaatttgttggtgaaatttgtgctttgtaattggaaatgtggtgagaactggggcatataccatacaagattgactagtaatatcccattctaataagtcactgctggttttggttttaaggtgtgttgttgtgtatttttcttgttttag

SEQ ID NO: 397849 - DNA, 784 bp, Cannabis indica
atatatatattaggttaaggcttattagggtttgattttcttgggttgaagacttagtgggccgaaactttgaaggaaataaagacttttgctttgaccgaatacacattagaggaataagagttgacctttgattggagagagcatattgaagtcttggactgcctttaattgtgtggaccgaaccatttattggtgctcttgatattgtatataacggatattgggctgaaacaaatattgcaattgttattttcaataataccaattatttgtggacgcataaaataataaatttagaaaaatactaattttcacagtattgtattaattgtttatttaaatgtgttagttaaaactaaattccaacacttccaattcctcaagcaaatccacacccaaaatcaagaattgaaatcaaaagagggtttgagagagagagagagagcgggaggttcgggtaagtggccaaataaaccagaaagttccttcatttctcaaaattttacctcttttattaaatgtaaaaaaataagggccaaaagaccattttgcccctagggccaaataacacctttaaactcatacaagggcatttatgtcattcccacacaatttcgaacccaattaatttcagattatccacatataaatataatgccaataatttcaatccaaattgcatttcgggcccgaacccggttcggcccgaaatacctagttgtgactataccgcgccaacctgtcaaaacacacttgaaaaagacaacacatgtatactata

SEQ ID NO: 397850 - DNA, 803 bp, Cannabis indica
ttattactttttagttttttagtttaattttatttttaaaacgtttttttttaaaaaaaaaaaaaaagaaaaaaacgaaaaaaacctaaaattgttaacttttttacctaaaactccaattagcttagaaccggcatgactctatttttttatcttacaaagatagtaagtaaccgttataattgttgttcatggcattcattagactcaaattggtaattgtaaagaccctattaacattaccattaaatctaattgttttgtacatctatattgatttgattttacttttgtttattagtcaaagcataaaaataatggtttatccaaaagactaggaaaaatgaacatctctaacccaatcattgaactaaaaagttacacaaaaatacaatcataaaagaaccccaaaataacaacagttgaaaaccaaaacaatcaaaacaagttagaatgaagaacagagaacaaatctcagttgtccatttaagaaaccacctaagaattttgccacatcaaattattaataacagtgttcaatgtatcaaaattaataaactagaaaaaaacagtacaaaatattcccaacattgttaacagaacaaaaatatacacacaacaaacataataaatgcaaagttaagataaaaaaagtttaataatcacaaaaacagctcttaaagaacttttagtttttatatcttcaatattatcaataagagtttttctttatacaattattaagaacaataaaagagaaaaatgaattataattaataatcaaaattagcatttaactaaaa

SEQ ID NO: 397851 - DNA, 900 bp, Cannabis indica
agacagctatcaataaaccatatttaaggcatcaatttctcattcacacattcgcttaaaatagctatttattatatgttaaatatactttttctaacatatataaaaataataatactaatataaattaattaaattaaaaacttgggtgaagaagatcatacaatttaaatcttaattaataaatttatataagaataatatttgggacacacaattacactaacactagctatcatgatatggtagaatttttgattttaaaacataaagtgactacaaattaagtcatattaatattttatgggaatcttgttagataaatcaataaatcaaaaatatataatttttatataatctagaatacaataataatagataataattaagtatacgtatttgattgatttatagcaattacaacaatgtacaagtacaatactatctaagtcttcctccctagatctctaaatcaaaagcagttttatttttgtgattatcaaaaagtatacaattgtgatgagacaatatgtatttatagaattagggaggggacttagttacataaccctagttggactgagcatgctcatcaaaaactttagttataactagaaaagtccacacttctacttcacttagaatttacacatatagatgctaagcccattaactattgatcactaacaatatgagctaacacaacaaagaactatccaacaaatccaagttttagaaaaactaataaaagttaatgtaagcccaaataaaaaaatctaacattctcccacttgggctacattaattttgaaaaattgtgtttttgcaaatgccaataattttactaaatttcagtaaaaacacaactgtaatagtttgcagcaatagattgcaatcctg

SEQ ID NO: 397852 - DNA, 905 bp, Cannabis indica
cactggcaaagctggaaaaagctatgtagacccaagaaagatggcgggcttggttttcgttccttagtccacttcaatcaggctatgcttgctaagcaagcctggcgcatcttaaagcaaccaaactctactgtgtccagaattttatctgcccgatattaccctcagtcttccttcctcagtagctccacggggcattctccgtctttcgtttggcgtagtatttgctggggaaaagatttgctgcgcaaaggccttatcacaaaaattggcaatggacagaacacttgcaccactacagatcattggattccgggtttccgtcaaatcacccccttatcccccgttcccgacagagtcgcttctttcatcactaccaccttgtcctgggacacagataagattcagagttgttacccaccccatgtggcccaggctatcctttctattcccctccctcttaccccatcccaggatgatctgatctgggaactctcatcttctgggatttactcggtcagatcaggctaccaccttagtttttccactactggtcctcctgacattccctcttcttcctctccctcgccttggtggaacatccattggcacctttcgatacctgccaaggtgaaacactttgctttccgagccacaaaccaaaccctccccactgcccaaaacctagcccttcggaaaatcattaattccccgggttgtagccgttgtggaaacttcgaagaatcggtgtcacatgcgctgttctactgccagagtgttcgaagagtctggaaaggtacgcaatttcacccctacattttttcctgctcttctgaaattttgtttcatgatttagctcatgagatttacacttcttttcctaaggaagatgtagatctttttct

SEQ ID NO: 397853 - DNA, 513 bp, Cannabis indica
ctttggtttatttttcttgctaactggtaacctgtttctttcaacattgtctttgtctatttcaagattgaaggtgtatgcaacgtcaaggatagggtgtcatattgccagttgatcctgaaattgagaagacttgtaggagaaacagaagaaacaagaggcaagaaagagtttcagcaactactgaaacagaagaaatcatggctgagaatactaatggtggtaacaatggaggcaacaatggtaataatggaggtgccgttgaagatcaagctaatggccgcagtctgagagactacattcttccaactcttacgggggtccagtcttgtataagaccacccgccgttgatgctaacaactttgaaataaagcctgccatactccaaatggtgcagtcttcaatccagtttggtggactcccatctgaagaccccaatctgcacttgtcaaacttcatggagttatgtcagactttcaagatcaatggagttagtgttggaaattatttta

SEQ ID NO: 397854 - DNA, 609 bp, Cannabis indica
ggacttcccagcaactatgacacctttgtcatttcgacaaatactagaatcgaaggatattcagtcggagaaattgaggccttattgcttgcctctgaatcaagaatcgaaaagacagaacacgaacctgaaattgtagccaatcttgccacttctgaacctgagcaacaacctgaagtcaatcttgcatatcaaaatcgattcagcagagccaattatccttcgagacctcctctgcaattcggaaccttctctccccagtattctgcagcaaggggttctccttccaatcgaagtgcttttctgtatcatcccagggctaatggttatggagctcctcaatacaatgtccctcatctcactcaggttcatcgaggaggcttcaatagaggaggcagatcgagcaactcatccaacagaccccaatgtcaactttgtctcaaaattgggcatactgtggtggattgtttttatagatttgataaaagctttactggagtgcaatcgaatccctctgctccctctcctcaggcaaatctggctcacacttcaggacaaaatgataccaactggtatccggactccggggcaacaaatcattgtacacca

SEQ ID NO: 397855 - DNA, 612 bp, Cannabis indica
tttttaccgaccaagaagattctcagacatgttttgccgtcgcagtattccgccggcaaagctttaacggcgcattcagtgtacttttgacggcacatcaaaagtcagtttcttgtagtgtttgcaaaagttatttttaccagcgcagtagtgaactatgctggcaaaagtaacatttcttgtagtcataggttcaaaatttatgaagagggagagagaggatttcgaaatagagaatgaaaggaggctctcaaaaactctagttttttaacaaaatgaaaactaggttaaatgcatttgatgagaattagatcatcctataccttttgttaggatttaaattatatggaataaaaaatgataaaataataacaaaattaagactatagtggctggccatataaatgggccccactagttataattttgtcatttttttaaccatttatcttttatttcactaatgccatatttttaaattttaatcctataaatgtcaaaattatttatttaataattataattaattaacaaataaaattgtcatttatcttatttattaattagactttaccaagtctcataattaacaaataaactctaaaacctctt

SEQ ID NO: 397856 - DNA, 526 bp, Cannabis indica
gcctctgggtattgaagggtgtttctgtacacactagtcctcggtaacttaccaagtactgcagttcgaggcctcgtcacttgcaaaagaattttagcaagagatagagaaacctacaatataaatatatatacatgagcatgtagaataaaaataatcaatatctagatcacagacgtaaataaggtttaaaaacaacatatgtaaatgtataaaacatgggttaattaccgcaattagtaaaccaatctcaacagaaatgaaaacaacgccaaagaaggctcccatgcaagcgacaaagtcgaatttgtcgatcttccatatgagaatggcagcctcatagtcgagcaaattgaccacggcggcaataatgatggaggcaagtatggcgttgggtgtgtacttgaatagaggcgtgattagctctagcgttaggaacacaacaccagccattacgatgttcgacactgccgtgtggcaccctgacatgtagttcacagccgaccgagagaacgaccctgccagt

SEQ ID NO: 397857 - DNA, 501 bp, Cannabis indica
agtccaaagcgaccagaatgcgtcgaagtttcaaagatgcaactaaaggtaaacggctaatgctcaatgcccacttttttttcctcattcttcttaaactaacttacagtagagaagatgcgatgccaaaagacaagagtacatgtcattcaaacatgcaattaagtattaaatgtagctaagcactgcacaattactgcatatacaaaaacactaaaataaaaatccaaaatctcaaaaccctacaaaaatcccaatcaaaatgaaatgctaatatgtagaaatgaaatgctaatacgaagaaatgaaaccctaaaatccaaaatcattaacaaacactattccatagcaaaaccaaagcaaaatacagaaatcgttaatccaaagaaatccatcatcaacaccaaaataaaaaaataaccaatcgaatacaaaattgacaaaaataatcacataattaaataaaaaaataaaatcgtcaacatgcaaaaaaaaaaaaaa

SEQ ID NO: 397858 - DNA, 874 bp, Cannabis indica
ataaacatcaactttcgacctcggtcaaagactcaatattgcaccaatgtctaagtcgcatccttttccaagaaaaaccccaataccttgacattctttgcccattcaaagtgaacaaaataaaagtgaagcccagaaggagaagatggactccaaatgattttttatttcctttgtcaaaaataaagtcttccccatctttggactcaagagttattttcccttgtgtttgctcatcttttgtcgcataagagttatttattaacaacaatcaaaaaagaagaaaaatcatcaatccaagccaatttaccatccaccctagtgcatgcacagctaattcatgagcagctttataggttgtacgtctaacatgaattagggatgcctcaggaaaactggaaagcaaactagcaaaatcatttaataagaaacctagttcattacaaaaggaaaaacgcttcgggagagtcgaaaccaaggctaagcaatctaactccaccacatgaagaggaagaccaagagtgagagaccaatccaatgcaaccattaatgatacaacttttgctaatatgactgaaaagttacccacaacaaccaacaaggaaaggataagttcaaaaaagaaattacaaaaaaaaagagtaaaagtaaaaggtcaatcctaataaatgaaagcaattaaaataaagaaagaagcaaactacaaacgcgttaaacaatgaccatacatcggagagaaaattctccctccgatcaactcactccatgagcctaacacaaatactctataaaagtaaactgcctcctaaactatacttaccagaaaccataacctaccatcctgagaaaactacgtgtaacgtccccgcttcaa

SEQ ID NO: 397859 - DNA, 542 bp, Cannabis indica
ataaataataaaaatgtcaatatgtaatagtggaactaatgttgctaaagaaataaaagtttggggatcaatttaccaagatataaagtttggggaccaacttgccaaaacttatataatttggagactaatttgccaaaaaataaagtttgaggaccaacttgccaaaacatacatattttaggaagctgctgtacaaataagctaaatataaattgacactttatttacaaaaatacctccataaggtgtggacaacatttattgcttttatgtgattttaattactaaaataccttttacaatatcacttacacaatcagacgatagttgcgcggtggttgctgcgtgattgcgcggtggttgcatcagtcgaaagtttcaatcagacgatggttttagggtggttggctgaatgttgcatcagacgaaggtttcaatcagacgaaataactgttagcaaaatgtttatgcaactgttatgaaacattaaaaaattagaacagtgtttccacgtacgcaactctatctacatgtctctt

SEQ ID NO: 397860 - DNA, 761 bp, Cannabis indica
gtctccttgccggattcaatggctcaatcgccgtccccaagctcctcttgcgagaagacgagatctatcaaagaagatgtcacatctggatatgggtttcgctaaaatgaaggtccaggaaaaaaagagaagattgtagaggtataggctgattgatttttttcggctattttttcttttgtaaatagaatattgaacaatgatgaacatatgatgaaatgttgcgatttgtttgtgcataaatctgagtatagcctatgtagttgtaaagcactggtttgaatgcaacaagtttgaatctgagatttattgacttgtttgtaatttctgggttttagatatttatggatttgtttggatttgagattttatttgtttatataaatttattttttgaatattagaaaatcgatgatgaatatgaaagaaaaatagcgagctgatagagatagggtaaatatttttgggttgctttttttcttctgctatccgtttcaagttgaacttctagttctaggtttagttttttttaatctcttttgagttttatttaatgatgaagatataaaattatagagtaaaatttttgtaacgtccccgcttcaagcctccattaggcccttacacccacggaatgatgacacttatacatgagtacgtcactatggctgcttcatggattgacgactgaccctatagatcaacacaagtgtttccagcgtgctttttcctcactcgtacgcttcttgggaaaacttccc

SEQ ID NO: 397861 - DNA, 511 bp, Cannabis indica
caaaatataagtaaataaaaatttaaatgataaagggaatgtatgtgttgtagtcgttggtactatgttgaattttttctttttctttatttatttatttatttatattatataattgtttttttggttcttttggtgagaggactgaggtgagccgcaagggaaagaatgtttggaggagaaggcaatatagtatataatgtatagacaaaaagaaatatatcatgcttctcttctcttgcatggactttttggtttttgtgaaattattagatttttcttttggggttttgtgaagaaacaaactccccctaaaaacttcatttttgtctttttagcccttacccacaactgattttgtggagcattgtgctttctatgaaatgaacacaaatcaaaataagttggaaccaatatgagagcttataaatgaaatgaacacagattgtgatagtttagctttcgaatgtgatattggccgtataaatatttcatttttaatttttgttac

SEQ ID NO: 397862 - DNA, 564 bp, Cannabis indica
tttattacgactctgcgtcagttaattaaaaatacaatcaataaaaacaaatagggtattcagttatcgtcaaactatctttcttactgattcttaaaattcttctcttgatttaaatagtgagttaacaaaagatgcttatatttaggttatgaaatataaactcaacctaaatgaaaatttgtgtaatttatatggtaaattcatcacaaagaaggcattaatcttaataactcgaaagctacacaaacaacttaggtatttttgtaatcaaagcataaatgaattttacttttgagaatttcaattcattaacatggttaattaattatcacaccaaaattaaaatagaataagataataatagatgaagaagaacattcaaatgtgcattaagccataataagaattcagtttatttaaattgtaattttaaacaaaattttaactcatacaaatccaattcattctaaaacataaaggaatttaaaaccaaacatatgaacaaagaaagagtagatgaaggaaaaataagtatggtaacaattttcattctattctttt

SEQ ID NO: 397863 - DNA, 502 bp, Cannabis indica
agcattctatagtctagcaataatattggcaacttgatttttagaatgtttaactaaatatataaatataaaaaaaaaatattagtcgtggaactcaacacctcattacactggtgaataacttggccaaaagatgagagcatttgtatgtatattgcttcttacagcttgagttgccaggagaaaactgatgaagattcaaccagctaaggacctctttgatctccgaggcctctgccagctccggccgaatactaccctcccaacggcgagtactagtagagtagacacttaatgagatgaagagtctttaaccacaaaccccatcccaaatcgatgatcttcctcaaaaaacaacagtctcaacattcactttgatcatgtaatattcaacagaggtttagtccattaatggatcaaaacatttgagtatatagagtacctaagagcatgtttggtattgttttctgttttttgttttcaaaaaattgtttttagaaat

SEQ ID NO: 397864 - DNA, 695 bp, Cannabis indica
ttgatactttatcaagaacttgactggaaatggcccagtgccaagtgttaacctgggtgttgggtcctagttttggccctttggaagttccgtttgatccccagaaatagttgaatcttaacattttcttaaaacagagaagattcttgaaagagttctcagaaaacatcattgaaattggcctacattgacaaaatgtcaacctggcattgggcattgcttttagcacctaggaggtgttgtttcttccccaaaagtacatatatctccatttttgatgaagaagaagaagatgcaaaagtcaaattattgatctaatacttagaaggtgcccaaaatgacaaattatcaacttgagtgttgggtgcctgggcaccgggtgctctgggtgctcaaaaataaacttgctttgaatttgattatgatgcctcaaatatatccgtggtatgtctatttgatgtcccaatacaaagtttgacccattttcactaaggcgatcccaaaaactaaaaccctagttgggaatgtcaacttgggtgctgggtgaaatcctaggtgcctaggttggcttttgaattacaagttcgtgtaatttcagctcccaaggcttggatttgattactccatgtcttcatgatacgaaatactgaaagatagtgtgttgaattcaagttattaaagtctaaacttccatc

SEQ ID NO: 397865 - DNA, 2097 bp, Cannabis indica
caggcatgaaagcttacaagctcttggatttgaacacaaaccagatcttttactgaagagatgttcagttctatgaacatatttttccttttattaaaactgaacatttacctgctgcatatgatcagtttttctttgaaatgccaactcatactcaattattttccccttgttctgaacctagttgtgaacctgatactacacctgcacagaattttcatcaacctgttatgcatcctgaacaggttctcacttctgatacaaacaatgagcaggttcataatcccaatctgaataatgatcaggttttctctactcctgaaactgattcacaacaggttcacattccttctgttgtcactagaatagaaagacaaacacataaaccatcatatttgaatgaatatcattgttatcttgctactaatgcttttgcttcctcttttcagagcaaatctaacacaccttacccattatctactgtgttatcatatcacgggttgtcccctgcctttcgagcaactgttatggccatttcgagttattttgagcctgaattttttagtcaagcacatggcatacctgaatgggataatgccatggacaatgagatagatgctcttgaaaggaatgacacttggattgtggtttccttacctgagggacagcatgttattggttgcaaatgggtgtacaaaatcaaactcaatgctgatgggagtgttgagagattaaaggctcgattggttgcaaaggggtacaaccaacaggaggggattgattacactgatacatttgctcctgttactaaacttgtgactgttaaatgtgtaagggctggcacttgcatcagttggatgtaaacaatgcatttttgcatggtgatctcaaggaggatgtttatatgactcttcctcaaggttataaacctaagggggagcttcctcacaatcctgtatgcaagctaaagaaatcactttatggtttaaagcaggcttcaaggcaatggtttgcaaaattctccactgccttgtttgatgagggatttaatcactcggctacagaccattcattgttcattaaacactttggtagccatttcatattcttgttggtctatgttgatgatgtaatacttgtcagcaatgaccttcaagaattggaagctctaaaaatcagattaaatgcccgattcaaattgaaagatttgggaaatcttaagtacttcttggggctcgagatagctagatcacacaaaggcatatttgtgtcacaaagaccatatgctttacagcttcttgaagacttaggataccttggatgcaagcctatgaacacacctatggaagccaatctcaagcttggacagaatgaaaaagaaaagttggcagaccctactctatacagaaggatagttggaaaattgcaatatctgaccattacaaggccagatatctcatactagttaataaactgagtcaattccttgctgtgccaaaactcagtcacatgaatgctgcttttcgagtcctacagtatgtgaaagccacaccaggtcagggaatttatttccctgctgaaactgaagttcaattgaaggcttatactgattcggactgggctgcttgtccagacacaaggagatcgacaacaggtttctgtattttcttaggagactctgttatttcatggagaagcaaaaagcagcatacggtttcgagatcctcagcagaagctgagtacagagcaatggcgaataccacatgtgaggtggtttggttgctatcaatcttaaaggagctcaaagttgatcatgaaggaccatcattgttgttttgtgataataaatcagctcaacatattgcatcaaatcttgttttccacgagagaacaaagcatatagagatagattgtcacttggtaagagagaaggttcaagctggagttatcaagacagttaatgtggcttccaaagagcaactagctgatatactaaccaaacctttgttccctaatcagttcaattacattaaaggcaagatgggattgaagaacatatattgtccatcttgaggggagtgttaagtttgttagaat

SEQ ID NO: 397866 - DNA, 830 bp, Cannabis indica
catgattatttttttatcaaattacattttttattagtatgacattaagattttttttttttttcgaactaagccatatggaaatttatgttatttcatacataaaataagatcagggaagaaaacaaaagtattaacggcaacatactcattcaatttattactgagaaaattcataattattttattttttaaaaaattcggatcatcctatttaaggatcatcatatttaagtactaagataataatgtaatttttatttggaattgggataatataatttataatttataaaataatacaaagaagcatatattttaattattattttttaggttttttttttttttattatatttttacactttgaatcagttttttttatggaattccacatagcaatttacataaaaattaacggagcaatgtaaatcgcaactaaaatccacatagcaacctacatagtgttgggtctgccccttattgttgggcttggaccaataagggctaaagcccatttataattataaggaaacaattaaaaaaaaaaagtagttgatggtattgtgagcagaaaaaaagaaaaagaaaagaaaaagagagggaaagaagagaaagaaagttagagagagaaagaggttttgccactttgtattgaagatcaagtggttgattcttatctattttagctcaaattttgggtggtgaatccttgcaaggtgctcttcaaatctaccagttccaatgtggcgattgtcctctctaaggtgctcttctacaatactcaattggtgagacccaaactttttctatttgtgtatccatcttt

SEQ ID NO: 397867 - DNA, 1182 bp, Cannabis indica
tatttttatagaaattcacataacccacattgtaattaatgaagtaacttaaattgcaattaaaatctacatggaaactatttgaacaactcaaactgtaaattttaaaaaataaaataaaataatatataagataattcacttagaaaaaatcattttctaatttaggatatagactttttatttttattttggacaaaaatgaatttagattgttgatcaatatatatcagaaatacgttgggtgatagatagtgttgaattaggtagctaaaaaggcttggtttaaaattttggtggaatatgttaaatagttggtttaggaatgttgggccaccaaaccacttatgcaactcatcttaattctctctatttgtcccaatttattatataaaaacttccctttcacaatgatttttcttgcttgcttaactaattgattgtcatgtttatccaataatataatttatttaaaaaaaaaaaatctaaacgatagaaaccctctaactaaggttggtaggtagcttttagtggtattcactaaccaactatcttagttaggagtatgacaatccaaactgtttgtttcctgggaaagaaaatttggttataaatatagaataaaaacctttattaattaattaacatgacgtattttagtagcaaaaaaacttttcagtttcaaattttgaggcatgggagatttggaatttggatatttagcttaattgttacccaaaattcttagaattttagaaaaacgaaaggaacatatggcgttacatactttaatgtcattaaattgaaattaaaagttgtttacattgatttacacgttaatgtaattttttttaatcctatatccatgttgggaccatgacttgcaaaaatttgcgttgtgtgtcggtttcgactatatagaaacatcgataatggaggtgttaataaattaatcttgggaataaattcatttcacacacccacatccaactccaacacccttgactcaccatcacactattatcagtattattaaaacgtaaatactattttagatcctgcattttgcaaaagttattaataagactatctgttttgttaaatgataaaatgtattatgtattttttaaaattatacaaatagcactctgaactgattttttgtcataataaaacttaata

SEQ ID NO: 397868 - DNA, 692 bp, Cannabis indica
aatctggtactagtgcctaaacccaatgggacagggcaggtgtgtatagacttcactgatctaaacaaagcttgcccaaaagactgcgtccccttactccgaattggctagatggtggacgccacctccggattcaagttattgtccttcatggatgcctacgctggctacaaccagatcaagatgcacattgcagatcaagaatgcactagcttcaggaccgataaaggggtataatgctatttggtcatgcccttcgggctaaaaaatgctggtgcaacaaatcaaagaacggttaaccggatgtttaaaggcctcctgggacggaacatggaggtttacgtggacaacatgttggtcaaatcaaaggcatgtggaagtcatgcagacgacctcacagaatgctttgaagtggtctggaggtatggaatgaaacttaacccaatgaagtgcactttcggggtcaaatcaggaaagtttctaggatttatcgtcagccaaaaggggatagaggcaaacccggaaaaaattcaagccctcctaaacatgccatctccaaagaagcacaatgatgtgcaaagcctaaccggaaaagttgctgccctgagccggtttatttcccaatccacagacaagtgcattcccttcttcaacattctgaagaaatgccaaaaatttgaatggaccaaaga

SEQ ID NO: 397869 - DNA, 541 bp, Cannabis indica
cttaatttccatgtttaatcatgtcttattacacaaaccaagcggaaaacaaacttatttagtgttggataataattttatttactttgagaaaattccgtcggcaactttttctactgctatataatgatataatttataataacaagctctttctttaagttaaataaataaataaaaaccttagtatatgaatttgatcctagctagtacgcattataaaatggtgaatttttaacatgtgtaaattatataaatttccaaatgtttatagaattaaaataaactaatataaaatgaaaatacaaaaataaaatgatcgtcatcatgtcataattagatatgcttagaaagaattacaaaaaaaatgagtagaaatttgtccaaaatatttagtgaatcaaattaacaggagacgaaggtgttgccgaagttcaatccgtcaaactccatagccaatattcttatttatttcttgttcatggtcttgctatcagtagtcctagtctccttcggtgagaggggtttcttatcttgatta

SEQ ID NO: 397870 - DNA, 577 bp, Cannabis indica
tggggatgatcgcagggttggtataagagaggtgcgctctctaggtagtcttaggacgtaaggaggcgagtcgcagaaggtttaacctcgtgaaagtggtaagatctaatttggtgacccgcgagaccaagtcctcgtacgaaaagggctcgttcaactgagtgttgtccaccgaattagtcccacttccctttgcatcttcttcctcctcgcctgactctcgagctggggccgtccaatcatcgtccatctcttcaacctcgacgtccggagcatgtctggaatggacgagataatcacgcactgacactgtagattcgctgtctcggagctcactggttcctggttcagcgagctcctacaccatcctctcaatgtctgcagaaggcatcgagcctaattctgtacctccggtagttgcgatctcctcttctgagatcgaggtcgggataaaactgtcttcccgttggtcctcatcaccatctaacgcgttgcctcctgagccaagcatctggctattcgacaggtcgctcatctaaaagatagaagatcttttcagcgtggtgaatgtgtgaaa

SEQ ID NO: 397871 - DNA, 603 bp, Cannabis indica
aatataaactaagaacaactcccataatataacgggcggtgtgtacaaagctccggattaaattcaaattacactcaaaaattgataataaaaaaaagaaattacactcaacaaaaatttgagtggtgctttaagctcaatttaatactattaatatttacttgtaattttttttaataaaattgtgtccactaatattaatctaaaaatattttaatttttttaattttatgtacatttaaatttaaattaatattttagatctattatttttttaaaaattatgaagggatatgataagtacttaatagaaaaatatggtatttaaaattaaaaacttaatatgtcatttatattaggctaattaggatttttactcctgagtgttggaatcgagggattcaagtttagatctgtaatcgtctgaggagaggcaaagtggtccttagtttgaggggaggattgttgggtgtacatccaaagtcccacattggctaaaaataagaaggatcttgggtatataaggatgaacactaactctattggaatgaggccttttggaaaggggtaagttgaaaaatgcctcttttattcatcaattaa

SEQ ID NO: 397872 - DNA, 550 bp, Cannabis indica
aataatcaaatatttgtttatcaccaaaataaattagtggttgacttttggtcaacattctctccctttttgataatatcaaaatatttgattatgttaaaggaaatgaaaagtaaattgatacaagttgagtttagctccctcttaatatatgcatatattgatttataccgacctttgcatacttatttttaccttttcttaacatgacatggcttccccttaatcatatactcaataaacttgttagtacttgaaagcataatatgattaatgccaaaataattaattctaatatttctcccccttaatcatacaagatatgaattgtatcaatgaagcacaataggtaaagagaaatttcaaaatgcataaaaatatgaaagttcatatagtcaaaacaagtttaaacaatcaatctaccaaaaaaaaatatgtcaaaaatcttaaaagtaagagatataggtaaataatggcatagttatgattttaaacattttctcatacctcaagtatgataaaacaaatgtgttcatgcacttaaatcaat

SEQ ID NO: 397873 - DNA, 1111 bp, Cannabis indica
gaagaagaagaagaaaaccctaaagcttgagctatcaacttcatttgcttcttaatcaactcagctttcctactcattaactcagcttcttccattctcagcaaaacccatctcttctgcaattccttcactttctcttcatccgaacactcccaccatttcccctttaacatctctttctcttcctttgcatgttcttctttgggtaattgctgagctttcttgccccaaatcttgcgagcgatcttatggagacgagtatcgtgaggggttttgatgagtgacttagtccttgcttcgcggtggtacttaattcgtaaacggcggagcttgtcgatgatctgactgtgagtgaatttgtgatccaatcgggtttggattcgctctaggtttggagatgtgatggctgaagatggagatgactgtttggagagcttgaggaaggatttcaggaggtggatctcgtctgactcggtgaagagtcgccgggaatttccgtttgacgatggtggtggtgactttgtcggagatcggaggttggtggtggtggtggtggtggtggagcgctttggcgttgacataattttgtattttttttttttgaaaatggaaaaatggatttggattttggcaacttttgatttaaattgtaaaaatagttttattattttaattttttttttggcccaagcccaattcactggccctggcccaggcctaagcccaagactactccaactaagtggaggtttcgtttattaattaaaactaataagcttctttataataaaaaaaattattacaaaacataacaaaaaaaaaaaaaaaaaataacaaaaataagaaattttaaatattttttacggtttttatgttgttcttttatttttgttgttgttttttttttgtcatttgtatattattttccttctactttcatgtggttttttgttttataaaataccgtaaatatatataaataactttgaacataaaattataattcttttatttaaaataacaatttatgtaaattttttaatttttgttttggtattgaggaaaaagttttaatataatttttttatgattgtgttgttatttaagatat

SEQ ID NO: 397874 - DNA, 528 bp, Cannabis indica
ccgacccgtgtgcacccctaggaccaactgtacaaactcattcgcttttgcagtacaaataggttcattgtagtatttttcataaaacaacaatcgaaatgtattccatgtcatagtattcgggagccacatgtgggccctgctcatcttatgccacctcactcgaggtccaccaatttgacaaataacatgtatataaaaatataagttcaaattccaccaattggattaaactgaattgtgatgtaaaagtgaggtttgacaatatgtgtgttgcagttgtcgccagaaaccatctcggagcagtgattgaagttcgtacggcgcgggtggacttctctgacgctctttgtggtgaagctgaggcatgctgccttgcgatctcgatggccttagagatgggttacaagtttatcataattgagaatgactcgagggtggtgatcaatgctctcaatggtttggaacctcgttgggcgattgaaaattacgtctcattttgtactaagtcttctcaatcttttatta

SEQ ID NO: 397875 - DNA, 819 bp, Cannabis indica
atatgtagaataatctgaattatttttttagatatattcgaaaatgtatgtgtgttgtatgttgtttttttgttatttttgtatgtaataatttttgatttattttgaaaatttgtagtattaaaatttgtgatgtatttaaaagtgttaagattgtgtaaatcgggttttaaaactttgggtatagcttaaaatataaatgttattttgcccgaattttcttataatttgagataataaaaaaattaggttaatttaataaattttaataaattagtaattttttttataaaaaatattaaagtgatatttaaaaagaaaaattataagttaataattatttataaaaattaatgaaattaatgttaaaattaagtaatttaagtaaataaaatttgtattttgtttaaaaaataataaataacttttgacacacaagtaataattatgtgtaaattaaatgcatatgaccatgaagtattacccttgactagctatgtgagcttataattataatttttataaataaaacatttaaatttttataataaatgttttccatgcaattttttttaaaaaaaataaaataattatcatcatcatgatgaatttaaacaatatctttaaatttcttctatcactcggtaaatgtataatatatattaacgttgaaccaaaacttatcaatacatagtcgcttgagggaaaaaaaaaaaaaactttccaatatagttaacatatatatatatggaacacttcttaatgggtaatacccattgatgggaactaaaaaaagttaataaggtaataatctaataa

SEQ ID NO: 397876 - DNA, 921 bp, Cannabis indica
aaaaacattaattcaatattatgtaattatgtttattaaagattatgtacctttaatttcaaagcagctttgtagttgcccttcatcttcatctctgcagctagagtcaattttgtgaatgttccttgtgttattttcttattttgcatgtccattcttggattaaagtcctcaaagcttccattattattgttattgttagttctctagctgccaggtttgctgcatttaatgattcagcaacatttgatgtcatggtactgtatcttttgtttttagaatacaatcttgaccatttctcatgtccaatattttgtagatatggtcaaacctgtttgtctaaggcgtcgagctctttcatgtgataattgaattttttagcagtgtatgcctttgctgcatgagaaaatagcttttcaaagagccttacatgtttcttgaattttgtcttcaggttgttgagtaggtgatacacacaatatccatattgtacttcagggaagactaattaagctgatttgattatactttcatgtctatcaaatataacacactgttcttgtctaacgccaaatgtggctcttaattttttaaagaaccattcccatgagatatcattttctaaatctgcgacacaaaaagctagtgggaatattttacttgatgcatcttatgcactagctgttagtagtgtcccccatatgtagcttcgagaaagttccatctactactattataggtctgtatttttctcattctttcagtgaagtgtttagtgccatgaacaaaacaagaagttgttgttttctttagtttcaatgtgcactacagatcttgggtttgtttttttttttagtagcatatagaataactaggcagcaactgataagactccttaacttttcctctaactatgtttag

SEQ ID NO: 397877 - DNA, 924 bp, Cannabis indica
aatatccaacacgtagattgcagggccgtacatcgtcccaaaaaccgattccaaatagtaagtgacttttctcctattttttttacatgcttgttatgttgtgtttctggatttaattaccaacttcttggtgagcatcgttgttatctcatttggttttagaatttttagggtcaaattgtatctaggtaaatgttagggtttagacaaaacacaggtttttgaaattctccaatttaccaacttctagtttgataaatttcttccaggaattgagatttctttctccttgcagcaatgtcccaatctagtttagaagtttatcgtccagaagagttagaagttgagtatcctattgaattttccatcccatacaaacccataattccaaaacccaaatccaatttggaataaatgatgcaaacattagggaacacttagtgaaaacccaacaagatgatattgctagtcgacacagatgcttcttgcaagaaattatagaaggcaaacgccgtttcttgcaagatgctgcttgacctgaacctctcaatgtgtcttctattcttttggctaagcctctatttttacccaaggtcacaattgcttttgaaccaggtgacttggattttgaaattatgtcttccaagacacgtaaatcaaagactccccaagaccctaatgtcaccttcgaggctgagctaatagagtcaaaggtgcgacccgtcagagaatatgtgggtagcaccttgagggcttgtgggatcgaatataggtgagactgccaggttagatctgtatgtgtcggcgagtttagttgctatcctccagtgcgactcacgagcaaaacatcctagggggccaccctaactgaatcaggatcgatcttgacaagtatgactaactgcgaatccagcctatactcag

SEQ ID NO: 397878 - DNA, 785 bp, Cannabis indica
tttttttttaaaaaatgatacaataaaaatattacaaattaaaattagacacactagacattatattcttattaatcaagagcacacatattttatgttatacaatagaacattataaaatttaagcacagtcaataatacataataaaagtattacaaactaaaacatacatttaaaaattaaaattaaacaaaccaaacacattaaacagaaaagtaacaacatagatatgaaccttcaaggataaaatgtgatacaacaatacaataatgtggaagactatttcttgatccaccgagatagtcataatatggactataaacttgtgagtcatttctagctctttcaccttgatcttgagatcgttgaccttcatcttaaacgccatgtcccgaatattgagatgctcgatattttgatccctcatattgtgatccctgatatctcaaatttagtccacccaacgtggcatgtccacgtaagccaagactgagaacatgtggaatacaaccttgtcaatagcaagacaaagtctccttacaaggcatggaaactgtcaagcaacaagcgaaatgagttaagtaagctgtcaagaagttgtacaaccaagttttgccaactaagggatgtacataggccgaccagaggaagcttgtatggccggccatggtttaagcacaagctggccgtgttggaatatattttactaggacctagatttactaacaagtatgtttttaacatcctaaatatgaacttataaaataataaaaattaaacacat

SEQ ID NO: 397879 - DNA, 1706 bp, Cannabis indica
ttcaggtggaaccaaaccaaaactagtagcccgataacaatggtcaagggggaggaactgatgctcaataagagaacaaggatgaagacaccaaagaggaccttacaaactatcagttacaagggatgggactaagaggactccgaagcctaattagaagtacatctacaacatatggagtgaagatctggcttatgcacttataatagatttggaaatggatgacatggaatcaaagacttataacgaggcagcaaatggaaagaactctaaggaatggaataacaccatggatgaggagataaggtctctcaagaagaataagacctgaattgtggtaccaagacccgagggtaaaagtattgtgtcttgcaagtggttgttcaagcacaaggaaggaagatctaaagatgagcctataaggtacaaggctaggctagtcgctaaaggcttcacacaaaaggaaggtatcgatttcaatgagattttctctccggtggtgaagtataaaacgattagagtggtcctaagcttagctacacagtttgacatggagatagatcagatggatgttaccactgcctttctccatggggaattggaagaagaaatatacatgacccaaccagaagggtatgtagagaagggaaaaccgaaccatgtttgtaaactggttaagtccttatatggactcaagcaatcccctaggcagtggaaaaaaggtttgacacctttatgatgaaacaaggtttttcaaggagttactatgatacatgtttctatcacaagggaacagacatcaacacggtcatctacttgttactttatgtagatgacatgcttattataagcaaggagagatctcaagtggatgagatgaagaggcaactcaaggctgagtttgaagtgaaagacttgaatatagcatctaagatactaggtatcactataaagagggacagaaagttgggcaaactgttcttgacacaagaggactacatacaaaagatcatagagaaattttcaatgaaagattcaaagaaaacttctcagctaataactagccagtacactttaactaaggaacaatgtcctaagactaaagcagagaaagaagtaatgagtaaagtgccttactcaagtgttgtggggactattatgtacttaatgatttgtacaaggttagatttggcctttgccataagtaccttgagcaaatacatgtcaaacccaagaaagattcattggcttgcaatgaaatgggttttcaggtacctagtaggaacacctaaggttggactcatctacaaacaaaaaaaggccagcaccaatatagaaggatacagtgatgccgactatgccatggatagagacagcagaaagtttactccatcttatatgtttttactaggacgaaactgtgtgagttggaaagcccaactccaacctatggttgcactttcaacaacagaatccgagtacatatcaaccacagaagctattaaagaagccatatggatgaaaggactcctaacagagatcaagctacttaaagaggttcctagagtttactcagatcgtcaaagttgtgtacacttgtgtagaaaccctatgttccatgacaggactaaacacatagagattaagtatcactttataaggaataaggtaacacaaggtgagatacaagtggaaaaagttcctac

SEQ ID NO: 397880 - DNA, 545 bp, Cannabis indica
tggtctggccaacgtctgaacatacagaaatctgcctacatctgttctactaatgtcccgtctaacacccagcttgatttggctcactacctgggattccgaaagttaaataaggaggatcgtttccttggaaacccgatcatttggtctaatagtaaagtcaatgatttaaagttcattaaggagaaggtttgctctaagattgaggggtggcggtgcaaactactctcccaagcgggacggtcgactttgatccgtgcggtggcccaaagctctccaatctattcaatggctactttcctcattcctaaaactctttgcactgaaatggatcaagcggttcgcaagttttggtggacggggaatgcggataaggagaggttcctggcgctcattgattggaattctctatgtttgcctcttgataggggtgggctaaacttcaagaagtttgaggacattaaccttgctctcatatccaaacttgggtggaaactctcatcggaagaggactctttgtggtgtaagtgttggaaattatttta

SEQ ID NO: 397881 - DNA, 1024 bp, Cannabis indica
attacactgtatagtaattacacagttgtttttaaacagacccttaatgtagaacaaaacatatacgttgaaaaaaaaataaaataattaaaaataataataaatgatgacaatatattagaataattatgtaataataaaatttataaatatatgtgaaaatatgtaattttctcaactaaaaaaattaaaataataaactaatttgaaaaagttaataaaattgtaaaataactcttaaaattccctaaatattatagctattactaaaaatatggcatcattatatttctttttataaatttataagaaaataatcatatatcattaatttttaagtataaaaaactataaataaagaggaaaagttaaatccctataaaaaaatttataaagttagaaaaaaaaaatcatattttatataatttcaaataaaaataaactaaaaaataaaatatagagcagccaaggaaatgaaatctgaataagaaataaataaataatagaaaaaagctaattaagattttttcctctcgaattttgacatgtaccaagtcatgctccttgaatttttttacatgttaaaaattctctctaaactattgagattgttagagttaaggacttttgtccaattttagtaaaaaaattctaacatgaatgaaagttcaggggccatgatttaatacatatcaaattgagggacatgatttggtagatatcaaagtctggggagcatggtttagtacataaacaatcactgaaacagtaaaattaaatgaaattagataaaaattcttaaatctaacaatctcaatagttaagggagaatttttaacagtaaaaaaaattcagaagtataatttagtatatattaaagttaaaaatcctaaattaaccttaaaaagaaaaaaataaattccacatcggtcaagttagactattacaagaatctcacctatatcattttccatatggataagcacagaaattttacacatatttatataattaattaattatt

SEQ ID NO: 397882 - DNA, 645 bp, Cannabis indica
agttggcgcccagaaagttcaatccatggaaggctttttcctcggagttccatgcacaatactcctcctctcgtctacttctcttacacctatgagatctggtcgaagtaaaacaaagaccaagggagcctctccaagcctacatcagcagattcatgacaaatgcgactaaggtgtcacgagtaaccgaggacggaaagttgtccgcgatacagggggcattgaagtccttggcaaactttggaaggaaataaggaagaacggaccagtagactagatgagtgattttcttgaccgcgcagagggttttatcaagcttgaagaggccattcagtaagcaaagggtgaacaaaaacctagccagtcaaaagctccttctactgggacatccgtccagctcccccattacccaagcaattcaagctcaagttgtaaacggtccaacaacaataataggcaagggaatgggaaaaagaagaagttcactggcaagaccgaacaagctccgcgggagaatcctgtcaagtatactacatttaccgtcctaacggaagatatagaaagtgtatatatggctaatcagtcattagccccgtacaagaagcccgcacccatgaaaaaatatgtcagcaagagagatatgac

SEQ ID NO: 397883 - DNA, 930 bp, Cannabis indica
tattaggataagttagttactgttgtctgttatgttagttacactgtcagttttctgttgtaactgtattggtttcctgttatgtggcttacatctgtaactaactcatcttaatattgaattcaatataaatagcaacagggctctctgatattgaatcagagccattttacattttctcccatgttttctctctactccattcttctacttttcacacatggtatcagagtcttaatggcgtcgactggagctaactcatccaacaatggaggacaaaccgacggcaatggtgctcctccgaacgccgcacaaacgatccatcgagcgcaagaagttcaacagatcgctctcccaaataacaaccttcttcctcttaatctgcgtttggacaaatcaaactacaccttctggaggtccctggttcttgcagctaccagggcttacaacctagaaggatacattcttggaactatccctcctcctccccagattcttgaaggtaatatccccaaccttaattttcttcaatggcaaagatttgaccaatttttaatgcattggttgatgaattccatatctgaacaaatgcttggtcatgtcataaattgtcaatcctcctctgagatctggaacgtctttgcccaactctttgcttcacgatccagagcccgtgttctgcaaatccgaggtcttcttcaacccacaaagaaaggttcatcaacaattgaagaatacatcttgaaaatgaaaagctatgttgatgcccttgctgctgctgaccaacagatctcggatgatgatttaatcttgtacatattaggaggcatgggtcaagaatatgaggctgtcatcgttaacctcacttctcgcgagaatccgcttagtctacaggaggttcagttcatgcttcatagtcatgaactcaga

SEQ ID NO: 397884 - DNA, 1639 bp, Cannabis indica
gtggtccgccgctaatagggtaatatgttgtagtgattataaacgagatgtgatgatgactatagaggtaaaaatttacttaatatttgcgatatttttaagaagtccaatatgcaagtcagacgaacccatcaataatggatccaaacaaccgggtttgagcccagccggtcagccaaacgggtggaaccaagtatatattgaactagtcagaaagacggttactactccctaaaaattaaggaatcaaccaacttgaacgagtctaacgggtgacgtggacggagggcaacggtactgaggacacacgataaaagaaaccatacggcagacacagggcatcgaacatttgatactcacactactcacttactcaagcaaacagtcgtcttttctaaacttttctcttaagcctctccactgtaattgttcctttaatccgtctgtacgcttgtccactcatccgatcgactaccatttacatttcatttattttttactacaatcgtactgacttgagcgtcggaatccctttggctgacaccccaccagtgctcccaattaaacttttatctctctctttattcttgacaggttgctggtgcccaaattttgtaattgtagatatcaatttggggagcccgtaatgacaaggtttggaatcaaaaaaaatgttgttccattggaagtcgtttcttctgcggtgagttatcttgaacagtggaagattgctcaagtttttggtttagaagctacattgtccggtctaaccaaggatgatggggcggagcaatggaggttaccaccgtcaaatagtgttaagatcaacgtagatggagctatctttgcagatttaaatggattcggccttggcttggttgcgcgagatgacaaaggattccttattgaaggaaggaccaagcttttccaagggaatgtggttgctgaagttgctgaagccatgagcttcagagaggcgcttagttgggtaaaacaaaactcaagtttgtggcagcgtgtctttgtggaaaccaactgtttggttgtggtacaatcgttaaggagcttctttagaatgatttcagtgtttggtgatttgattaacgattgtaaaatgttgcttaatgatttaccatttgtctagttttttttttgttaaacggtctgcgattgtggttgctcatattgctagagcgtctcgttcataccttgatcgtactttcaatttgggggatgtgccaactgagttgttatcttgtttggtaacagagtttgatgcttaataaatcttgaatttcattcaaaaaaaatatttctcttttgatagccttaatattttttgggtaaatatcattttggaccgtgtgttttgcaaaagttatcaattttttttgctcagaaagttatcaattggaccctctgttttattaaatgacaaaatagactcagtattttctaaaatagtacaaatagaaccttgaactaattttttgtcaaaataaaatttaataataattcgatctaaaggtgttatgacaaaactatttatattttctgaatttgttcgtattaggaattgtctttaagttaattatattaaaaaaaagttgtcaaaaattaagcttagggtcctattttt

SEQ ID NO: 397885 - DNA, 1209 bp, Cannabis indica
agtagaaaaacaccttgcaagtttagaaacatcccaatccccattattagtaataaaataggacaaaaaaggggaaggaggcctataatcagaagaaaaaaatttaaacctgttacatggaagccaatgatcctcaatggttctaatatgactaccatcacccactttccataaaagtcccatattcaatagctctctaccccaaagaatacttctccaagtgaaagaagggttgtgaccaagtttagcatcaagaaacgcagtacgagggaaatatctagccttaagaacaaaagcaaggagagaagaggggttcttaaaaattctccaagcttgcttagccagcatagcttgattaaaatgaataagagaacgaaaacccaacccccccccccaaaaaaaaaaaaatttagatttgcacagagatttccaagacttctaatgaattttatgagaactccctgaagatccccaccagaatctggccatcacagcttcgatacctttacacagtttaacaggcagacaaaaacaagacatggcataagcagggatagcctgaataacagccttcaacaaaacctccttaccagctcgagaaaaacacttagaagaccaacccctaagaacagaattaaccttatcttttgaaaaagcaaaagagtgatattcagaacgagttaagcattgaggaaggcccaaatatttacagataaaaggcatgtcttcaagattaaaagtagtgaagaaaacagtacgaatatcaggctgattattaggggaaaagagaatagaggacttagaaaaattaatagcctgacccgaagccctagaatagacatcaaaaacattctgaagagctaaacaggaagtacgattatcagtgcaaaagataaggctatcatcagcaaaaaacaggtgggataatgaaggagcattcctagagatagcaatgccagttagtaaaccagcatcttgcttcgccctaagaagagcagaaaggccttcaccacaaagaataaaaagatagggtgagagaggatcaccctgcctaaggcccctagaaggctgaatagatccatgaacagaaccattaatcagaaaagaaagagaagtagtagaaatgcatttcatgatgagagaaacaaacctagaaggaaaattaaaatgaaacatgatactctccaagtagtgccaattaacccgatc

SEQ ID NO: 397886 - DNA, 568 bp, Cannabis indica
aggaaatagtatggccatcttagttacaatatgagtatgtaaagtgaggtacactagatgatttcacaaaaaagtttcttaagaacttttattttgtactaggatcataaccaatgccactttttgaaaaaccacatgattggcttcctagcataagatcataaccttctttacctctagtgaaagtatatatgtcattctttaggcttttcacttatgcatttaaatgaacaatttttttcttatatgaagcacatgtagcacattgagacatacctaaaagttcctctcatttattttcaaaatcttaatttcttttagaatcatgttggtcttctctctaagagttttgtttttaacaaacgatttaccaaaatcattaaatagttccttaaatgaattagacaactcatcatataacatatctaggttatcatcatcatttttactatcacaatcattttggctagaaatgcttaccccatcatcgagtgccagcatgcacatgtttgctacttcattctttacttcatcttcggagtcctcttcatcactattgagccattcc

SEQ ID NO: 397887 - DNA, 973 bp, Cannabis indica
accaatgttgataagggttggggctggaagaggagggaacatccgttgatgcaagggaagaggcaagatggtaagcatatttgacagtgataatgccagaggggtgagatccccaaatgagagagtcagacaaagttggatccaggggaattttgagaatactttcgacttgataaaaaggaaagtaatgcttaagtttaggtacattccaagtggaatcctggtcgataaagaaagaaacaaaagcctgggaccggtcagtaggatgtaagagagtgggactgtgaatactagggatccaatttggtgctgataaagggacattaataccagcaccaatcttccaaaccagacccttcttaagtaattgacgtccctaaagaagactcttccaggtaaaagaagaattatgaccaactggagcattcaaaaaatcagaatgtttaaagtaacgagctttaagaatagaatgaagaagagaatccttatcattccatactctccaagcttcctttgctaaaagagcttgtttatgagaagacaaagtacgaaaccccaaacccccaaaaaacttagagacagagatgtcatcccaatttttccaatggacctttttggcaccctgagaaccccaccaaaatctggctatagaactttgaattttctgatagatagatttaggcactctaaaacaggacatagcaaaagaaggaatagcttggaccacagccttaattaaagtttccttgccagcacgagagaagaacttgtcattccaagtatttaatctagaggaaaccttttggaggagataatggaaaatggaattggtgaccctaccaacacaatgaggaacgccgaggtatttgctaataaaaccctccccatgaagttgcaaagactgacgaaattgaagctgggagtcaacagaggtgttaggggagaaacgaatagaggatttatctctattaac

SEQ ID NO: 397888 - DNA, 575 bp, Cannabis indica
cgggcgtcagtgatatgaaattgactggttatgattgaaaccattattgggttttttcctggtgacatatcgggcgtaagtacgagcgttagtgacatattataagtactgggcgtaggtacggctcatctgattagacgatgttatttattggtgccaagttgtggcacggctcgcctgattaggtggcgcaatgatattatatatgatattacattatgacaagggcttgcctaactaggcaatgagcatatctatttctatgcatatgactggttatattatctactgttgaatgttatagtttaatcattttgtgataatgaaatgtataattagctatttagtgtatccttctttattacttttcttattgagtctatgtgactcacgggtgctctatggtgtaggtaagggcaaggaaaagttagaacaaccatgagatgacggtctgcttcagcaatgtacataatgatcgtaccggcctgtgtgctgagttgccaagagttgttttgaattgctattgtatatagtcttttaggtaaatcttttataacagggatccctaaaacaca

SEQ ID NO: 397889 - DNA, 611 bp, Cannabis indica
cttcatcccagtgaatatgtgatttacactatcttccatataaaagttcataggggccatactacatactcagcaatatcattcttcatgcctggccactagaacatggccttaaggccttgatacatttttgttgacccagaactgaataaggatttgtatgagactcattcatgatctctcttttaatgtcatcgtacataggcacacaaacatgattcataaattgtagcattcccatatcatccactgtaaagtcacttatcttcccagccgaaaccctatctcgggttttcactaattttggatcttacaactgtgcttcattgattcgctccaaaagagtagattgcagggtaatattagccaattgccccacaacaaactcaattccagctcgggtcatttcatgtgctaactgttgggagatttgcttcactgttatttatcagactctaaccttttctactcagggcatcggcaacaacgtttgccttcccagggtgataatggatttcacaattataatcattcaccaactctagccaacgtctctgtctcatgtttaggtctctctgggtgaagaagtatttcaaacttttatgaacagt

SEQ ID NO: 397890 - DNA, 563 bp, Cannabis indica
agcagcaagaacatcaaaaactagcatgcaacctaaccattttcttcaaaaaatctcaagaaactcaaatagcaagatgaagaacttaccaacaattaaagatcacaaaaacttgctaaaaagagcttgaatcaccaagaagaattccaccttcttgctgctcaaggagggccgaaaacaagagggaaagagagagagcttttcttttttctaaattttctaactttttacttttaatgaaatgagagaaaataatcaaataataaaccttatttcagccaacataaaaatcaaataacatttaatttccaatttctaagtccactaaaggacaaaacataaatggggcaaaatgaccattttgccccttcacactaaaataacataaagaacactaaaggggtattttggaaaattctaaattcccgaccaatcccgacattcccaatgtctaataaaccgtcccaatatactaacatactaagttgtgattttactgagccaaacaccgagttccatgttaccgggcactggaaatgcaaaattatgaaaatcactaaatg

SEQ ID NO: 397891 - DNA, 684 bp, Cannabis indica
gaagaattggaagaggttattttttgacacaggaaatcccacaaaatgtgtatacattgggaagaacctggacgagcagctcaaatagcaattaataagctttttgaaggcaaaccaggatcaattcgcctagagtcatggggatatgatagggatcgaccctaagattatctgccatcacttaaatgttgatccaaagtacccggcaaaaagacaaaaaaggaggccgctggatttcgagaggcaaggggcattaaaacaggaagttgacaagttgttagtcgatgattttttaagcgaggtgttttatccctcgtggatagccaatcctgttctcgtcccgaaacctaacaaaacttggacaacttgtattgacttctccaatctgaataaggcgtgcccaaaagactgttttctacttcctaggatcaactagttagtggatgcaactgctgggcacgagcttatgtcatttatggacgcatattctggatataaccagatgaaaatttacgtcccagatcaagaacatacaagcttcataacaaacatgggactctattgttataaaatcatgccgttcagactgaagaacattgtggcaacgtatcaacgactagtaaacgaaatgttcgcaatccaaataggggaaaacatggaggtctacgtcgatgatatgttggt

SEQ ID NO: 397892 - DNA, 557 bp, Cannabis indica
agagcagattcaaccaatgtattatcgaaactggaaggctgatcacattaattggtaagtgtcttttcttatgcactcacatagatatgctaaaatatattttattgtatctataacatttgtggtaatctaaatattgagagttattggattgtcttttaatatgaagttaataatcataggtaataataaccggtgatcaagccttaacaacatattgtataaaaattaaaatatacatttgtgttatgattagcttcctaaatagcattggaaaaaaacctattagttcactcttgttgtaaagcatatcattgttcttcattatattagttaacatgatatttactaatattttgtttaattgcaacataattttttgagtttacaacattatttttgtgttcaacatatgaatatatgttgctttaatgattttcttgtatgcaggttgttaatattcttgaaaatgttgcacttaaggggataagccactattggaaaatgaggattaggaataaaaaatagttggttgttactttcatgagaggagatat

SEQ ID NO: 397893 - DNA, 565 bp, Cannabis indica
tattttgtttatttccaaaagaaattttttgatatactaagttatgggagcattgcagggcttatttgttgttattagattacatatcaaaattttttttagatcttagagtcttagtaagggatagtgatcctaagatgattatgaagtaaaatgaaatagtttagttgctagtagccaaagagttttcattttggctagttctagtaattttataggggggtctagttgtttaattttggtgtttgattgattttgatcagcttgataattttctaattataaattttttctagttttttgattttttttaggtggaatttcagtgatacaggccgaaactttagccctgttggttggacttaattgggctcatatgtgtagtcttccaattcatgtagtttattgagatttgttagttttggtgatgaccatcaacaacgaaaatatgtatttcaacgagttaggagcgttgtttgaagatgttataactttattgtctaaatttctgggagcagttttgtcccatgtggctcgctctgagaatttagcggcccatggtttg

SEQ ID NO: 397894 - DNA, 755 bp, Cannabis indica
agtttctaaccctagggtttccttagcgtttttctacaacatagttgcgttcaaagtgtaaaaatgcaaagaaaagcataaaggaaatcagaaacttactcaaagatttaagtgtctgggttcgagcaacgtcaatctaaacggcagtcgtctgaaagcacttcgtcaactttgaagccagaaaactctcttttcgctctagagtttacttaacagcgaagggtggtaaaatgggtttatgtgccagtgctatgggtatttatagggaagtcacgaaaagcgaatatgggaaatcaaaagtaatcgagtgcaactgtcacccgtggagagagaaaattggatttcgaaatattaattggcagagcatttattagtcgaaaaccgaagggacgcccagtcagcttcacatcgggtctcgaacggtcatgctcgagacgtgtccccatccaaaggcagagccagctcggaagaagtctacacacaaccttggaggtcccgtacagacttggggggaaaatgttatcccaaattttgcactctgatgtggcatcacgagaatggtgacacgtggaatccacttagagcatctgctcgggaagaatggaccgagtaggatgcctcgctggcacatctagaataagatattcagcgattcgtacagagcactcaacacttagcgaattcagctttcgcatcatgagtcatcagctcaatccctataactcagggatcagcttgcgtggatatggcataca

SEQ ID NO: 397895 - DNA, 1389 bp, Cannabis indica
aatggtgaagcatcggcaagctctcgaagaaggttccaagttgtatgtcttctcgaacggtttggctcaccatagaacccagtaagacgccagtgaacaaagccaggaacatgaatctctaagtcaatgtggtgggccgaaaacttaagcaaatgggcatcagtagcaattttccataaaaaagcaataccaccttttctaccttgggccggcacagaaaagctattctcaaagcccaaccgaaccttgagcctatccacaatgtcattgttgcataaagtttcacagaggaaaataaagttgggcttcttttgtacacagatatcaacaaggaattgaatagcccgtgggttcccaagcccacggcaattccaactaatggcattcataatgattggtgggcctgagcaccaggacccacctgttccacgttttttggaagcccattagcatcactaccatgaaaactaattggctcagaaatacacaccacatcctcttccactatcttggccgaatttgtagagagagaatcaattcttttcctcttcaaatcatagagatccatgttatcctctgacataaatgttgattcattttcatgaatatggaaagttgcctcatttgtattttccaaaattgaatgacccaaatgcctaggatcaaggagagaattttggaaattagcatttgtgacagggagttgattacgctgcctggttggactcacaatcgtaggctgcgattgagccttcgggttgaatgtggacgactgtggtgatttgctacctccagccgtggcaggttcaggcttgccggtccgaagccaaggagaagccgtgagaaattttggcgtcgtgaaggagcacgcatatccttgctatatggctttttgatcgattccggtggcgtatcgtagagttgactgcaaaaattctctgaatgtcccatgatgccgctaataaaacaaaaggtggggacgtactcgtacttgaaatttgcataaaacacatcaccattcttcttcttgaacttcatacgcctttttaatggtttttcaatattcagacgaacacgaacacgtaaatattcacgccaaataccttggaagttgttaggatccgattcaaggtacataccaatgtagttccaggcttgacaaacagccctctcggttttgaacccaggttgtaaatcgtggacttgcacccaaatatcaaggttgtttagtggaattgttctcggatttttaccttgtttgagtcgctcgatgataagttgtttacggtcatatgtccatggactgcccgtaagaacacgcttgatatctatttcatggtagaactgaaataaaaatcggttttgctcaagaatcttgatatacatgcc

SEQ ID NO: 397896 - DNA, 1206 bp, Cannabis indica
ctttgtttgatcgacaacagaacaccaagtttcaacacctcactgtaagtttctcgcatcccttgctttactgtttgtgtaaaaggcatgctttacttatctgtttgtttttttttgggtttggtatttgaagtttctgggaacgtattcttttgggtctttcacgtaacaggtctagattcaccatctctggtgttagggttactcttgttacgtacttgctgttattttttgcaaaggaccatacgctcttcgtgtactggccttttagggcatagagaagactttgtttttcttgattttttgccctttatttttcttttatgcgcaatgttgtcttctgtgattttattgcacgcgacttttgtccaggaaatccttctagggttttctggttgacagatgtccggagggggcctctttccagcggttaggggacccccattccctttttcttggtttagtgtttggtacggggcctaactactggaatcttaactcttttttcagaatccaaacatgtctgcgtctggttcaaagtcgtccaagaagagcggtaagcgtctggctaccctcgaagacgtctcactgggtcccgttgcccaggaggggtatcgggccacaggatgggaggcggctaagcttcattccacccctaacctgcccccaccagctggagaacatcgtggaggtggcgggaatcaaactctcaacatctgggacgtatcaccggccgccccgagatgcggagacgcccaaccataactatggtggcttcggggcttggagcaagacgcacctgatggccggggccatgcttcctcttcaagactattttattaattttttagtttttgtcggccttgcgccataccaactgattcctcaagcataccgcctgcttttaggcttgtttattctttactctgcccggggatggggctctcccagtccggcggagattttgtatttttacaaacttgtttcagtccccaagaagggggacaaatttaaagatagtttttacggattccaggcccacccttccaatgattgggtggtcccttacaataggcaaactcatattaaggagtatcgccaccgcttcttcttctcctccgggttccgagtagtggagcacccggagcttctcacagactgggtcacgattcccccctatgagcggaccgcgcctactcaggtctt

SEQ ID NO: 397897 - DNA, 596 bp, Cannabis indica
tagatcaccaatagtaaatttcccgtctttgaccttgtagttgaagtgtttagcaaccttcttttgataagctgccatccgtacttgaaactcatcctggagtttgtcaattttattcagtggttcttgtaataaagctatgtttgttactagatcataagttgtcctcctgtcggatgggaacaaattttccaccaggaccatagcctcacaaccgtacgaccttgagaatggcgagtggccagttgtggttcttggggtggtctgataggcccataacactcttggcaattcttcgagccagttgtttttgcaagcgagtagcttcttctttagggtgacctttaggattttattgatggcttctgcttgtccatttgtctatggccttgccaccacggagaaacttttaatgcctccattttggttgcagaagtcggtgaactcttcgcagtcaaacaactttccattgtctgagactatcttatgaggcatgccatattgacacactatgtttttcataacaaagtctaatgcttttttagcggttatggtcttcatgggctcggcctctgtccactttgtaaagtagtcca

SEQ ID NO: 397898 - DNA, 892 bp, Cannabis indica
ttattcatatagggtgtttagtagaagagtggcggggatgagaatacaataaaatatttatataaatagtttttatatatttttaatgaattcacccacgttctagcaaccataactagaacgagatcttgtttatgataactgttatccacatttttagcattggacacatggactccagatcaacatcaagacccattagtgggaccttcagttaaggtaaagtgggccaaggccattgggatgttaccttctaggaacacaccatgattctgcatttgcaaaaccttctgccctttgcaaattgtgcccgaaagacatgtccggtaccacgagatcgaagaggcaagacagacgttctcgaaagacccttccgattttcctttatattcatgcacacaattaaggaaaatttaattattagatcacaacagagtatcatatcaagattaaaggggaaacttcctataataaatattgtgcaattaattcagattaattgtctacaattagtgtacgcagtgttgaccagatcagtccaattctgattcgcctagtaagcaaatcatcttatccatggactggacttcatgagaaatcccacgagtattatttattgtaaactccccagtagagggaaatgggaaacctaatgtaattttcaaactactataaataccccactaatcttatggattaagggttgaactctcttgcaaactttgctcaggaaaacttgagaacatacattctgtgtatttcctaaggtatttaaaagacttactgaataatactaactcgtggactaaggctagttaacgccttaaccacaataaaactgtttgtctcattttataatttctcttttgattatttattcttcagttcttat

SEQ ID NO: 397899 - DNA, 1045 bp, Cannabis indica
tcggagatatcatagctatcccaactccgaatccgttttcgtttgacgctccatccacgaacactttccatgctggggtttgtggtattggtacgtttgcgctagcttctgcttcattgcattctgttatgaagttagctagggcttgtccttttatagaagtgcgtggtatgtagtgtatgtcaaactggcttaactccatgtcccacttgagaagtcttccagatgcttccggcttctctaggacttaccaaagcagatggtttgttaataccttgatggggtgagcctgaaagtagggtctcaactttcttgatgccattaggaggtagaaaactaacttttcaatcaatgggtaccgtatctcagcccctatcatacgcttgctgacatagtacacaggatgttggactttttcttattcctagactaaggctacgctgacagcgttctcggagacggccaagtacattaacaagtcctctccgtgaaccagctttgataaaattggaggtttgaccatatgttcttttagttttttgaatgcctcctcgcatttttcggtccaccaaaatttctaacacttctttaaaatgttaaagaaggaaatgcacttgtcagttgatcgggaaatgaatcggcttagggcggtaacttttccggtcaagctttgcacatctttgtgcttcttgagggaaggcatgttcagtaaagcttgaattttttcaggattcgcctctattcccctttggctgacgatgaatcctaaaaatttccctgatttgaccctgaaagtgcacttcttcgggttaagtttcattccgtaccttcggaccacttcgaagcattctgtgagatcgtccgcatggctcacgcacgctttagacttgactagcatgtcgtccacataaacttccatgtttcgtcccgggaggcctttgaatatccggttaaccattctttgatacgttgctccagcattttttagcccgaagggcatgaccaagtagcagtacacccccttatcagtcctgaagctagtgca

SEQ ID NO: 397900 - DNA, 527 bp, Cannabis indica
aatatctaacatccatcattccttattgtctaacaagtacatacctaaattaagtcatccagaccatttattcaagtctaaatgcaaaatcagttttttaagggaaaatttaataaatagaataagactaaactaataacgacattcttcctcaacggtatcatcctcatccactagcctcaactaagttcttggaatgggagaaaataggaggtgagcttataaagcctagtaaaaaaactaatatcaaaggaccattaatttaataaaatttcctgcagggttttttaaaaaataaaatatctcatcaccattatcattattgtaacgccctatccaacagggacgccatgtgtgtgtttttgtaaaattcttatttagatactatataattataccaaaagtgtgggtaattaaattttgataattaaaattagacatataaaactatatgataaaagataggtgatattaactacgaggtccccctgtttcaaaatatttacaaactggtttaatagtgtttt

SEQ ID NO: 397901 - DNA, 714 bp, Cannabis indica
gagaatatatatcgtgagttgaccatcatgatgacattgtcggatcacccgaacattgtgaagctaaaggcatttcgtgaagatgaagacttcttttactttattatggagctttgtgagggaggcgagttgtttgatcgaattgaggctaaagactacttgaccgaggcagaggcagcccctgtggctaagatgatagccaaggcagtttgtatgtgccatgtggctggggtcatacatagagatttgaagcctgaaaactttttgttccttaacaaccaaccagactcgcctctcaaactcattgattttggattttctgtgttttttaaacctaatcaaaggttttcagatatagtggggactctgtcttatgtagctccggaaatgttgagccaatggaagcgtcatggaccagaagtggatatttggagtgctggagttatcatttacattatgttatgtggtcatttcccattttatcttaattcagatttagattttgataaaactactcagacaacttgtgctattttaaaaggagacatagactttgaaacacaaccgtggcctcaaatttctgagagtgctaagagtcttattaggcaaatgctagagcgtgatccaaaaaagcgtttgactgctcaacaagtgcttggtaattactaatctatgcatatatattttttgttttgtaatgtgtctttctaatta

SEQ ID NO: 397902 - DNA, 529 bp, Cannabis indica
taaattatttttatgtgttgtttccgattaattttgttactgttttttttttaaaaaattattgttcgaaactggtttacatattttgagatttctttaatagggttgctctattttataatgttattacaaattttttattttaagttactctttttattattttatttctaggttcaaaacttacacttatattttatttaatttcaaattattggtatgattatatttgtcattaatatttttattttttatttttgtatgtgttttttatttttcatttgattgtttgatgaaactggttttagttaactttattatttaacatttattattttttatgatttttatagcgtcaaaattggttttacagggtcgaaactgatttcacaggttttaactgttctgtaatagggttgctctatttttatgatgttattgtatattttttaatttgtgtaaaattagttttattattgtaagatatttgaacaacaatttttgtattattttaaataatcagtttcta

SEQ ID NO: 397903 - DNA, 672 bp, Cannabis indica
ccagtaaaaaggcatcctgttaggagtaaattcctcaactgtcataataacaaatcaaaaatattggaaaaggaatcagtacacagaatcatactcgtaaaaatcaccattgtgtagatcaagaacaacacacatcacatcacatacccagtttgttcctccaaaataacagtaaactgaagttgcagtgtatccagcaacactagaagttattgtgtatgtaattatcaatgcagtcaataagggtactcggttgtacggataaaacataccaattaccccaagtatgagaatgaccatggtacttgaaatgcattgccaagaacattgaaacagagtcatattagcttacccaaagagaaaaaatcctgttagtaaaaagttagtacttttcataaaaaaaaatggcccaactatgacatttgtagagactagagagtattgctctctgaacttttttctattgcaaaaattcccccaaactataaatcattgcaaatactacccttcagttacatttcgctcattttttttaaaacaattttctacgtggctatgagtcacatgtatagttgcaatacaagagtctatttaacaactttaagttactcgaaattcagtttatttgcattaaacataaaaacattagctctaataatgtatgtatatatt

SEQ ID NO: 397904 - DNA, 820 bp, Cannabis indica
aaaaaaaaaaaaaaccaaatttattactgatcacctttcaccatcttactagtttcacccaataacataatttctatattaaaaaaaatgaaagacaagaacgtgctttatagaaagaaaaaaaaaaatgaatatatattaggattgaattatatatttaaaaaaaaagagagagaaaggagaaatattaaaaaaataattaatcctaacatactctatcataaccaaaaaatattacattctatatggggtaaaaaaaaatgccttcacttgagagcaaaattatgcgctctcaactaaggagtaccccctatatagggataagttgagtaatacctcttttttgtatccactaatcaaaaataccatcatattatatttcattaaaatgtatctatttttgtagattgtttaatacaccttaattctctacttaagtctagcatataattttcattagcctaagaggtataatggagatatcatctataaaaatgagtatatcttaaataatataaaaacaaaggtaacaattaaaatagataaagtaaaatgggtatagaatataatttcctcctctcgtatatatatgtgtgcactcttaatgggtattacccatgaatgaataatattaaaaaaatttaagtttttataattaattagaaaaaaatatcatttttactattatatgggctggggacgttgttctatcagctgaaaaaaaaaaatcgtcaaaacaataagaaaaagaaaattgagtttgacttaaatatttttcatataaacatatttttgatatagtgtaaaaagaagtcttttt

SEQ ID NO: 397905 - DNA, 810 bp, Cannabis indica
agaaagtgtttacatggcaactcggtcactggccctatataagaagcccgggcctacgaagaaagatgtctgcaagagggacatgaaaaagttttgtcgattcgacggagaatatgaccatgacactaatgaatgcaatagcctgaagcgggaaattgaattcctgataaggaaaaacaactcacacttgcagaagtatgtcaagaccgatcagggttagagaattgacaataaccaagacttactacctccaccggtagatggacatctgcaagtcatcattggaggcccgcatattgctggagattcaggcaaagctcaggagaggtatgcccaaacagtgcagcacgaataaaaagaagttatcctggccatggaagaaaggaagcccaaagttccacgagcaagagggcctaccataactttcaatgatgaagccgctgtcaaagttagatttctgcacaacgacccactggtcgtggaagtccagatagccaataaaatggtggccagaatcatgattgataatggagccccttccaatatcttgttcaaaactacttatgaaaagatgggactccagctcaaggatctaaccccgtgtctcgtgcctatctatggtttctctggtcaaggagtcgcacctctaggacaaattcgtttacccctcactgttggacaagcttcgaagagcatgactatcaaggcacagttccttatattagatgttccttcagcttttaacgtgatgctaggccggccggccttgtatgacttaaaggttgtcacgtcaatattccactcatgcct

SEQ ID NO: 397906 - DNA, 728 bp, Cannabis indica
ttatttatataaagatgaaggttccttctctttctttgttcatctatttgtgttcatttctgatttttttgtgttttggtttatggattttaaatgaagaaacctactgattgtttattttcatctttcatggacaattttccagtttaggtaactttcatgaaaacccaattcataaaagggttagtttatgaaacagatttccaaattgttccatggtactccctctatagttgaacgaaaattgctctttacaccaattacttccacaacccaagagcccattgaaattattcttgccatttttttttttgttgttccaccatgcttaattgattgtctagtggcaaagtactctaacattatgtatagattttacaacactaaatcatgctttttctaaagaattaaatgggttcacttgaagctttgagtaattgggtattatgttaaccagaatatgctcaatagtggtaattttgatttaattttagctatgtaatctcagttattacatgattccaagaagaataattgagtgtggtatttttatttataatgtttattaattgttaacatattctggttaacaacactaaatcgtctgaattcgaagaatacaactttaactttagttatttgtttacagtaggaaaataatcttatagtggttggttttgtatttaatttatattcacatcagcttgaactttgagctatcatcctat

SEQ ID NO: 397907 - DNA, 641 bp, Cannabis indica
gccaacttttgccggcgcaattcttgtacttcgccggcaatattgtctattgccggcgatattaagcgccggtaaaaggttgaggtgggaaaaaatgttgatttcttttgcctgcgcatttgttgacttgcgccggcattggttgacatttgccggcgcaattactcaatagcgccgacaaaagttggcattcttgtagtgtcacgttctcaatctggaggagatgagagggattttaagatggttacgtatgtgaagggcctttacgctcttaacgattcatttttcgatcccgtctttcctaaaattgagggtaaatttgatgcttggattagcaaaggattgctaaaatatgtgattattttctttattctgtttttatatttttatttgtttgtatttcgttttattttgccaattatttgaattcaatattgtttctttattgttttttttgatataggccttacaatgtttacgaggatggtgcaaagaaaatttccccggagttcatatatataccttacaacaataaaaataaaccacaaaactaatattagtgttgcatttaattttttttgtttccttcatgatataataaatcacataaaatagatatacaaatcttttaaattaatata

SEQ ID NO: 397908 - DNA, 585 bp, Cannabis indica
tttttaaatatttttaaatttcaatttcgttgtaatgtatcttgtcattttgttttagttttttaatagtgtaatccgtttatgtatgttgtcttttgggaatattatttggtctagttgtttgctgttcatttttaggtaatcaatgggtaacaatttgattttagatcattgtattttatgttcgaagtggtgtttatgtttttcagttttttttttatatagtttgaatacttgtttattttccatgtttgcttatatttgccatgtttgttaaatagcaagtctgggattacaaattcagtccctctgatttttacagatcgaaatgtatttgtactagtaatttctctgttattgataatataaagaatactttatctgtgaatttgttgtctatgtttcgtgacacccaatttggtcattttttggatatacctgattttgttttccatccccaagtggtccatagcctactgttgagggaagtataccagcctaatccaaaagaattttgggctaaggttgctggctgttgtatacggttcagtgccgaggagttttatttgatcactggtattgatt

SEQ ID NO: 397909 - DNA, 802 bp, Cannabis indica
ctccttctgtttctctttcaatccaagcctaaacatggaaagaaacactaaatactcttaccaaatttctctcaattgcttgccaataattcaagcttaggatggttcgaaggttgaggtaagtgttatagtgttttcctttgatttttgttgatttaagctagatttctatggtatttgagggattcagttatagttagaaattgatggattaggcattattctttcgtggtttttgagccaaaatcatgtttagtttgttgttatagagatgtcgaattcgttggagagtgagatttaagcttttgagttcaaagctcaaactatcacgtggtgaattttaattcatttgtgtatttttctgttttgagttgataaatatgcttagaatgtctaattgtcttgtgttgttatgtttggttgtgttttgagtaggtggggaagtttagaactcgagtttcttgagttgcaatttcttgactcaaatggtcgcctgtttaggggaaactggtgcacgtttgttctggtgtggccattacaccggtagcccaattgaaattttgtgcacccatttgaggttatttttgggtaccataattttcatttctctcgatatttagggtattatgacacaatttatcgataggaaatttttttactatgaatttaagtactagaaagtgttataacgagttattcaccggtttaccagttggaaattattttaccaagatcttagatctactcacaagtactcactatgattgcagtatcacttggtgtgtgtgggcactactctaat

SEQ ID NO: 397910 - DNA, 1199 bp, Cannabis indica
cattaaaggattgagccaagagttggttggtatctttgccacccaattctatcaacacttgggaggaattggccctaaaattcatttccaagttctttcctcctgctaagattgccaagctaagagctgaaataaacaacttcatccaacaagacaacaaatctctttatgaagcttgggagaggttcaaggacttaatcagaaagtgccctaatcatgggattgaaaagtgaatgcaagtgcacaacttctacaatggattggttggcactacccgaacaattatagatgcacaggtagtggggcttttatgagaaaaagtgtgaatgaggcttaggaactacttgaaaagatggccatgtataaccaataatggtcaacagaaagaagccaatcaaaaaaatttgtgggtatgcataaagttgatgccataacaaagctgacagcccaggtggaggccttgactaaattggtgactgctcaggcaaagtaagctcaagttacttgtgagctatgtgggggacctcacacttatgatacttgcccgatggatgtgaatagttttccaatggagtaagctcatgccattgggaactattagaacaacaactatggtaacaactaagggggtcatcgatagaactttcaagggcaatttccaaattagcagcaataagggttctacccacagagaagtcagtctcaacacagtcaacaacaacaaggctccagtggagggtctaatcttcagacatatatgctacttcaattcatgacagagattaaatcttccattaaggtcttagaaactcatatggggcagttggtgtaacgccctaacaattaggcacgctacgctaaccgattatgaaaccctaatcccctaatctgggattactaaaaggataagcgcgaaaaatttaaactttatttgaaacagaatgaaaattaaacttgtaacaactttaaactttacaaccaaaagatacatgtttcgggatcccgtaaatatttcacaaaatattacaagttcattttatgagccgacctaagcggcaaaatcagaattacaaaatacatcactagcagaccccaacccgcttggtctagtgtggcccgaacatatacaagcatcaccaagctctcgcactcatggctgatcacagactgatttaccctttcctgcacagtagagcacc

SEQ ID NO: 397911 - DNA, 525 bp, Cannabis indica
aacaaatcatctaagactctctaacataaaagtggaaaaacttagccttaatcacatggttttggacatccttatataaataccttttacaattaagttggttgggattgtcatagctgacttgatttagaataagtcaagtaagttttcaactaaaaagtttaggttgaataaagcttgaaaattttagaccactccatatattttttgagtctttgggtcagtttggcacagctatgctgtggggaaagattaaatgggactccaatggcagcttttccaatagctagtccttgttttacttcatttgaagcagtatatatatctacaatagaaaatttcatgataaatatactaaaatactgaagaaagaaacaatatttacttactttctttttgttggaagtgaaacccataaaagacagggtttataaatatattgagataaagatctagtcataagcaaagtgaaatcccaacagaaaaggctcttaggactacaaacacaggaaggctacaatataa

SEQ ID NO: 397912 - DNA, 532 bp, Cannabis indica
aatgtcacttcatggtaaaagagaggatagtgttaaggcacaaaattttaaaaagtagtattgaggtggataaagccaaggtattgacaattgagaacttaccccgtccagtgtgagttaagggagttcgaagcttcttggggcatgttaggttctatagaagatttatcaaagacttctccaagattgttaaacccttatctaatttacttgctaatggagtgccttttgagtttgggaaagactgctttgaagcctttcaaactcttaaggagaaattaatttcagcgccgattgtcactacaccaaattgggagctaccttttgaaatcatgtatgatgttagtgattatgttattggtgcagtgttgggacaaagggttgacaaggtatttcagactatttactatgcaggtagaaccttgaatgatgccacactgaattatgttactacaaagaaggagatgctggccatagtgtttacatgtgacaaattccgaccttacttgattggaaataaagtgatagtgta

SEQ ID NO: 397913 - DNA, 923 bp, Cannabis indica
gggtatgtgcccggagcccagtcgtcgggtactgtcctgacagcaactccaccaatgagcggcatacaattctccgctactcccagatatagccagggctaggcctcggggataaatggacaagccctctcgcactccgctccgactgccagcttggccggtccttcccaaggttcaaggagtaaaagatcctccaagggtagcacctggacgggggaaaagcgacaaaaaagggggtacactccccaatatacccagtacacggagttgacggactcccaagaacgtgtgtactttgctactaggcaaaatacagactaccggagaccacctcctctgtacaaagatagttcccggagggacctcagcaagaggtgcgagtaccataatgacattgggcacatcaccaatgaatgcaaaaatctcaaagacgagatagaaaatttaatccgattggggcacctctacgagtggataaaaaatcggttgcctcatctcaacctgggtcaggcggctggagctgtgccccagggaacaccagggggtgcgacaggagtattggctccatttgctcccgctggagatgcccaacatatccctggtctgccacccagacctaatgggagagtggccatgatctcgggaggaccccatatcggaggaactacccgcaaagagctgaagcggtatgcaggggccatgaaacacaatgaggtttgggaagttacccaactcgcggctcaaaggccccggctgatggatcaacccatcaaattcacggaagaagacgctaagacggtgcgttttcctcaccatgacccgttggtcatagagactcccatcgccaataaagtggtggccagggtcctgatcgacaacgggagtttcatgaatttacttttcaaagaggccttcactgcaat

SEQ ID NO: 397914 - DNA, 1372 bp, Cannabis indica
aaaaaaaaaaaaaaataagaatggtgcagcaaatgtggcacgaaagatcacaaccggaagacataccataaccaagcaattagatattgagaaaatattaatttgaattatttaaaaattttctgtgaacttttataggtaaaaatgttactttaatacattgttattatttataatacattactagtttttaaaaagttgcataatagttgttttgtaattgaatgtcaaatccaacatattatcataaatataaagcattagcaacaccagttatgaaacattaattaaaagttcaaaaaacttttctttttacgttgacaagcatgttggttattcaacagttgccaaaccattgaatgatagttgtatagcaggtgttatacataacacattaatttaaaagattcaagtgatttcttaaactattttcctagatataataattagacatgttaaataaaagttgctccacaattgaattaaatattttatatatcggcataaacgaaaaattcgcacaaaaatatatgcattataacctaaaataatacattgtctaaaaaaagaataacaatctgatatccaattcttaaacagaaagaagaacaacaatagaactataacatcgataaccaagtcttaacatctagcattaaaataataaacaattaaaataaataataacattcaacatgctacaaaaattagtctccaatcaccaatcactagactcttgttcttcccttgaacattcttcatatacttctaaggcttctcatactcactattaatgttttcttcatttttccttttaccatatgcgaacaaaaacatagcaagcctgatgcaataagctttgatatcaaaatccagtggaacatattttccatgtataaagaactcaacaaatacaacaacaaaagccccacagttcatgtgtaataaaacaataattaaaatagttaaaaataactataccgaaacacatcaacaactaaaatgcaacgacataaaaaaaattcacttattttcctgaccaagcagagaaacaatctccactaatcttaatggagctttcacatcagaaccaaaatctacaacaattattaaacatcatcacgaacatcaacaaaaaaaaaaataaatgaatcataaacaaaacctaagaaatttatgaaaccaataaaaataacaaatcacactacaataagcattcaacatacataaattcagaactataaaaatcataatcaacaacaagtaccataaaccattaaaaagagaaacatagttccaaagttgagaaacaggaaaaaaaaaaactaaaaccaactaatacgaaatacgaatgaaactcaataacagacct

SEQ ID NO: 397915 - DNA, 799 bp, Cannabis indica
agattaaccttgactctcgcctatcgtgacaacgttgaattcttattttgatcgaataaaaggttgctacaatagtgtctattcaactgatgatgtctttgactctcgcctaccgggatactatatatcatctagttgaaaaaccttagaaattatttaagatgtattgaacatgtatttttttgttattaattatgtagtataaattttgaaacttcattattggtctaacatagtttgttgtttttaacaggacatcctcaatagattgtcatccataagataacatattagtgttagatctcgacagataagtgtttgtggatacaaaatctagttgactcatctctatgatgacaacttagactagtgtttacaatgctaaaacaatgaagaagtttataaaataagaataaccttgactcgcgcctaccgggacaatattggattcttattttaataaaaaatattctttagttttccttttagctttttttttattatgaaatttcttaagatagtatatcattggacaagaaggtttataaatcatctgcttatgatgtcactctattttcttctataaaaattgagtggcacagatgactacacatttcagatattctatttcgtaatgatataaatccttgatcttagaaaatctcctatttatatattcttagtaaaggcaacataaactcagagttagattagtagtagttgtccaagctagaataattactcaagcaatatttagtataaatttatgtctttgactttaaattttagattccaaata

SEQ ID NO: 397916 - DNA, 767 bp, Cannabis indica
acaaagaggcaagatgcttactagaattacattaatgtttctgagtatatagcaataatatatatataataaaaacaaaactgatgcccctacctatcattaatggctcaattgtggcatgcacaatctaacattccatgtgtcacctaattcattaatcttttctaaaaacaataatgtgagacaagccctatacatacatcttgtgttgtgggccctcttatttttatcttttatttgagtaaaaagattttgagttccctccttcactgttaaactagtcttagtactgggacgaaaacaagagagagaagaacaaaacaatttgatattctttataatctgtatgaatgaattacattgaagaatgccttaaataggcaatgaaagtgataactgaacaagaaaatggattaacagaaaaataacacaaatgactaaaataactaattttttgtgaataagcttaactagaaccggttttaacacttaggtggcgtttggttgaaggtaatgaaatggaatggaatggaaagtaaacaatttttatttcattcctttgtttggttgcattttaaagtattagaatagcattctaatggaatgctctttccactattttggtagaatgactatactattttaaaaataaaggaatgaccattccaatgtaacaagaaaaaaattttatgatttttttatcaattttttttttatgtattttaaattttattctattccattcctattcctattctcattcctat

SEQ ID NO: 397917 - DNA, 1226 bp, Cannabis indica
cgtgatgaagactacgaaaaataaaaaagaaagttttacagaaggagtagtatagcttatagacttggccgatggtgtgtggtagaaatatatataatatatatatatatatatctatatatgtaacgttggggggacgataatatgtaaaaataatgagtatataaatgggactaagagacaagatagaagagatatatgtactaagtttgacccaagacatataatatcgattcttatatatgtttcatatacataaactacttgagttgaaagtcaagcatgttgaaaataaatattccttttaagcaatggaattttggggtcgacacaatgattgggcgtgctctcatggactcataatatataaatatatatatttatacatacatatatacatatactctcgcacttctggaaagagagagatagagactatacatacactactcacatgccccatgcatgctcattaattaagaaagaaaaggtagagagagctttctgaccaataattttggcctccttcttacatataaatatatatatatatatatattaatacgtattatacgtgagtattatcttagtttctattccagaattaataattattctagttaaatattttattatacatgttagtttaggtttatacttttgtagaaataggctttttgatcgatattattttaattaatagaagatatatatattaaaacattattaattgtaaagtacatgaatagtgattactctaatttaatgcggatagaggctgaataaacgcgcgttgagtgtgttaggaaatgaaataatatgctaatcactttcctactattgtcttgctgtcattttgtactgttagtttgtgattcaaaattttaacaaattggtaatgttagaaatttgctaggatattaattccattctctatgattctacacaatcattcatttcctctgtatttttcgtaatattcttaaatcttataattggtctattcaatacaattttagccatacccatttttgaactttacaatttttgtgcttgtcatatccttattttttgatttcaagtttggtatcagagtctttcaagacgtgcgctcaagcttccttcgacaacaatggtgaccagcaatagcaatctggccaaagcactacaagaaatgtcacttttaccagcacatttttgtgttagcaaaagttggtattgcgctg

SEQ ID NO: 397918 - DNA, 1626 bp, Cannabis indica
cgtacggattatgtgagcatggagtggagatattattacaattttttgtttagatattatgatattgatttagaaattaagttgtaatattgatgtttattatttattttgaattgtattttttttaataatattgtatatattgtggattataaaaatatattatttttatttattttaattaatattattttttcgatgaaaataaatattattatacatatttaatatttaaaaaatatatatcaaaagtaatttaatttaatttatataatatttttaccaacagttatgaaatgtcatttaaagtaatttttctcaacagttgtaaaccgtcatttaaagtgacttttcccaacagttataagtcgtcatttaaagttccgcatttttatgacacccacatagccaacggttttaggaaccgttgggaaatagtataaaagacagttatagactgttggaaaaggccaattttgtagtactgaaggattaaagtaaggatcaagctagggtaaccctagaacccttaatcatgtgtttttgaagctttatttttggctagttatgcatatagaagatttaggtgctgttatggtttggtttatgttttgtttgaattttaagcttaatttgagttggtttggttgttttattgctgtttggaggtttggtagcatggatgcacaagtttgagtttgaaaactcaagcttggttcatccatggcatattttgagtttgtgtgtttttcaaggttttgttgattggaaatgattgtgtaagctcattataggtgtttaggaaagtttggtggcaattggacatattttgagcaggttgtgaaatgtttggggaaacctggtacaaactggttaaccggttttacagatccggtttgccaggacctgtaaaaccggttaacccggttttggcaaattacccgaaaaactcattttctcgattcgtgtcatttcagtgcttggttgggtgatttcttttttcctaggatattgtggtttcattaggtaatagcggaaccttaaattgtaggttcgggtttcccagattagggttttgatgtgtgatttacccagttatgttatgtgattagggcatccatccagcacgagacttttcgtttaggtcggccaactcacttgaatttggaaaagaggtaaaaacagcatataatatgtgatatatatatatatgcgaatatatgtatgtgtgaattatatatgcatgcttgttatggttggtacactaccaacacttgtatggaaatggtacagagtgcattgatatagtgtatattgtttaaagagtacattacgatgttaccagcataagtatggaaaagtacagagtgtgtgtggtatatcacttagtggtactcaatgtacgaaacaaacgctatcaatactcgtgaaacaaggtacgtagtgtatgtggtacagtagtcgtaccctagtatggaacgtttttattcatttgttaagccttgtaaataggtgtatgggtgcctagatacaactcgatattatgtgatatgttatatgcttttcttactgagtatgtcgactcacaatgctactttcatgtgtaggtaaaggaaaggcgaaggc

SEQ ID NO: 397919 - DNA, 1062 bp, Cannabis indica
ttacttgaacaaaggggtcgaacttccataaatctatgtgtcctttacatttattattattctcacgtgactgtcataagaaaaatccgatcgtagtcagactccacgtcggttggctaaatccacagtcaaccttttggtgctttcattgagagcccaaaattctcattcaagaagctttcatatttttcttgacctcttttttgcatggttgtcacaagacatgggaattcaactgaaccacgagacttatggctgcggatcttaatttccaagtgccacctgtcatgaccaatccaaacttggctggtagaccatcacgttttggccagctacctggaacctctacctcgaaggtttggcaaggtgagctagtttcttaaaacatttagctacttataaatgatattttagtaaactaatataattattgaaataagatctcaatcatttaactctattaagtcaagctcgaaagaaattatcgtttcacttctaaatacttataaaagctatagattccatatctatgattagcgctcccactcaactgtcctatcatgttcctaagatataagtttctacccgaaccattggttagctttcacgaacaactctaagaatataaataatacaatttagatcgaacctaaccatctcaagattaagatctattgacctaagatcaactagtgatattaacttagaaagatataacggtaagtttatgatatcttatccaagtttaatatcggtccaattcaatgtatactccatacatctgatactagcatactttgccaatgtcttggaaaggacataacacttatccaaggtgtaagtatactttatcgctgattatcatgtcagtctaaatctagtgtactgacaaatcatgggacttaaattttgaaacatataatcatgatttatatttttaatgtgttgacaacattataatcatgaataactatatgttctggatttaatagaatttatacattaaacatataatcaatgaaataaatcatgtgaatcatgcaacataaaatgattttttga

SEQ ID NO: 397920 - DNA, 639 bp, Cannabis indica
aagttcatggttgtacaaacatacatttcggttagacgatgagctatcctgattcgatgagagtcttgtgcggtttgcagaaatctgcatcgtaaattacatgaatgattttaatcactatagtcaaaaaaaagttaaaaaaaagcaatgatttaagtacataaacaatcactgaattactaaaattgaataaaattaggaaaaaattcttaaatactacaatctcaataattctgaaagaatttttaatagctaaaaaattcacacataatttaaatcatgtcaaaaataaaaaaaaaaaaaatcattattaattatttttttatatgccaaaaaataaaaaattggtactaaagcaaaatggatgaacttactaaataaaaaagggatattggcggcaaaaccacgaattttatattttgtaacacttaaccataaaaaccgaaattttggtggcaaaactaccaaaagctcctttctgttagctatttaccccttccatctaaaaaacaatgttaagtgccacggtggacatgctacagtgtacacatggtaaatttttattggtccatgtaatattaatggtttaaataatataaaaattttataaaaaatatttataatttaaaaaataatttt

SEQ ID NO: 397921 - DNA, 785 bp, Cannabis indica
cggtgaaaaaccccaaaagcggagggcttgatgccagccacggtcacgatcttttccaactggtgggcgcaggtcaaggttaagcgaagctcatctgtctcccaaccattggatcggcgagtatagttctcctggacgacaggacccttcatcacttcctccagggtagccagagtaactgcccccttgcgagaagatttggttccagatgcagaagtagacatttggttctgtaaaaggaaaaatccaacagttagcccccaaaccaaaccctagtgttaaaaaagggaatgagggtctcctgaccgctggaaagaggccccctccggatgtttgccaaagatggaaattcaaaggattttcctaagcaaacatcgggtgcaaatatctcaaaagtagcgaaagcagaggaaaagtgaaagacacagaacgtgggaatgaaaactgtcccatatcttaagtaatctttcgacagaggggtcgattgcaaaaaaaaaagagagtaacaaaacataaataagagagggtaggtacaccacacgacaagactgtgccaaagccatttccctagggatcaccccaaaaaaatactatgaatacctcgcaaacatactgagaaaggggtcgaggattctgggtttagaggaatcaaagagagaaaataggagagaaattcaccaagaacattctctgtaataaatactctcattaataacaaagactggtggactaaggctcattaatgccccaaccacgtaaaaatctcatgtattaaacttcctaca

SEQ ID NO: 397922 - DNA, 632 bp, Cannabis indica
caacacggccacatgaacacaaacaccacaaattacaagttagggttagaaaaaattaggacgcgggtcgaaaaaaaaaaaatagtcaacaccacctgctttaatgcgaacttgacatgtttgacacattttttttaaaataaaatagatatttaggtgccgttttggtaactactttttttaatcattttttctgtttttaaaacttgaaaaagtgaaaatatttttcaaaaacatgttctataaaattgttttcactttttaattttttaattgaaaatcaaaattttgaaaacaaaaaaaaaatcactttcattattttttttaaacagattttttttaatcaatgttatggactctgaccaaactcaaacccgaccctagccttggtgccgaacctagcaccctacctggaccccaccccgaacccaaacccgagttaaataaaatcaaaaaataaaataaaaataaactttacataacacaattttattttctgtttttaaaattgaaaaacaaaggtagttatagaatgcatttttatttttcaaaaataaaatttttaaaaacaaaaactctactttcatttttgtgattaaaaaattagaaaataaaagtgttaccaaacaaca

SEQ ID NO: 397923 - DNA, 645 bp, Cannabis indica
cgcgctaaccgcattcttggagaaagccaagtactggaacaagtcctccccgagaacgggtttcaataggattggtggtttagccatgtgctccttcagttttttgaagaagggaatacatttgtctgtggatcgggagataaaacggctcacggcagcaacctttccggttaagctctgaacatctttgtgtttcttgggggaaggcatgcttagaaaagcttggattttctctggatttgcctctatcccccgctgactgacaatgaagcccaaaaactttcccgatttgaccccgaaagtgcacttcttcgagttaagtttcactccgtatctccggaccacttcgaagcattcttctaggtcatccgcgtaacttgtgtatgccttcaacttgaccagcatgtcatccacgtatacctccatattttgccccagaaggccttcaaacatccggttcaccattctcaggtaagttgcactagcattctttagtccaaaaggcatgatcaggtagcagtatacccccttatcggtcctgaagctagtgcactcttgatccgcgatgtgcatcttgatctggttgtaaccggcgtatgcgtccatgaaggacaatagcttgaatccggaggtggcatccaccat

SEQ ID NO: 397924 - DNA, 654 bp, Cannabis indica
agtatgtagatttaactataaaatcacgtgaaatcctttatgttcaatacatatatttataagtataaatattaattctttatttttcaaagcttcattgattgttaatgaaaatttaagttaatcatttggtgctttcatttagagcctttgtaaaaataaaactcgaaatatatctccccttttgttccatcacattatggaaaacactcggcgtgatgagcctgttatggaagaagaaacaacaaggtgaccgagaaaagagcctcagggggcacatactcaaaccaacacaggaaggggtcctactgagacgaaccctgagagaagtgaccctaaggaagaaattcatgagagaagggagttagatgcatatgaccccacaagatatgtccctattgttaaattagagaatcgaaaacttaaggctcgcagaatccaatgttgtaccaaaaagtgagtgtttttatatttatactcacaagtgcacgaatcattttggaatataatgttcatgtaagtacgaggtcgaacccatgagaactgactaatatcaaaagaaactatttcaaacaaaacaagaattttctaacatagttttgaatatttgatgagattttagtgtagaaaaataaaagacaagtaataaaaaga

SEQ ID NO: 397925 - DNA, 534 bp, Cannabis indica
ggaatcatctcagtttaaactcaattttagaaataggagagacagatcgagagcataaatatctcttcttaaatggaggagtgcgttcattaactttcgaggatggttgtgctccaatatccacaaagagtgccttacctttaggcctgtgtaaattactgcataatttcaattcttccatataagtatcttgggcttggaagaactaaccaagtgctctattctcatcaagttggtcactattgtcttggcccaaagtggagtcctcacccaacttctgcttaattaagttcgacccaataaaggaagctcccaatttttcttttggcccaataaaagtctaggctaggggtgtgcataaatcgatccaatccaatgagaaccgactgatccaattacaactgaccgccaaacattagatatccaattgtgatcagatcggattggatgctatttttaaatatccaattggatcggatcggatggtggatggggtgtctaaaaatccaatacatccaatcgaactaattaata

SEQ ID NO: 397926 - DNA, 511 bp, Cannabis indica
ttaaagttttgatatatatggcaggtaaattctaaatatgatattttttacaaaaaaaaaaaaacttaaaatatgagaaaaatcattatagataaaaatgaagggattatttcacaaatatacaaaaacaacaaaaaaaattataaaaatatagttttacggaattttaaatatttttacaattttttaatttgtttgcaaaaaatacagtctttttatgttatactcttgttaatttgttaattttttgttgttgttttgatgttatttttatgtatttttttgttatttttcgtgtattgtttctataaaaagccttaaaaatataaaaaaaattctttaaacgtaaaaatgtaattttttttttacaaaaaaatagtgtattatgtaattatccctttaataacaaaattgtaattttgaaaaaagctgcttttgttgtgttaaatttagaaaaatgttataaattgtgttatatttagcataatttatgacatgtacaaaatttaac

SEQ ID NO: 397927 - DNA, 559 bp, Cannabis indica
atatataggtgcattaagaagtgtttcattttaattaatcattaatgaaaatttacttgattaaagttgatctaaaattaattaaaatatttaatttctaactttaatgtattttttaaaatttcaaaatatctgcatttaaataatgcatttcaaaacttaatgggaaattattaataaaataaaataaaaacatattttgaaaattattcaaatttaagttgtcctcaaaatagaatttccaacttaaatataattttctatctaaataaattttttgaaaacaactaatatttaagtgtcttgaataaaattattaacttaaatatttaattttctatttaattaaatgtatacgaattagaaagaaataattaagtatcttgaataaaatcaacttaattattaattctattttaatatctaagaaaaatattataatttaagttgatctaaaattaaatatatttttctaattaattaaatattagaaaataaaatttatttactagaaataactttctaaaatatattttattaaacaagtgtattttttttt

SEQ ID NO: 397928 - DNA, 810 bp, Cannabis indica
gaagaagatttaaaaaatatcaaaagaaactaagatgaaaaaaaaaaagataaaagatcgcataaaagatagttgtgcaaaattgagattcggcctaagaaaaaaagatttgacaccttgaaaatgtgggaaagtacacacgggctgcaacccgtatcgtgaaaagcaagccccttcgtgtgaaaaatgcacacgggtcgcggcccaggaaaggcatgccgcagcccgcccctattctgaagcagaaaaagatttatttctcaacgtgggcttattgtggtggcctaattcaaagctgaataggatttttagcatgtgcaattgttctatcttttgtccctcaataactatataaggagtgaacttcaattgatttcggtaagcaattcaaaaggaaataaaaaggcagaaaaaaacgaatttcagagaccgacttcaatactgaaggcattcttcagagggttttcagcattcttttcttcactattttcttctcttttcttaagttaatatgtgtgattttgctacaatgaacatgagtagctaaacatttaattagggtctagattgagattgtttggtattgttttatagttctaatatgatttattttcccttaatttctatgtattctatttcattcgtacttaattacttttaattgactgatcaccaattaactaactatgattttgatgcgagatctgagaagtgagtgtcaattatgctacagtgaaatagaactgaatgtgatataggacgatagtacttgtatggtttagatagcttatagggtttctgtgtttaatg

SEQ ID NO: 397929 - DNA, 1142 bp, Cannabis indica
ggcatttttctttagcattgttggtgagagatttaagacccattttttcatattttttcaacaatggagatgggaaagatgaagatctagtgacagcttggaagttggagatgacgaaggggagcagttctttgaaacgaaaatgggattttgatcgcggagagcaactttttcagtgatcgttaatgaaaaattgaaattgaaactaaaaaataaaatagaaaataattataaaagataaaaaatttgttgagagtgaatctaaacaaatgacatcatcaatacatgtaatgtgtataaaacgtattttagtaaataaaataataataaaagtaaaatattgttcaaaccatgtgggtgtaaatttatagtgaaagtgttattgcttactttcatataaatttttctttaaattttttattttttttttgaaagagagggagccctctagagagaaaggaactcaaaaagattacaggggtcatctccaatccaaatggctacttcatctaaccctagagcccggtgcgctagcttatcagccagggtgttagcctcgcgatagacatgggagagccgagcagcagggaactaagataaagtattcttgatttggctaataatgtcaccaaaaactgaaatgtcttctttatggctagacagagtatcagtaatggttttgcgatccgtttccacctcatggactaaaaagtgttcattgatgcaccattgaagcaaagtgaggagagattttgcttccagggtggggaccgttcctcctccaaaatgaggctggcccagggcagcgactaccgaaccatcgctgtttctaatgataccagcgaagcccgctttcccgttgacttttgagactgctacatccacatttagcttgagaagacccgcagctgggggggaccatgaaggaggagccattatctgactggggcgggaggaggatgtaggaatcagctgggaggattggtaatcttccaggaagctttgagccaagttgagaattgcatgatctgggtcgaaagcttgaccttttagagctttgttcctgttaaaccatacaagccaagcagtacaaagaaaaatctctacatcttttttggttagagaagtgtaaatcatatcag

SEQ ID NO: 397930 - DNA, 590 bp, Cannabis indica
gaggcagagacggtggctggaatcggtcaaagattaagacggaaaaattttgtatcaccccgggaaagccaatgttggggtagatgcactaagtagaagagttcccgggcaagtttttaccactgtaatgatagctccttaactagcctcagaaatggtaaaagctaaaattgaatttgtagtttgaaagttgcataacttgaaacttcgatctgatttgttagaaagaattagaaaggcgcatttggaagatcctgagctaatcaagatttgagatgaggtgatggccgatcagcctaaagaattttcaatctcgaataatgaaatggtactgcataaagcttgggtttgtgttcctaatattggagatcttaagaaggaaatcctcgatgaagcccacaccacaccgtattcgttgcatccaggaaccaccaagatgtaccaggatctaaaaccctatttttggtggtatgggatgaaaatagatgtggtagagtatgtatccaagtgtttaacctgccagcaaatcaaagctgaacatcaaaggccggcagggttattgcaaccattaacccttcctgagtggaagt

SEQ ID NO: 397931 - DNA, 683 bp, Cannabis indica
aagtggaagcacagaagatccacgtaaaggttaggacagcgtatccaatggctgcctttatagccccaaccatggtgaattggcgaaattgatgatgtatttgtttttttttccaatctaagatatggagcagaagagtaggtttgattggtctgttagagagagtttctcacattatctcggtggattttctgtggagccaaacatgagaggagagtagttggggcttgaaggtggatttattatatcaatacgattgggtttttgaatcccattaaatccaaaaaataagattgggtttttgctattgaacaattactatatcaatacgattgggtttttgctgttgtaatgtattcctttttctattacaatttggacattcctgttctaatttatatcagagctagctgagaaggacttccactctcatcaacccaaaacccatttatatctcatctcttctctctctttttccatcccaatatatataacagaattagataccctctaattttttttgttggccgtacagttacaccacttctcttcttctccagatttttctctctgcttattctcccacgtaatgttaatattcatcactttaatatcactttaatatcatattttttttatcaatttttttttctttttgaataaagataaatatgaaattttaa

SEQ ID NO: 397932 - DNA, 556 bp, Cannabis indica
ggagatatgattaaccaattaaagtagcattacctacatcgtgtaaatagctcagaccaatatgaacaactcaatagtaaaaaaaacaattaaatcttatttttttgtcaaagtaacaaaaagttaaaaaattgggatacaataatattattaagcctacatgttattattttttgtcacaactaataaaaagtaaaaaaaaaaattgtgatataataacattaagcctataatattattttgggaaaaaaacaggaatattctaaaaagggtaaaatattacaacaatactgtgggccggcccaatcaacatttgtacagcccaaaatgaaaatattacaaaaataccacttgcctttaccttcagccgcacgtcacaaacggagaggatgaatgaacctccatcgatgcagtcggctacgcaaccagaatgaaaccagatcgaacgtaaaacaaccgtaaatcccgtcgaatttcaataggaaacgaacaaatccaaggatctaaacagaaatttaaaaaaaaaaaaaaagaccaggaaaaccgtggagaaact

SEQ ID NO: 397933 - DNA, 574 bp, Cannabis indica
gcgattccccttagaatctgagtctctttggcatagggtgattgagagtatggtttggcaaataatttttgggattcaaaaagaggggatcggatgtccccgaggggaccatggaaggacattgcggatctatatgatgaatacttaaggttggtgaaattcaaggtaggaaaaggggataagattcggttctgggaagatgaatggttaggtgattcatctctgctacatacttatcctggtttagccctgatttctagagctaaaaacgtaagtataatagatctggtagctgaggaaggtgcagctggagaaagtgtggtaagttgggatttcaagttcagaagaaacttgttggaaagagaaatacctagccttatagggatgttacaacagttggaacaagttaaattacttaatgtcaacgctgatatcagaatatggaaacctgatgccactggagttttctcaagtaaatcagcgttcgcttggtttaactccaaccaaaatgtagccagacccccttggaccaaatctttatggaaaagtacagccccgccaagggttaaaatct

SEQ ID NO: 397934 - DNA, 703 bp, Cannabis indica
tataacgactaatgcagtatttggcttgagcaatcaaatagtttattaattaaaacaaataaataaataaaagagttgggataaagagccagcacctcataaaattttgacaaggtagttagagcatttctagtgggaaaaatttagaaaatattttctggaaatatgatgccgtaaaatattgaaatgttatactattagatagaaaaagatattattttaagaaatatatatggatggtatataatattattgatgttatttattttttttttaataaaaaattattatagttaaaagttagaatatatatattaaataataatacagtgagattgtaattataatattttgtaagggtactgtatatattgaaatatatttaaaagtaagattaatacaaataaagttttggaaaaaagtatattatatttttaaatagagaaatttgcggccaaacctctttatgtttcatttgtttaacacttaacctccttttctttatttttgatggaaaaacccccttaagtcccgttccgtttgcaatttactgttttgtgcattgaccccgttaacccctaaatccaactcaacttatctaacaacgtggctgctttaatacacaggtggtaattaaaaccatttttgtgttttgaaaataatacataatgaaataagtctaataagtaaaatccaaatttag

SEQ ID NO: 397935 - DNA, 861 bp, Cannabis indica
gtaaaataattagttcggctcttcgtttctatctatccccattgcccctaatatccatgtaagaatcttcattgtaatctttttttggaaccctggacttcttctgacttttatcatagtttatgttaaaattcaaatttttaattccctgcttttctttcacttccttctcatgaccctcctccactacctctgcttcctcattagatactattgtctcccatgttcgtcaaagttgccactattatgccaagaggactttctcaatttacattcccctttatcaactccatcatttctgctatctatctttataggcagtttatgttgcttatctgcctcaataacacattcttttcgtctttcttcatgccacaattcatcccctcgattcaccatgatgttatcctcatgccacaaaacttttatttcacatagaatatcttccatttcttcaatgacttcgttctcttcgacccctcccaactcttctatatcatcaccgtttgagctacttaccgacatttcttccccgtgataactttagttgcaatccttttttttttccttttatggtttcaatgaatttttcaccaagtttgcccaagtttgtgaatcctccttccttttgcaacgtgattttcgcattgtaatttctaatccactaatccaaacaaacaattaacaaaattcttccatccctttgagtctctttcttcaggtataataatcgttgtcattttgtttattttacgaactacgaacactccctttcctccgaagctgctccatgttctcctaaaattcttccattattccatataaccaagttgttgtatcaatggttatggtgatctcgta

SEQ ID NO: 397936 - DNA, 690 bp, Cannabis indica
gagaagagaaagaaacctatagatccaagagcaatgccgagaacgagcaagccgacggtataaggaactctggtaccacgcaggaggtggcggcaggcaattccgagcaccaaagagatgccgacgaagatgacagcatctgagggattggaagatagagaagaagaggattcttcgtctagtattcggtaggagagcataggatcctcaacgacggaagaccattgaagaaggaaggaaagagagagagagagagagagaagaaaattaaggttttattgattagaaagaaatgagagaagacgaaaatggagtagtgagaaagattctgctcttgctgtgctgagctactctctctctctcattttggagccaaaacattatatataccaaataaagagtataaacattacacatattaattacaatcacttgccttttaacaaaaaaaagtagaaaaaaatgactttaccagatttatgatgaacatttatgagtagagttgctagttagttagctatggtttttattttagttgtttttttttccttttggtagctaaaagaaaatttttttcttttgttattaggtgtactaatataaacgcgtcacgtatgtaaaagtgtacatatagatagtcaatgtgtcgttaactgcgataaataaatgacactttaaaatttgttaata

SEQ ID NO: 397937 - DNA, 871 bp, Cannabis indica
agggctatttatactcatgaacaaattgtctccaaacttggaccctattttcagcatgattttctaattcacccaaagtatccttttgccaatctagtccccttcaggactgcacttttcactccaaaatttatagctcatattttttggtacctaacatgcctttgtacaatggttgtcgaagtccaaactatggctcttcacactgctatacaggtcttgtatcaaacaaaaaaaaaaaaaaaaaccagcctaccaaatctaaatagacattttgtcttggtacgctcctctagaggagtggaaaagaatactttgagatgaatgggaaaaaagttcgcaacaatagggacttctttgtttatccatcaggaccacatgtagccaacatgatggattgttacactgtcttctttatcagtcttaatgcaaaattggacgagaacaagaaaatagtttgcaatcccactttcgaactatacgaatcccaggaagcacctttcagagaaagtgtagagtacacggatctccaaaatgttatttttgagaaaaatcagactattccaccagaaatttggccaagaatagaagatgatgccccacgggaaatttttccctcagattattcacgacgcatagcaagggctctagaaaagttttaaattttcgagaatagtcacaatcaggtccaagcccctaaagcgaagaagaaaaattcatcactattcaaagaaacagacactgtaggggtcttactccgtaacacaagtatttttgaagattcacaagatccatacatggaccaagaaattaaccagaatccctatctctttcagtacaatggactagaatgggagattgtttattctga

SEQ ID NO: 397938 - DNA, 687 bp, Cannabis indica
tgtaagaaattactttataaaaattacaaaacatatatgattaatttacattgcgaaaaaatcaagaaaattgaatatatatatatatatatataaatgtacaacgaagaagatcgaaatacctcaaatattgatctctgagcttctatcccacatgagcttcagatatacacaagaaaaccaattatatgagttactgttagaacttattttaccagaatctagatttactaacatgtatgttgattaacattcaaaatatgaattctctaaactaatagtgtaatatcccgagaattgtattgatatttatttggccatattttattaaatatgtaattatgtgaatattagggtaagattataatcttacttaagctaattacgagttaattagtgaaatttgagtaaatgagtaaataaagcgtaatttattaattacggaggttttgttacaatatgtgggtatcgtggatatcatttttttgaaataaaatatcttcaggttcggagatcgtgggattttggcggaatggttggatatgtcacgataatgaattatggattagaatgggaaatttatcggactagtttaaaattctaagttgtcggttcggtggaatagttaaaaatgaccaaaatacccatatgttatgctttggcttaggtgtgtattgagggtaaaat

SEQ ID NO: 397939 - DNA, 927 bp, Cannabis indica
tgtatgccgctcatcggtggagtggatgttggcaaagtgcctgggagttgagctccgggcacatatcttgctattccggtgggatagtatcccccataggccactatttgggcctcttctaggttgatatatttctggactctcttctcgaaatcttgaaggttggaagccccttcttgctgtaactcgttccagaatggagtccctgtacggatgcccgcttggagaagagcaagctgttgtccgtcatctacgttcttggtttttgaggcttcttccttgaacctctttatgaaattcttcagtgtcttcgtaggcagctgcttgatgttagtcaaggcgctgacctccagattaactttccttgcagcgacaaattgtctgtagaagctagtttgcaacttattccagcaatccatggacccgggttctagtttcttaaaccactcttccgcggatcctcttagagtaagtgggaagcacaaatatttggcgtcattgctgactctcatgactgtcatgactcggttgaatcgtgacaggtgatcgcttgggtccgagttcccggtgtaagctgccatttcgggcatcttaaaatttttggggagctctgcttccaggatgtgcttggcacatggctcccggtcctcacagtcagagtcagagtcgtcgcctttctgtctcaaggagactcgggcgatgtcttttcggagtatggcaagttctgccatgattccttcgtttaacgtccccgtggagatcgcgggtccgtacttcttttggtccaggtgatcccggagatcaccatggttcccgttaatctgatttcctagatcaatgggagggcatttccggccctttcgtcctctcctcccgggctcttggtgcacataaacgcttttttggtcctctcgatcctgagggcca

SEQ ID NO: 397940 - DNA, 572 bp, Cannabis indica
cactgtaggaaattattcctaatttaaccctacacacagcaaaggaaacaaagaaaaactgaggtcaaagatgacctttactaagtcaaagcctccctttttgacttcctgtagtgtaccaaaacgacagcccctttttgatttactacagatcgttttgaattaatctaaaaccctaaaatcacatcatatatatatcatctttaaaagcaaacatataacagcagccctactaaataccctagccgttcctcctttcttcactgttcttctttgaagaacatgaagaacagcttcaaacccaacccagaaaaattatccctgcccagaaaataaacccgaaaataatatccctacgcagatcagtcaaccccagaaattaatcccttaaacccgagcaccttcttcgttgttcttcacagaagaacacgaagaacaccaaaaataatacccagaaaaaaatccttttctaaacagatttaaacccaaaaaattgcataaacaatatatagaaaatgcaaaaaagtaaaggaagagataacaccggtttatagaggttccccaaaattgtg

SEQ ID NO: 397941 - DNA, 1050 bp, Cannabis indica
acttcctaatcattctttgtctttatctattgacggttatgttgactgttttagatggtttttgtcgtttacatgttatctttcttaaccatctttatacaaaatatcaagtattgagttacaatgcagctcgcagtctttctttgtcattgagaaatgtattagcaaggtggttacttcaacgcgtcaaaagtgaggtgagtaaatgttgaagttgttttcattccttaaacatactcacaagtttgtggatcaatgagttgcatgcttttactcacgagtatgtgggtcaataagctgcaagctctttgtttactcgttttgaacaactttcattatgtattatgtttatccaaagatgggcttgtttgtctcgctggtctcattaatcaatagttattactcatgcctcgttgttgcctatatggcggcgtgtaacaccctaactagcataggcgtgttagcatgatttttaacatactgtgcagctcgttgctaatcaacgaggttattggaaaacgtgaataattaaaattttgcttatttaattaaaatataacaaataacttttataaatttctgggatcccgtttacaaaatactgttacaaaagtttactacataattacaaaatacttgtcgcctagcgacaaaatacaaaagcctggtgtcctgaggatcgtacgctccatgcctaaccgccctgacatgtacaatcatcacttgctcgctctcacggctcctcagctttagccttgcccttacctacacatagcaatagcactgtgagtcgacagactcaataagaaaagcataataataataaacatactaaaatcctgggttataatcaggcgcccatacacctaaccataaccctaactgaatcaggatcgatcttgacaaagtatgactaaccgcgaatccaacctatactcagtactctaatcgcactgatgtggtagcagttaatccatactatctgatagcctaacatatatctaatggcatctcggtgcaactctataaacacatcactgttgccctgat

SEQ ID NO: 397942 - DNA, 1371 bp, Cannabis indica
ccttggaacatattttttaatttgttcaattgtggctgcacggcttgaaaaacttgttcagcctcttggccgacctaagtcacatcagcatctctttgagcgagattttgagtgcgggttccgtgatctacgattggcgcatcatgttggtcgtccaatcctctcctcctgttcagatcatttttgagatcatgagttgtccccaatctatcaattatagttgcatcagtgattgcttagtttggctaatttgctggtaggcaccattaacttggttggaattatttggtatgacttctctggttgaattgctagacaaattttgttttcttttggccatctaaattcaaatgctcagaaacaggtaaatgtgatatatccagaagagtcaaaggattaaaaccataaataatttcaaatggtgaaaatttagtagcagaatgcatagaacaattataagcaaattcaacatgtggtaaacaatccttccatgtcttaatatttttacttatgatagccctcaataaagtggataaatttctattaactacttctttttgaccatcggtttgaggatgacaagtagtagagaataaaagttttttcccaagttttccccacaatgttttccaaaagtaacttaagaacttagcatccctatcggatacaattgttctagacatgccatgtaatctgacaatctccctaaaaaataaagctgcaacatgagaagcatcatcagttttatgacaagggataaaatgagccatcttagaatatctgtctaccaccacaaaaattgagtctcacccacgtttactcctaggtaaacccaacacaaaatccattgagatatcaacccatggtgaacttgggataggtaggggtgtgtaaagaccatttggctgaaccctcaatttagctggcttactagtgacacatttaccacaaattcgctcaacatctcttttcatgtggggccaaaagaagtgttcttgtaatataaattaggtcttagcaactccaaaatgtcccataagccctcctccatgggattcccgaactaacaaatctcgtaaagaactattaggcacacacaacctatgctacctaaacaagaaaccctcatgcttataaaacttaccctcacaagatttttcacaagcaccataaatctcccctaaatcatggtcaagaggataaagttccttaatatgttaaaaaccaattaatttagcatcaagattagagattaaggcatacctctgagaaagggcgtcaacaaccacattctccttaccttttttatattggatgacctaaggaaatgtctcaatatactcaacccatcatgcatgtctcctattgagc

SEQ ID NO: 397943 - DNA, 659 bp, Cannabis indica
gagtctgaatctttgtagttacaataaaggaactccttccatttagggtattttgattcctaaatttggcagcacagagggtgacaaccattcaaaatgttccacccccacttagtcagaaaggccaagttcatttctctggttttccggaacccaagtcccccaagagatttgggaaggcagagcttatcccaagcttttagatgcaacccatggttaccttttttgaatccccaacaaatatcacgcacaaaactatcaactttggtagcaaggaaattggagagcttggtagtttgcatagcatataaaggcagagacaagaccaaaaattttatgagtagcatgacccgcctttgacaggatttttgctttccaccgttgtaacttcgaagtgaggttatccaggataaaattgaagtatgcgtccttatatcttgatctgaacagggaaagatccagatacttgacgttctcctcaggtgtgccgatccccaaagcttccttgatatctcttttcatttcattggaagtattcttactaaaaacgattgaagttttgagtttattaacttgttggcccgaacatgcatagaatctctcttccatgtactaatatgaggatatatattataaaataattctataatagtgacatt

SEQ ID NO: 397944 - DNA, 530 bp, Cannabis indica
aattatactatcatgttcctaagttgtaagtattgggtcgatccattggtcagctttaacgaataactctaagaacataaataatatagttgagatcgaacctaatcatatcaagattaagatctattgacctaagattaagtaactgatattgccttagatagatataatggtaagtttatgatatcttatctaatgtcaatatcggtccagtccgatgtatactccatacatctgatactagcatactttgccaatgtcctggaaaagacataacacttatccaaggtgtaagtaaattttatcgctgattatcatgtcaatgtaaatccagtgtactgacaaatcatgggacataaacttttgaaaaatataatcatgattatattccactgtggttacaatactataatcacgaataactatgtcatctggatttagtagaatttatacattaacatataatcatgaaagcaatcatgtgaaccatgcaacataaataaattctgatcttttgttaattagtaaat

SEQ ID NO: 397945 - DNA, 697 bp, Cannabis indica
ccaaaggctacaagttgtacaatactagccaaattatcatcagtcgcgacgtaaagtttgatgaagaagattcttagaatcgaaaaacaaaagaagatgagtatgattttcgtccttactttgaagaggaagatgtagcggagcaaccaaggatgtaagaagaattttaagaacctactactctaccaatctcgctaactggaaatatataagaagattcaagtgagagcttaaatgaaaagacgccacgttttagaagcttgcaagaactttacgaggaaactgagaatcaaaatgatatttcccttatgtgtctatttggtgattgtgaacctttaaactaccaagatgcagtaagaagcaagaaatggatgcgatggatgaaaaaaatcgattcaattacaaaaaatgacacatgggagccagctattcttccacaaagatataatccaattaaagtaaaatgggtgtacaaggaaaagaagaatgctaaaggtgaggtggagagatataaagcaagattggtggaaaaaggctatagtcaaagggaaggcatcgactatgatgaggtatttcctccagttgctcgtcttgaaactattagactaataatttctttagcagaccaaaatagatggaagatccaccaaatggatgtaaagtctgcgttcttaaatggtttcctcgaggaagaagt

SEQ ID NO: 397946 - DNA, 908 bp, Cannabis indica
ctagaagtaatctggtggttgccaatgcctggaattcggtcacccaccattgggctcctgctagaatatacaagaaggttggtgccacctgggtggccctcctcaattggaatagatcccaatttgggaaattggatgtgaccattaaagctcttgaatagaagctcaactcccttcaaagtctccctgctggctcccgggactggaatcaggagcgagaagttcgtcaagagttgaatgaatctctggaaagaaaggccatttactggaggcaacgagccagagtatcttggctcaaggaaggtgacaaatgttctaagtttttcttcctatcggctgcgattaaaggaagaagaaatgccattgagagtattttaaacaaagataatgtctggatctctggcagaagggctattgggggtgaatttatagagtattttaaaggtattttttgccggggttgacaatgatgttgagtacaattgtgcccagttatttcaagagagaatttctcttgaggattcggaggctctggtttgctgcccgagtcatgatgaaatcaaaagagttctatttgccatgaataaccataaggccccgggccctgatggaatgtccgttctgttcttcaaacactattgggagtcagttggacaagacttctgtgatgcggttctagatttctttgtcactggcaaaatgcataggggaattaatgccacaaatgttgtgctcatcccgaaggtccaaaatccgactagaacctctcaatttagacctatttctctatgcaatgtggtttataaggttatatccaaaattattgctaacagaataaaacccctgcttcccactcttatttgtccgactcaagctgcctttgttcctggaagaaatatccacgataa

SEQ ID NO: 397947 - DNA, 822 bp, Cannabis indica
aggaaaattaaagaaaaactaaaaatagagaaccctctctctttctctttcggctgaagcaaactagggggatttcgtcttcaaatctggtgttttttgaatattaagcaaggtctttgtgaatataaagcaatggtaaaaccctagaacctttatttatgtgtttttaaagctttgagtaagtttgagtatgtgattttgataattgagagctgttagggtttggttgctgtgtaattcgaattctagggttaattttgattgattttaagttttgaatgctggtgtagtggtattgggttggatttgctcaagtttgagcttagaaactcaaagcttaggtctctaatggcatgttgtgtttcattgagattttctgtgaattactggttggaaaatattgtttatgcattgtttaggtgttctggaaaatttggttgcatttggtgcggttttgagcaagaaatggaattttttgggtgaactggtgcaaaccgggtaaccggttttaccaataccagtaaaaccggttagccagtttttgcagggttcctcgaatgttccattttctcaattctcgtgcattttagtgccttagttagggatttccctatttcctgagttggagtaatccctagagagtataaccgaacctagagtagtgggttcgggtttcccggattagggtttttgatcatgtaattgacccagttttgttatgtgattagggcatccacttcgcacaagactttccgttcaggtcggccagcacacttgaatctggaaagaaggtaagaaatgtgtataaggtataataggaat

SEQ ID NO: 397948 - DNA, 526 bp, Cannabis indica
aaatgcttcagagaggcatcaggaaagttagagatggaatgcctgatcttcaaaacaaggctggaaagagccgattgatccttccatgtcccattaactttggagagaaggttgagacagtcagtgaaaattaaatccggcttcagctgagaagagacacaccaggagacaccttccaatagggcttgaccttccgcaaaaatgagggtggatgctcctggtttatgggccattgatgaagccatgatttgattcaggcctatcttaaaaacaaaaccaaaacctgtgacacaattatcatgatccaatgttgcatctacatacagagctgggttatcatcctgaattatgccagttgttgtggagatagaagaagaactctgctagcgcgaatttgatgctgaaacagctgcagtgtgaattttttgggcctccttatactcctgcaaataatttaagacaaactcttccacattgtaagaaacacaagacttttgaaacagtaaagagtttatggtattccaga

SEQ ID NO: 397949 - DNA, 884 bp, Cannabis indica
aaaagggaggaagagagagagagtcaatttaaaaatgaggaggtaaaagtgggtttaggtaaaagtttcccattttcctgttttacaaattatgtatagttttagattaggatactaattttagtctctaatatgcatataatttcaaatttcccaattttattttaaaataaatcatatatatttaatttatttatttgatgactcaacacacattttatatgtacaattgtgactctaataaatttctaacattaaaaatatttattagaaaaaacagaataaacataattttatgtataattatattgtttaattttaaatttataaaataacagtgtatactgattaatattgtcattaattcatttaattgacaagtgatactgatgtgatttattttattgaaacaatagttcagagagagtatgaaatgaattggtaattaaaataaaataaaaagtaggtatttgtcacattccttaaaacgaactgatgacgacgttattatttgcatcattagagtgttgactatatctatatattaacaccgtaatctattctattgtgtttgttttcaaaacttcagttcttataacccaatgattccatttggcaattgggtttcttcaaaatattgtgcaatatatttacagaaattattcctgttgactcatcttagtcggccgttttaaggtgtataattcaaaattcctgttgaatatttttttttatttctttccgccatagcatttttgatatctttcatttaagtttagttatttttgttatttttttttggtaaggatctcccatttaagtttagttatttttgttatttttttttgggtaaggatctcccatttaagtttagtttttttttt

SEQ ID NO: 397950 - DNA, 585 bp, Cannabis indica
atccactacatctcttttcattctgtaccaccaatagtagggcttttaatcttgatacatcttggtggtacccagatgcaatgagtaaggggtagtgtgtgcttcattcagaatttctttcttaagcttatgatcacttgggacacacacccgagtcttaaacaatagcattccattgttcgaaattgagaagtctttatttgcctgctaagacatcttctcgacttttaaccaactcagggtcttctagttgtgctactctgatcctttccaacaagtctgactaaagtgtcaggttatgtaattctccaattacaaattcaatattttccctagacatatccgaggctaactgaggagaaatcattactacattgaaagtcgggttgggccccttccgactcaaggcatctgctacgatatttgctttcccgaggtgatacaaaatttcacagtcatagtctttaaccaattctaaccatcgcctttgcctcatgtttagatccttatgagtgaaaaagtacttgtgatttttgtggtcagtatagatttcacaccattcaccatataagtagtgtcgccaaa

SEQ ID NO: 397951 - DNA, 856 bp, Cannabis indica
gcacacgaattttttcgaaaaaaataaatgaagtttttaaatcatgctatctacctacttttaaattaactcatattaagcaaattgactcaaaacaataaaaactaaaattaaaaactaaaaaaaacatgttaaagctagcaaaataaaaagttaagtttacccccaaactaaagtgacacactgtccccaatgtgacattaaagaaaaaggaaaggaaacttacctgagcgccacatcaacaagcgattgacccccataataagcatcatgcaagacaacttaaaaattattgttatacttgccttcaagcttggcaagcgacgagtttggaccaaagtcagcaccaacaacataagactttagatgatgagcttgaagcctttcgtagctcgtagagaatataatacagtgttgatgaaatatatggatccattggcggtttattagtcaatatcattaatgaagtcgaatcaatgatgccatgtgcttcctcatcctccaatctcacagtatctacactttcatctaacaacccttctttttgttgctcactctccacttggctatccataccctcgcttgtgatttcatattcgatgagaacctgatcatggatgaattcattctcttccatgatttcattcactacacgacattcattatctatgaagtcagaatcttatgtagtcaaattttgagttaataccacttcaaaaggatctcgatcttcaattgtaggctcattatcttccttgtattcaactaatgacccttcttcattataccaataactctcataactttcattattggagtttgttaggtccttttttggcaatttagttgtcaaaat

SEQ ID NO: 397952 - DNA, 1170 bp, Cannabis indica
ttcgggttcgggtttccgatcctagtctaggtccaaatctgggttctagtcacgagttcaagtccagatccaggtccgggtctgagtgtcgggttccgatctgggtctgggttcggagacccgggtccatgtttgggtttgggtcctactaccaattccgatttcgattccatttctgggttcgggtttgggtccagatctaggtcgaggtctgagggctggtccaagtccagggttgggtctgggtccaagtcctgatccctgtcagggttttggtttgggttcggccctggtttttgggtctggtttttgcttcaggtccaggtcctggtttgggtccaggtcccggtcttggtttaggtcctaggacaaaggtcctggtctgggaacaagtctcggtatgggttctggcctgagtttgggtttaggtttgggtcctgttacagtcccatgtccgagttctagtcccaatcctggtccgatcacagtccgggtatgggttctagtccagtttcgtatctagatccatgtcaaggtccgagtctgggtctaagatcgggtcctagcttcaggtctgacccgaaatcggacccggaaccgaaatcggaccaagactggcacaagaacccagacatgggactatagcaggacccaaacctaaacccaaactcaaactagaacccataccgagacttggacttggacccagaccgggacctgtgtcctgggacataatccaagaccggaacctggacccaaacccgaagccaaaactagacacaaaaactggggccgaacccaggacccaagaaccatactcggacgttggacccgaaacccggacccagactgggactgggacccaaactcggacccgaacccaaatcgagaccaggactcagatcggtcccgaacttgaaccggaacacgaactttgacccagatcgggacctaggatccaaataaagatgggggacccagagctgggaatcgggcccacgaactaggacaagaacttgggcctcagatcttggatcgggatccgggactcgaccccagacccaaaccttgacttaggatccacctaggtgttggaacttattttaccaggatcttagatctactcactagaatggggaccatggatctatatgctgagcttccaataag

SEQ ID NO: 397953 - DNA, 1035 bp, Cannabis indica
aattgctcttgagttttcttcatgataattcgtggtccagggtgattgagagtatgcctactcatgtcaaaacagtacctagcatagtgtgaaaattgtgcctaaagaaattgaaggagagaagatccaggttcagatcttataatgctctgcgacagaaagaaataaagagttagagatctaaatggaatgagtcattattatttcgctgccatcaatgtaagaatttcataatctcttatgtgtttatttcactgttttaaaaaatttatatttaaagtgttagattatagaattataattaaatatacatattatttaatttaaatcctaataaaataacttctaacaactgattctttaaaaatactaattttacacatatacacactataattaataaaaaaatatattttttaagggggcagccatccactattggctctatgtatgtaagtccacctcttatttattacataataatataagtcaattacaaatataatattatatcaaagtaattcgtaatacatacaacataacaaatgtctctttagtatagttcactataattatgaacaatcaacgatgacaaaaaacataagtgaaaaataataggtgtagctaagtaattttcaagctaagaggagttggaacagagtcccaactgctcctttcaaataaagaaaattttaaaatatgaagagttggtgccaaaattctactcaaagagatggtttatactgtgactatacatctgttctattccttaaatgattttatatattattatctgtttaatctctctcctcatttgaatgcttgtttattttattttattctttattactttttttcctaatatttaataattaaattatttaaatgtaatttctaaattaaataaataataaaatagaaaaaataatgtataatgtattataaaagtctaaggtaaaaaaatattatttggtaatatattttgaagaatatagttgagacactaccaagagaattctacatacggtcttgtag

SEQ ID NO: 397954 - DNA, 738 bp, Cannabis indica
acgagtgacccgttgctgaacagtagtactaaaaagttcaagcaagatgggcaaatgatcggatgtcgatatctcaaagattgtaaagtttagccgaactaaacatttgcaaccaagcaacatccgctaagatgggtcttcaacaagttttgttgtgactaaaagtaaaattttttgtagtgaaattttatttaattaattattcttgcacattttttctcgaattaatttgtttcatttttcttcaatactaaacctaaaaacattaacaatcaaaaagtgtaaaattacacaaaatacatttgaacataattaaaatatttgtaggaatttttaagtttttccaattttaccctacaccaacattaagtaattagtatttaaccaaggtcagtttcaacctttccttctctctgacttttcaaagtcagcagagtaaaaaacgactccgttttggctttgaacaaaactaaaagaatctagacacttctcgatcacttccctcagccctaggtttagattcgaaaccctagcagagagtttctctctgagaaactcgaacccaaaccatagcaaacccagaaatcccaacacaaacacaaaaccaagatcagatctagaatgatctgatctatacacaatcacacacacaaaatcacaaagagtagggttagaatacaccagattttcccgaagttcaccaataaattggctacgtctccgtttgagctgctcctc

SEQ ID NO: 397955 - DNA, 543 bp, Cannabis indica
tgttgtcacttgtaactcttgtattggtcagacattattagtgtaacaaaaggattgttacacaatttgatgataggattcaaatgttatgaaatatagttgttacaaattatattaatactcatttatatgagaaaaatgaggtgtgtattttgaattctaagtgtgatcacataaacattataaaaggaggtctttggtgctcatttgagagaactattttccatcaaaaaagcacattgctagaaaatcctaaggcttgataattcccaaaggtatttcttagagagttcccttagtgtttagagacaggagaaataagcttttggacaaaagtataataccttgttcaagtcatagtgatccccactaatctatcctcaaggtagtaagtgagtgtatatacatatatattcttctgttgttatatatatatatgtattatattacatgtgttgtattctttttcttactacctttcatataatatgtaatatacatatatagtgtatatatgtgtattataacatctatgtaatcaat

SEQ ID NO: 397956 - DNA, 945 bp, Cannabis indica
cttgtttgagtcagggtcttccattgcttctttctaagtcaatggattatccttgtttgtgtcagagataagaacatgtgcttcatgttcatagcagacatgttgtctcataatcctcccactacaatgttttactggggtatccttttcaggaactgtggcaatcgttgtcggtcgttcaactaatggtgctgaaattggtggttcagatatctgctcatttctgattacctagataaccacttgactatgtggtttgtgacttttcatatagtcttgttcaagaaaagtagcaattttctatacaaatactttgttgtcttgagcacctcgagtttcatctgaatatcctacaaacctaggagcaagtttcccagtcttaggtttgagaacatgagcaggacaaccccagatacgaaattatttcaatttgggttttgtcccattccataatttcattggggtattgcttatgctcttcaagggtactacattcaaattgtagatagtcgctaaaagtgtgtatcctcaaaagtttagtggcagtgataagtaacacatcatcgatctgaacatgtctaacaaggtccaatttcttctctctgcaacaccgttttactgaggtgttccaggtatcgtaagttgggacaagattccttcttccaacaagtagtctttgaatttgcaatccaaatactcactaccacggtctgatcaaagtgtctttaatgatttacctaatttctttctaacaatagctttaaagtctttgaactttctgaaagttttagacttcttggccattaggtaagtatgactgtatcttgaataattgtcaataaaagggacgaagtatttataaccacctcgagcttgatatgaatagggttgcactcatcaatgtgaatcagctcaagttgttctttggctctattgccttttgca

SEQ ID NO: 397957 - DNA, 1241 bp, Cannabis indica
ggagttgcattagaggaacgagttgactcactgagttgaagagcattgggaattagtcttttttttttttaaataagtgttattcttttgatctataatttaataataataatcatttttgtcttgtcgttttgacatgtctggtatgtgatttttttgctgttgagtggtgtgtgatttttgcaagttatgagttagttgtgttggaattgccgtgggcttgggaatctcgagttgttcaattccttaaagaaatagttttcaaaagagacccaatttaattttttttgtgtgagacaatttgcaagaaagacaaagttgattgtgttagagctttgttgggctatgatggaagttttgttgttgaggcccgtggacatagtggggggcttgcaatgttgtggaaaaatcaagatgatggcaaacttcttagctttagtaataatcacattgatttggagttgaagcttgacggataccctttgtttcgtgcgactggcttctatggtgaacctcagaggagtttgcgtgggaattcttggagacttattcggcagcttgcgggggaatcgactcttccttggtgtttaatgggagatttgaataatgtccttcatcatagtgacaagagaggcggttgaccttatccaagctctttaattcagggattttaagatgtggtttcaaattgcagtctaattgatatggagttggtgggctatcctttcatttgggagaaagggaggggtacggaggcatggattgaattccgtttggatagagctctcgtcacgcatggttggaatgatctttttccggatgcaaggttagaaaatttagaaaaacctgcttctgatcattgtcctattttgttgaatcttaattatttagaaaagtggttagtttgaagaaatttcggtttgaaaatgcttgggtgcgtgagcctatgtgtcgccgaattgtcatgataattgggatgttcacaagtcgaattctttgagctcaaaaatcaaatgttgtagtactgctttagccgaatgggggaaggatatcactggtaatttcaagtagcaaataaatagttgtcataaaatcctgaagcttttgaaaaatagaagggatgttgattcggttaacaggtacaaggaggctcaaaatcgtttgttcgaagacctcgcccagaaggaggtcttctggaagcagagatccaaacaattgtggctgcaatctggtgaccaaaa

SEQ ID NO: 397958 - DNA, 936 bp, Cannabis indica
gtttatcagtccattgtggaccttggtccgaaagtaaatgattgtcatagggaaattttactagcagagtacacggctaaagaagtggaatcagctatgttttcaattgacaaagataaagcacctggtccggacgggtttgggagtgcattttttcaagataattgggagttggtgaaatctgatcttgtagaagcagttatctcttttttatcatctgggaagatcttaaaagagataaatactactacaatcaccttaattcccaagtctaattgccctaaaagtgtggtagatttcaggccaatttcatgctgtaatgtggtgtataaagtggcaaccaaggtcatctgtaatagattgaggagggttcttcctgatctcattgcagagaaccaaggagggtttgtgcatggcagatttattgctcacaatgtgctggtatgtcaagacttggtgagattttatgggaggaataattgcaaacctagttgtatgatcaaaattgatttgaggaaggcatatgatactatagaatggagtttcttgcatgagatgatggatgctctaggatttcctagtaagttcaccaagctcattatggaatgcatatccactgctaagttctccctattgctgaatggctctatgtgtggattctttaatgcaaagagagggctgagacaaggagacccgatgtctcccctcctttttgtgttaggaatggaatatctatccaggatattcaccaaggttgggactcggacagggttcaaatttcatgataggtgtgcatctctcaaattgaaccatatgtgttttgttgatgacttgttagttttctgtcatggagactatatatctgttttgctactgcttcaaggactgaaattgttctcagcttcatctggcttgcaaccaaatgagcagaagaca

SEQ ID NO: 397959 - DNA, 633 bp, Cannabis indica
cccacaaccgatcactggggtgcttgtaaacgcatccttcgttacttggccggcacttccaacactggtttatcctttactgcctcccccactttcagtcttcaaggatattcagatgcggactgggctggctgtagcgacgacagaaaatccacatcaggctattgcatgttcttaggctcgaatctaataagctggtgctccaaaaagcaatcggttgtagctcgctccagtactgagtccgaatatagagctcttgctcttgccacatctgagttaatttggttggaatccattctccaagaactgtccattggtactgccacaactcctattctatggtgtgataatttaggagctggctcattggcttccaaccccgtttaccacgcccgcacaaaacatatcgagatagatgtgcattttgtccgaaatagagtgctggaaaataagcttgaagttcgatatgtggactcaacctatcaagttgctgatattcttacaaaacctcttcacaatcctcaattcacttttctaagggacaagttaacactcaagtcaaatgagtgtaacttgaggggggatgttagagatataaaacagagttagttataactgtattagttttctgtt

SEQ ID NO: 397960 - DNA, 1097 bp, Cannabis indica
taaacataaaaataaatttgcgaagttaacatcaaaacgtgaacaaatcaactcgcagatttggaagacgcatacgttcatgaacttagtaactgccgttcatttattaatgttaacgttgtttagtttaattattgtaattcaatgtgtaaaaacgaattgacaataaatgcaatccttgtataactgatcggacaactgctttgtatataaaggggtgatccaccgtgaaatggcaactacgaaactcttgctacggtggactaagcagaccgtgatctgactaaaccactataattctttgtctcattgttatttccagctttctattaatcatttctcattcctagtgtgagtactcgccactctaggttgaatactcgcacttgttcttcatagtcatttctttctgctattaataatatcatataaaattggtgttgccaaattcttgcgacaacatttggcgccgtctgtgggaaccgagaattaaaatattattcatttcaagtaagaataccatcatggctggaaaccaaacaaacggaggtgctaacaacgggtccatcaacatcggaatgatgaacgtaccgttatccggagctagaacaccgcctgtggacgtcgttaatggtggagtagggaggagcaacatcagacctctcaacctgttccctgaaacaactgaccctcaagtcggggacacgtccacaccaccagcaaccatgcactttccccctgtcactccggcggtggtatctgagggaatcatccagctcaccactgatcaatatactgcgatccaggaccaactgcgtgcactacaggccgaagtggatggacaaaccgggcccgacgccccctcgagtccctactactcgcacggacaaccctcaggtaacaaattctagacgtcgtaataaccgtgttcgcagggaacgaagagccaaccctgagggtctggacctgaatcagccaacatcgagagaccaatccgtgagatatcctaaccaaggaacacaggctgatgaagatcctgagcgacgcaatccttgcagtcgaccatcgagagacaacgacgcagaatctgcctcttc

SEQ ID NO: 397961 - DNA, 816 bp, Cannabis indica
actcaaagctagatagggtcttttctaatgaggcttggatagactaattcccaaacactgaagccagctaccgttgggggacgatctcggaccatagctattgccttattaaaccgattgaggttgctatctatggtaacagaccgttcagattctgtaattactggatgctaagagaggggtacaaagagagagtgcttaaaagttggaaggatgccaaagactctaatctccaaaacattgtgaagaaactctacagagtgaaacatgccttaaaaagctggcataactcagagaatggggacttgaaaaccttgtatatggaggcaaaagaggagttcacaagagctcaagagcaacttgctggcatgaaagaagcgcatcaattaatggtggtcataacaaaagaaggcgagaagaaagaataggatctacaacctagaatccaagatgagaataaccagctaaaaccaattgaaaagatggaaaaagttattttagatctagaaaatcccactaaatgtgtgtttattgggaaaaatttggatgaaaaactaaaatagcagctaatcaactttttgaaggaaaaccaggatcaattttcttgcagccattcagacatgatagggatggaccctaaggtgatttgtcatcatttgaatgttgaccccaattacccagcaaaaagacaaaaacggtaacccttagactccgagagacgatgggcacataaagaagaggtagaaaaattattgacaaatgaatttatatgcaaggctttttatccttcatggatttcaaatcctgttctcgact

SEQ ID NO: 397962 - DNA, 1275 bp, Cannabis indica
gaggaagatatggatatgtgatcgaagtcatgaatgaggctttcttcctcagagagaggggtgagaaggttgggagtggtggaggaagaggccattgaataaagagtgagagatagggcagtaggtgaagtgagattggaagaggatggcgaacaaacatggcaaatcaagaataaatagagaaaaggaagaggagaagagcgaaggaaatacctggagatggatgggcgcgtcaggtgatgaagggagttgtgaaacatcgcttcgattcctgaaatggcaatctgcagaggcggaggggaaatgatgacccagaagtaaatgtttgagaagatagaaaggatggtttgggtagatttttgtgggatcacggagagatagagaagagggagggtctgatcgaacattaaatgcccaaaaaaaggagccgtcagaattaaatgcaactggagagagagattgcattaaatagatgctgagcacgtaagattcgggggttatttgcaatgattaaggttgacatggggaagatcagggaggaattaatgctaggagtgtcggagaactgagagaaatggatggaggaaacacagaaatggaagctcacttactgaaccagagaccaggcctggaaaaaaccttcaaggagaagagatactatggggtctatgcatatttgaattgggagaaaaacaatgataagtgttccacttggagttgttctttgatttacatccaatttcatttctcttatattctactgacattactttgtttttttgttctttttagtattcacctttccaattttgtgtatatcagtatcaatgctaataaaagatcacatacagtgtaaatgttgatttttccgtcttcaagtattattgtaatttttataactttctaagtatacttgtaacaaaaatattggattttaagttaaagtttacaattttactgtcacacagaatttttacaaaaatactatttttttataaaacaacaaaacagaacaattaaaaataatagtagaacaactaaaaaataactgtaaaacaatagtgaaaacttaatacattacacagtatgaaacttatacagtatttttagaaaaaaatacagtatttttgaaaaaaattccgtcccacaataaaaaaagaaaaaaagtttgaaatttcagtatgtgatataaaaacccgggtaaatagtggcttaagtacccaaagttttaagtttgtaagtggcataatcctaatgtttatttttagtagcata

SEQ ID NO: 397963 - DNA, 555 bp, Cannabis indica
aaaaataaaataaataaaacaatgatcaaaaaccaaataaggacacattttgaaaaaattagaaagaacacacaccaaaacactaaacacaacctaaaatctcaaccgatcatcacaaaaacaacaataaaccctaaaaacccaaccgatcatggaaaaacatcaagaaaaaaaacacaaacatcacactgcagaattataatcactaaactaaagacattataacaaaaattatgaacaactgatcacatacctcacttaaccaagcaactgagctcaaaaatcaataaaaacaaagaacccgaacacacggtagctgaaatcgaagcttgcttcgatcgacaatggcttcccacacacaccgacgaagaagaaaaaaaaagaagaggaagaaaatgcaaaccctaagctcagataatgctcaaacggactggaaaatgagagagaaaatggttgagcaaaaaatgagtttgattgaagaaaataaaatggcagtaggatgcaatgagtagtaagctactccatgcaaaaaggaagctataatagctatagctt

SEQ ID NO: 397964 - DNA, 1037 bp, Cannabis indica
tatcaggtatgggacctagaccccgattaggacaaagacctgaaccaggactaggactagaacctggactaggaataggatcgagactcaagagctgggaccgagatcgagacctgggaccgggaccgagaccgggaccgggaccgggaccgggaccgagaccgggaccaggacccgggacccgggacccgatacttagaccttagacctgagaaccgaattgtgacccaaacctagaccaagccaagacccaagacaaggaccagtaccgaacacggaccgggacctgcactcagactgggaccctaacccagactgggaccttggaccctgacttgaatcggggacctggacccatgactcacgacccaagacccaaacctagacgcaaacctccacctgacactcgaaccatgaccaaagacatgagctagaactggactaggatctggattttggcccgtgacccaggacacaagacacgaggcttggacctgacccataatcggtgtgtaaatcagggaatcgaacctggaccaagatccagacccggaccagaacccaaatccgtaccagaactcaaactagactaaacatgaggtgggtgtttggatttgtgaccaagactcggacctgaacccaaacacggacctagacccagataaggactcggacccagacccactcccaaaccttaaatcataccatgtgacccgaaattgaagccgagactaaacccaaaaccctaaatccctaaacactaaacccaaaaccctaaatcctaaaccctaacctggacaagggtttagacccatacccataccgagattggatcccaggccccaaacccagacccagatacagacccgaacctagacctagactgaggacctaaacccagattagaacctggtctgggacctagactttgattaggacccagatcaggatctagacccgatattgaaaacagactaggactcatcagaccgggacccggacccacactaaaacctgaacccatactaggacctcga

SEQ ID NO: 397965 - DNA, 543 bp, Cannabis indica
tttttatcatagtatgattaccatcatatactacttgttagggtataatacttgtactcaacactcaaaaaaaataattttgttatgagtagaacatttttcttaaggtataggatcgtagaataagcgtgcttaactcattctctactcgttaccatctctgtattataagtttttactcaatattttaagaaagattatcacaataaaaaaaggtttatttttttcaattttaaccaaaataataataataatattataaaaatactttcagttgaccaaataaataaatttacaactcaaataaaaaaattacacaaataccacttacacacaccttcaacacatgattcatctttcttgggcaaccatcaggcaaccacacagcaactcaatgcaatcgaaacgaaaattcaaccagaaagagaaccaccattaattttggcaacttcacctgagaagacgactagaatcaatcaaaacatggactgtttcgaattcatgaaaaaaaaaagtgtagaaaaactactacaaaattaaaat

SEQ ID NO: 397966 - DNA, 579 bp, Cannabis indica
agagagagagagagaataaaaactgtacaaggctatgccttaaaatgaattgaacactaactatttatactaacagaactaaaggattgacttaaatttgatcacaccctccatcctaaagtgaaacctaaagaggacaagacaataacaaatctcatcaacagtaaagaagaaaagataaaagagactaaagtaaccaaatattgttctaagtaaattccttcagttagtaattgcccttaaaacattatttttaagactattagaaattacaattgctcacaaaatgaaaattataataaatttatctacactactaatcttgtgcagggccagctctaagctaagacgaaggaagcggctgccttaagcccccaccactcagggccccatttcgaaaaaaaaaatagttagtaataaaataaataataataatacttttaatgctaaatatgtattgtagcctagtgataatttgattagtttaacagagttcaaatcccaatagtcttatttttttattggccccaatttttattttgggaaatttacatagattactaacttttctcattttct

SEQ ID NO: 397967 - DNA, 770 bp, Cannabis indica
attctccaactcgataattggcacaaatcttgtgggatcataggcaccttcattatcatattccataggttaggcaccccccagattgggttcttcatctccttcttatgggttctggccattctcatgctgagtcctccttgaacgtgtggaccgtgtacttgggactttttaggttgggtccttctggaacgagtggtccgtgtagatcgtgaattgggaggcctccgtgagcccattggctcctttctaggacggtgagtggtctcttcaggatgagtatcaacgttttctccgttatcaaccatggagaaagagttttcttttgatcaggagggttttgttctaagattttttcacgtaggctcttaatgaaagcactaagctgttaacagttattcgttaacgatattaaagcctatttcgtgattgatttgcacagaaataataatagtaaaagaagaagaaataacataaagttttttttacgtggttttgcagttaaaattctggatagtccacgagtctatcttattagatttctctgatataaaattagggttctatctctaaaggatttttcgtctatttttcagtgtatcctacccctatttatagttacataggaaggcagttaattacaatcaaattaatatcccacaataataattccctgaaattgtgggatttgatttcatcccacgtaaaataaatgcggttattattaggggtgtacgtcggtcagtttagtcgggttatagcatattttt

SEQ ID NO: 397968 - DNA, 911 bp, Cannabis indica
aagaaagcattgggcctcgattgtttggagtagattgaacataccccgacatagttttttcttgtggctagctgtccaaaataagctaaaaacaagtgaaagactatgtaagattaatgtcatactagatgatgattgtttgctatgcaggaatgacaaagaggagctggaacatctttttttctactgcaatatagcagcaggatgttggcagcagctaaaaactagaatgcactggcagatctgttctggttcgcttcaacagatcgtaagatggctgcaacgacacaaagcaaatggtttcaagaaaagagtttatgctgctgcagttgcaactttagtatacaacatttggtaagcccaaaatggagttctttgggaaggaaaaagtgtgcaagttgatcaaatagtgagtaaaacaaaaatagatattttgtatagaaataaaattatttggcctaaaaaagttagtgacaaaaataggtcatggtttgagaagttggaaagaaatacacatatgcatatttgttgacgtatagattatttttcaagtctcgttagagatgctgttaagttgtaattggttgttttggagtaatgataatcttgctgattcatcaaaagaaaaaaatagtcatataaacaagataaatattgacttatcattgagtcaaatgttaaaacaattaaatgtgaggaattttcaaaatgatgaatcccaattttatgaagcttgtcaatttggaaagtttcattcctttccttttagaccaaagaataaaaaaactcaatttcctcttgaactcattcatattgacattctgaacctaataatgtcaaacttaaatttttgattctatattaatgttatagatgattatagtagatacacatggctctaccctttaaaa

SEQ ID NO: 397969 - DNA, 515 bp, Cannabis indica
gcacaaatgtccatagaagctgctggtctaagaaagagaccgagagagagagtgccctttagatatcgaaaaaggcgcttacaagcttcccagtggttgacagttggtgcatgaataaactgactcagtttatttatgataaaagcaacatcaggccgagtgagtgtgagatattggagagcaccaagagtgcttctataaagagttatgtcatgaaacgggtctacatcggccaaagataacttttgagtagaactagttggattgggacaacttttagcaccatcaagctgaagtcgaacaagcaaatcaattacatacttgctttgagaaagatacatccctgtagcatctcgaaaaatctcaatgccaagaaaatagtgaatagggccgaggtctttcaaggcaaaagaggtgttcaaatcagcaatcagttttgaaatgagactagaattaggaccagtaaccagtatgtcatctacatacacaaggaggataatcaggtttgcatcaga

SEQ ID NO: 397970 - DNA, 697 bp, Cannabis indica
acctaccggagatacaagtgaggtgtcgacaaggttgagatctgagcatcaacgacatctgggcatcaacgacatctgggcatctcgatctaagaagcttgagtgttggggttgcaatcgcacaagaggacgacgatgatgtttctgtgcactcaagaaaatcgcaggcttctaggttatttttttttaccttttttattttctttttcaagatattatagatgaggattggtttttttcttcaattttgggatattcgagtagagttttttttgttggattggttagattagttttctcttagtgagaatgtttttgagctttaagtgggtgaatggttttggcccttttgggtgagaaatttttggttgaaattttttttaggtttgggatgcctctgttaagaacacaatggagaagacgatggtgagggagatgaagatttaggtttataattaaaataatttgcggcataaatacctaagtttatcattcggttgtagtttaatacctaagttaaaattttggcggcataaataccttccgttacacttttagatattctgtaagtaccttgctgttatcttgcacactggacaacaggtggcatgccacatcatttaaaataatacaacatcatattataaaattgccacctaatattaactattaaaataaaaaatttaaatttgattta

SEQ ID NO: 397971 - DNA, 881 bp, Cannabis indica
gagtagcttagtactcattgcttcttacagccattgcattttcttcaatcaatcacacattttgttaattcaacttcattttcgtttgatttttctctcagctactattcactttttttattgagtctctgtgattcacgggtgctttatagtgtaggtaaggggaaagcaaaggttgagcagccatgagttcgtggtcgtagcagcaatgtacatattagacgcagtcacgacccaatgaacaggatgctctattttgattgtattttgggaatgcatgtttatgttgcaaagcactattaaactagtttgtaaccattttgaaaacaagggaccccatagttaatattacttatcttttattataaagaagtttttatatgtctgattttagttatcaaaaatttaattacccacacttttggtataattatatagtatataaataagaatttaataaaaacacacacacacacgtggcgtccctgttggacttggcgttacactggtggttgatggaagggataccaatatttggggggacccttggatctctcattgtaaagacttcttcccgaagcctattgattccactgacactggtttgagaaaagttagcgttcttctgttaaatagtggtgattggggtatccacaagttaacagtctgtttgataaagagactgtctctgcaatcttaaaagggggcagtccctttggccagggtaaagataggtgggtctggacacttgaaaataatggtcggttctcgtgcaaatcagcctaccttgcccatgctttggatagggctcctcagtgtgaggtagctccttcgctctggaacaagctgtggaatagtaaaatcttggagcgtcataaggt

SEQ ID NO: 397972 - DNA, 642 bp, Cannabis indica
tatggattgtaaaatcgcatgaagcaatgacaaaaaagaatcacagagtttctaaacctagggattccaacatattttctacaacaaagtcgaaggtgaattcaaaaagtaaacatgcgaaaataagcataaaagaaattgggaacttactcaagagtcagatgtttggattcaagcaacgtcaagccaacgagtagtttcggtgaaggcacttcagcaaacttgaagccaaaaaaacctctatttttgctctgaactcacttagcaaagaaggatggtaaaaatgagtttatgtgccaatgcttgttgatatttataggcaagtcatgaaaagaggtaatcatttcaaaagaacctcagatgcctcggttcacccctaaaagtgaatatgggaaatcaaaaataatcaagtgcagccgtcaaccatggtgagagaaaattagatttcaaaatattaattgtcatagcttttattagctgaaaaccaaagggacgcccaatcagcctcacatcaagtctcagacagactcgctcgacaggtttccacatccaaaggcagaagcagctcggatgaagtctacacgcaactttggaagtcgcgtatagacttggggggcaaatgttatctcaatttttgcactc

SEQ ID NO: 397973 - DNA, 404 bp, Cannabis indica
atcggaccccccccccatcggacccccccatcgaacccgtcgggcccaacccaatattttttcccaactcgcaagcatcagaccccccattggggtgcccatcggaccccatcgggccatcgtcttccccaaactgcaattttcccaaatcccagatctgaacctaaaatcgaacctaaatctaacaaaactcaaggtgcacacataaacacatacattatacattataaccctaaaatcaatacctatcaatactccaaaacatatatcacaaaaaaaaaatgacaaaaaaagggggccggcggtgggagatcggttttggtttgggagggggccggcattgtggacagtggtgaggggccggcgttgtggacggtggtgaggggccagcgttgtggacagtg

SEQ ID NO: 397974 - DNA, 584 bp, Cannabis indica
ttttttttttttttttcttctatggcgtttttgcattctgggtgtcgtttctatggttcatttttctcattcttctttgttttgggattttgaagggactttgatgactgcaagtgcacatattataacagctgttattgggtctggagtgctttctttggcttgggcagttgctcagttgggatggattgcaggcactttggctcttattatgttctctgtaataactttatttacttctagtcttttggctaatttttacaggttcccagatccaattactggaacaagaaactatacttacatgcaggctgttgaaacatacttaggtatacatcctaatatcacatcccttctttctctttttcttcaaagattaaccttgtgtttctttctttcttttctttatttatttatttattttttttgactcatttgttattagttttccttatggatttcagtatttatattactggtttgcaatttgattttgagaaagaaaaaacagtttgattttgagaaagaaaaaaggatcttttcagtttgattttgagaataaaaaaaaggaaggggagggaggg

SEQ ID NO: 397975 - DNA, 1598 bp, Cannabis indica
tagtatcataagtttgagattatttgaacctatggcctgtggtatgcttggtaacttacttactcctatgcaagcaacttacttttgtaagattttagagaatttttcaatggctaactctataggaagtcattcaactcctaggcatggagtttatctaaagaacagtttcaactattctaggaaaaacaaaatctaaggaaataatttcttaagcgtcaacagtgagaggtctcatgtatactctggtatacattaaactagacacatgttgttgagtgagagttatgagtatgtatcagtttaatccaggaaaagaatattggaagacaatcaaataaatcttaagattaaaggaggacatatatgttagtctataagggcaaagtttttgaaaccctttacactacactaactcagatttctagatttgcattaatgctagaaagtctaaatctgggatggtgcttactttggggatggaacagtgatttttggagaagtgtaaaaacctatccaaagtctctacctctaccagtgagactgaatattaaagtggccctaaaggctactggataattattcagcctaaggaaagttctatacagcctttgacattattctaatcatggattaactactagtgttacttcctaataatacaaagttgccaaacagtaaagaatctaataccctaagaggagtaaacatatagatatgaatttcacaatatcaaggattttgtgactaatgagatgaattgtggaaaaggttaatactaatacaacttgtcaaatcttactaaaaagatagtatgcactactacaaaaatgagttttctcaacgtttttaaacagtcgtttaaagtattcccgtcggtttctataatcgtcgcctatacgactgtcgtaaaatgagcaaaataggcgacagttcaaaaccgtcgataatgtggatttcccgacgatttaaatcgtcgcctatagctgtgtataggcgacgatttaaacctttgcttatagtatagggcacgattataaattgtcacctatacccagttataggcgacggttttaaactgttaggaatgtaaaaaaaaaagataaaaaaaaatacagatttttctgccatttcccccatttttttcctgcattagttttataattttacctaaattaaaataaaataactaattaattttgttacaataacaactaactttagaacacattaaatttatataataataaaataaatatatataataaataaaaaagtatataaataaataaatgtatttataccgagctaggagagagagaaagagagaaagggagacggacgggaggtggtggtggtccaacgtatgagacgaagatgagagggacaccgacatgaggaggggtgggtggagatcgatggacaagagaaacaagaagaaatggagatagagaaagagagagggagggaggaagacggtgagagaggagggcgatggtgaggaggcgtgggtggggttttggagagttaagatttttatttagggtgtgtgaaatggagaagaaataggtaagaagaaataggtgggcatgtgggaa

SEQ ID NO: 397976 - DNA, 551 bp, Cannabis indica
ttaaaaatacctttgacaatattgaaaattgtaattatcgaaaacacttagaatcctagactattaggtaaatagtaatcttaagattacggtagattaaagtaaaacttaatttagtggccatctaaacagtaaacaagattaaaccaataatcatggcattgaacatagaagaatataagcaatttgatataatagaaactagaaattaacattcaataataaaattaagaattcatgtctcgggctttgaaataactcttaactaaaaggaaactacttagaactggacattataatgataatcataatacacagtaagatttaaggagaaaaaaaaactatgatgaagaacacttcgaagtcgcaatctccgtctcttccttgctatttctctaagcttctatctcaatttggtagctctagggttctcaaattcgtagcctaaaaaggtctatttatagtgcttgaaaagatagatgaatctccttagaattaggatttttttaagaaaaaagagataagtcagtgctatagcgcccatcagatat

SEQ ID NO: 397977 - DNA, 1130 bp, Cannabis indica
ttttctgggttatgatcatttatgtttctgttcttccccttagggattagtttaaggaattctgcaactacctcggggttgccccttctagctgaaccccatctcgtataggataattgcgtgcttgaaggtcctataccatattttaggatgggagtgccctactcctttggagatagcctatttttactggttcaaggtagtccttgcgaggaaaaatgctacaggaggcttttactatcttaggactcatactggcgatcgcaggatcatacttaggttgccaaacaagacagagtttaaagaagaattcttctggatgacgggcctctctccaataaatacaactgcctttcgcattatacgtaagttttctttcttagaaacttaactttgaaatgtaattatttgtatttttgacgtcgcttattaaacttttatctgttcacagcggttccccaaagaccaattcccactcctgagatagctgagcgtcacaaatcttgttgaatcttccgttcggtctgagatcggtagacttcttatgcaacgagattaatctgaggagtgttggccttcttgccttggatgaatttacttgtgactacaaagtacccaagtattcttcgtggcaaaaggtcccagttccaactaacgaagagagcgtggactatgtggctcgcgtacattatctcgagagaactgcccctcaagaagaaggagcatcctgaggtaatcaatgtgggtggtcacccacagtgcttagggcagaacgtaacaccctagtgtctttccgagatagtcgatacaatttttacacttggaatccctttcttatagatcgcataacacataggttcgatagttgatacccagaattacacgttcagattagctgtactagttcatactatgggattgccgagcagtatgggactatgttggatagatcggtagtacttttagaggtggtcactgatagtacttttagaggtgctccccattccaatatcttcgtaggagaactagctctatactcttattgtaccggccaagcttgtaggttctcttacttgttatctctataacttggtaggggccttcctattggggattatttaccaggatct

SEQ ID NO: 397978 - DNA, 850 bp, Cannabis indica
aagctctgttattttcttaaactacccacatataagatctagatttttgatcattgggtctagacagaaacatgtagtatcagttacttccaaatgttcctttaataaattcaaaatggagtttctactgacaaaactggaagaaaattacagttttacaaatattgggtacttatgcctctaaaaataaacattaggtttatgccgcttacaaacttaaaactttgggtacttatgccgctatttacctttttttttttaaatggtaaataccattttggaccttgtgttttaggaaactgattgtactctctatttctttaaatgaaaaaatagaccctgtattttctaaattagtataaataggatcatgagctcaattttcgacaatttttttaatataacaaacttgaagaaaattcctaacatgaacagatgtagaaaatgtatccagttttttcataacacatctagaccgggttattactaagttttattttaataaaaaaaaattcaattcagggtcttctttgtaccattttgtaaaatacagggtctgttttatcatttaacaaaatagaaggttcaatcgataacttttgcaaaacacatagtccaaatagtatttaccaaaaaaaaaaactatcatatttggtgcattaattttgcatgccatattattagaactttgctaaataggatttttaccccctaaactttaaaatgtaccaaatcatgccccttgaacttttatggtcgttaaaaattctccctgaattattgagattgttagatttaaggagttttgtttaatttcattcaattttactatttcagtgattgtttatgt

SEQ ID NO: 397979 - DNA, 1020 bp, Cannabis indica
aaataatgagctttaatcaaaaactcatccgatctccattgttgatcttacatggtcaattgtttcaatgtaacctcgagatgctagactttgtcccccttctggatggttatccatttaagcattaacaccgtaagatctcatatgttaagtattttgtaagtttttgtttttattagactctccactacggtgactacttagaaataaatttacaaagtatgaaacaacagtggaagttcataaaataagaataaccttaactctcgcctatcgagacaatgttgaattcttattttgatcgtataaaaggttgctagaatggtgtccattttagatgagctgactactctattcaaccaatgttatctttgaccctggcctacttggacattgtatttcattttgttgaaaaccttagcaaataattgaatatgttttatttttttttggtattcttgcaatcatattttctgtacttgttattttctgaatttctgtatgaatttatttgaaccaagtaatttatttctgtttattgatatttgtagtgtcaaaataatgtttagcaatcttcaccctaatcatcaattagtatatgcctttgcaaatgaactccaaagtgtgaagatgactcttggtcagagtaccacttcacacttgctcatgatgaagttgaaattacagaaagcaactatgctaggaattgtcttatcaagagagcaaagagttcaatttgttctcaacagcttatcacctgagtttaaccaatttattgtatcttttatgattaacaattggaacttgtttgacatagacaagttggacgatcaattgtgtgcttatgaaaagacattgtcacttgcaaggaggtccctctccagtactgcagataagggcaaaagaacttctaaagatatttagaaaaattcctctgacaatcctactactttaggctcagttgagaaaattagataaagtgcttccacttccttagattatctttcacaacaaattgaa

SEQ ID NO: 397980 - DNA, 1471 bp, Cannabis indica
attatgaagaagacccagccttaattataggcaatctggtgaaaggaggtaatcatttcaaaatgcctcagacgcttcgattccctcccaaaagcaaatataaagaaattaaaattaatcaagtgtaatcgtcaaagtgtgatgagaaaaactttgtttcgaggcactaaataagttagagcattaattagctgaaaaccgaagagatgcatattgagcttcgcattgaatcacgaacagatgcaccaaacacatgtcacccattcaaatgcaaaagcagcttggatgaggtctacacgcaacttcagaagtcatgtacagacttggcactctgatgcggcatcacatactggtgacacatggaatcgacttcccatatttgctcgaaagacatatgccgaacagaggatcacacatatctgcacggatgaagccttcctggttgggcaatggacgatctgaacagcgtgcccacacttatcaacttcaacatttgcatcgtgaatcacgaaagcaacccctataattctgggatcatatcacaaagatatggcaagctgtccaaatcccttaattattgtattctgtatttaatgtgtaatcttaccaattatagacattttaaacagaagggaaactttccctcaaagcttatggccctataaatagtgatctattctcactaggtaaagcgtctaaaaaacttatctctgagtatatactcagagatatcattgtaagagctctaagaggggaataattgcattctttattcttaagtcaataaaaatcaagaggagtaggctattactgaactgctcaggaccgaacctctataaaaattttgtctttatttatttcattatattacatctatattatatcacttgttgcttacaattaagactcattgtcgttggccaaaagcgaggtcaacaacatacattcatcaaataacacataaatcaacatgaatacattcaaatcaacaaaataaacatattcatcgttttaaatccatatttcataatagtaaatcataacctggctctgagaccagttattagaatattttaccaggatctagatttagtaacaagtatgttgaattaatatcctaaatctgaatatctctaaaaaaaatgaacttaaacacataagagtttaagaaaaccttacattaattgcagcggaatataataactccttctgctcagatatctaacccttgttccttcctgtcacagagtattatcaagatctaagcttgcatctctttctctctttcgagtttggctaccaccgtacgtcttactcactataattgagtacttgactatctatgtgtgggcatggcactctatcactataggccgaaataggaagaacagtgaagaagggtgaaatcactatggaaggaactctctcatatactagttgtttgacatagaaaactaggtttgatttggtt

SEQ ID NO: 397981 - DNA, 1297 bp, Cannabis indica
gaagtgtgagacatgacttgatacagcattaaattagctttgaaacacaagttcaatcgcgtaaatcatatcaatattgagtgagttattggccattttactgaagggtgttctaggcccagtacttaggttaacatccagcgcctaggttgatgtatgacgttaacttggacgctgggtgagtgggaacacatcccgagaatatattttttaatgcctaagtgatattttgacatcatttagtccacttcaatgttctagcaaagttggtcaccagttctcgaagatattgatgttctgtagaaatgagagactcaaaactatccattttcagtagtttaccatgttggaaatgagaaattcaaatttttaaatttgacttttctaacattgtaacgccctgagcctaaggaacgccacgtgtgtgctgttacaaacttatttcttactaagtttagaaaagtatggtttaattaagactcttttttttttaaaaacaaagttgaaataaaactttcatactaaatgcaccataatacggggattccttgtttataaatttcttttacaattggttacaaatcactgttacaaaaataaagttatatttcaaaacatagaaaagaagtcgatcctgcttcccggaagccaagacactacgactgatatgtacatcgctggaagacctctaactcatggccgaacacagcttctaagtttcttacatgcatcacgaagcacccgtgagtcacaatgacttagcaagaaaagggctactagataaaatcatagaatgtgctagcaaatttcattacaatataatatacgtaccaagggtcatacacattcaaggtacataaataacttaacgtctatgcgagtgcacttattacataatcaagaatatttataactattcataatcaacaatctcagtgtttcacacaacaccctaaacaaacaacattataaatacccacctttagtgcttcataaagtactctaattcacacattaccataaccaaataatctcagtgcttcttaaagcactctaaccttacatatctatgaacacgtatacttaccctccgtgagtctctgagattctgcaagaaaagtgactaacttcataagcagtataaggtttgtctagtcactataacaaaacgaatttgattacaacctatcacataatacatgcttagtcaatttcttaacattgcaatcacacaatcctggtactttaaaaagtacccttaccactcgctaactacaagctatgtatgtcactattg

SEQ ID NO: 397982 - DNA, 1120 bp, Cannabis indica
aagtcagtatattatttaccctacaattagtatcattcttttcatctcatcaacctaaagaaacttcagtcatcttcaaccttaccactgtacttttggctaaatctatagtactcagtgtgctcttattcgatcaacctcatctcatgtctcttagtctatacatctagaagtattgaaggtatgaaacaatttatttgtccattaatgttagaagttgaattaggattcagacttattatatattttttcgtttttagagaaacatgttttagtaaaattatgatatatctctctcgatattgatctgtttctagcgatttttgtatcgttgtaaagcttatttgatgatctacaatttttatgaagaaactatttaccaattcggtgttattctatgtcaaaaattgtcatctttctgcagttattgtaattcgtttttattcatattccctgaaaaagtactttcacttaaaatacaaaaactctctcaattctcatctatttttaatgatctatatgtgttttaaagcttattccatttcccataagttttatgaagaaactttttgttaactcagagtcatactatgtcaaaaagttagttttcttcttcttctgtatcatgtgattcgcttcatgaatcttgttcttgcaaaactgttttcataaaattgcaatatctctctgaatataattccaatttcaaatattgtggtatcattggaaagataattttatttcctaaaactttcatgaaaatattatcttctacttctgaattcttcaatgccgaaagtttgtatcattactctttcagtttgggtaaaaatatcataactctttcagttttaatccatttttaatgatcatcatatcattggaaggataattgaatttcctataatttttatgaaggaaactttcattgaatttgtgtaattattggtcaaaataatattctttctactgtactataagagtacgaattttaatgtgagggccgtgacccatgtcttatgtaacgcccgtattttatatttactaaacgagaaagataactttaatatattatatctttataaccatatgggtcgggatcccgagtatcaaaatataa

SEQ ID NO: 397983 - DNA, 968 bp, Cannabis indica
tttagccaacgacagtgagtcagttattaagagattaagaatataattaaaatagagaaaaaataaataagtaataaagaacaccagattttaaagaggttcggccccctaaagtgtggtaatagcctagtccccttagattgtattaacttgaaaaaaaaaaaaagtgtttttctctctcaaagctcttacaatgaaatctttgagtaattctcttagatctctctctgaagaaattcttttgatccatttcatagtgaggctaagtcactatttatagggccttaatgcatgagggaaggtttcccttttgcttacaatgtataaaataggaaagtacatttattacataattatgatacatgaaataggaaattggaacaggttgccatattcctctaactcaatcccacgattgtggggattgtcattatgcctaaacttcacgagatcattataaaatagttaagtcctgataagtagtttggacagctagatctatgcctgctcagatgatctgcccctcaccctatttggataattaagagttatacatgcagatgtatcatatgaagtctactcgggacattcatctcagcctagatgcatggaatgcaggaaacgtgtcacttgtgtattctgccatgtcattgttcaaaaaatgggataacattttccccccaagtttgcgcgggaccttcttgatcgcacgtggaagtcactaggtctggatccttgtctgaatgggtggcacgtgtttgaagtgtcggttgatgacccgatgtgactctaaccaagggtctcttcaattttcgactcattaatgctgactgacatgtacctcgatccaacctttgaattagcacgttttgacagttattcttcagataattgagtgcataacgtacattgagtgcataacgtacaattttagaaggaaattgaggtatttaatgttgggttttatg

SEQ ID NO: 397984 - DNA, 740 bp, Cannabis indica
gaacctcgctccctctctctctccaaagctctctctctttctcgaagcactctagaaccagcaagtattggggttttctagtttcaactcagatttctagcaagatcctagcatttcaattcaaggtataaacccctcaagcttttccttcttgttttcttaagtttctagataggttttatgcatgtttttgagagattggtggctgttgtttctactggtgtttaatattgttttcagaggcttaattatgttagattatattgatttaagcatgttttaatggttgttggttagtttatccaagtgttgagttttagaactcaaacttggagctttaatggtgttttttagttctgagcttgggtagttgtgttattgcttggaaaaagtttattggggtataatatgcaggtctagaaagtttgagaaggtttggaaatgatttggttgagctttgaatgtttttggattttctgggtaaccggttttacaatgcttgtaaaactggtcacccggattttgcagtaaggttccccgaaaaattcagcttgtcgtttcgcgttagtttcaggtttctcaatggttaattccctgctagtttagggtattgccattttaagttgtttgagatacgtttttggtttaaaacctaagtctcggttgtgatttagcgagtcacttattcgtgtttttatcgatgtgatttaggagcctataattcgccgagcagttgttcc

SEQ ID NO: 397985 - DNA, 484 bp, Cannabis indica
actacgtacttaactcgtactagtgttggtatcacaggtttgtaccctttgaacatcatatattgtaccaatgcactccataccgtaactgtactagtgttagtagtatatgaatcacataacatagcatgcaatttacatacatacacatatacatatacatgttttatactaatcttacttcattttcgaattcaagtgtgtcgattgacctgaatgaaaaatcacgcactgaacggaggccctatgtcacaatcacataaatggataaataacttgctaaaacattctcggagacctaaactaaaaactagaagttttcctattgatacctaccaagatattagaatggagagcaccttcgcaaatattattggtaaccaacttacagaacactactccaaagtagtagttctacctactcaacattagagtacaaaagagctagtacccacgacctttttggcatggtctcccaccattc

SEQ ID NO: 397986 - DNA, 890 bp, Cannabis indica
aacagtttatttactctttggttaaacgtaatagaaaaagatggtagtgatgtctacgtacgagatgtctgttattgcaatcaaatattgggtcttaaagattttaatttaataatttttgtaaaatatcattaatcattaataaaaaaaagttactcacggtggtattggtactactagggcctaatgtcaatgctaaaaatatataaatatatatatatatatatataaaaattatactttttatttggatcattttcttatgataaaaaatatttatgttttctatatattaaaatgattgcctcaattagtatttttttatttagtgtaactaatatttttcttagaaagataaataaaaaagagaatatatatataataaacaaaaagacaacaaaagaaaaaagatttgagcacaaaagaaaaaaaaaacttcaaacgaggtctattttcatgattcggtgggtttatttttatggttcggtatgaatgcttttataattgtgtattattttcactgatactatttatataattattttacaattgtcgtataaaactaaaaaattccctaatttttttctaacaatattcaaacacatggtttatacatagttgctagtatcttgtttatgcgatgcccaataattgtcttactaaaattttattatgaaaaaatcatggatcaaattggcaatgtaggactcatgtggaaaaaatattgtggtaagtttgtttatattaaaaaaaaaggaggttattcttgttttcaagttgtataatagttgttagagattatattacaatggaagataaaccaagatatatataactcaattataaaaataatacaaggacaataaaagagattgattaaatatatgtta

SEQ ID NO: 397987 - DNA, 517 bp, Cannabis indica
aaataagaaaaattaaggtgatgaaatatgaattaaaatattattccagctttattgaaaaatggtaaacgattataatttataatattttacttatttagtaaaaatgttaacaactacttaaaatatgactttttgaaataaaaaatataaagaataatcataaattaaaatttatttttcaatgatcataatgattatgcgaagcacgatatgattataacaatcgcgcaattgtataaccaacttcatacggtatttattattttaattatcgcaaaatagtaagataaataaatattttattatggaaataattagtcatatggattatgagttttcttttcatcattattacaatttaaggtataaattttacatccatataatttattaaaattaattctcttatctaaacattttgtatagaaatattctatcactaatagttttatataaatctcgcaattttcaacttttaaaaaaagataatgttacgacaatctcttttatagtt

SEQ ID NO: 397988 - DNA, 703 bp, Cannabis indica
gttgtttggggtataagcaggtactctggaagagattctttagtttgggctggaatggaatcaaaggggtcggtttttgggttccttgcacagaaccggtcgaccggttctgggggactcatagaaccggtcgaccggttggtacctagaaatcgggattccggttgggaaccggtctgccggttggggccctttcccgaaccctagtttttcccgtttttgcgtaatttacggtattagcatcctatctatcgataggattatcctaggttttgattttaaatccctgataagagttttagtgtgtctctcattgaattttgaacgttatggtttagggccctgtaaagcgtcaagctgcgtttccactcaggctgaccggtacacttgagcacggaacgaggtaagatagcataataacgtatatatgaatatatgcttgttttaactacttacactactaacactaattgtttatgtgattttaagagtgttagtatagtatgggatatcggtgtgttacggtgttaccaacacaagtatcagggggtacatcgtgcatgtggtacaacacttagtaattcctgagagtacattaatggctctaccaacacgagtacagggttggtactttagtgcatttggtacaggggtcgtacttcccttaagaacgttcttatccatttggtgagctcaattattg

SEQ ID NO: 397989 - DNA, 717 bp, Cannabis indica
ttacatagacccatggtccccccggatagaactaaagcgcgttgaggaagtttacaaccactactaggatagattttaggaagatgttggagagcttctgggtggtgcagacgtcctttcgctcgacttccttatggggaaccttcttgaggagtttactaaggtaatcttgtactttgcttttatttcgtccaaccagctcttatttccaccttaactgactttgccattttttccttagttaaacttgcagaccaaatacatctactgtcagaccaaggttgtggtgaagcagtccgtcactaacaaggccaaaattaagcaacttagacaggagctggctgaaaaagaaaagaccttggagcaagccaatgggatctgtccaagcagaagaaaaaggctaaagagttgacccagtaaattgccaagatcccttcgactgcctagctggagaaggaatgtaacaccctactagtttaggcgtgttatcgtgattttatactaactgtgcagcttgttgctaatcaacgagtttattgaaaattatgattaattaaaactttatttaaatacttataaataccaaaataacatatatttataaccgagatctcgtgtacaaaatatttacaactgtttcaagcactagatataaaagttgtggcctagcgactgtacaaaatacaaccagttatcccaaagaccgtacactctagg

SEQ ID NO: 397990 - DNA, 736 bp, Cannabis indica
tccatagaagagagtatatttattcagtgtcacccttaagttgttaaatcccgtagaagcaagagtgcaagacattgttaccagagttccaatttttttattttcttgagtattattcttcatttcatttctggagttatctcaaaatccaaataataaatgaaaaaatattgtcgaaaaaaatatatttaatgaacaaaaatagtcacaaaaatcagctcagatggccttaaaacaaaccgaacgcatctcttcaaacattaccaaagcatcatcaccccttcccacacttgctaaaccatctatcatcacatactttatacgtatcatcatcagcccctccaaatatcttgtatacatctaaaacaattccacaattgaaatacaatgtgaggattcaaattcttttggctgcaacttctgactattagtgctgctccccaaaagatttgttatgatttgatggtccaagagtttcgcaatggatttgataagaaaaggaagttttggaactatgatgtttttactatgctgagggtcatttggctggtgagaaatgacaggattttccccaaggaactgagttagagtgcatttggttgagaattaagttattttttctgacttatgttttaactgttataagaagactactacattgcttctcatggttctttttctgccctcttttctggtcatgtgctacagtggtactaaacaacaacaacaacaaaaa

SEQ ID NO: 397991 - DNA, 665 bp, Cannabis indica
aaatagaagcaaagaaaaaaaaatcaaaacgctgggaaaaaaaataataataagcaaaagcaaaaagttaaagcatggaaaaatagagcactgaagaaagctaaaagctcgaaaaagaaaattgagcaaagcaaaaagctaatgcccaagaaaaaaattgggcaaagaaaaaaaagaaagcccaacaaggcaaaagctcaaagaaaatgagagcagcaaaaagctcaaagctcaaagtttaaagcagaaagcgagaacttaaggaaaaaaatccatgacgcaaagtaagaagctaaaatgtgtttggaaaaaacatctcaaaagcttaagcatggagtaaagaagcacaaacgcacaatgtgcttatctgaactacgaaaggcttgatcccgtcgaaggtacatacgtaggcaatctaaataaataatagatgcaaccaccaaattaaaacttcaaattgctctccctaagcttaaagacaaatatgcaaagtatttttcctttcaaattaagagtggtggaataagaaatctacaaagagatgtacaaaagtttaaagttactcgagcatcacttgtgtccataaattaccaagcgcatgcttgagagggcatctgttgaaccattttttttttattattaattattatataaaaaataataat

SEQ ID NO: 397992 - DNA, 709 bp, Cannabis indica
gtggacgatatactaattacaggaaatagctcaaatcaagttaccaatctcattgctaccttgagtagcaaatttgccctcaaagaccttggtaatcttgattatttcttaggcattcaagcacttcccacggctacagggcttctactatcacaaaagaaatatcttcaagacattctttgtcgtgctcagatgcaaggtgttaaaacacaaagctctccaatgaactcgggtctaagactttctctatatgggagtgatactgtcactcatccacatctctacagatccattgtgggtgcacttcaatatgccacaatcactaggccagaccttgcatatagtgtcaacaaagtctcacaattcatgcataatccattacagtgtcattgggttgctgtaaaacgaattcttcgatatgtggcaagcactcttgactttggtttgcacttacaaaaaggttcaacactcgatatcacagcattctgtgatgctgactgggcagctgacccagatgatagacgctctacgacagggttctgcatctatcttggtcccaacctcatcacttggcagtccaagaaacaaactactatatcaaggtcttcatctgaggctgaatttaggagcttggctgctgttgttacagaactcacatggcttcagtctctaatgactgaactcaaagttaaacctgttgggttttatg

SEQ ID NO: 397993 - DNA, 816 bp, Cannabis indica
aatgatccaatatataaaaatcaaggttttagatgtttgctttgcaagatatagaaaagttacactgatccaaagcacatggacattgcatttcaggtaggagaccatgttttctagcgggtttcaccaatgaaaggtataaaatgctttgggaagaagggtaagttgagccctaagttcatatggccattcgagatactcgagaaggtcacgctgatagcgtattagctagccttaccacctgcattgtcggctgtcgataatgtatttcatatttcaatattgagaaagtatgtttcagactcgactcatatcttgagttacgaagtcctagaactacagttataattatcctatgagaaacaaccagttcaaatccttgataagaaagagaaagttcttcgaaacgagaccataattttggtcaaggtactccggaataacaataaagtggagaaagccaacagagagctagagtctggcatgagggcacaatatctagagttattcaggttagatttttaggataaaatccttttaacgggggggataattgttatgcccgtataattagattatggatttgtaaaggcaattagcattaattagtaacattttataattatacatgagtttatacttgttatgggcccaatttttagaaatgggcattagaattataatttctcaattccataaaatttattaaactctaagagtattatttgtgctaaatatgaaatatgtaatttcctccatttttactttttcttctggcttcttttttaccaataacttctcatctccaagaacttt

SEQ ID NO: 397994 - DNA, 758 bp, Cannabis indica
ttattaaaaataaaaaaattctgactatttataaattattatttttatgttgtgactaaaatatttatgactaaaagtattaattaatcacaaaattataatttattataattataaatgtatttttattcacagtatttgttaaattaatgacaatttgcatatataaatattatgttatagtcacaataagtaatattttgttgtaattaaaagtcattttttgtcaaaaaaaaaattaatattgtgattaaaaaattatcactaaaaagtactagttttttgttagtaattattttttctaatgagtacttattggaatagattatattgaattatatgcatgtatttatatatatatatatatatatatatattgtaattagggctaatactggaagtagcagtgataggggtccgtgaagccttgagttggattaaaaatcataattggcagcgagttctcattgaaactgactattcaatggtggttcaagctttacgaagttcagctggtacaatgattctcatttggacaaattattataattgtaacaactcactttagagttgaaaattatttttgtgttttttcaattaatatagtgactcgtgtaataaattttaatttgttaataaaatttgttagaatttaagataagatgaaaggagttccattttaaaactaattgaaaataggagaaatagctcattcatcttatatatgacaatttatttttacacattagcaatatgag

SEQ ID NO: 397995 - DNA, 823 bp, Cannabis indica
caaaaaaaaaattaatatactaagtgaaaaacataaaactgtactaaaaaatataagtaagaaaaaatttatagtttaatacacatcttatttgtagcaacatccaagataattttttaatttttttttttcataattatttgtgatcgttgttgttatttaatacatactacttataatttttttttagaaaaatcgaaaaagttaaagtactaaaatgaagtttaaatattttgttgtatttttttctttatatgtgtagtatgttgttgaataaattccacttataatcagtccctttacataatatccacatcagcacacaacaacaattacataacacgaaataagactcaatatcctaggtggctttgcctctacaagaccaagaaccaggagttagttacaactaattcttgtaactaacttccagctctgatcaaccgactcaagcattataaagcacaggaaattaaaagcaaaacatagagttgaacagaaaaagtgagaagagagaagagtaaaccctagatcgagacttctgctccaagatccagtgaagaaaaccaagcagagagttagctctcgtggtgaggagatagaagggaaggaagtacatgcacaaaaagaggaaacagatgagtttgatcgagaaataaatagagaaggaaaaacaaatcaaaaattgtaaaaaggaagaatcgagtcttacctggtcgattttgtgacaggaagctccacaaagttgtaaataaccattatcgatagtggatatcaagctagatctctaagatgagcttgacagagacgtagccctaatttt

SEQ ID NO: 397996 - DNA, 690 bp, Cannabis indica
ggaagaggagtcggagccaccgcgatcaaacaatctggggcttggcatcggtttcaccgtgtggaaactgggatgaatcgagtgtgaacacgcctgagaagatgaaagaccttcgttcatactgggagggtcgagagaaaagtctggaagttgaataatcctctcttcaattatttacttaccttataagttaatttattatatatattatatattataatagtaaatataaacgaacagtacgaatgaaatctttttctttcttcttcaataaaattttctctctttttatctattttttttttattttcaacttgaaacttagtgatctaggctctgataatagcgggatagcaaatccttgaagaagaaaaacttaaggtacggtttaatttcgttttaagtttaaaaacaattggtttcatataggggttttgtgaattagaatagttatggagattctgacttcgtagaactgttctttggtacctatgggactagtatcgatgtttacttgttgaatttgaggtgattttgagttagaaatcgagtttagaactttttaaagcttagtccgaactttaatggcgtttttcatttaagggcttgatttttattttgttatgtaaggatggtaatatttgtagtatatatgcacccaatgaagtttggagtgatttggataagttt

SEQ ID NO: 397997 - DNA, 597 bp, Cannabis indica
tatgaacatggagagagggttggaaatctccaactgatgttccacatgtcccaggttgtgtcccaagactttcctcagtttcctcaggttgcctctcctaacagttctagaaatatctttgggttgtctcctgccccttggtttatgaggtacgagctttgcctcgtggatctctatctccaaggtcaagttgatcttgggaactattctccagtgccaccttgactgcggctatttcacgctcaaattcggtattacaccagtttgcttcctttagtcggcgcctaagatgacggttttctaactcaacgattcgtatgtacctagttggtcgtaggcgccatcctcatcaacttggttaggaagtgaccgaccgttatttatcctaggcccttcgagtctgagtccccaatactgggttttcctggagccagtggccagttcaggttatgaatcaaaagaaccatgaggactcagaggctcttttccaagacgatgattgatttcttcatgaggactatcttctttgttgtcatccatcagttttatgttaggaggctttttttctgagctttttcacaaaggctctcaatgaaa

SEQ ID NO: 397998 - DNA, 526 bp, Cannabis indica
acccctatatacagaagcgtaaaccgttaaccataaactctaaactgtaagtcataaacactaaacactaaaccgtaaaccgtaaaccattaaaacttaaaccctaaaccctaaaccccaaaccaaaaatcctaacccctataccattaaaccttaaccctaaacccttacccctataccctgaagcctaaacccttaaccttaaaccctaaactctaagtcataaacactaaatactaaaccctaaacactatataatatacaataaactctagtcctctaaaccgtaaactaaaaaccctaaaccgtaaaccctcaactaaaaaccctaaaccctaaacgctaaaccttaaaccctaaacccaaccccaaaccataaaccctaaacccttcaacataaagtctcaaccctaaccttatcccctaaacactatacccgaaaccctaaaccgtaaatcatccacactaaaccctaaaccccaataaactttatgttgggttttgtgccctaaataaaacccattac

SEQ ID NO: 397999 - DNA, 785 bp, Cannabis indica
gctacattgtaatgtcatttgggttcaaaaatgtcaaaggcacatatcaatgtctgatgaacaaaatgtttaaaaatgttttggagaagaatatggaagtctatgtggatgatatgctggtcaaattaaagacttcaaaggaacatagtgacgatctggaagaagctttttccatcatccagaagtatggaatgaaggtaaaccccaaaaaatgcacatttggagtttctttagggaaattcttgggtttcattgtcatctttcgaggaatagaagccagtctggagatgattcaagctcttcaagatatgcattctccccaaaaacacaaagatgtttagagtctggctggaagaaatgcagcgcttagcagatttgtttcgaagctaattgacaaatgtatttcgttcttcaatgttctagcggaagcaacaagtttgaatggactgctgagtatgaagactattgggctttgtgtcctaaataaaactctatttcaatgtaattttttctattcaattatcaataaagaaacaactttaatttcattatttgtttaatgtgttatttggttcatgcgatcatttatttgcttatttgattaataaattcatccaaacccttatcacactgatattcttgtttattgtgttgtcaacatagtggaaagtaaacaagattgtgtgattaaatgtattcctagatttatcagtacacagggtttaactgatatgataatctacaacgcagtttacttgcaccttggataagtgctatgttctttc

SEQ ID NO: 398000 - DNA, 397 bp, Cannabis indica
gcaggagtttggaaaccttaggtaccccatgttgaaccctgaaccttgtggcctaaattgatgttgatactgagactgctaacctgattggggtatgaaatcgtatgatgaagactgagactggttggtcctgggctgtccatgaaaaggagtaggctctatatagctccctatgggtcctccgtgagaagcttgaaatctttgttatcgttgtgggcaatctttctacttatgaccttgttgaccacaattgaaacacctgtatggtccactacgagtctttccagatgaaccactattagtggtacccccactaaattgttgtccttgggaccactgcccttgattcatcttggtcttcttttgatcatctccttttcctctgcttgtgttcttc

SEQ ID NO: 398001 - DNA, 760 bp, Cannabis indica
gttgtatatgcctccaaggccacaataaaactctaactgtggtccaaagagggaaaaaactagctgcccgcttggagccttggccttggccagccaaggttctaggtcctataggctggtcagaccccaagacccagcttagaggccggccaagaaccctagttccaggcataggccggccaacctagggacatagtccccatggccggccagatcccatgaaagccacccatggccggccaagcttcaaacaaagcctccttggctggccagcatgtgcatggatcaaaacacatgatttttcaagaactcaaacatgttcttcgtgttctttgtgttcttcgtgactcaaagaaccaagaatcacaacgaaggtcagatttagttctttttcatctataaatcacacattgttcatcctaaggctatcatgcagatcaaaataccgaatgaattacaatctaacgtaagaatcaaagcatgttcaaaacaagaaataatgttcatgcattcatggcaaaattattcaaattaggtgaaagagaggaaatagaaagcttacccgaaactagatttcaatgaagacgaagacgaagacgtgaagcttggatcgttgaaataacgcaaaaatcccaaggatattgaagcctagagttttagccacttagagagaaggaggagctttttcaagagccaaattctaatgagagaaagtaaaagtgaaaaatgaaagtgaaaaaaagggtttccccccaaaact

SEQ ID NO: 398002 - DNA, 730 bp, Cannabis indica
atatcattcttgaattttccttataattgtattgagtaatactatttgacaatttaaggtgttaccatcatattactcttggttttcatttctttttggggaatatagttattttgtatcatatgttttaatcaaaagacatacttagttccttgtattttgtatatttggtacttttaactccaatttaataaattgaccatattactcttaagggcttgtttggtacgttgtattaaatcgtgttacattgtattgtattatattgaattagattatatatcatatttttataaaatactatgttaaattttaatttatactaaaatattatacatttaggtacttataaaagtcaatactatacatagttgtacataaaaatattacataaaatacaattcaatataatattgataagcctccagtcaagttggtatacgctaggaggccacgagacattgaaagatagggttgttattttctattccagtcgtaattgttttgctttgttatctagttggcaattattttatctagctcgctattttcacttagagggttgtgttttattaattctttttagatcttagctggcaattaaattattttttccaatacatataaataggggctgattcattgcgtaaagttggttggtaatagaagagaatagactctaggagagagcagccctctcgaaaggttgtaattggagatactagcatct

SEQ ID NO: 398003 - DNA, 733 bp, Cannabis indica
aaaaatattaataaataaagtaaaatcaagtttaattttaaacttataaataatttattaattattttttaaattaatcttgtcgaataattattttagggctaaaattagaaatttttacaccaaaaatctgttttgcacaatttattacaaatttacccctacacgcctacatcaatatttttacttatcctctttcttttattacaataataccacttacacatcatttccatgcacagacacgtgtgccatccccatcatacatcaatcaacttccactctcttccctctcttttttccttttcttttcatttgattttcgattttctttcagttttttttttgtttggaagatcaataacctccattgttgaagcataactacccattattcatcacggttttttccctctcattttttgttcttccaaaaattttcaactcccactcaacccacgattcctcacgtttttttccctctcagtttattcttgtttccaatttctttataaaatggccatcactcgttcatcctcatctccttccccagttcagaaaaaaaaaatcgaaaatgggcttgaaatctttagctaacaaagcaaagggtaaacgtccgattgttgaagaggaggattctgattttgatcctcctttgaccaagcgtgggaggccacatactaagaagaaatcgaagctcagtgtggaggagcaaatggttgaagaaatttct

SEQ ID NO: 398004 - DNA, 723 bp, Cannabis indica
aatctcgtcagtgctgggggagctgacaagttgatccaactccacctgagagaggctctcctggatcagacgagcacagttgtactcctggccagtagcagtctccgtaaaaataccctgaaaaaactcagtgaactcccttccgatggcctcgcgtccagaaatccagacgttgtctctattcaaaatactctcaatagcatttcgccggcctttaatagcagccgaaaggaaaaagaattttgagcacttatccccatctttgagccacgagatcctggccctttgcttccagtagattgctttcctttcccttgattcgttgagttcccgacgaacttgacattcctgcttccaatttctagatcccgccggaagactctgaagagagttgagcttatcttcgagttccttaatggtcacatcaagtttaccaaattgggttcgattccagttcagaagcgccactcgtgtagcacctacttttttgaagattctcgccggtgcccaggcatgattgatagagttccaggcactatccactacaatattacttctagaatcgcgcgtccaactttcttcaaacctaaagcaccttttaaacttggtggccagaccattcgacagtaggcataagggtctatggtcagaattgctagtctgggacgaacataagatagccctgggaaataagatgagccaagctccattcactaatccctt

SEQ ID NO: 398005 - DNA, 1094 bp, Cannabis indica
aatctaaaaattaattgggtttagatttgtgtgaaagacataaatacccttgtatgtgtgaattagtcctaggggcaaaatggtcattttgacctttatgttatatttgataaagaagtgaatttttttaaaaaaaatgaaatgaatatcctaattttgctaccccccatacccgaacccctctctttctcaaaccctcttttgcttcaacattgaagtgaaggaattttatgagaattatttgtgattaagcttgcttttgaggaattaaggcttggttgtggcttgaatttgaggtagctcttcttatcactctttaattttgaatttgtagctgaggtagaaattgaaaagcatgctcttctaagctttgaatgttcttgattgcatgagtgtgaattttgaaaagtttgagtattaattacaagatgttgttgtgagtttattgttgattaatggatgatgttgttgagtattttctaggtcacaatttatgtgttaaatgggtgttatgctgctggaaaattaagtgagttgggtaagtttgaagctcaagttcatgagcttgattttgtgtggaatgtgcaatctgaatctttggggtttattgttggaattgatgcatgaaatatgtattttttaactctctaatatttggtagcaactttactttgtgatttgggagtttggatgtaaattgtggtatttgattgtgttttggagctgaaattcgtgaaaatggttgctggtttctgggttttgaacccaagtgccgcgccgtggtatttagcatgccgcggcccgcacctattggtgagacctaggagttagtcccaggtgccgcggcatggcttttgcatgccacggcccgccctcgagtttttgagcagatttgagttctaacaactttaacataactttgtgatccgaactctgatttgggagttctatatatcattggaaagctcgttctgagctctatgtgattatctgtaatttaaataccacgtatatattttatgagtatggaatcaggggttaaccctatttgtgaaaatcccaatattgtgactaggattaccggcacctggtca

SEQ ID NO: 398006 - DNA, 651 bp, Cannabis indica
catctgatcctaacatactttgtttaagtcttggaaatgacataacacttatccaaggtgtaagtaagctatatcgatgtttgtcatgtcagtctaaatccagtatactgacaaatcatgggacataaactttgaaacatgataatcataattatattctattgtgttgacaacactataatcatgaataactatattttctgaatttaatagaatttatacattaaacatataatcatgaaagaaattaagtgaaccatgcaacataaaatgaattttaatcttttattaattaataaatctgattatattgaaatgagttttatttagggcataaaatcccaacagttaaactctcctattgccgtttcacttgcatcaaattttagtaataaaaccctccaaactactgaacttgtagcaaatttaaggtgtcatttatttaaaaaaaattcaaaatttattttaaaatcaaataaattataaaaataaaatataaaatattttaaaaaataaataatatattataaattttgaaatattttttaaataataatattcggtataccaatataaatgtgacatatatataaaagtatacatataagccgtttatattaattgttaattatagaaaatagatgatacctt

SEQ ID NO: 398007 - DNA, 572 bp, Cannabis indica
ctggacgtagcagctggttgttggttagcaacttgataggctttgcgtatcaatacggtggtctgtcttgttcggtcatcgatggctgcctgctaggccttcacgtttccatctccctatccctccattcaataaactgatgcctctgctcttcgaacgcaaggtttactgcagcatgaagttcttcatggtcatggtgcaaggtattagtgtgactttgcatgagtccaagagcattgtgaaggttttgaatcttagtatcatctcctattgtcgtctgaccattggttgtggaagggattcgagtgctgggagtactctgatcggctgccgaactggtggttccagtctcttgcacaccgggtgtgatcccagcctgaggggatgtcacaccttgacccacagtaggtgattgcgtgtttggtttctcaggattggtacctagtgggacccttgtattcacaggagtctaaaatgtaggatctgctaacagtgggtcactctgatcaaccacgcctctgcgagtttgcaccaccattttgttgggttttatgccctaaataaaactcttt

SEQ ID NO: 398008 - DNA, 635 bp, Cannabis indica
ggcaagcaagcccctagatccgcaaaagcagtgaagaagaggaaaaaaactaccattaaaaagcatctcatttatcaaactcaaaatttaacaccccctctgttggaatatattttatcatgaactaaatttactaacaaatatgtttttaacatcctaatatgaacttctaaaacaatataaaataaatacataaaaggtatgagaaaccttacattggttgcagcggaattaaatgactccttccgctcagatctctaatacccttgtatcctttctgtaggagagtatcaccaagatctgagcccgacactccttttgttgtttggattcttcacagtcttacactatgattgaggattaacttgctatgggtgggcatgcactcaatcactaagactcgaatttgatagtgaagaagactataggatttcgaattagaagaagagagaaaggaagaagaagaggtctcaaattctctagttgtcagatagaatgaaactaggtcaagagttattagaaacattagttagataatgagaccattcttttctttttatactaattcacatagggttaggtttgatttatttagaataaaaaaatgaagcaaaaataggctctagtggccgacc

SEQ ID NO: 398009 - DNA, 903 bp, Cannabis indica
actcgggatagattgcagaaatttaacatagtagctgatacaaactgcctgatgtgtgatagtgcagcagagagtatgtgtcatctattcttcgagtgtagttttgcacagcactgtctacgggaactgagaacttggctgggatggaagtcaaagaataagttactgtcgagcattctaagggggattaatagagcaaagcagagcaagttcaagaagaattgctacactgcttgtgtagctgctgcagtgtacaagatatggcatgcaaggaacaaaaaattctggtgcaaagagaataccgagttgaagatacttgtccaagaaatcaagtggttagtaaaaaatagaattacttgtgtaatgcccaaaagtgtagatcaaaaggatatagattggtttagtagattataattttttcacacaatttacatgtatatatgtctgctcattgtgagccatagtttgtaatcaaagagttaatagtgcaatgaaattcctgattcatcaaaaaaaattgtatttctcttgatattttagatttcatatattgattaattagtacatgtttatacaaatatttccaaaaattaatattgtactgtgagacttgagagtgccacgcaatatttccatcatcaattaataataatatatatgatttagaacgtaatcaaaaaatacaataataactctttataaacataattcacaatctacatttaaatgacaactgttgtatttgttgtgtccttgtaatatacagttaaagtagttaggtcataactgtcttgacatttatgacagttagtttcttgtccactttggacacctataaatacattatatagtttgtaattcaagttagtactacaaaattttttgactaattattaattatca

SEQ ID NO: 398010 - DNA, 435 bp, Cannabis indica
ttgtagtatgaatctcaatgatgttcttatcggtaaagataaaaagtgacaccaccgcttcttgtaatatgttatttcatgatctatgaatgaatggagtaattcatacattaacaaaatctgtaatagttcagatttagacaaattaatttttaagttttgctgtacatatgtttttttatttgatgaaatgattctttcgagaaaaaaaaaagtgacaccaccactctaaactctcatactaaatgattataataatgttatggaaaattctacaatgcactcctttaaatggatatattaatgtacccttatttattttagcatttgaaataattttttagtcaaaatattttctatggtcatgtacgttatagttgtttaagacattctacaaaattttaagaaattcggaaaagtttaacatgccgaaaa

SEQ ID NO: 398011 - DNA, 747 bp, Cannabis indica
tctgcccttcacttcaaattatttcatgagaaagttgaagcttgacttccacgagttaatcaacaaccttcagacatttgaaaatttgattggaggaccacagaaaggaagagctaaagctcctaattctgggagtgctaatggtacggctaaggctgaggcaaacattgcctctacttcaaaacccaataacaagaagaagtggaagaatagcaagaagcctattcaagctgtgaaaacagttaaaaagaaaaaggctgctaatcccgatagaaagccaaaaggaaaaatgcttctattgcaataaaaagggccactagaaatctcaatgccctaagtttctagcaaagaaacaaggtatttctttatatgctataaactcatgtgttttagagaattattatcgccttgggttatttaattctagatccactaaccatgtttgttttcttcttatttcagctccagctgcttaaacctggattgttattctagcgagttgagtcagatggttggatagaagggtggagattgtccaagattgaagatgaagcttgaaatcttcttttgatttttgaattaattgttttaatttatgaacaatttgatttcaattattggtttgggattttattccctatttttcatattattgcagacaattcatttgtttttagaatattaaaaaaaattctcttttagtaatgaattgagcttcatagttctttatcttgtgtatgtcaatac

SEQ ID NO: 398012 - DNA, 586 bp, Cannabis indica
tgattatcataatagattcccaatgagcactgaattctaactagcggacatattcaccaagcctcttagtgatgagaaaattagtttcattagaagagagctacgcatgaccaacttaaataaaatataaggtttgctagctattaaaactatatatctctttactcacttatgtatacatattcgttccctacgtgatatttatatgactaatatgcgtagatgagaaaatttcttgatacttgacctacataaactttacttgctaaaaaaatcaaaattataggtcattgtgtgaatttttgtgaactttggacttgttttcaaacaagtgagcatgtaaatttttgcatatttaactagcttgtgtatttatatgtgttatagtgtaaatttttcacctagaaactcgagactaggctcccataaagatgacatgttggctcatactcctcgaggagtgttgagctgtcagaaggagaccacttgagtataaaccttgcctaaaccagaatcagcgagatgatgtgaccctgatagagtctagttgcattagtacgcctcgcatgatgcaggaccaagaagg

SEQ ID NO: 398013 - DNA, 667 bp, Cannabis indica
tatattattagttgagaatcattgttaattataatattctattatacaatctcttcgtcaatctttacgtttgaaatcagatagtatactattatttttggtacttcgttatagttccaacattcctcctgtaaatttttaaaatttttcaaatagtttaccgtatcaataatagagtttctaaattttagtttattatgtctattaaaaatattttaaacttattttcaatattgtaaatattgtttaaaaaattataaagataatatttgtaactacaacaaatacaagaagaaaaaaaataaaaaaagattaagtaaaatgttgtaattagtattttttttatttattaaattaaaattatatttcttccagaaattaaaaaaaaataaagtaaataccatttaggactctgtgtttttgcaaaaattactaattggaccctctgttttgttaaataacaaaataggccctgtattttctaaaatagtacaaataagaccctgaactgattttttgttaaaataaaatttaataataatccgatctaaatgtgttacgacaaaactatttatattttctgtatctgttcgagttaagaatcatcttcaagttggtttatattaaaaaaaagttgtcaaaaattaagttcagggtcctattttta

SEQ ID NO: 398014 - DNA, 534 bp, Cannabis indica
ggttttccctatcaattatctcacttaggaaaaattaaagaaaacaccatattgaagaagctttctcctcctttctttctctcttcgaaccagctcagggcaggggattagctgctggtttttaagtgtttcagcaagggatttaagaagaaatcaagccaaggtaagctctagcaaattcttgccctaattcttgaaatttaagtttaggttgaatatgtgaaattgagtttcaggggctgttagagttagggttgtttggggttcgaattttagggttcaattgagttaaactaagttcctagcagctggtattattgattggtttgagtttttatgcaagtttgagctttgagttcaaagctttgatctctaatggcaacttgggttttattggtttgttttgtgaattattggttggaaatggttgtttatgcattgtataggtgtactggagagtttgataaagtttggttgagttttgaggtcatgggggaaatttttgggttcccaacacagaaccggaattccggt

SEQ ID NO: 398015 - DNA, 741 bp, Cannabis indica
caccaaaattctattttgtagtagtgactctatattagcaatttctcaaattatttattacattatgatttgaaatattaaaatgcacctcttatagtattttggcgtaaaagtgccccttatcatttttcttaaatatatcatagtaatatgtagtaatatgatacaccttagatatattatgtacaccattagtattgtttagcaaattaaattagagaaatggcattaggaaacgctttaatattaaattaggggtcatgcatagtttataaatatatagatgcatggaaagcaacagaataaaaggaatttaattgaaaagagaaatggttaaaaaaggcatccgttccatatataccattacagtacgtactgttaaactgtaattaattattagaccacatatgaaacttttttaataatcattcacaaataccacctccatccatcgattgtttcctagctcctaataccattgctcatttgaaaattatgaaaaatgtacttgaaaaagttggaaattagtagtaaagtagagatgtgggatcaacatcattgtaaatttatatactatcttattaatgaggattcctaaagaaaattaattttagagcatctttgttcaaatgctaaatcattgatgatatatataattatatatatagggtaaattgcggcataaatacctaatgtttcagattttatacacttaaatatctaatgttacaattctcttac

SEQ ID NO: 398016 - DNA, 960 bp, Cannabis indica
gttaaatttaacggaataaaaaataaaaactcccttaaactaaaaatttatgttagatagtcacttttaatatataaagattatatattattatttttaatatattatctatctaataaaaataaaatgattagaattttagggttttttattttttaatatattatatatgtaaataaaaataaaaaataaaaaaatgaccaggttggaaggtaggttctggtctaacctaaaacccaatgactataaaaaattaacctgcaaacctgtccaaaagtgtaccgggttggacccaacacgcccgaatataacatatttatttatttctttttaaaagtttacaagttaatcgggttggattcaggcaagttagccaagtccaagtcaaacccagtcaaaatatttggagtaaaaatcctgaataaccattctacaactatactcatcgtataactttaaaatgtagatgtacttattaaaagataaatataacatcatatttctcatcaaataaaaatttgacatgtttttagtaacctattcattgtttagagcatgcatgttaaaatatatgtttgactagaaaataggtacccagattgtcttagttggtacgactttatcaaataatctcacctgcctcactaaaataacattttacccattttacattaataataataaataaagtaatttgccataaaatcttcttaactatcaatttacttataaaaaattatctaaaatcctcttaactatcaatttacttataaaaaactatctaacctcatattttagtaggaaaaacctccaaagtactgtttcgtttacatttttaaggtatcgtctgtccaccttcgttaagtcttaattttacccatgtgataatgacaggtcactaaaaaattatcatatgtagccatattttacaaaataaaaattaaaatgagtaattaaaat

SEQ ID NO: 398017 - DNA, 937 bp, Cannabis indica
tttaattattttttggttccccttactctgttcatccatgtttttttcattcgattattattcactgttagtcgtaattttcccacaaattaaagcttggtaatcgatcaagaacgaagaatcaagatttatttcgctgcaattcttgaagaaacattgaatgtcattaatggcaagatttaaattggagaagttcgatagaactggggactttgcgctatggagagaaagtttaaaaagaatcctagtgcaccaaaaagtctccaaggttcttggagatgaaaagttattggcagaaaggaaaccagagaaaaaagcagaaatggaggagatggcatactacatgatcatatgtatcttcaaacaatgtttgaagaaaactcatcacagagaaggcaacgaaaggatttggaataaattggaagaattatacttgaagccatcaattactagcaagattaatttactagaaatgttatacgattttagaatgatttattccctttctttagataataatattgatagatttaaagagattattataggattggctaatataaatcacaagattgataaagaaagctaggccatcgtccttttgagatcactttcaattgtatatcaagaagttaaggtagccatcaagtatggtagagatgtgattgcattggaacatgttcttactgcacttaagtcgaaacattttgaattacaattagaaaaggaatccaagaaagaagtagtgtacttggaaagaggaagatctcccaagaaagaacttcttagaataaataccatcactgtcaatcaagatcgaagtccagagagaaggaaacaaggaagtgttacttctgtggaaggtttggacacttgcaaagattttgcaagaagtacaaggagcaaaaaggcttcaacaaatctcacaatggagata

SEQ ID NO: 398018 - DNA, 838 bp, Cannabis indica
tggaaaattttgaatgggtgtcagtctttgtgttgcaagatcttggaggccaagtatcttaaaggaaaggattttctcaactgtagttacagagattctgattcttggttttggaaaaatattgtgaaaaccaatgcaattctgagaaaaggggcctgtaaagtggtcgctaatggtagggatactagtatttggagggatccctggattcctcattgtaaaggtttcgttccgaaaccaaatgatgttgttttatcggatctcactagggtggccgatctcttgttatctagtggaggttgggatgttcagaagctaaacggtctttttgatcaagagactatttctgcaatcttaaaaggtagcaatccatcgggtcagggtactgatagatggatttggaccttggaaagcaacaggcagttctcgtgcaaatcaacttacttgacacaggctttggaaagagccctcactgtgaggttgccccgtcgctttggaataagcttcggaatatcaaaattttagagcggcataaggtcctttggtggtgtatcctatctaatgtgctccctattagatccgagattagaagacgttttcaaattgaggatacaagttgtcctttgtgtgggttgagggatgaatctattgaacatttatttcttacttgtgaggtggcactgcatttgtggcgatcttcaccttggggaatctaccctgtttgtgatacggtattcgtgtttgggactgggtgaaattcatctgggatcttagaaatagggggatccgaattgagaagtctttcttatgcttcaattgttgttgacactatatggag

SEQ ID NO: 398019 - DNA, 1018 bp, Cannabis indica
agttctttgaggccttgttcactcatatgcccaagcttgtgatgctatagctgcatatctaattctagttgtttcaccaaacttgcttctccagctgaaacaatttctccttggagaatatataaactattgatattttcacctttcatcactatcagcagacttttggtgatcctcatgcttctatgcatggacttgtatccgtaatcttcatcttcaagtgcacccagggatatgatttttttgtcttaagtccaaaatgtgccttccgccatcatactatatgatgggaacctttccgattccaataaccctacatgaatgatcatttcccattagaactttacctccatcaactgatcgatctataatcaaaaaattattctcaacttggacacatgtgataagtgcatctagagtcaagaatccacactgttcattcaagattccgagatgaagaataattctctatctgttgaacaatcatcactatcctccacgattgcagttgaatccttcctgtggtgatgctgcatgttgtccttcctatctccattgtgagatttgttgaagccttgttgctccttatactcttgcaaaatctttgtaagtgtccgaatcttccataaaagtaccactttgagtttccttctctctagactttgaacttgattgagagtgatggtgtttactcttcaaacttactttattgggtgatcttcctcttgctaaatacacttcttctttcttggattcattttctaattgtaatttgaaatccttcgaattaagtgtggcacgaacatcctttgatgcaatcacgtctctgccatacttaatagcagccttgacttcttgatatgcaattgggagcaatctcaataaaatgatggtctagctttcttcattaacctcgtgatttatattagctaatcctataatgatcacattaaacctgtcaatattatcatctaaagaaatataaaaaaaaaaattctaaaactgtataacctttcta

SEQ ID NO: 398020 - DNA, 591 bp, Cannabis indica
aggtagatacttgagtgatcctatacttagccattggaaaggatctaagaaagtcatgtggtatcttcaaggtaccaaggatcatatgttgacttatcggtgagctgacactcttgatatagttgagtttagtgatgccgattatgtaggatgcgtggttgataagaaatccacatcatgctacatttttatgatggctagaggagttgtttcgtggaaaagtgtcaaacagacactcacaacatcctcaacaatggaggcagagtacatgacatgttgtgaggctacatgtcaagtaatatggctgcgggacttcatttcagcattgggtcttatgaactctatctcgagcccgctgaaattgtattgcaataattccgtagcagtagctttctctaaaaatgttagaagtacttcccgctctaaacacattgacataaaatactattttgttaaagagaaagttacaaagtctcttatttctattgaatacacgcctagcactggcatgttagctgacccattaacgaaaggcttacccatatgtatatttttggagcatgttgctcgaatgggattgttaggagccta

SEQ ID NO: 398021 - DNA, 795 bp, Cannabis indica
acgtgactgaaatttgttcaaaaaaggagaaaggtaaaggaaacttgaacatatataatattgtctttttttatatatataaaggggggagtgccaaggcactcattcattaattagcatataacgacgccaaatagtcttacaagcaatacaaacatagaaacataaaaccatataaacaacatactttaaaaagtcaggagaactaaacaacagagttaaattggactaactaactcctccacacatttagcgcaccaggatcccattccactaagtcatccagcacagttgcctccagcgtctggggattgatctgcccttccgtattcgaggcgatcgcccattttgctatattgtgagccatgaagttacacttacgagggatatggaaaatcttccagtcgctgagctttgagcaccaattcagaaactgaactttcgccgtctgcagtctgaagtccacgcagcactcctcgtgggattcaaaagccttaaccaccactagattgtcagtctgaaacatcactttacacaaaccagccttgaccgcagtctcagccgccaagcataccgctcttgcttcaccaagtttaggattggttgtaagatctttcaaggttgtaattgtccgtattataccgaattcatctctcaccactactgaaagcaaacatcctgtggaagatagagcaatatctgaattgcagcacatccatgaagcaggttgtaatacccgaaattaagaaatggattagcaaaaccctaactagataattatgtataattgaggaa

SEQ ID NO: 398022 - DNA, 794 bp, Cannabis indica
taacagtgagaccaggtacatgatctgtaaatactttccatctttttgtagaagctgaaaataatgagtatattcgttgtaccacaccaaaaaaagatacagccttgggacaacaatgagccatatcagaaagtaaaagatttagagaatgacaggcacaaggagtgtaaaatgctctaggattcatttcaagtagcctagtttgtacacctttattctttcctctcatattagatccattgtcatatccttgtcctcttatattatcaacatcaagtccaagaatattcaacgcatctaaaagttcattaagcaaaccaagccctgatgtgtcatgaacttttatgaatcctagaaaatactcatcaacaaatattggactttctgaaacattcacacatcttaaaacaagagacatctgttcatcattacttgcatctggagtacaatctagtatgactgaaaaatattttgcttctttaattctactaattatcgagcttttcacctcagttgccagaagttgtatcatttcattttgaatcttgtgactcaaataatgataatgagtctcacctcttaaaatacgacgaacatgttcttgcatagttgaatcaaattcagcaagtaattctataatttgtaagaaattcccattgtttttctcatatagtttttcacgatctcctcgaaatgccaaattattttgcccaaatctttttacaatagcaagaattctctctaacacttgtttccaatattttttcaacttgcatcaattgttaacttcattt

SEQ ID NO: 398023 - DNA, 1178 bp, Cannabis indica
gggagtagacagttgccactgctaagcaactaatcgaacctcgttatattggtgtgatttgatttttgtcttatatttatatttttaattctcttaacatgttgattcatgttaatacactaaatgatttagtctgttcttgattgtttttgagctgatctatacaccacaaggggtacgtatcagagcatcggatttcaattatcaagattgtgtgtgtgattatcaagaatcgatcaagatgagtccaactaagtttgacatttataagttcactggtgagaatgattttagtctgtggaagctcaaaatatgtgttctgttggtgcaccagggcatataaaaagccattgaaccagaatgtcttgaagacatcaaggaagatgtcttgaagacatcaaggaagacaagaagaaagttaaggaaattcagaagaaggctcacagtaccatcctcttgagtcttggagaggaagttctctgagaggtttctagtgagaccactgcaattggattgtggaacaaattttcctcaatctatttgaaaggactttggctaacaagttgtatctcaagaaaaggtcgtacacctaaagaatggatgaatctagagaactctggaaacatcttgatgagttcgacaaggtcatccttgaactcaataatattggtgtcaagattgaagaaaaggatcaaggaattgtcttattgagttcactgccaaggtctaatgaacattttattgacaccatgctgcatatggaaaggaaactttgacattgttcaaggtcaaagctgtactaaattccaaagaaactcaaaagaagtctgatgacaagaaaggatcaaatggtgaaggtctaatggctcggggtaactcaggtaaaaccacagggcataaaggcaatggttcaggtggaaattaacaaaagaatcacaacaacaagagaaatggctgtagtcattcaaaacccaaattcaaggctggaaagttttgtaattactgcaagaaagaaggtcatctcaaggatgaatgttatactctgaggaacaagaataatagagacaatagtaaagacaagaatgataaaggcaaaaagagtgaggttgttctgagtattgatagttataattctacagatgttcttgttgctacaaaaatagagtcaagaaaagatt

SEQ ID NO: 398024 - DNA, 1007 bp, Cannabis indica
tgaggtccgtaggtatccttacttataaggagtttacttgtgattataaataccccaagtattcttcttggcagcaagttcctgtcccagtcgacgagattgatcaggattatgtggctcgtgcacattacctccagaacgtcatccctcgagaagccgaagaaggagcatcctgaggtaatcaatgtggcttgtcacccacagtgcttagggccgagcgtaacactttagtgtcgttttgagatagtcgttataatttatacacctggaatcccctcctcataaatcgcattgcacataggtttgatagctggtacccaaagttccatgtccaaattagctgtactgactcgtactatgggatagtcgagcagttgacagttaaaatgaaaatatgacatttataaaagaaaaagataaattgttaaataaatggcaaaattaaaactatggggcccacaagtatggtcggccacttaagggagttttaagctattattttatcttttttaattccatataatttaaaccctaaccctagaggaatcctataaatagataatgatagactcttattttgataacctgataatctacttttctactttgttagacaactgaaaaattaagagcctatctatagaatttgaattcctctctctagaattcgaattcctctttccttcctcttcataattcgaatgccctatagtgaagagtaccttacctagacaattgaagtcagtactcaatcatagtgtagaagcttatgaagaattttaacatctaaaggagatccaagtttagatcttggcaatattctgtgataaaaaggaacaagggttagagatctgaatgaaaggagccataatattttgctgccaccaatgtaagattttctacaactttatatgtgtttacttcattattttaggaaattcatgtttaggatataagattatagaatataagcaaacatacatgttagtaaatttagatcctagtaa

SEQ ID NO: 398025 - DNA, 553 bp, Cannabis indica
aatatgaatttctaaaataatataatttaaacacatataaagtttaagaaaccttacactggttgcagcagaattaaatctcctttcgctcagatctctaacccttgtatcctttctgtagcagagtatcaccaagatctgagcctgattctccttcagttgatttggattcttcaaagtcttacacactatgattgagtaccaacttgctatgtgtgggcatgtactctatcactatagggttcgaaaattgaagagagaaagagagagagaaggatttgaatatgagagagaagagagaaggctcaaattttgactgaaacgctttagtccatcatcattcaatttgagaccatcaccatctatttataggaatccatctaggtttaggtttgaattatttggcattaaaaaattgataaaacaaatggtaaaatcatgcacatgtggccggcctataggatgtgggcccaccactttcaattttgccatttctcaactatttatcttatttttctcaaaaatgccatattttccaattcaaccactcaaa

SEQ ID NO: 398026 - DNA, 651 bp, Cannabis indica
tagtttacattagtttttctttcattaattttagtaagcatagtttgaataaaattctatcaacaatgattgctcgtgtttgatgtgtttttcctttgatgtcttatgcatggtcttttggaaaataattttgttgatgatgaaattcttgattgtgtgatagttataattcaaagaaaatagtagattctcatagtttgtgtgcttaactcacgattaattactactcaagcttgatttttttaaaacttttacacattagttgaattatcatatttgctgatgtttggaaagataaatgcatatttgacttttaatttacacattagaacttatttgataatcatttgaggcaaaattgataaattacatatgattttgagatatgatataggtaattttttttagatcgattgagcttttcaagtttgccctatttgttgattcccttgttacccaatttgagcttgattattgaaatcttgtttttttctttttaaccatatacatgaaccttttgagccttaagaaaaaaaagaaaattccttgttcatcctttttcacaccatagtatattatgtatttgtaagggtgtgagagtttcattgagtggaaaatattgatggttatgtacaagtgatgatgaggaaa

SEQ ID NO: 398027 - DNA, 729 bp, Cannabis indica
gggaaagatagtggtaataaccacaataagtgagctacgttgatgacaagggatgagatacggtgatgactacgggtgagatacagtgataaaaatagatgagatacaatgagacaatatgtgagatacaattatgacaacgactttaaatgagtaagaaataaaaataatgcattatgggaacaccctattttttttaacaccatcctatttatttatttttagggtaaatactattttggatcctatattttgcaacagttacagattggaccctttattttgttaaatgacaaaatagaccctatattttctaaaatgataaaaataagaccctgagttttcgacaacttctttttaatataacaacttgaagacaattcctaacataaatagatacatgaaatgtaaacagtttagtcattacacttttagatcaaattattattaaaatttattttgacaaaaaatcagttcggggtcctatttgtactattttataaaatacagggtcgattttgtcatttaacaaaacggaggatccaattaataatttttgcaaaacacagagtcaaaaatagtatttacctttatttttataacaacaagtttttttgacaaagtaattaaaaatactacgtataataaattttaaatattttaataagtaactccaaaaactaattaataaaattaaatttattttttaataaacaaaattattaataa

SEQ ID NO: 398028 - DNA, 533 bp, Cannabis indica
agagatctagggaaaaaaacttaattgatatacactatcaaattatggaaattactatggatcaatcaggtatgtatacctaattattattctgttctagattatatacaaattttgtatcttgggattattttgatttttctaacacaatgtaactgcattactaacaacccattcagttgcagagaacttgttattctcactaacagcaatttgatggtgagtcatcgaagaacaaagaagaaccaacaacgaaacaaaacaaaataaaaccatgtcacacaaacaagatgaaaatactcaaaaacatgtcacatatacaagattaaaatactcaaaaccatgtcatagagacaagactaaaacactcaaaatcatatcataaaaacaagactagtcgcagtatagcaaatattaaagggccaagatgcaaaatggccctaaatctaacaattaagttaataaatgtcatttttttaaaaaattaacaaaatgtccttttagttgaaaatttgatgataaaattacaatta

SEQ ID NO: 398029 - DNA, 569 bp, Cannabis indica
acataggagacaagatctaatttagtgggactaggtgtcaaaaggcaaccacgtcaccctataagggcttccaaatgcacctcttggacttcatgtctgaatgtgccttaattattgtctggaggactttctttactctatctcttagaagactatatgggcttttgggaatggaataatcatgtctttggaggctcggctcttggagtttagaagagctcaggtctatcttttcgacttggactgggtctggaattatgcaaaccagtcataccttgaggatgccacgtgacgcttagataacaattaggtaattgatttttatttattttttatttttgaaaacaattatcaatattattgaaagattaatactaaatgacaaaaaaaaaaaaaatctagccaataaatatgaagtaaataactttaaaataaaagtaaatttttttgacagaataaatattaataaattgtgttaagaaaataagaattagtatttatggattaaatattaaattggtgttattattaatattattacgcatttagggattttttttttaaaaaaa

SEQ ID NO: 398030 - DNA, 1799 bp, Cannabis indica
catgagtgcatccatgcatcgaatctctctagtaaagatacttgcattgtccataggtttccactatgaaaaggaaaatcccaacaccatcgctcacctagtcactcgtgaccaagttagcataagtggcaagatgccaacactaagctgacgtgccaacgcttctaatcatgcctcattcgatagtgttcatacaatctccctcatcacccaaggactcctatacgtccatggtctaattctcaaggcaccatgcctccacacatattggtaggccctcaagacaagccgctaatctagtagcataagttagacctctgtttctttcaagcatggtgcttccgtcccatgcgcatatgcaaactagcccacaaatgactacccgtgtcatctcgcgttgagattcatagccaaggaacaccacaacgtctcttagaggtttaggccacgtcctatgcaagtgccatactggcaagccaatagaaatgtacctgctaacctatggcagtatttttagatgcactattgggttggcctaatagtgtccatgagtattctaactcatggagacatatgagtccgatttttttttttgagacatatgttcatcaccatataccaaatcatagattttctcaaatcctattctaccattgtattcatagacccgaataaatggtgaatatcaagtcttatcccgatttagacacaaatatttataaaaataccactaccgtacaaactaagcatcagcatgcctccagcaggcacaccaatatgcgccaccacttgaccaccacttggccaccttgtgggcaccgcctagcttgtatcgtgccatcttggctcacatgttacattctcccccacttcaacatgttgatgccctcatcgacgaaccataggcaaaactttctaatctcgacccctaagattactccaagcttcatctaaatcctaagtctgcacttgttcctctatccctgtagaacgaccctcttggcgacaatctccctcgcccactcttggacttgatcaaagaacctatgccactgttgctattcagaatcacccatggagtagtgcctctgcacttgaatacttcctcctacatgaaattctctgagtccatcacaatgccccttcagtcaactaagtagcccttgcaacactgacgttgaagctatcacatcctctaatagtagctcactcgctaattgtccaatgcatactccttttaacaaggactaagtatggtgcacacctcggggtgaggttcacaaccaaccatacccaacgacacctatagaacacgcttccactgaagccaagtccttctagataagtccctttaaaaacttcacatgctaactccatggcgcaccatcctcttgatggcaatcaaccacgacactcttattgaggacaaaatttgatgcgtcgttcctagatgaggctcgtaagccaactgcacctaatgtagcaccaagtgcactcttgcacacaatctcttcctaaagtactcaatattggcccctcgaccctaccacacacccacgacttcatgcaaaaggcccctctgaaccaatgcgataagtgctcctatgagcttctttcatgtagtcagtgatctatcaatcacccaaaaccatgaattcgccatctggcttctgctcgtgtcggctctttgacacagtgtcacaagtccatctcctaaaatcaaccctgcatcctctgacgactcactaaattttgacaaacttgataacacgaagtcttacttgttggaaattatttta

SEQ ID NO: 398031 - DNA, 518 bp, Cannabis indica
tacaatcacccttgagctctggagtcactggtgcttagccttagcttttcctttacctacacatgtaaataatatatgtgagtcgacaaactcagtaagaaaagcatataacataatatatatcagcaacttgtatttaggtgctcatacacctatttacaaggcttcagatgcatcaagaacgtccttgcttttggtatgacagatcataatattagccactactagcattataattgtgatgtgggctcgacacgatggttgtattgctatgatagcatgaatctatacccgaaagtaccattgaccatattattattcttaacaagtactatactcgtactgtcgattcagttatatagttggtaccattatgatagtgtcaattaatactttatggaattaaataccagtcacacccaacactatactcgtatggctgacctgacactataatttgcgtgactatggtactaattcatgcatttcggccactaccagcactataattgtgttgc

SEQ ID NO: 398032 - DNA, 598 bp, Cannabis indica
gccacataagctttatttactgcgttgttaatctccttgtaactattctggtttttacagtgaatgtggggatttacttttaacaatttccacctaaatccccatatgcattgtgttgatgttgtttaagtgtatctgagggtcttagctcgaactcattaagggttttaccaacctatgtcaagccccaataagcttaggcaaagcttaaacttattgagggccacaacctttgtgcccatgtatgctgaattcacttcagtaggcactttgtctatcccgatctgtccttgtgaaattgtatccctgataaagtgatattttatctcaatgtgttttgtcttgtcatgaaaaaccgagtttttgcacaaatagatgctgctctgactaccagagtagattataggagccttttccatgaacttcaactcctccatgagtccttttaaccatagggcctctttaatagcttatgtagtagctatatattaagattcagtagtggataaaaccactactggttgtaattgtaccttccaactagtacaatatccccatgttaagaaaaactagggcgaagtagatcttctagtgtccc

SEQ ID NO: 398033 - DNA, 591 bp, Cannabis indica
gtggcatccctgagagtcagggcattataacatggtatcagagcgaccaaggtttaaaatatagtatttagatacaagttgtcactaatttaattttagtcaccataaatattgtaactaaaaatatatttagtcacaacaaattgtaatttttgtgactaatacctttagccagagattttttagtcacaacatagaaattattatttataattagtcataacttttttactttttgttacaaattttattgtgattaaaagtgagattttttgtagtgactttaaaagtaatatttagttagtttatacttttatcagtaaaaataaaaaaaaaattgatcgaatttggctgaataaatataaaaattatttaaataccatattaatgattaatttcataataaaattttagtaattagataaatactatgttgtgattttataaaaaaaatgtaaaaattattttacgtataatcttacttaggactagctaattaattaaaagtgatattggcggctaaaccacttgaactttacggtttgtaacagttaaccacaaaaatcgaaattttggcaacataactatcta

SEQ ID NO: 398034 - DNA, 1186 bp, Cannabis indica
ttatatgtgatgtttagggtgaagtagggaatgatcaagacagtatattactacagaacagagttcttctttacctggaattgatagcatagccataggggagtttgctactccactgttatgaaaaataatcacttcgaataagattattccaatgttctttgacaaaacaaaggcacaaacatcacctactttcaagtcgttgtcttgaacgaatgccttccaaccacgctcgatcctgaatgtcgaagattttttatgcggtttgaaatagaaagtgtacttaacaggccaagtccttccatcctgaaccttaagaatcacatcttgaggaccactactgatgcttaagagatattttttcgcaaagaaagacggtataatcttcaataagatgaatacaagagtaaaatcaatatgagaaacatatttgaaaagataaacttgtaattaagaagcttattaattaccatagaatacttagatttggatccaacaaatgatggttgcatgggaacaatgaaaaaggggtcctcagatttaaaatcttttgctatcttcaaagcttcatccttttcttttctactcaactcctggtttcttataaaattttcaggcagaggagattctccacatactttatctgacttgttaactgaaggttcaattacttctttctttggaattatgtcatgtgaaatcgtacttgcattgtcataattattgctagtaaaagaaggttcaactttcacacaaggggttgtgttatttgcagctgaaaacaacacttatatatgtcaacaacattattataattctcacctagatttttatatgcattatcagcagcacagtaacaattattataaaataatcgagttcttgattaattacctggtaacacaggggaatttggtactccattcttataaaaagtaacaacttcgaataacattatcccaatgttctgtctcttaacaaagacacaaacatcacctactttcaaatcattgtctctagcaaaggccttccaaccccactcgaatctgaattgcgaacgccctgtatactttctataatagtacctaacaggccaaatccgctcatcctgaaccttaaggatcacatcttcatgcttactcacacttaggaggtgatttttcgcaaagctaaatggtacaacctt

SEQ ID NO: 398035 - DNA, 465 bp, Cannabis indica
tcttccaaaaagcccaggagggtagatactccggccgttagctccgactcagggattccacctgaagcagagcaatacactgtgcctcccaacattgtccttacccccattcctgcagatgaggagagacagaaactccggattgccaagcataattatgctatagctgagtatacaaaggggaacgccgaggtcgaggctttgaaaaaggtcttacgggaggcccagtagaagtccttgcgtgaggagaccttcaggaacgcttgggacctgaacatggactccctgacggactggttcaaacgctttgtcgagcccaccctcgctccatttgcctctgagcttacgagccacttcgtttccaacttgacccaactcccgaccagagatatgcagcttgcgcttccacgaactccatctatcagatttaggatatcagtgctgctatgactgctgtaagtctct

SEQ ID NO: 398036 - DNA, 680 bp, Cannabis indica
gggctcctgatgccagcacatcaggatctggcaagtctcccttaacggtccatcatgtcccttctgcccaagattattcccgatgtaggcctatagaatttgacgaacgtcttcttagctttagaatgcccgctacccggtggggtgatcatgccaagggcttttatttttccaacttaggtcattttctagaccggtccaggatgggatccggacctctgcacatattcccctggatcattcagcttatctgtcttccagctagtttctcccctcggacagctttcctggggatgacgaagccagtattgtggtacaagactttgctagggctgaattagatagtcagggtaggagtagttttactgctatgttttttgtgtgcatattctctcgtggtcacttctgacacttaaatttgtttgtctttttgaagcagccaggccaatggagaaactcttggtgactcttgcccaaacctatagtccagactctgctcttccttcggcgcctaatcagacggtgaccccggggaggtcttcttctagcgtccccttaggccaaatcgtcttgaattgacaaagacggggaggtcgaggaggaggaggaagagggtgagatcctggcccctttggaccgaaaatgcaagggcaaaatggtggaggctgagtcttccaaaa

SEQ ID NO: 398037 - DNA, 636 bp, Cannabis indica
aaataaaaaaagagggaggcgctagtgacttgtcttgtgggctaagtaattttgtgctttgtttggtaagtatcaacatttaatctaaattgatttattttgataagttccctttaaaagtttgataccatattcattgttttttgtctttgatcttgaaagattttcttaaatttcctatttttggaaagtatcatggttattttagtttccttttatttctttcggaaaaaaaagtggggcggtttgtttaatgttcgtgagctggtggtttttcaaatttgaaattggtttccttttttgctccactctcccatgattatttaaactaattttctttgtcatttattctcaccacccaccaaattccttttctttgtgttcttggttctttgttttctcattttttccttacaaaaattcatggctaagactaagaacctagggcatccaagcaagatggtggaatccgaacctgcccccttgaatgctccttctactgctccaatcttgctccctactgctgcaactgctttaaacccaagagattcatcgcttcctcagtgtgaatctcagactgtgaagcccaagccaaaacgaattccaaaacaagtggctaggaaatttgtgcgaccc

SEQ ID NO: 398038 - DNA, 1201 bp, Cannabis indica
atatgacacctagctagtatgatatgccttttagcatttctttaattataaatattaatataacaaattttcattgaaaaaaatcaggagcgttatatagtatattgtaaagaaatgatgaaaaatataatactcatcacttattatctacttcgaatgtatacacaattaattcatacacaatcagattggtcgaacaacatacatgaatgagagacgtcttaaaaaacctagactcatgttgcatatttaaccaaattatcttattaacctaataaatataataggcatcagcttatcatgtttgtaatttgaaatcatatattttacaactcttgacttaaaaaaaattaaaataaaaattattaatatgatttaaatttgtcttaattaataggagttttgaatatttaaaatttatttatttttgaataaatcatgagatttattaattaataaactcgttcaaaacaatagaagcacttcagaagaacaatcctccaactcaagcacacaatcctgtagagaaacaagagtctattgtcaagcaatgagctaacttgtatgcagatcgtttaacaaaacataactcaacaaaagataaagccaaaagtatattcctaacatcttgaacaataagaccaaactgtgaggacataaactgcttggccacacaccaaactatccgtttctaacactacattgtctcagggatgagtcgcaatccaactcaaagcttctttgatgcctatgatctcagcaatttcgggttggacatacccaacctttcccttcttgaaagcttctaccatggttccatgatgatctcgagttacacagcccactccaaaccacccctcttgttcaaataaagccccatcaacattaactttaatcttgtttaacacaggtgcagtccaacgctcacagttccgtccaggcccttcctttcttgagcaaatttgtattgatcaagcatgtttctagctgatgttacaatatttgaaacaagtcaactcttcttttgccaaacaaagtcattccgcgcgcgcacgccaaatagctcaactcaccatcgccacttcctccatttcaacttcgtgccccctggtgaaaattcccaacagccagctgttgaatgttgcagtcccagtcctgacatccactatgctgcgatgccaagcagcctttgcaaacgagc

SEQ ID NO: 398039 - DNA, 575 bp, Cannabis indica
gattgtttttgacataagaaaacaaagttttaacatccgaaacgaaagaacatgattttgattccattaaagaaggtacaccgccaatgaaggagacaaccccgatctgccaacttgggcctctttacttgggttgatcttgatcgttttgaggtcctaagcattgtggatagcttccccaatcgaaaggacgtgtcaagagaaattggggacaaagttacactttgtcggcgaccacgttctgggctatactgaggatcttgttctcaataaggaaacacattgaggtgctcgaggtagcaagtgaggtcttagcaactgaggtaagaagagtgggcatctgtgtacagggtgtatgtttatgcatacaactgggttttgtttgctatttaatttgattatgtgttgtgatgatgtccttacataattagcatcgttagtatgagaatagtgttagggtcttactccttgtgtgagtataacacttgcaggttataactttatcatgggtgagtacaacttatggtatatgatttccatgttggatgccaagtgtgagaataacacaaggcagg

SEQ ID NO: 398040 - DNA, 1137 bp, Cannabis indica
tcagaaagttgcccggttgccaggggaagataggaatattatccagttgacctccgatgataatctggtgaagtacgggctctatcccgaggacttttcttcctaagtccgtggcggggaagaagaggaagtctgatgttggccggcctgaatgagctcatccagagaatgagttgattcaactgaagcgtgaagctaagttgaaaggaggtgtcaggtccaagcaatatgctcaggagtcttcaaatcctgaagatgaggccgaggacgagcaggtgaccccactgaagaagaagaagaaactctcggccacgcccaggcctgttgaacatgcaattcgcataagggagcccatttcacctgttcggccatctcccccctttgccggaaaagggaaggctgtcatggctgagataagatcaatgtcaggtgatgatggacttttgagtctctgtgcgggcagtcaccttgcattttactttgttcttgtgcttcttgactttcatgccttgtttttcttatggctgtttcctaaccatactgtttttgttttgtgcagacatgtctcgatagatgctcgatgctctgaggaagagaatgggtggaagctctagcgcctctcctccggccaagaagtccaagtgcggtgaggggtcctcttcaaaggaaaagagaccttccggagaggtcattgatctttttgaggagctgactgctgcaaacccctctacccccaagtctgccaagtccaacgagtatggaccaccaacggctgggtctgaactggtcaagagtaatcctgagcgggtgcaggcaccaactccacctttgcccgtgcttccagaggccaaaaagggcaaggagatgctggcccactatatgaaccggctggttcccgaggtcagtgagcaactgcctggtgctgataatgactcatctctagatgtgttggtcggcggagtcttgaaggagttcaccagggtaagtcttttttgatacttccctttaactttccacacttagctccatatgctaaagttttccctttgtgcaggccactctaaagttggcttacactattggaaatattttaccaggatctagatttactataatatatgtttcattaacatccta

SEQ ID NO: 398041 - DNA, 2149 bp, Cannabis indica
aaaaaatctaccaatccgtagtccaaaaggaccacttgttccaagagggctcaacctgagggtggtcctagtgtgcggatatcacacgatcctagagaactcgacccgacattggtcatagtacgcgaacaatgagctcgaggagaactcagtgtctgaatagtagaaaccgtaggacgaaggatgaagagctcaatcgtcgaggtgcccaatctgtgggagaaggaacttatgaaacagaaaaccgctgcctaaggcgccgtttggaagggcgcagtggcaaaatgctgagttagagcgtgatgcagcctcggccagggcggcataggggacgaatgcttaaaatcaacctaaacttggagtgagagaccacgagggagacctcgtggctcacgaaccaagcgaggaaaaggcccgagaagaacaacccggggaaaatgagacactccctgagaaccagaacaaacagccagataggacacaaccggaaactgatgaacgagaaatccctcatgagaatgaggaggatcttgggactcaaccgggagaacggaggtcaccagcaagaaatcaccaatgttcttcacaaacccatagagtgaggactcttacagaccctgatgggggaaatacgacaaactgctctcgggagaaaagaacggagcgtgaagaagcaagtctgacttggaggcggtctagaacccatagttgatcaactcgaagaggggaaagtactcaacgagctaatgatcgagaaagtatgggaaccagtaaatctgcaggccactcaaagacaaggtctatgagtagggcgcgatctgtgagtaagacaaggtctgccaataattactcccaaccggatctgcaagagcacttaaataagaagaaacctgacctttgccaatagctaggtccaaagcaagaagatccaatccaattgtggataaacaagctggaggacaagttcaggatatatcaagtgggggaattagggaaactatctggatacgactctgacgaggagcttgagccgtatcatccaaacataatgaatacccattttccttcagaattcaaaaacctacatttctcgatatgacggaaccactaatctggtctcgcatttgaacaactttaacaaaataatgcgagcgagtaatgtgacgaacaatttacgctgtattttgttccccacctcgcttgttggaatagcgagtagctggtttaacaagtttactcatcattcaataacttcttgggagcagttgtccaaggatttcaagaagcaatttcaggatgctaaggatcggtgacccgaagcggcctcactaaccaatataaagcaacagcccgacgagacacttaaggcatacttaagtcattttagcacggctatagctaaggttagaaattatttggatgacatcacgcaacttacaacccttttggtggggatctctactgatccattgaccgtaggggccgagttgtgggatgactttcaaggacgtcctatgagaagcaacacgagttcaggtgttcgttcggaaggaaaaggcccaataggaaatgaatctattgaaaacaagctctggaggcaaacccagcaatgtttcaacaggaactgtttccactagaattgataactcgcgggcttctggttcgaaaagaaaggagagagttaaggaaccgtcgaaggatgaaaagaaacagaagaagcatgacaaatacgtgccagtgtatactatttataccgagcttaatgaaactcaagagaatatttacctcgcacatgagcagaaggtggcctttggcaaacccgagcctatgaggaattagagaagcaaaaaagatcctaacaaatattgtaaattccataaggatattgggcatacgaacgacgaatatcaccaattgaaagatgagatagaaagtctcgtcgtttatggccattttaaacagtacatgaaaagacaaggctagggaaacaactagcccagtctgcctaataacccaaacaaccaggggttacaacctattcctgttgaaggagaggacatcctggttacttcgggaggaccacatatcgtaggggaaagcaataatgcccagaaaagatatgtgatagagataaagaacgagcagttgg

SEQ ID NO: 398042 - DNA, 979 bp, Cannabis indica
tgtataattaatactaataatctcaatacttcagaggaaatttttaacgaaagaaaaaattcagagacataatttggtaaatagtcgaagaaaaaatcctatgattaattttaaaaatctagttttgaaatgtcttttctttagtgcatacaattgaatgtgtcatgaaatttgaacaattaataatctttaaagaaaagaatataaataaatggtgacatctaacattttcctattgaaatatatcacacaaatatttactattgtggaattttcataaatataaaaaataaaattaaaatttacatttatattgaataaaaaaataatgaaaataaatacgagaataaacagcacaaacaaaaaaaaaaatataaacctacaagaaaactaaaactatacaaaccaaaacttttctaaaaaaaaaaaaaaaaactatataaaccaaacttagtgtaaaagtcagttaaattttctcaaaaccccaactctctctgtgatactcttcagaaaatctcaaaaaataaaatgtaattcttgttctatcattcgacgatcgcttactactgcaattcctcattattcaaccggcaagtgatataccttaggtctggtgctttatcgttcgcaaaacaaagcatctccttggactgtatcatcttctccacctcctttgacctacaaatacataaaacataaacaaaatctgcaacaattaacaaaaaacaacagcattcaaacaaaaaaaggaacaaaattacaattgcaccaaaaacggagtaatcaactcgtgatcgacttttatgaaaaatctccaaacttttcaacacaagtaaattcaaactacacaatcaattatatattcatgatgaaatattaacctacaaaaacttaaaatatatacatattatctgaaaattaaattagcattaaaattgtcaattttaatatatctttaacgattaggtttgatctcccg

SEQ ID NO: 398043 - DNA, 851 bp, Cannabis indica
gtccaaagccttacaggtaaagttgttcaactaaatcgctttatatcacgttcctctgataaagtgtaaataattttttcagattctaaagggaaataaaaagtttcagtggactgataagtgtgaagaggcttttcaagccctaaaagtgcacttggggcaaccctttatactatccaagtcgatgcttggagaagttttgtcaatttacctagcactgtccgaatacgcaattagttcagtactaattcgcaaagaccaaggtagacaacatctagtatactatgtgagcaagcgccttttggatgcaaaaacccgttatccacaaatggaatgactggcattcgcactagtactcgcttcaaggaagttgcgaccttatctttaagcacacatcattgaggttttaacaactatcccttgcgacaagttttagccaaactagaggcatcatgaagattactcaaatggtcagtagaactgagccagttcgacattaggtacaagccaagatcgacaatcaagggacaggcccttgttgatttcatactcgagtttccaaacgacgaggtagcgataattatagaagagcgggttgaccccgatgtaccaatgttaaatgccaaaatattacatattttatagtataaaaatacaaaataaaattaattctttataatattttcaagaaattaatgcaatatattattatattgaaaatattttatttaagattaattttatctttgtttataaataataatagtatttatggcataatagagaaaaagaaataaaaaattaaaaaatgcattgtttttatttaaagaaatacaaattaattagatttt

SEQ ID NO: 398044 - DNA, 663 bp, Cannabis indica
gtaaaacaagttccaacacatagcgcatgtgatacagaggtcataccattgttaagaatgttcttaatcatctattaagccttgtaaataagaatatgggagtctaatacaagtcagtgttatattgtatgttatatgcttttcttactgagtctgttgactcacagttattgcttgtatgtgtaggtaaggctaaggctgagcatcaatgagttcgaagctcgaggatgaatgtcaagatggtgcgacctggagagttcggtatcaggatgacttaggcttattttgtagtcgttgtgcgacaaagctgtaaattgtttattttgaatatgtaaactagtttaaaagcgatcgagatcccgacctttttttgtataattatatatttatatatgttgacttcgcttttagccaacgacaatgagtctattttataagcgataaacgatatgtagtaacagatatatgataaagcaataataagacacaggaattttatagaggttcaaccccgagcagttcggtaatagcctaatcctcgttaattgtattgacttaagatcaaggaaggagattccttttcttatagctcttacaacagtatctctgaatatgtatgtttaacgcccaaatgtgacttccactagcggtggttgtagtata

SEQ ID NO: 398045 - DNA, 1569 bp, Cannabis indica
ttggccaccgccagtcttcgaccgtatccgccgggatctctgcgcatttaatttcctcctacgctgaaatgctaggttccgggatgaagtcaaatggtattgttctcgtgatgtggaggggggaagaggatcctaagccggccaaagcgtcggcgtgcatattcgtttcacgggggatttgactaatttggaagtagtcgagagtcgcgataagtttctttacttcagataagtatctggccatcttcaattctttggcttcaaaatctcctttggcctgctggactatcaactgagaatctgactggactaacaccctctcggcacccatttcctttagcagttttatcccgtggattagagcttcgtactcagcatcgttgttggtagctcggaagcctaactttagagattgttctatcatttccccgtcgggcgatagcaatactattcccactcagcttcctctgatatttgaggacccgtctaccttcagtagctagtcttttccggcggattccttctttggcaggataggctctggggttatctcgaccaagaaatccgccagcgcctgccccttaatggctgtccggggcaagtactgtatatcaaattcgcttaattctacagcccatttcattagtctttcggatacctctggcttgtacaagacccgctttagtgggaaagacgtcatgaccgagattgtatggcattggaagtacggccgaagttttcttaccgaagtgactaaggcccatgctaatttttcgattattgggtatctcccctccgcccccgagaaagttttactggtgtaataaattggtaactgcgtcttcccttgttcccttaccagtaccgaacttgcggcagacttagacaaggagaggtataggagcaaggtttcgccgggctctggctttgaaaggacaggaggcgtcgtcaagtatttttttaaggcctccaaggccagctagcactttttgtcccacttaaacttgcggtttccccttagcaagtcgtataatggaaggcttctgtctgagagttttgagatgaagcggctaaatgaggctatcttacctattaatttttggatgtctctcacggtgcggggctgtcctgttttcattgagtaggcgaggaggatctgaaagcattctcgtagatgatcgacgtggtcggcgccatcttcagatttcactaacatgtcgtcgatataggcttccatagtaagccccaattgttgggaaaacatcttgttcaccattcgctgatacgttgccccgacgtttttaagcccaaagggcatcaccttgtagcaatatgtcccccgctcagtgatgaatgaagttttatcccggtcgggaggatgcatcattatttgattataccctgagaaagcgtccatgaagctcattagctcgtgcccgcggtggcgtcaattatcatatcaatgtgtggcagcggaaaactgtcttttggacaagccttatttaagtcagtgaaatctacacacactctccactttccatttttcttgggaactgttgggttttatgc

SEQ ID NO: 398046 - DNA, 809 bp, Cannabis indica
ttaaattgaagatatttcccaccaatattgccatagaatcctccaacaacctcctcacttctgggctgctaatgtaacatccccgaagcagtggccgcaccaccattgaatctgccagcaaacatctcatatgtctcattcccatcacgcaaccactgagagcccaccaggttgttttgttgtcgtggttgagccctcatccaagcgccatacagctttatgatcatctcggctggtgtattaaaatgcttaggacaaaacttcttagagtgccctattataccacagataaagcaaaacgtagggatatattcatatttgaattcagcccaaaaaccatcctccattgcagtctggcagagcttcctgcgccttttgaaaggggcagtaatatccaatgtaacctgaacacgcagataatctctacacacattctgaaaattcttaggatcagctttaacatacgtaccaacaaaattaaccaaattctccacaacactcgtagacttaaaccctagttggagactatgggtttgcacccagctatcgagatcgtttagcactacccttttcggatcatctccccttcttagcttgtgaaaaacaaactgaactctattaaatgtccaagggcttccctctaccaccctttctaaattaatttcatggaaaaattgaaatagacaacggttggtgtcaatctccttagcataaacccccttgcctggctgccacaaagaggccataacatgatgcatagcttcaaagtcagtggctcttccagttaagaaccagcccacaatacataa

SEQ ID NO: 398047 - DNA, 729 bp, Cannabis indica
gtatctttaagatactaaatattgtagtcatacatattttattgagatgaactgatattctagaaatatagttagcctattagatttcatcatacttcattggctataatcaacatttgattacgtccttaaaattaccaataaattgtctcgtgaagaatcttaattgttatttctattataaaagtcagaatcaattattattttgaggatacatctcgtatgctgtattatagagtctcatactaagcttagagtttagaattattttttcaggccattaagaaaattttgtaataaatttagctacagtatttatggataagaattcgaagctagcatatcaatattaagtattttgccatgaaaggcgtgataagtggtcattaagcacacactactaaattaggtgatcacatatccttgactaaaggcatgccgcaacacaaattcaaggatcgtaaagtaaatatgggatttagttacacagatttttggttgtacaactaaaattattcaactgatattttcttatatttacgtgtaccttaattttttatctgagaaaattatcataagagaactaaaataaacataaggttataatttattcacttaagtatattgccacataaaatacatttttatgtagtggatatattgtgtaatacatgtaagataatatttgatatataatgaagaccttgttataaatattaataattatgt

SEQ ID NO: 398048 - DNA, 674 bp, Cannabis indica
tatggtattatgttgatctggagctgttggacaaatttggaaggagtttggttcaaatttggggaagaaaacccatgaaatttggtttgccagaaccggtcgaccggttggttcaggtgcaacagaaccggtcgaccggttgtactgaaggggaaaattttttggtttttctttaggatttggttttggctcgtggttgtatccagtatctattgtaggttaattatgtgtagtatgacttgttatggggtgttggagattaggtgttgtcgggttttaagaatttggattttcttagagattttgattaaagtatttatcgagagttgttgtcgtgacataggaccagggattgccaagctttaattccatttagaagggatgcacactaaacttctggactgaggtaagaaaagtattaaatactgtataaggttaatgttatgattgttacagtttcgattaagatcgaaatcttgttatacgttgttgtgacttaattctaatcgaggttaacgatatgtattggatatgactcgattatgatcaagggaaataataggaaacgattattatcgtttgactcgattatgatcgagggaaatattatgaaacgattattatcgtttgactcgattatgatcgagggaaatattatgaaacgattattatcg

SEQ ID NO: 398049 - DNA, 978 bp, Cannabis indica
taatatccacattttatctaaaaaaaattaatattaatatatgtaatttacattattgataaacaactgcacacaagtacaacctatttactaattataaaatattattaaaataatttaatactaactaaaataaaaaatataattaaaacaataacaataaaaataagtttttatttccactttttaggtgaaaaaaaaaatagaaattatcatgaaaatctctaatatcttcctaaaagaaataagtgaaaagaaaagtgaaaattacacaaaatatggtttttaaaattttattacaaaaatatggtaaatttaggtttgaccactttgtatggcatatttttttttagacttttttatggtatttactataccatacatatgtaaacttatttttcaaactccatatttaatatttagatttaccatctctttctttctttcccgtaccctacctccctctcgctcttgatttgtgcggcacccctgtccaggctccgatgagccatttttggtcagagatggtggagcaaaaaatcaacaagaaagtcgagcttctctctcctttgccgaagaaagatgttggaggtgataagaaatcggaagaagctaaaccggcggcggaaaaaaaacccgtcgaggagaagaagcctcccgaagttcaaaagccaaaacaggtaataaaacatcacttgagccacaccagtattagagtcaatgatgaaatttcctgtgtatttggattggaactcttatattcctttcactgagttcccatgacctttttactcacattaaaaaaaaaattaaaattaattttatttattttgtatttgtgaacagattatggtggttttgaagatcagattgcatacataaaataaagaaaattatctccgaaacccaaccccttgctttcccaaagtttctttctctctcttttaatatatatatatataatatatatatctatat

SEQ ID NO: 398050 - DNA, 1365 bp, Cannabis indica
atgccttgcaccatgatcaggagaatctccgtactgctataaagcttgcattcgatgagcagcggtgtcagttcattgagtggagggatagggagatggaaacattgaaggcccaacaagcagccatcgatgaccgtgcaaggtaggaaaccgtactgatatggagagcctatcgagttgctaaccagctgctagctaccacgtccagtattccactgggcagtacataagaaattactactaggcatagtgcccaaactcataatggtcagccgtccaatccccggtcataggtctaacctatagggcaagcggtagacgaccagatcttacatggctgctatttgggtggagttatacctaataacttcatccagactaaaaattctggcctactcactggccaaaccagtcaaacaacgagaccacctggtacctcggtattcaacaggttaggtgcagcccatgacctcatggctaacctgaatagaagaagaggtctggacgaataatatgttcaaactgttgctcaaccaggtatccgcatttaggacccagctccaagagatcctaatgtgacataggttggtcatgaaactgaaccagttcatccatctgtgcaagcacaattgaatcaactgaaaaatatggtccaaggtctggccggccaaaaactcactgatctcgagctggaccgagcacctggatcacccttcaccctagagattgacgtccttgaattaccctaaaatttcaaaatgccgacctggacgatgtatacagggaaagaagatcccttatcacatctgaagtattttgagatatagatggatctgtaaggagtacggggtgatgtgcggtgtagggtatccctgctacactagcagaaaccgcccagcagtggcacttcaagctaccaccagggagatttaattcgtggaaagccttttcctcagaattccacgcacagttctcctcttcctgtaactcccctcgcatctagaagacttggtcaaggtaaaacaagtaccaggagaacctttcagggactacattaacagatttatgacagaggctagcaaggtcatggggttgactgaggagggaggttggctaccatactggggggcatcgagccactcgaggaactgtggaaggacatcaaaagatgtggccccctggggtctatggcagaatttctggaccgagcagatggatttattaagctcaaaaaggcagttcgacgagtggacaccgtcagacataagaagggccagccacatatctccttggcaggaggatagaatactcaacaccctaacagctcaactccgagcgaaaaaaggtccaataacaatggcaggc

SEQ ID NO: 398051 - DNA, 666 bp, Cannabis indica
acctgtggctaagtataaaactaccagaattatactcaccatagctactcaatttgacctagaagtggacaaaatcgatgtaactacagcatttctacatggagaacttgaggaggaaatctacatgcatcaacctaagggatatgaagaaaaagggaaagaagacttggtttgcaaactgattaagtctctctatggacttaaacagtctccaaggcaatggaacaagaggtttgatgagttcatgatcaagaagggatttagtagaagctactatgatacctgtccatactacaagggcactaaaattgatgaagtcatctacttacttctgtatgtagatgacatgctcattgtgagcgaagaaaggtctggaattgaccttatgaagggttggctaagggaggaatttgaaatgaaggatttaggcaaggcagctaagatcctagggattaacatttttaggaacagggagaatggaactctaaggctacatcagaagaactacataaagatagtcatagaaaatttttctatgactaatgcaaagcaaactaagcagcctatgactaatcaatactacctaagcaaagaccaatgccctaaaactatagctgagaaggaagctatgagtgaagtgccctattctagtgctgtgggatcagt

SEQ ID NO: 398052 - DNA, 862 bp, Cannabis indica
gttcaacctcctcctcttccttcacctcagaggaatgctagaatgtacgtcgtctggctccttaatctcctggaccgcagcgtccccttcatgatccccctcctcctgaacggctggatcctgtttagcgctgggcaaagtggcgtgccgagccacttgaggatcagacgcgtcggccatacttgttgttttttttggtacaagcattattctatggctagataaaagattggagggagaatgtccttcgctggaagaaggtgggctagaactgagacgaggatggtcctcgtgcaaaagttgaagcaaatcctggtcgattcgatgctcgctctcccaaaactcacctgggttcatctacaaaagacaacacacaagatgtgtgtttggtcagaatatcgaaagataaacaagcaaatatgccgaccaggagtactcaatagattaaagaataagaatggtcaaagaaaagtcaaaactcaggaagtttgaaattttctcgagttagggaaaaaatttcatgaagcttagaataagcaagatgaaagacaggcgttatgcagttcagaaagcaagcattatggattgtaaaaccacatgaaaccatgacaaagaagaatcgtagagtttctaaacctagggtttcctatgaatgttctatggcaaagtcgaaggtccattcgaaaaagtaaacatgcaaaaataagcataaaggaaatcgagaacttactcaagagtcagatgtctagattcaagcaacgtcaaaacaacgagcagtttcgatgaaggcacttcagtaaatttgaagccaaaaaattctctcttttcgctctgaactccttagcaaagaaagatggtgaaa

SEQ ID NO: 398053 - DNA, 531 bp, Cannabis indica
ctggtttctatgtagatttttgttgttggttcaatgactctgttagtgctttttttttctatgtttttgtacatactttgattgatcctacataaatcctaagtagaagactgggtgaaaattagaatcaagggcaacaacatgtggatcaaaacatcataaccaaactttattaattgttttctttaaagaaactaaaatgtgaaccaattaaaaagagaaaatgagttcaagaacaacctctaagtgtccacatacctataagagaaaaatgattatgtttccatagtaaaaaatcagttgaaatttctctctcttaatcagtatgagttgattatgggcattggaacagtcaattttaagttttgatgcaaatttgagctgaacaagttttttttttctcacatattgttaaccaaaatttgtagactaaaatcaataattttaattgttcttattcccgaaagatgggctaattagataaggactcgtttagcaagcattttcatatattccaataatgtattgtat

SEQ ID NO: 398054 - DNA, 1847 bp, Cannabis indica
ggaagttgtccgtcgagtagataattaataataggaatcatccatgttggagaattgtctatcacctcgatgtcttcagtttcacacatacttggctcgcttagcatctctaccaaaactaagttcaattcatccaagtcagtctgcgaggctagttttgctaaggcatcggggttggagttctgtactctcgaaatttgttccaatttaaagtaattgaatctttccaagttcttctgaactttctctaagtaccttgccatttttaagcctttggccaggtattctctgaggacttcgtttacaatcaactgcaaatcactacgatagatgaggtttctgactttcaatgcctcagctatctttaagccggcgatcaaggcttcatactcaacctcattatttgatgtgtcaaattggaacctcaaagcatagtgaaacttaaagccttctggtgatattaatattacccctgcacccaaccctgttcgttggatgcgccatccacgtataacttccaggtttccgcgtctcgctagacagggggagtttcttctggagttataccttctatcaagaagtcatccaaagcttggcccttgatggaagttcgaggatggtacgttatgtcgaacttccccagttcaatcgactattttataaatcttccaaaagcatctggtttggataaaacttatcttaagggctaatacgttaacacttttatggggtgcgcctggaagtgtggccatagtttacgagacacatggactatgcacaacgcgtgtttttctagagggggatatcaggattctgtcctaataacctttcacttacatagtaaataggttgttggtgcttcttctcgcactatagctgcactaatcgcatcttccgagatggctaaatagagaaacaacgtctctccagttatgggttttgccaaaattggaggcatcgctagatgcctttttatgttctggaaggcctctccgcactcttttctccactcgaaatttttgttgcctcgtaatatattgaagaatggcacacacttatcagttgactttgaaatgaatctattaagtgcagccattcttcctatcagggcttgtacttccttaggctttgtcggtgatggcatatctattaacgccttgattttttcaggatttacttcaatacccctcgcgttaactatgaatcccaaaaattttcccgaggaaactccaaaggaacattttttagggtttagcttcatgttataattctttaatattttaaagtattccgcgaggtctaaggtatgatccctactctttattgactttaccaacatatcatcaacgtaaacctccatgttctgccctatttggtttgcgaacatttcgtttattaatcgccgacatgttgccccagcgttcttcagtccgaacggcatgactttataacaatagagtcccatgctggttacgaagcttgtatgttcttgatctgggacatacatttttatctggttatatccaaagtatgcgtccataaatgacataagctcgtgcccagtagttgcatccactaactggtcgatcctgggaagtggaaaacaatattttgggcacgccttattaggatcagagaaatcaatacaagttctccaagtttcgttaggctttggaatgagaactggattggctatccacgagggataaaacacctcgcgtataaagtcgttgactaacaacttgtcaacttctagttttagtgcccgttgcctctcggaatccaagggtctccttttctgtctcttcggtgggtagtttggatcaacatttaaatgatggcagata

SEQ ID NO: 398055 - DNA, 746 bp, Cannabis indica
tttgaagaagctcctccttcccactacagggtcgaaccaatcaagcactattctctcgtgatttttgcaccgtttcgacgatccaagcttcccacattcctcctcaatggtttcttgtagtgggtaagctttctatttctgctatttcacttgtattggttgatttttctatgaatgcatgaactttattctttgctttgaatatccatcaatttttacgttagattgttgtcctttcggtattttgatctgcatgatggccataggatatgtaatgtgtgatttcttgacaaaaaagatctgaatctgacctttgttgtaattcttggctctttgagtcatgaagaacacgaagaacgtgtttgagttcttcaaaaaacacatgtttggattcgtacaagccttgaccggccaaggtcttatttaagacctggccaacaaagggtggctgtaaaggggtctagccggccaaagggatgtaccccttaggctggccagcctatgcctggaaaagggattcctggctggccactattttgggtcatggggtttggctggtcattaaggcctggaaacttggcgagccaaggccaaggctccaaagggtagctagtcttcttccctttgttgacctcggttagggtctcatgacagccttaaaggcatataaaacaatagtcttatgtgtggttccccttaggaactctgtataaggctcagtattgagtccattatagtcaattgtg

SEQ ID NO: 398056 - DNA, 519 bp, Cannabis indica
tcttcctagtttttacctctggtttgtacattctttgttttgcctttgctctagtttcacactaaacaacgagaaacaaaccaataaccactcttgacagaatgaaaacttgaaaaatcatgacctcaaattaatttatcattagatggagaagaaggttagtaagggtggcaaaatgggtttcgacacggtacacgaacacgaacatgacacgaattttacgggttagggtgaggaaaattagatgcgggtcgacacgacctgtttaacacgaatgtgacacgtttgacacaatttttttaaatataataaaataaaaaaaattaataataataatataattatataaaaatatatatttagtgattcaatgttaagttaaaaagttttaaatttaattttttttaacatgaaattaaaaatattttaatttttattatatatataacaaactgtatatacataaactgtatttttaatggagcttaaatttattatttttctctacaattccagctt

SEQ ID NO: 398057 - DNA, 1205 bp, Cannabis indica
ataaaagaaaaatatgcaaaaattgaaagctaaaagagttgaatcaattggctactctctaggttttatttatagaacatagcaaccctagagacagccacaaaatcaattccacaacagtacatactttcctaaaaaaatcctgatttgcagcaatagagtcgagtttctacaacaacaaatcagaccagaaaggaaacttgccaaataggtgtccgatcacgaacatgaacttcatacctgccaaaaatagtgtgcttgatctaatgttatcaagacacacttgaaaatattaaagagaaagagcaaggtcaaaatttccaaataaaaccaactttcattaagagaattccttctcttataagaagtttccaaaacaagaaaatggacaactaaaaacgaattctttcatttgaaagaaaagaggaataaagacacaaaatcaaagtaaataaaacagtttaattacacacgaaaatcacatattaaataaaaaatattttgacacctaaatttgcaaaaaaaaaaaaaggaactctacataacctctctcaaacattgagaggcattgattttggcatccctttaccttaataaggcgtaggagacagcgagtccttgaacaatattacatttgcatcattcatgcctttggtgggaagatgtcattctcgcttcgatatgcttaaggccagaattcttattattggcctcccactaattttcaagtcaagctctgtgttggttttatgatactaaatcaggtacacagtggaataattgtaatcttattatcattgtaccatagctccaaggatcaccatatgtataaatattaaatctgaaaaataaattacatgaaagaatataatacctcttgaggactatcaggatatcctcaaattttcttataatttggatccaataaatctcacaccatagtcttctaaatctatccaccatacacaatgagtagtgtgggctactaagataaagtgtataatttattcttgttgaattctaaatacatgagcaagaacagtttgagagagaaaaataatttttcttttcttctttggtatttcaaaaaaaactgtgtagaaaaagcatcatttaatttctcaaatcaggcttctatttatagtagttaatttctaattaattaagtcatatctataaccgaattcaattataggtattttttt

SEQ ID NO: 398058 - DNA, 564 bp, Cannabis indica
tggaatggcagactgcatgaaaggtgataagtgtaacgccctatcctataaggatgccacgtgtataattttatgaactaatttagtactaatgaaataattaattattaaaatctgagataatattaaaaacttcaccaaaataaaatactaaaaatagacatcatagcaacactaaaactgtgttatggagatccctgttgtaaaagttttacaaaaaggcgaaattcaataacaagtcaaaatactaaatcaaaatacatgacatatactacccaaaaacaactcctggtaactcagcaatgccggtagggtcaatgtgtacattactggagaagactgtcacctcatagctgctctagcttttctttgtctttacctgcaccacatagcactcgtgagtcacaaggactcaacaagaaaagtaataaaagataatacatggagcaaccaattattcatttcactattatagaatgattgaataataacattcaaaagtggataacataaccagtcatacgcatggaaataaaagcaatcatatattgcattgcctaatca

SEQ ID NO: 398059 - DNA, 985 bp, Cannabis indica
gcaattcaacaactccacgatatattgggcgtcctgttcaagagcacgacaatacatataactatcatcggcgaaaaacatatgagatacagaaggggctccacgggcaaccttgcaaccttttaaccaacctcgagcttcaaattttcttattaaagcagacaacccttccgcacagagaatgaacaaaaagggaaagagggtccccttgtctaatacctcgagtaggaataattggacccaacgaatgaccgctcgcttgaatccagtatttaactgagcaaaccaacgacattgtcaaagagacccactgtgaatgaaagcccattcgatatagcatagcctctaaaaaaccccattccactctatcataggccttgctcatgtctagctttaccgccatttgtccaacctttcccattgtcttccttttcatgtaatgcataatctcgtaagacaccataatattatctgtgataagcctccctgggacgaaggcactttgagtatctgaaatgatagtcccaagaatccctttcagcctatttgccatgaccttagaaatgattttgagcactacattgcatagtgcaatcggccttaagtcagacaaacacaccggattagttttcttaggaataagcacaacgttggtgtcattcaagctcataggaagagatgcagtactaaaaaacttacgaaccaggtcagttacatcctcaccaaccacagaccaatacttctgatagaaaccaggagtcataccatccggtcccggagctttatcaggatgcatttggaaaattgcagtccgtacttcctcctccgaaacctctcctattaaacaatcattaatttcaggagttatgcaagggtcaatacaattaagcacatcatctcctaaagaattggaagtagagaatagatcatcataataattggaaattaaatttcctaatccactatcccaatcataccagactcc

SEQ ID NO: 398060 - DNA, 804 bp, Cannabis indica
ttttttaattttactttatcggttaccgcttgatcgtttaacatttacacagtacaccatgtcttaaaaaactcaattactgggagtaacatctttattttcttaaagttattattaccatgagagtacttacacaaatgtgcaaaaagaatttgaatgctcgtgtaacatatggctctcgtataccataacataacctatgtgcccccaagtgatcaaagaagttccttcattggtcacttgccataccaaatctccccaggccttcttgatcatgacccttgagtggtgttacacgtgtgagcactctccaattatctgaggattcgtgggtggcagtatttaactcacttaagaaacaactaaagttatctcaagaccaactcacaagctttacttagcgcttagttagtgtcgttaggtatgtgagctgtaattgattaatttaaatgaagtaccaaaaaaaatttaattatgctttttctcattaaattaagtacaattaccttactgtgagctaagtttcaagaaaaaagaatacactttgatgtagtagttacagaatttcttcttcatccaagcttagctaaagtgatcctcactatgctaatgccttgttcaacttttagcataggagccataccttagcgatggacctcttaacctagggacaacttcatcgcattatgttagttaagtggcgatcattcacttacacgaggtagggtgaatcccattgtgaagtgagctattttggagacagctcctgtaacaccctaactaacataggcgtattacgtgatt

SEQ ID NO: 398061 - DNA, 554 bp, Cannabis indica
gtggttgttagggttaggttgagctgtagctcgaattctaggcttaatttgagttggtattagcttcttgtagctggttttgatggttggaacaggttttgtgcaagtttgagctttgagttcaaagctttgatctctaatggcataatttgttttaatgagtttttctgtgaattactggctagaatatgttgtatataccctaattaggtactttggaaagtttggtaccatttgatagaaaattgaacgaagaattaaatgtttggggtggactggtgcaaaccggctagcctgttttaccagaaccccaaaacctagccggtttttgtaggatccccaaacacctcattttctcaattttcgtccatttcagtgttgtggttgggtgtttccgtaattccagagtttgagtaacctctagggggtataacagaacctagagttgtgggtttgggtttctcaggattagagttttaatcatgtaacttatccggtttcataatgtgattagggcatccatctagcacgggactttctgttcaggtcggcca

SEQ ID NO: 398062 - DNA, 803 bp, Cannabis indica
gcactcaagtctgcccagataccagtcttctccaaatttgttaagtgtccctcagttacgatggatgaaggacacacccatctggcccctaaggcaccttgcctcttatgggggatcgcctcggtaaactcttgggtgacatagtcttccccctcgaccaagacgtcacccagctcagatacaggctccccggactgattgtatcctccaaagcgtggaggtcgagccactccctccctcgtatagaagctgaagcagatcctgatcgatatggtgttcgcctacccaaaagtcaccagggttcatctataaaagacaatacatgagatgagtatctgggtgggatatcgaacaaaaacaagcaaatataccaaccaggtgcacttggcagattaaaatgatgaaaaacgtgtaaagattaagttcgtaacccagaagtttgaaatttttgagttaagggttaattttcactaagccttgagtgggcaaagtgaagatcgaacattgtgaggttaacttcaaaatgtcacaaacaacaaagtagtatgatctactatagtaaaaattatgaagtctcagcctagattttctatatatctcctaaaacaaatcaagaacaattgtatttcctacaatggaaacccagaaaatcgaagacacaaaattaaaggagaaaaaaatgagaaacttactcactgtttataggtttggtgttgttcggatgaagctgttcagatctttctgctagaatcccacgacagattcgagagagaaaactctttttgctctaaaattacttagtg

SEQ ID NO: 398063 - DNA, 669 bp, Cannabis indica
tgacaattgagcacagaggacggcgaggttgatctgtacattcgatgggagacctctgactcaaggttgaaccactttcccttttcccttatatgcaccacaaatgtaatgactgcatgattaaaatatagattagtaaggcaattagcattaattatttttattttatgattttatatggatatatatattgtgggcccatttttagaagatgagcattagagttataatctttcaattctgataattttattaaactctaagtgtattatttttgctatgtatgaaatttatgattttaatgacttttgctcggtaacgatagaaaatgcgatggatggccattagtgtgacatgggtgagtttagaacctttagttaggggaacaatcatatgttagattttgtatattgggattaggtagggttttgatattggactattttacccctaagccattttgttatttaagtactaaagtaaggttaattttgactttttattttagtgataagtggattattacactaagcctatagctggccatttttggcgataagataagcctaatgttgatattcattcatcaaaaattaattaagtaatttaaccaaccataagacaaaaatcaaaaacatttttagctctttctctctttctttcctacgg

SEQ ID NO: 398064 - DNA, 604 bp, Cannabis indica
tatatatatattaactttgtgtgtaaaaatacaatttgtaccccaataagagtcttggatcactctaagtggagcactacttcctatcaaagattctctaaaagaagagaatgccttagaattcaaaactccaaaattttatggggaacccctcaattatcttaagtaagcacgttccttactcacccattcgaattagattatttgtatttaggtttggtcatcttcctctaaattggctttctttaatttcatgtattgtagattatggagagctattactagattgggtggctatgaagtggtaagtttccacctgcagctaatggttgttgttcctcttattgtgttttttatgtattgtaagccatcataattatttgttttgataaactttgcacaagactagaatctttaaaacatattgttaagggccttatggctattgttacacaaagtgctctaggttactaaagaggaataaatattatttttttgaggaaaagaaacatctagatgaactttaatgtaaaatagtaaatgtggtaatttgtttttccctaagaaaaagaaaaaaaatgtaatatttctaaatcctaattga

SEQ ID NO: 398065 - DNA, 793 bp, Cannabis indica
taattcaaatttcccattgtaaacaacccatttagaatgagattatcattacaacaatctgagaaagagattgatagtccttggcagtgcaaaactattgtaagaggtttgaaaacaccttggtaaaaaaaattcggttgtaagggttagtcaagcccgttaacttggctcgatattggaactcaaagctaggtccataactttgaagaccaaggattgggtggcttagttctatcgaaccttctaaaattcgagagtttggaattcttacccttaatctctttataagtttgattatttgctatacattattgcttgtcatattacttgcatttatttgattaagagattaattgcatagttttgtgttaaaagttttattttatcaaaattagtttaaatttttaattcacccccctcttggaaacatatcttgggttaacaccaacaatattggtcacaggcctaagaaatccttatttcactcgaagaaaaacatgcaaaccctaacttctatagcagattcagaaacataattaaaggtgagaaaccaaagaaacccatgcctggtagtgaagacaaaggatcccaaatgatcttcgtcggtcctggatagtgcaagtgagcacacctttctcgagaatggttggctaaggcaatcgacaaatcaattttagagtgaaaattgtggtttgccacttcactcctttgaaaaacacttgatcactgggggtggatgttaggttttatgccctaaataaaactcaatttcaatgtaatctattttattcaa

SEQ ID NO: 398066 - DNA, 547 bp, Cannabis indica
acggtcgagacctcattcccagtattgggaaatttataaacgccagtgattggctggttcagagattttcttgtgcaagcttgggtcttgagccatttgggttctttagtagaatccatgacctcaccaactgggattaccttcttcctggattccttctcagcctgagggggacctctgaactcgctctcaaaatctacgtccatttctgtagagacaaagataaaagatcagtgaagcaacagtaaaaaaaaataataatccaggtcagaccaccattcgcgaaggatgatgcttaccctcgaaaatatcttgtgaagatcgcccgtaatgttcaattgtatctccttggtttggattaatcagaagatcttcgatccttcgtttccaatttgaagtgaggtttgaagtttttgggaacatacggagaggaaaagcagttgatatattccggtgttacgagttttgagtgataagtttctgagcttggataggacatcttagcaagagaatgacaatccaacttctggatgaaactcattaaaaa

SEQ ID NO: 398067 - DNA, 1357 bp, Cannabis indica
ttgataagacttctccaggcatcaacttggatagtatcgagggttaccctaggtacgtttttagggcctgaaaagcctcttcacacttttcagtccattaaaactttttatttgcttttagaatttgaaaaaacactttacatttatcagaggaacgtgatataaagtgatttaatgcacatattttacctgtaagcctttggacttctttcggtttggtaggagatcgcatctccaccaaagtttttatttttgctggattagctttgattcctcgttgatttaccataaagctgaggaattttcctgatcccactccaaagacacatttgagagggttgagtcgccttttatatcgtcacaagattctgaacatggcctcaaggtgagagacatagtcctttgcaggttgagattttacgtgcattgtgtcaacatacacctccatcgtctcgccaattaaatatgcaaacatcatgttaaccagcctctgatacgccgcccctgcgtttatcaaaccaaaaggcattaccttataacaatacaaaacttgatctgtaatgaaggaggtatgctcttggtctggttcatacatcagaatctggttatatctcgagtatgtgtccatgaagctgagaagctcatgacctgtggtagcatcaataagttggtcaatgctaggtaaaggaaaactgtccttagcgcatgctttgtttaaatcagtgaaatcaacgcatgtgtgcgatgagccatttggcttgggcactagtacgggatttgctaacaagtttgggtagaatgactcccttatgaagccacatgccaaaaggcgatccacttcctctttaagtgcttagtagcttgcggggtccattttgtagcgcttttttcagacaccttgcgcttcggggtcaatgttcaatcaatgacacatgacttgcggtgatattccgaccatgtttgagtgttttcacacaaaaacatctaaattttatttgagaaaagtgacaagcttttctcgttgtcgaaaggttagtttagaacaaattttcaaaactttattatgattaaaaggattgattggtacctcaactttattctctgcagcttgtgcagtattagtgtaatcgaggatccttggatccagatcagttttttctacatgtggtatctcctcgatcctgaaaactgcctgtcgaggaggtggtgcttctagtaaatatatcagatttactgatttcttcttttctgcgagttttagtgctgtattataacactctcttgaattcaattggactcgttgcacagatcctacacgcgcgggggtaggaaatttcattgtgagatgatagatgga

SEQ ID NO: 398068 - DNA, 783 bp, Cannabis indica
ataaaggtgcctcacctaaggttgatgcaagcttgattatgccaaggctagtgatgctttctcttgtgaatccgcaaaggttcatcatacaaggccttaatttggcctttttgagtcccattttccgtagagtctccttataaagaatatttaccgagctcccattgtctattaagaccctcttgatccatttattggcgagttgaatggtactcactaatggattgacatgaggatacctcacgtttttctcgtcttcccccgtgaatacaatgggaggctccttgttttcaccttcttggaaggttttggggcaaaggccgactgctcgttctttatttctttcacatatcttatctgggcattattgcattcccttacaatatgtcgccctcccgaaataactaggacgtcctctccttcaataggaagagattgtaacccttggttgtttgggttactgggcagattgggctggttatacccctggccctgtcttttcacgtactgcctaaaatgtcctcgagcgatgagactttctatctcatctttcaattggcgacattcgttggttgtatgcccaatatccttatggaatttgcaatatattttaggatttcttttgctcctcgaattcctcataggctcgggtttgccaaaggccaccttctgctcatgtgcgaggtaaatatttttccgagtttcattaagcttggtataaatagtatacactggcacgtacttatcatgtttcttccgtttctttttatccttcaacggttc

SEQ ID NO: 398069 - DNA, 766 bp, Cannabis indica
taggacacgattttgacaattatcagcatgtggcatccacatcagcatagagttggtgcctcatgggtcgagctccaccagatgggcccaagttaatatattatttgtttttaccccattagtgggcaaagtcagataaataagaaccctagcattacaaatataagaagagccattcgtgcaaagggttggaatctcatttttcaattgctcaggcaaatcctagggttcacacaattgtgtaaattttccagtcttatcgtaataatattgattcatgggctaacgcttgttaacgccccaaccacgtaaaaactctaatattatttctttcacatatattttattggtttccaaaagtgtcaataaatattttgttattttcattaagaaaattgtaaaaagaataatcaacaaagaagatcatggtaaggtcatcaaagtaaaaaaaaaaaacctacctttggccattaaagagaaaatggtatccacagtgaagaagaatcatgatgtattggtatggaaccattctaacatgattgggatcagtcctcatctaattttccacactcagaacattgatgaaaaagtagatccaattcatcaaaaaagaagattgttccatccagtatgggttgaagcagtgaaatgagaagttgaaaaactaacctctatagagttcctccaggaagccttgtatctagtttggctagccaatttggtcgttggtttcaaagcctaatggaacctggagaaaatattattt

SEQ ID NO: 398070 - DNA, 901 bp, Cannabis indica
ttttttttttgaaagctctttatagagaatgttgtgtgaactataatgaaaattaataattgaatgataatacaatgtcgcgctattattattattaacgcctaaattaatcgaaacaacttttggtaaaataaattatatgatgtattagtatggcatcattaaaaaatataaaaacggaagaaataataatataaaaaaaaattgtacataaaataattgaaggagtgaagagaaatataaaattaatagaaatagtttgagtgtattgcatattgaaacttacaaacatagttgcatgggataaagagtttgagtgtattgctctattaatattttaaaaaagcaaaccaaatataataaatagagagtattaaggaaaaaataaatagaagtatatatcatttaatatttatgaagctaataaaaaattaaaaaaaatgagatctaaggagaggattaaggagagaacaaataatgctacttagagagactttagagcgacacatcaccgcctcatacttctcctttatatatatagatatagatatagataagtaacatatttggcggagtttaaaacgttaaatattatttttttagttttttttgccatgtcctaaaagattgggtatataatatatatatattttagtattagtttgaattttgttgtattataaattggagtgctgataattctatggtatagagttattttttatgctttaaaactgaaaatattgtgaggagagtagtgaaatgtgtttggttgcttaattttaagtagttttagtttaatttctatttaggaagctaacttttgagtcttgtaaaaattattgtgttaagtgtgtttttttaattaaatatttgcttatttgttgtgggaaagaagaat

SEQ ID NO: 398071 - DNA, 535 bp, Cannabis indica
ccaaagactgttttccacatccaggaatcgatcaacttgtggacgcaatagcagagcatgaaatattaagctttatggacgcctatggggtataatcaaattaagatgcatccaccacactaagaacatacaagtttccgattagatatggctctatattgctataaagtcgtgtcatttggtcttaaaaacgctggagcgacataccaaagattggtaaacaagatgtttaaagaccagatcgaacgaaacatgaaagtgtacgtggatgacatgcttgtcaaatgcaggaagactggggggcacatagatgacctggacgaatgcttcaaagtcctcaggaaatataacatgaaactcaatcccttaatgtgctcctttggagtcagcttgggtaagtttctaagctttattgtcaacgcccgaggaattgaagccaatccagagaagattcaagccctcctggatatgaaatcgccaacaagaactaaggaagttcaaagtttgactggtcggattgccacactcagcagat

SEQ ID NO: 398072 - DNA, 801 bp, Cannabis indica
ttgagtgaggataggacccaaaagatcaagagtaagtgagaaaggtgcctcttcatccaacccacctaggtcatcggggcgattcaatgttgatagggcgaggtttgtaagtactgaagcacaagagcgctatctagaattgaagaataggccattcattgaggataggggtatggacataggtgaccttagaaatccaagaatcgacatccatcctatatttgagccaataagagaacacgtgatcaaccgggaatgggtgaaatttgtggatgttagtgtaagagtcaaccaaccttccctagaattttttgctaactggcccaaaggaagaatgacatagtgaaagtttaggggtgttgacgtgccggtctccactagagctatccatgccatctatgacttgcaaactttttcctgtgaagagcaacacctaaaaatgcttgacgaagaaaagaagttagattatgttgatatggttgagactttgggtttccccggattaaggttcatgagtacaattaggaaccctatcagttgtaccgttgtcagttgaacccggtggctaaagcttggttgtatattgtgagtgctaggttgatacctaacaagcacttttctgatgctcagttggataggctaagacatgtctatgccattatgaagggatttaatatcaatgtggggatattattaggcatagctttaccttgatggtcgaaggagcatgtgggggtgggcttggtctcgctgatattatcactgatttgtgtgaggcatatggggtaccacaatactcct

SEQ ID NO: 398073 - DNA, 501 bp, Cannabis indica
gttagttgtcattatcactactatataagaatttgcgaaccgtcgctaactatttaaaaccgtcgagaaaaatttagtattcccgacggtttaaaatcgtagtaaacaaaatagacgatatttttgaataaaatgcgattttttaatggatccttataggcgacggttttaaaccgaaacgaaaatcttaactctccaaaaccccacccacgcatccgcatcatcgccctcctctctcgccgtcttcctccctctctcgatctccctcttctctccattgcatacgtcggaccaccaccacctttcgtcggtgtccctctcatctccgtctcatacgtcgcaccaccaccacctcccgtccatctccctctctctctttctctctctccgagctcggtataaatacatttatttatttatatacttttttttattatatatgtttattttgttattgtatacatttaatattttttaaagttagttgttattgtaacaaaa

SEQ ID NO: 398074 - DNA, 792 bp, Cannabis indica
ctagagtgatacacaatttttactacaagcatacaatattgttataacaaagttttaattatagaaaggttgtcgaaccctcaaagattgattattaaattttactaattactatacctttttttattttagttttaattagagaattaaaagtaaataagaattcagaacggaataataaagtaattgaaaagtaaacaaacaaacaacaattttaatagaaaaataaagacatagagcattgattttcttatttccaactatgaatctcaatttaccgattatcccaatctattttataatttgtaatttcaagaatcctaatgtaatttattaacctctctcgagtgatgataaaattaacttaattaactatcacgatatctctactcaagaatcctaatagtctggtgcactaggttttgcttatccaattttgatttcgtctcgaccattcatctagtttttcatcataactgtgagccatgaagtcataagagttaaattcaaaacttcatattttcacctttctgacaaggtgatttactcaaaaactaagtagttttgagtctcccattttcgtagaacagcagcatcttcgagatttagtgactagcttcaccaaaacacagaaatggactaagtgatattagaattcacttaagcatcaaaaaatacattctcaacacgttttcccactcacccaacatcgaggttgacatcacacgtcaacctgggcgctgggcccagaacaaccttcagtaaaatagcaataattcacacaatattaat

SEQ ID NO: 398075 - DNA, 723 bp, Cannabis indica
ttttttttaaacctatttaataattgagaaacttcagaattttaactttttaatagattagattatctctcgcgcgaatcacttgttaaaaagttacgagtggagtctcctaaaactgtattaaactaatatagtttcacatttcaattaatttttatttattaaaaaattaacttttaactgattcaacaaataaatagttagtatatttagtttaacaggaatcttgactcgtgcgatctctatataacgcaagagggaccaactggaaaagaatttttctttttgagaacagacatctcttttttctcgtaaacaattttacattcgtattaatttcgatcaacagtaatatttgaaggtgtattaattcaattaatggttttctacaaatcttcagcaatgtcgccattagcatatataaagataattagataactatatataattgttattgcatgacaccattgttataactataggtttgggccaacctattgagcctatacatctaagtttcctttattagggtataatctagcccatcattcctaaatacttctcttgttgctcgtgtgattgtggagaattcggaagtatctcaacttcaactactcaaagtattaactgttagacttttatttgggcttacattaaattttattggttttaataaaatttgagttgattggatagttcattgctgtgttagctcatgttgtt

SEQ ID NO: 398076 - DNA, 1225 bp, Cannabis indica
gagttgtggaatgaatgcatcaacaaaaccaacagggctaaagaagaccgagcgcaagcgttaagatggcgctagagttttgaggccagagggtcgtgccagtgagacttagtagtcatgtgagcctgcgaaagtcaagaagcgtgctagagtttgcatgaaggtcagatggccgcatcattggaacttgagcggactttgcatgcatatagaaattgacgggggtgttatatgagataggcctgttcatataaatcgaaaaaccgcggtttaaacctggaccactacaattcgaaccactgtaaaccgtaaccggagaaaccatttttggtggtttggtcaatccgaaccgtttacggtgtaatggtttgcttgcggttcgtaatatatagttaacagttaaatctgactggaccgtttataataaacaattaatttatatatatattttatatatgactatatgtataattttgaattttttatgtgtcaaattttttattgcatgaattttagatttttatggtatgtatgacttttgagaatatttttatattgttatttataggttatagatctgttacttatcatgttaaatatatattttaaaaaataaaattagaaacttagtaaaaatagtacaattacttaaaaaatatgaataattataaatttaacttaaaccgtggtttcgaaccaaaccaaaccgttcttaatgatttggtttggtttgagaaattttttggtccagtttggtttctaatattcaaaaaactgtacttgtttggttcaaaaattatgaaaatccggaccaaaccaatccgtgaacacccctaagattatgagatagttgactcgagagtcacatcctacgggatgcccttttagatggcatggtgtgcatgaagagttggggcggtcaggcatccgcttgtgggcatgttgtcgaggacaccaacaaatgaagtgggggagagaccttcacgattcactcaatagactagttatttattacaagcatcgagatgagtatcatggagattgattgttgttcagaatgtaaagtcaagaagactcaggacacaggcagggccagttatctagggtgaaagtctgcaggactcaggtgctaagataacaccatggcaatgttggcctaaggtgaaagtcgacagcactatggtactaaggcaatattgaaatgtcgaggggcgaagagtcagaa

SEQ ID NO: 398077 - DNA, 441 bp, Cannabis indica
tctagaaagataaggccctacatcaaggcataccccataaatgtgtacaccgattaaccactgcgggctgactactcaaatgggtcatagagcttggccagttcgagatcacataccaaaagaatagccataagggtcaagccattacagacttcactgagtgcaccaactcaactctttagcctcctcattaggagaaaagtaagagctagagaaaaagagagagcaacaacaacaacaaaatctcgaagatctaacatggaaactctaagttgatgaaagttgcactgaccaattattcagtgtaggcattgaccttaaaacaccttggggcagaaactacatgaagcaatcaaattcagcttcaaagccttgaacaacaagactgaatacaaagccttgatagctggcctcaagttggcacatgaagtacgggctgac

SEQ ID NO: 398078 - DNA, 716 bp, Cannabis indica
ttattaattattttgttaattaatttttaattggcattatggacttaattattaaaaaatgaaaaaaaatcgattaagtaattaaaaaaactattatagttttattaattataattataaggatgaattaatttattaatactatagttatagatattatatgtacatatagggtaggtcattatatattagattttagttttactttttttttctaaaaaaataatggtcctgaaaaatgatttaaaaattaagaaaaaaaaataacaatttttggttcaatgttatatttatatataatgaatagataaaatagagtttggaaatattatttaaataataccaatattatttattattgtttctattctgtcaaataaaataggatagagtttgaaatttaaaaaattaatttatgcggtcacttttaactaattttttcatgggtatatataaattatttttgagtaaccttattattttgggtcacaattatattatataaaatatataaactttttttttttttagaaaaagtactattatattaatcattcaaacaaaatgtaatacaacagtcaattaaaaaaagggaaatttacacccactactattttttccccatttattacatttttactgttgcacggaaattgcaacatttatactgtcttttttttttttttttaggcagtttactgcctttaaaactttag

SEQ ID NO: 398079 - DNA, 806 bp, Cannabis indica
gtctatgttggatctgttcagggatcttagatcttgattatttcagtcttaagggctagagatttactacatagtggatgtgtaggattttttgcggttgtgattgactccagcagacctaaaacatttgggcttaaagtagtcagggttattaaagaatttctccccaggagttgtcaggattaccgccacaaagagaaatagattgtgtgattaatttggcacctggagtagaacttataaaagcaccatatagaatggttccaacggaactcaaggagctaaatatagaacttcaggggatgcttgatttagggtttactcgacctagtgtatcgccatggggagcttcggttctatttgtgaaaaagaaggacggttcccttagaatgtgtattgattatcaggaattgaacaagctgatgatcaagaataaatacccatggcccagaattgatgatttgtttgatcagctttaggggaagactgtgtttttaaaaattgacctacgatccagttatcttcaactcaaaattcggaaagaagatataccaaagactacatttcgaactagagatgggcactatgagtttttggtaatgtcattcgaattgacaaatgctccaatggccttgatggatcttatgaacagagtattcaaggatttccttgataactgtattatagtatttatcgatgacatccttgtgtactctcagttagaagaagagcatgagcaacatctccaaatggtatgacactgacttagagatcataagttgtatgcaaaaattcaaaaagtgtga

SEQ ID NO: 398080 - DNA, 548 bp, Cannabis indica
atagttagggttactataaaagggataactaggggatttctattaatagttttgtaaaaactaattattatgtttgtaagttagattttggtgtggaaagaaaaaaaaaaaaattagtatgaaaagaaaacttgtatagaatattcaattcaacaaaatttttaatatcaaatttgaaaattagtttttttttttttttttttttgtatggttctacacatttttttttcttacatttttccctacttttttttccttcagctaaatccaacttctaaacatagcttaagagaatttattagaaacacttcatgagcgcaattaatagatttatcatctactttaggtttcatttagtacaactttttgaaaaattaaaaattaatttttaaaaaaattgtgataaaaaagtatttagtaagtagttaaaaaatagtttattgaaaaatttatgaaaaatctacatttaaaagttaaagctagtacaacttaaaaaaaaaaatctgttttgattaaaagactataataaattatttttttactaaaaa

SEQ ID NO: 398081 - DNA, 738 bp, Cannabis indica
ttcactggatttagactggcatgataactagcgataaggtatatttacacctttgattagtgttatgtcctttttagggcattggcaaagtttaccagtatcgggtgtacggagtatacattggaagagaccgatattgatctttgataagatatcataaacttaccgttatatcttgctatgtcaatatcaatggtttatcttaggtctatggatcttaatcctgatatggttaggttcaactttgttgtattattaatgctcttagagttgttcgtggaagctaacttttggttctggtggatacttacatcttgggatcatggtagttcaattgagtgggagcgctgatcatagatatgaaatctatagcttccataagtatttagaagtgcaatgatgattttctttgagcttggcttgatagagataaatgattgcgatctcatttcaataattatattactttactgaaatatcatttataggtagctaagtgttctaaggataaaatacattaaagggtagaacggtaaatttgtccctattcagtatagatcatctatagagtatcttgactattaggataataatggataatcataacgtatctatatcatagtacatataaagcgttctataaaactgagagtgctattaaattccaaatctatagtggcacaaggcggaataaataagattaaggaatttacttggtgaattctagatctacttaat

SEQ ID NO: 398082 - DNA, 663 bp, Cannabis indica
cgtatatattattgaagaatgagaaaaatccaccagccaagaaaatgataaatcttgtcttgtaccatttggattggtttctgctttttctattccaaattccatgtcacccaataaacccaataagttcttcaaacgatcgagactttctattttcttgtgtttggggttagacttagactactcagttttgttcttcaataatagtaatatatagtaatgctatgcatgcctctcattcttttttattgaaaatgaaaaattatgcatggattaattgaacttattaagagaagtggaagtgtggctatagtatagtactgttctgttttcttccaaaaaataataaacataaaataacgtatagcagtactatatattaataagtttaagcatggataacccaatgagtctattatcaaaactattcaatgaatttactattaattgataagagggatgagatataagacttaaattaaagagagagaatacaaaaaatatggtataccttaatttgtttcatgtgatagtcaatagtcccgtgctccgtaagggaaaataccgggtaagttgtgcaatcccacaccacctgggaaggtcaagtgggatgattcggagactgtgtaggtatgtgactacacagttgaagagagcttaaat

SEQ ID NO: 398083 - DNA, 799 bp, Cannabis indica
gcacagggcagaatgcaattgaaagctttccaaagaagtgtttgatcttttggggcatggaaagggaccaaagagttttccaccatctttcaaaggggtttggattagaggaagaaggggagtggatagttgtttgagcagaggcaaggtgataagcagatttgaccatgaggatgcctgagttatgaaagccccaaatgagagtatcagtaggattattgagaagggaaatttggagaatcttgttgacctagtaaaggggaagataatgcttaaggtgagggacattccaagtgtgatcattgtttataaaaaaggaaacaaaagacacagggggggtcgataggatggagaatggtaggggaagaaatgccagggatccaattgggagcagattgttgtcgagtgaatttcgcaacaccaattttatatgatattattaataacagaaagaaatctatatgaagaacaagtgcgagtattcaacctagtgtggcgagtactcaaattgggaatgagaaatgattaacagaaaactggaaataacaatgagacaaagaattatagtggttcagtcagatcacggtctgcttagtccactgtagcaagagtttcctaggtgccatttcacggtggatcacccctttatatacaaagcaagtgtccgatcagttatacaaggattgcattcattgtgaatccgttttttacacattgaattacaataattaactaaacaacgttaatattaataaatgaacggcagttctaagttcatcaacgtatgcgtcttccaaat

SEQ ID NO: 398084 - DNA, 1088 bp, Cannabis indica
tattgtcaagacgtacatatctcctcaaatgaggttcatttttctgatggggaactgtattttctccttcatatttttacactcgtcagtgtcatgaccataatcattgtggaattggcgaaacttattcatgtcttgttttctaatatcctttctcatgggataagggttacgatatggcacaactgagtgagttgcattgtagatgttttcttttgtgtcaaggaggatgctctaggtagtgaaccttggggtaggatgttgggattttttgccctaattaaaacccatttcaatacaatctaatttgttatcaatagaagattagaagtcatttatgtttacatgtaattttcatgtgttatggtttaatgtgtacaaaatctgttaagtccagaacatatagttattcacaattacagtgatgtcaatagagtggaatgtaattgtgattatatgcttcaaaagataatgtcccttgattcatcattgcacttgatttacactgatgtgataatcagcgataccgtatacttacattttggataagtgttatgttctttccagaacattggcaaagtatgctaatttcggatgtacggagtatacattggactacgaccgatattgatcttggtaaagatcgtataatcttaccgttgtatctttctaagtcaatatcactagttgatcttagattaaaagatcttaatcctgacatgcttaggttcaatctcaagagtgttatttgtattttttgatttgttagttaggtctaccttttggtctgagtgatatgtacattttgggaacatgatagtacaattgagtgggagcgctaaacatagatatggaatctatagcttctatctggacatagaagtgaaacgatgatgtcgttcgagcttggcttaatagagataaatgaaagagctcttatttcagtgactgagagtgcaattccaagttctatggtggatgcaataaggaattaataagttaggaaatttacttggtaaattctacttctgcttattggaagcttgcttgtataggcccatggtcccgatactagttgagacaatact

SEQ ID NO: 398085 - DNA, 1624 bp, Cannabis indica
tcattgttagaagccgggaattcgaaacgcagagtcgcctagagtcgaagcccgatcgaagatatcatagctatcccagctccagatccgttttcgtttgacgcttcgtccacgaacactttccatgatggggctcgtggtattggtacgtttgcgctagcttctgcttcgttgcattctgttatgaagtcggctagggcttgtccttttatagaagtgcgcgatacgtagtgtacgtcgaactggcttaactccatggcccatttgaggagtcttccagacgcttccggcttctgtaggacttatcgaagtggatggtttgttaataccttgatggggtgagcctgaaagtagggtctcagctttcttgatgccattaagagagaaaactaactttgcaatcaatgggtaccgtatttcagcccctatcatacgcttgctgacatagtacacaggacgttggactttttcttcttcgcggactagggctgcgctgacagtgttctcggagaaggccaagtacagtaacaagtcctctccgtgaactggctttgatagaatttgaggtttgaccatatgttcttttagttttttgaatgcctcctttcattcttctgtccactcaaatttctgacactttctttaaaatgttgaagaagggaatgcacttgtctgttgatcgggaaatgaatcggcttagggaggcaacttttccggtcatgttcagtaaagcttgatttttttcatgattcgcctcaattcccctttggctgacgatgaatcctaaaaattttcctgatttgaccctgaaagtgcatttcttcgggttaagtttcattccgtaccttcagaccacttcaaagcattctgtgagatcgtctgcatggcttacgcacactttagacttgactagcatgtcgtccacgtaaacttccatatttcgtcccaaaaggcctttgaacatacggttaaccattctctgatacgttgcaccagcaatttttaatccgaagggcatgaccaagtaacagtatacccccttatcggtcctgaagctagtgcattcttgatctgcaatatgcatcttaatctagttatagccgaagtaggcatccatgaaggacaataacttaaacccagaggtggcgtccaccatctggtcaattcggggtaaggggaagcagtcttttgggcatgctttgttgagattagtgaagtctatgcacacccgccatgtcccatttggcttcggaactagtactggattggctagccactccgggtaatatacatctcggatcaggccattggttagtagcttgtccacctctttttccagggcctccgcctttataggatcaaggggacgccgcttctgctggactggttctaggctctttcctagtcgaaggatcttggtaggatcgaggtcgcatacttgcacttcctcgacgtcttccataggttctacagtcttttcggatcccacacggggatccaactcatcttcttctgccaatcctggctcaatattctcacagaccattaacaccggtaaatgggccgcgacattataacactgcctggcctctcccttgtaacaccctaactaacttaggcgtat

SEQ ID NO: 398086 - DNA, 807 bp, Cannabis indica
cttcgggttcggcgatcgtgggattttggcggaatggttggatatgtcatgataatgaataatggattagaatgggaattttatcggactagtttaaaattctaagttgtcagttcggtggaatagttaaaaatgaccaaaatacccatatgttatgctttggcttaggtgtgtattgagggtaaaatagtaattttattaagtttaattctttgttttatttaatgccttagtattatcctaggctgaagttttaatttagataatatattaagtttattaaataagtttagattggaaaagaatgaaatcaaaaacctattactctctctctctcttctcttttcggctcaagaacccagcagaaaactagggaaaagcctagcccacttcatcaattttctagcaaaatcttcaaccctaggagataatcaagttgaggtaagtgttcttcatgtgttcttgatgatttcttaggttttgggtttgatattagttgggttttagtgatttcgggattaaggtataaaactgagattagagcaagtttctagacttagattggagtttgtttatgcttgatttggttagaatcaaagctgttagtattgagttaatggaattttaggttttttttaagcttaaactttaagtgatgatgctattttgatttaatggatgaattgttgtgaattgatggttggattatgttgtattggtgatattgatttgatctggaggtgttgggcggtgtggttcggatttggctcgagtttggggagaaaactctaggctgctgccctgcca

SEQ ID NO: 398087 - DNA, 2663 bp, Cannabis indica
atgagatagaaagtctcatatcggaaggacaccttcatagatatataaacgggcagaaaatatctacctcgcacacgtacaagaagctgtttttggcgagccaagacctatgaaacatgcgaggtgcaagagggatccaagtaagcaatgtgaataccatggtgatattggtcataccacagaagagtgtcgtcagttgaaagatgagatagaaagtctcatatcgcaaggacaccttcatcgatatataaacgggcaggaatatgcctatgatcagttcgatctgcccaataactcgagcgactgaacattataaccctcttccacgagaagaagggacactttggttatctcgagagggagcgtgtcgcaagagtacaaaaggtagttactccggtaaaagcaaacttgtaaaagaattgcgacctgagtagatactggctcgttatggttgccataattagacgtcaaccagtggcagtcaaagacagaactaaaaccaggattactccacctagaaccccagtatatgtcaaggatcgtccttgaatattgaaacgattgtgggagaatgttggggattgaccctggacatcgaaactcgttttatcaaaactagatgttcctaaaagattgataatataaacaatttaattgaggaagttcttttgagattagtgattgtaaatcatattactgatggaatattttgaattccagttgtgaataaaataatcatttctttcaaacaaatacttacaaagcgtaaaatcttttaaattacttgaggggcatatatgtatggttaaccggaattgatatggaaatacatagtacaatgcaaacccatagtttcaaatttagaaaactttattaaagggcctcgaccaaacctttttgactgaagaggggtaaaaatgttataactcccagaccaaactttttcgacggaagaggggtcgaatcgttataacaccttgaacaaacctttctaatgagaaagggatcaaacaattgtaatttttgatttataacctatcttacgagaaatgaaaatcaaaagttacggctatcgcataaaactgaatactaacggttcgcgctagggggaagtattaaacgagacatccaaatgtcttgaaaaaataattaaacccaacacgtgggtagaaattttaacaactcatgtaagcaataaaagaatatataaaatgacaagttcattcaaaatatatttgaatgtgcttaaaatgagatcatttctgatgatcgcgagatggaattgatgatggttagcggattgaggaacgggcagataagctgctcacacgtaaagtaggaaattaattacttaacatcgaaagaaaggacaatcaatgtaaacccctaataaaatttatgcctgtgatagtttatattgtgaataaaatgcaagtaaaagtccgcataataaagttcatgcttaaaaggttaaggcattaaaaagcaaagttggtcgtccaaccttgcaaatttgtctttacaaaaaacaaaagtgccactagggggaaaaccattgtctcagccaaaaggccatttcctaaaaaaaaaggagataaataaaccaagtctacatgctgggagacttggacagaatttcttcttcctcctcaacctcgtcgtcttcttcttccatcttggtcttctcccagagagctaaagtttcctcttccttctcctccatgaagttggtatccatgttagcgttccaaagccaggaccggtatacagcgtaaaaactaactttattgcaccgttctacgatctcgatttctttctcggcaagtttctcagcaagcttctcctcaaactcatcagcttagactttgatggccttctcggcctcctcttttgccttctcagcttccttctttgctgtctctgcttcctccttcggcttttcggcttcctacttaaggcgggtaatctcctgttgggcgttgtctcgttgctcacacacatccttgcattgggatattaatttgtgagtctcgccctccaaatactcaagtcgctcagagagtagtcgattggaagcaaaagaagcaaaggaagcctggagaattacaaaataatgagtacaaaagaggtataaaaagatagtataataatattaacaaagctgacgtaccatgaagtgacagtccaaggtcctcgaaagcatctcctttggactcctaagattgagaaaatcccaatcttggggaaggagagttcgaagtttgtgccaaaaagcgaccccgtatgcctgggcaaactcagagccagcttctccagctacgaacgatagggtctcgatggcttgactcggagaagcggtaatgggagtcgcctcgggattaggggcattggtgtgaggaacaactggaggaagaacttgctcttgaatctcgttgtcagaaacctcgagatcaataggcttggccggtaacttcttcttttgagcgttggtttcatttgcttcttgggaggaaccacctcggcgacaatggggactctagggttggatgaccttttcttccccttacggtccaggatgtctttgtaacccatgtctgcaaaatgagacgaggcattagaatcattataaaagacgattaaaaaggggaggagtataaatttcc

SEQ ID NO: 398088 - DNA, 634 bp, Cannabis indica
actcattggccatgtccgggaagccctccaggagctcaagtcaaattttgctagcctagggaatcaagcccacctcaaggagctggatgaaatacacaggtccggttgttgggtcccaaacttgagtcattgtggatgcattaaatgcggcatggagaaaacatctgggagtggtcttgaaaagacgtgacaaagggtttaaatccattattctataattacacactgccctatgatccttatgacggctgcataataaactatcgcttcaatccacaagggttaagggcttatgtcaccaaacacctagagaaagcctatgcaacctaccaagcatacaaacatgccctattatctaattttggaaacgtatgtaagtgatgcttctacacttacgacaatagtaatattttcatcatttttatgagactataaataccctaactacattttgagaaaggggtcagaaaaaatggtgtaaacaccctctgtatagaactactatattaatagcagtgactcgtagactaaggctcattaatgcccaaaccacgtaaaaatcatttgcattaaatttcttctaatcattaaacaactctaattaataggttccaaaaatatcggtcaacacctt

SEQ ID NO: 398089 - DNA, 2163 bp, Cannabis indica
taatataataataataataacagtaagaaaaataataatatgataatattaataatttttttttactaataatcatcgtatcgtttcttagccactaagaaatctatatttgaagggtgttaagttaaattttacatacttctaattaccctaatacctatattatcaacttatcataatattctcgtccaatctactaattaaacctgttatgacatttctgggccccgatcaagtcgccaaggtcgctaaatctaaaaatatttttattccacatatagctcatattacattcatacatgctatgtaaatctctgtaatttgtaaattataaatatttacccacttatagcatatttaaaatttatgttgaactagattagtaggatcataatcccacttattacctgattaacccataatattaatccaacccctaattatttaccattaggcttttcgagatattacaaccatcccctccttataaaaattttgtcctcgaaatttatttaaacatttcgggatattacccccgtatttatgattctaactctcaaattgttatttctatcttgctgtttcactataacactttgttaactagtggaattgtctcattccatagtacttccttttttcagttcaaaacatggacatgatgtttttcccatataataaatttgtctaaagcttaacatcgtcacagctcaaaatatgggtcgagtctaatacatattttctcagcatggagatatgaaacacattatacactctagacaatgaaagagtcaagactagttgataggctacttggcctacttactctagtatcaaaaaccctaatgaatttagggtttaacttccctctctacatatctctttcataggcaatacttggagaaaaacaaaatctcctattttgaattagataatcctacgctttaaatcagtgtaacttttctgtgtattcaatgaagctagcatacaactcgaattcactctatcattttataaatgtcgtggatcttttcggtccattgttattcttttctcacctcattactctagtgaacaagtgtctagtatttccctcgtaccatacttattaaagtacctaaccaattgtaatatcccgaaaaatatattgatattttaattggacatattttattaaatatgtgattatgtgggtattagagtaggattataatcctacttaaattaatgatgagttggttagggaaatatgaattaatgaataataaagcgtaatttattaattacggagattgtattggaatatgtgggtatcgtagataccataatttgaataaaataatttttgggcttgacaattgtaaaatttgacggggaggttagaaatatcacgacaataaatgatgaattaaattggaattataccggattagtttaaaattttcagttgtcggttttgtggaatagttagaaaatgaccaaaatgcccttaggttatgatttaagcttaagagattttggttgagggtaaaatagtcttttcccaagttttacttattttgttttaatggtttctaggctgattaaagggttagtatgatggggttatattaaataattatagtgaatgaggattaataaaaaaaatagagaaaaatcacatatacttgcttctctctctccttcccttcgagccctagaagccagctgaggtattagggatttttcatctcaattcaaggttttgctagctgaattaacaaagtttagagattgatgaagcattaaggtaactattcagtagttatatttgatttcttaggttttaagttgagttttggtggggttttcatatgaattcgggttgtggttgatgattgagttcagagtatatttgtgagtttaatttaaggttgtttaagtatatttgtgatattcttgtgagctgttatgtttgaatttggaagaattgagtttatgaactcaaggttcactcaagcatggtgatttcattatcttgttgtattattgcgttttgatgcttgctacatgttatttttatgataataaactgctctggaggtgttgatcaggtttgaaaaagtttggggaaaggaaccctagatttcttggtctgccaaaatcggtcgactggttggttct

SEQ ID NO: 398090 - DNA, 852 bp, Cannabis indica
atgtatagcaaggcgtcaacctcattctgtatagaaaggtattgacgagatgtgttggcagtcagaaaatttagcgtataatatcattatactaactaagtataacagttggaagaacctgagtgacgaatagtatggcatccatctcgctataggaaggcatactactggcaccttcactaatcagctcaagacatctttcaatgagttccactgccacatcgagtcagctctcttagaaagaagtttacattcaaatgatgttggctactgaagttcaccttgtcaccaagagctgcgattatcagaaggagcttatgtattcaattgcagaaacgatgggatttacattgttaacttcgaaaagacgttggaaaagctttagctcactgccagggttattgttactatccaaattcccagggagatacactttgcagcgtatctaaattcacgtcagcattgacccattaaaagcggatagatcacaactatatgatttttaaataataaccgcatttatttacgtggtgcgtaattgaagaccacaaatacagggaaatattgttgtgggattcgtatctgattgtaattaacttccaccctatgtcactataaataggggcagaatctactgaaaaatggacggaaaatccttgagggaaaagaaccctagtttatatcagaataatctgaataagactgactcgttgactatgcagaattttaactgaaaacccacgtaaaaagctttgcgttatattttcttctttgactttctattatttttgtgctaatcctatcacgaaataggcttattatcgtttacaaaaatttgtgttaacagtttgg

SEQ ID NO: 398091 - DNA, 622 bp, Cannabis indica
aagttgatgtcatcattatatttcctattgatatccttaaatctctaaacttaacactcaatttgttgttctgttagttcaacaataaagtatatttgtaaatatagtattggcaaaattactaattcttttaagaaaaataattttaaaaacaaaaaaaaattaaaataaattcatattattaaaaagaatacattatgtacatattaaatgaattgaaattaatttatccattttcttccagccatattatctttactgattaacaataaactttttttttgtaaggagattaacaataaactttttttgtaagaagataaacaataaactttgattctcaattcaaatgctatttttcaattttattttcatatattgaaaataatcattccataaactttctactaatatttttcaatcaatgaaactagaaggcaaactttcattcccgtatgaaaaatgaaatattcaatcccaataatcataaagaaattaacaacatcaaatttcaagttctccaaatctataaaaataaataaataaataaataaataaaaaaaaaagatctcataaacacaaactcaaatattggaaccctagtaaaacactaaaactcaaa

SEQ ID NO: 398092 - DNA, 567 bp, Cannabis indica
aacctcaataccagatgcaatagagacactatttgcaagcccaattacgaaaaatcagaattaaaaaaccacactcttttctttcccagaaatgtgactgaaaatttcaaaaattaaagaaaaaataaaaagaagatgaagaaaaggatcttaacatgaaaaattaaaaaaaaaacatatatgttaatggggagaaatagagggaacttaagagagtgaaaaaaaagataataacctatgaattttaaaacaaaaaaaaaaaaaaaaacccacaaagaagaagatgaacatggagaaagaataatgagaagtagtgtacataattggcctctcatcaaattaaattaaaagaaaaaagaaacaaatgtgacaaccaaatatcacatcaaatttatactaattcttttaagaaaaataatagatattaaatagggtcctattaaatgtgacacaagtgtcaaaatagggtattacaagttttatactacttataaaaagacagtatataaagtaacagtaaaaatattaaaaaaaaatgtatgtcgcagtataaaagtaaaaaaaaaa

SEQ ID NO: 398093 - DNA, 500 bp, Cannabis indica
agtcactcatttccacaatcacctaacataaatgaaattaattagcagttacattaaaggattatgaaaaaaataccaattataaatcactcggtattgcataataccttttctttcaaccatgtactaaaatttcgataatgttcatcttgcacccatttgtggttcctcgacttacgaggataagtagtcttgatccaatcaaaatgtttccttcaagatttagttaacattattcttattagtacacttttgatttgaattgaatattaaaaattaaattaaacttactcaatgtacggttgaacctcatcaacattttgcaaaacgagtcggtgtgcttcatctcgatcagctcgacttacgtcgcaaacagaaacaccctgaccccctttactaatttcattatcaattcgaggaagacatgacccaacagttgctacatttgacaagaagtctgaacaaaattctacagcctcttcaacgatgtaggattcaac

SEQ ID NO: 398094 - DNA, 969 bp, Cannabis indica
aaaaaaaaagaagaataagaagagagatggagagagaaaatataagattgataaacaatatagttttagattatatagagctgtttggtgtattttttttttaattttataaataaaatatacgactataacattaatttgaggttaaaacaaaaccaaaagaaggtgatggttatatatatagattagaaattatctatataaatatatatatatcttaatttaaaaaaaaaaaaagtgatggttggttatattaagagttatcacaacaaaaaaaatgatattttagtgataattttttagtcataacataatttttttgtgattaaatgtgatttttagttacaacaaaatgtaacaattttttagttacaacaaaatattatttgtgattaaaacataatatttagatacaaattatcactgatttagttttagtcacaacaagtaatgtgattaaaaatatatttagtcataagaaattgtaatttttgtgataactttaatagtcgtgaaccttttagtcacaatatagaataataatttataattagtcacaacttttttacttttaattacaagttttattgtgacaaaaaataaatttttttatagtaattatatagcaagttacttaaattggctccaccaaaacaaataatagggcaccaaaaaatatggtatatcatcccagagccggccttgagaatatatgggcctaaaacgaattaattttgagaccctaaaaaaatatataaaaaaaatattaaaagaagagttttatgagatttaaactcatgaccttaaataatatgtcatctacctcaaccaactaaactatgaatatttgttgcttacaatacacttaaattttacttaaataaaagcttaataaattttttatttttttattttgggctcccgaaaagtgtgggccgtcctagacgcccgcctatgtctagggtcggc

SEQ ID NO: 398095 - DNA, 897 bp, Cannabis indica
tatttgttacaatttataaaataacggtaattaataaatcaaatataatttttgaagagtaaagagtaatttagtcaaaataataaaaaaattattccattcaatataataccaaatatgataattcttattccgttgttgattctatagtctttacaaaacaaaagaataaaattccatttcattccattcttaaacctatttccattcacattcatattccattttcacttagtaatcaaacgccacctaaaaggttatttagaacacccgaaaagttaatgttgcccttaattttgtccaaaatacgtggaccaacacgactgtgacacgtggatttgaggagtagggttttgagatgattcaactaagtcttttttatcaagaggatcaacaagaaacatgcctcccggagaaggcacgagggatccacacactcccggagggcaaagctataacaaagcacctccgggaggtatcaaaccccatctgaacagtcacctcgcatttaatgccgcatgagagaagacgtattagaactgccataagtattaaaatctgacggcgtaaccccctgctgcagctattatgctatgattaataagcctagtgacgactactttatgaggaatcacatcagtcaagaagagataatggattacatccacctaacccctaaaaaacctagggtatagaccatgcatttcctatgttacactcgttgagaatgtgtgcctctactgaaaaatacagaaagacatgtagctcggttctagggatcaccccacaaaaacactataaataccccccaaacacattaaggcaggggtcgagatttctggtttttcataagaaccaaagagagaaaagctaccaagaacattcattgtaataaat

SEQ ID NO: 398096 - DNA, 973 bp, Cannabis indica
ctttaatcttttacacaaagggttgaaccaaaagtcttggtgttgtgctccaagttgaagaagtctagtaagatactccacgactagaacaaagagcatgggtgagatatgatctccttgcctcagcacttttgcacctttaaagtctccttgaattctcccattaagtattagagtataagaggtaccttttagacaaatcatcacccatttaatgaagcgagaggcaaagtacaaggatgtcatgaacttttccaaaaaacactaatccagcgtatcgtacgctttacttaaatcaatgtttacaggacaatgaggggaggcattcttcctattgtaacttttgcttaagtcctgaaaaattagaatgttatgagccaaaactatattcttgataaaaaatactttggttttgactaattaaacaaggaagcatttcagacaacctgctacaaagaatttcagaaatgcatttgtacaacatattacaacaggcaatgggatagtattatacaaccctcgaaggatgatcagtcttaggcactagagcaattgttggtatgttaagctgtgtaggaatgttttaaaaaattcaagaatagaacaagctatttaatcacccaattctaaccacatttgcttgtaaaaagccgagccatagccatctgaaccaggactcttattgtcaaggatgctgaaaagagatttcttcacatcctcctatgtaaaacgtttcatcagccctaactgtctatccaagtcaagtttaggccccatatttaataattcagcattgaggctaaaagttgttgtacttctactgcccatataccctttgaaatggttaagaaagtgatgaaccacttcaggaaagtcctcaatcacaaagccttgttcattaacatacgaaacaattcgattttcttcccttatcttcttgatactagcatgaaagaattgttgggttttatgc

SEQ ID NO: 398097 - DNA, 571 bp, Cannabis indica
tagtagtgcaatatagaagttagggatgaagttttgatagggtgcgatggttgataaaggtacggtggtacggtaagctacgataataatatcctatcgcaccctatcataccccatcgtaccactatcatactttaacacccatggtacctgttgtggtattttaacacacaagtatacgtatcattttaacaagtaatactcaggaatcgagtagataaattttaaaactaaataactaagcaaaaataaataaaataaacaaataagaggtttaacaataaatgtgaaattagagatatgatttcaattgtatctatctattatggtctaatatgattcaactcttattaccaaattctatgcaataacatgtttactcaagtaatttatagtcttctcagatatataaatctcaattacatgcaaattttctactctcttaataaattaaacatgtaaagggattaaacacagaaaccctttaagctatccaaaccatatatgtactcttgtcttatactgaaatttgtttctatttcactatagcataattgatactcacttctca

SEQ ID NO: 398098 - DNA, 942 bp, Cannabis indica
ttaaataaagtcctacaatttattagtacgcatgatttcaactgatatgataatcaacaatgtagtatacttacaccctggataaatgttatgtcctttatagggaattagtaaagtaagcttggattggatgtattgttatacatcggattggactgatatttaacttggataagatatcataaacttactgtaatatctatctgagacaatatcacctagttgatcttaaatcaatgatctcaatcctaagatggttaggttctagttcaattgtattatttatgttctttgaattgtttgttaaagtggaccaattggatcttatcgatacttacatattaagaataggtagttcaattgagtggaaacactaatcgtggatacaaaatctatagcttctataaatacatagaagtgaaatgatgatttccttcgagcttggcttaatagagataaatggtggagtactcatttcactaattatattaatttactgaaatatcatttataggtagctaagtattttaaggataaaatacattgaaaggtagaacggtaaatttgtccttactcgatgtagatcatctatagatgatcattgattatttgaattataacaattaataattaatagtgtatctatatcttagaacatatagagtgttctatataattacgagtgcaattccgaatttatagtggaattaggaggacttaataagttagagaatttacgtggtaaagtctgaaactgcttattggaagcttgattatataggctcatggccccacactagttgagataatactgcttgtagactcagttaattggtgctaattattcaattataattttaaaattagactacgtcttatttatgaattttcactaagcaagagcttaattgtaaagaaaatagattttagggtttatttgtt

SEQ ID NO: 398099 - DNA, 743 bp, Cannabis indica
gtctaatgcatactagagcctacatgagacttctcactgttgatgcttaaggaattcttttcatgacttttatcttttttgaatagttaaaactattccttacataaataaaatatatgtctaggagccaaaagacttcatttagagctagtcattagaaaaatgctccagcatcttactaaagtaagttgcttgtactagagtaagtaaattaccaagtataccacaagtcataagtttagataatctctaaactatgatactaggatcatgaagttttgttaagtccattgaatagacttattatcaaaatttcccttcttgtccttgtaatagaaaacttttggttgctctatatgaatagtttaatcatagttctcttgactttgcttcttagttccttattaggactatccattgcttgtttaaactaacaatgaatttttatcataagtgtctttcaagtcatagtagggtgagttccttgaaaccctcccactacaaaagttaccgtgactttttttctaggaacactcataagttgtgtcaatacaacagaggcagtgggaccattttatataaaataagatgatagaacactttagaattaaatcaaaaggtatctcctctactttgctattttattttcagatttagtcacgcacttagaaaaatagtatttgttgaaacaaacactttcttatcttaatgaccgtgggatggtccacccctaatcatttaga

SEQ ID NO: 398100 - DNA, 529 bp, Cannabis indica
acattatctttttcattatattaggtgataatatagttttattttttgttattttgtaggttggtttgtggagggcctacaattacagagaatttaccgataagtttaattgaaaaaataatttgtttgatgttgattttcaacagtttctaattagggtgatagtttgttactactagccaaagggtaataccttaggctagtttttctcaaaaattatgtttggttttttagtttttagtattgttgagttagtgttatgggttgtgtgttaaattttaagtttattttttagttttattttgaaaaatgttattctaatataactatattttttggtttggtgttgtgatatttttcaattttgctagctctaatggcaatttatattgggaaggtatgtttcaatgtgatggggtgctgtttgacttcgttataggtttattgtctaaattttcgggggcagttttgtcccatgtggctcggaataagaattttacagtgcttgtgttaagcaaaaatttcacat

SEQ ID NO: 398101 - DNA, 750 bp, Cannabis indica
gaagcggggacgttacatacttatcctctacagtaaagttaagaacgcatgtatggaacccataaattaagcatgcaaaatagaagaggaaagaattgaaaacttactcactgttcgacgtctgagtttggtccaaacgaagctacccggatacttttggtggaaatctcacgacagacttaaagcgaaaacttcctttcttactctatgcttgctaaatagagaagttggtaaaagtgaatttgttaaggatgtacaaccctatttataagtagaaaaatgaaaaagggtaatcatttcaaatgccttagatgcctcagttccaccccaaaagcaaatattgggaatcaaatataatcaagtgtaaccctcaaaatgtggtgagagaaaactgggtttcgaatcattaattgcgtgaaagcattaattagccaaaaattgaagtgatgcctagttagcctcacatcgaatcgcgaacagacacactagacacgtgtcacccatccaaacgcaaagacaactcggatgaagtctacacgcaacttcggaagtcccgtacagacttgggggggaaatgttatccaaatttttgcaatctgacgtggcattgcacgatggtgacacatggagtcaactctatgtacctactcacaagaaatatgacgaacaggacaccacatacatttgctcggacgaagtcctcttagccgggcagtgagcaatccgcgcagcacaccaacacttagcaaa

SEQ ID NO: 398102 - DNA, 1040 bp, Cannabis indica
gtctagctgtgcctgtacggctgcgctaacttgctcggcattctaatcaatttgaatcacgtctgcatctttttgagtgggaattttagcacgggctccaggctgcacgatcttcatgacattctgatcgtctactcctctccttctattcagatcattccttaggtaatgagttgtccccaacctttcgaatacagaagcgcctggctgccttagcgattgatttgtttggttgacaggtggaatggcaccgttaatctggtttgaacaatcaggtatgatctctcccgatgacttactagacaagttctgcctgcctaccgcttggcccacaagtggaactcgtgaccggggattgggcggcttacaaattgtagtctgggaagtattcatcgctggatcttcatctgtctcacacagggggatgacattcggaggttgctgacctacagtttggtaagcttttcgtattagcatggtagcttgccaactaagattttcaatctttgtatgatgagctcttaacgcctccatctctctgtctctccactcggtaagcatacgcctttgttcttcgaatgcgagatttaccgcagcgcggagatcttcctgatcatgatgtagggtattgttatgatcctgcatgagtccaagaatgtcacggagattttgtaactcagtagcatctccaatggttgttttagtattagtactgggtggaacgactgtgttatgaatgccctggttgggtgcggaactatttttcccaagtctcttgcacaccagacgcaatttcatctatagtagttgttacaccgtgacccacggttgccggctgttcaggattaacagccggcggaacccttgtgtttcatgatttctacaatgcaggatccagcgtctgtgaattggctggatcaacctgacccccacgagtctccaccacaatcgtacttgtggttagattttgaatgaagagcgattcttgattcttctctcaatgaaagcaccaaaattttgaccttgttgggttttatgcc

SEQ ID NO: 398103 - DNA, 681 bp, Cannabis indica
ctaaaaaatgttatgtgttaacccaaaaacacttcctagtaacgtggacatcaatgtttgacatgtggcaagaaggatgatgtcacgaagttgagtagacctgagtcatagcagtcgacctaagaggggaccctagccctgtgcccatgttgacttcaaaagctctgggatgaaagttcaaatttcaataacttgaattcaactcactatctttcagtattatgcaccatgaagacatggagcaatcaaatccaagatctgggagctaaaattacatgaccttgtcccccaaaagcaaacctgggcacctagggtttcacccagcgcccaagttgacattcccaactaggatttcagttttcgagaccgtcttagtgcaaatggatcaaactttgcattgggacatcaactagacataccacaaacatatttgaggtatcaaaattagattccaagcaagttcatttttgagcacccagtgtctgcgcaccttccaagtatcagatcaatgatccaattttttcatcttctttgtcttcatgaaaaatgggaaaatatgtacttttagggaagaaacaacactccctgggtgccggaaacaaggcccagtgcccatgttgacattttgtcaacctaggccaattttaatgatgttttctaagaactcttctaagcatcttc

SEQ ID NO: 398104 - DNA, 621 bp, Cannabis indica
ctagcatcaccactattctgagctaatagggtggtgaaaatctacgaaagattcattttggaaaactgaaccaaggatggaggtagttccttcccatgccttggacttacatcgtcttgcagggtgtgcccgacacattacctgttggacaagcatcttctgtgtttagagatcttcttgcagtagaggctgctgtgactgtcgcccagtactctgagcaacatccaaccttgactaggactaagtaaacatattgccaggctcccctaaatgatcctcatattgtcgaactcatggcaagagggagacttcgacaggttgagcgggctgaacaagttgaggtcggccaagctgaggcctatggccggccgggacttgggacttgggatccaaactgggtacccagaacccaaactcgaatctgggacccgaactcgaaacacagacccagtccctaacctggatccctaacccgaacccggactcgggacccagacctagacgcggactcgagccggaccaaggacgcggaccccagactcagaccccgatcccgaaccctaaacctatattcgaacatggacatgttgttggaaattatttaccaggatcttagatcta

SEQ ID NO: 398105 - DNA, 481 bp, Cannabis indica
tagaggaggccacacaaccccgttatgatgtagatccggaagtcagccaaggagaggtgcctgatgttgaccaaggggctgagagttctaacactgggtttgaggtggaggagattgcacctgttagggggaggacatatagacttatgttgtccttcccaactgccctctaggtgcatatgacgtcgatgggcagtcattgaacaggctaggctagcctttggtgataggtttggaccatgtcttaatacaaacttcagagcctctgttcttgatgatggatcacagggagagaagtgggtctctcctgcatctattattcctatcgagacttttgataggatactagccagtggactagtgagaggtgtctagtatgagatacccacgagggatgagagagcacactggcttgcctttggttggatggcatggtcgaagcatcatattcaacagggggtagtgtgttgggttttatgcc

SEQ ID NO: 398106 - DNA, 511 bp, Cannabis indica
agtcttctcaaataaataattttttttacatgtttcggtttctttttttaccaaatgcaatggtgtgaatatcaatatatattaccctagttttttgtggtattatttgctttaggccattcttgtaattgcctcatatatatgtgttgctttagggtcaatatgtaaaatagtcttaaatctaacaattaagttaataaatgttcttttttagaaaaattaacaaaatgtccattcaattaaaaatttgatgataaaattacaattataaccttgaataattaagtgtttggtatagttattttgcaaaatagtatattgtttttatgtgcaataatatattaaaaaaaactgaaaggtagtatatatatatttttgaaataactgaaaggtagtacattagtttaagattgtagtatattattttaatgtgttatagtatataatgaacaaaagacggaaattaaaaaatgtgaaatattagtttaagtttgaggtatagttatatttc

SEQ ID NO: 398107 - DNA, 1503 bp, Cannabis indica
attcatttgtttcaaatagaaaagtcaagaaactatacctttctatccctctctctcgagctccttagaaaaccagctagggtttgtgttttttttttttttgctcaattcaaagagtttccaacaagtttagagtgtgttcaaatcaaggtaaactcatagcatcttcttcttagttttcataagttctagttaagtttttatgcatatttttggcaagtagggttatgtgttgttgattggtgtttgtttatattttctgaagttgcattaaggttaattaggttgaattgaactaggtttgtgggatattttgatgtatgagctagctttgagtttaagaactcaaactttgctctctaatggtggtttttgattctgagcgtgttgagttattttgttgcatgaaatatgtctattacggtatattaaatagttctggaaggtctggtaaagtttgaggtcaaattgagggtgtagtgaatttttgagcttttcctgcactgaaccggtcgactggttggtccccaggaaaccccacagaaccaaaattgcagttagggtctaccggttgggccattttagggaacctagtttttcccgtttttgcaatatttagggtatttccatgttattcatcaataggaaaacttttggtttcaagtttaagtccccgaaaagtgatttagcatgtcacttatcagttttccaaataatgtaatttaggggcatataaattgtcgagcagttgttccactcaggatggtcggcacacttgaattcagaaatgaggtaagattagtaaaatggttacatttatgtatacatgtttagggtacatgttagttgctgtcagaataacatatcagggtatcagtgaggtgtacatagagttgcactgagataccaacatatatatatatttggcaaatctatagtcatcggattagcatatcggggcatcagtgaggtgtacatagagttgcatagagatgccaatagatatatgctaggctatcagatagtataatctaactgctaccacatcagtacaactagaatactgagtataggctggattcgcagttagtcatactttatcgagaatgttcctaactcagttagtagattatgattaggtgtataggtgcctggttgcagtctggatatatgtttaagtttatgattatgcttttcttactgagtctttcgactcatagatattacttgcatgtgtaggtaagggcaaagctaaggttgagcaatcgtgagagcgagcagatgaaaattgtacatgtcgggcggttaggcttggagcttacgatctttgggatagcaggctgtactttaaatggtcgctaggcgacaacttttgtaaagaatatttttttaactcaaatgtaaatactttttaatacggaatctcggttatgtaaaagatatttacttttgtttaaaaaataattaagtaaattcttttaattattcatagttttcaataaa

SEQ ID NO: 398108 - DNA, 699 bp, Cannabis indica
atatcgggcgggttgaccgagttttggatttgcgggttttaggttcaaaaaattgtatccacacccgactcgtgaaatggttcgggtggcaggttttgggctcgcgggtttgcgggttcgcaagtctggaggttcgggttgatcaggttggctgttgaccccttaactcgttaatctttttttttttttttaaaaaaatgaaatttatgtagtttttctatatattaaattaaacatatacgttataaacttataacaccacaatttatattcgttagataaaaaaaataaaaaatacattaatttcaaatctaaaatataaatgtcaagttgcagattttatataatatattatatattgttattttaaatatattatctatgtaataaaaattaaagtaattagattttagggttttttatatatatatttaatataatatatatgtaataaaaataaaaaataaaaaaaaaaagtgaccgggttggtgggcgggttcaggttcaacccgaaacccagtgaccataaagaaccaacctgctcacatgctcaacattgtactgggttgaacccgccccgcctgaataggatgagtgttttttaatttgacgggttcaccaggtcgggtccgggctggttggacgggtttgggtcaaactcggtcaaaatgttcagtcctagctatagggttccgtatg

SEQ ID NO: 398109 - DNA, 1222 bp, Cannabis indica
agatgaaaacatatataaggggagtgaagtgacctgtaaaatgaccccgattttgattctcatgaaatcattctcttgagctcccattctctcattctaaaaactcacttaaggattgaattcttggagaacataattctggagaactctcctcaagcattgagatcaataacattctaagtggattagcctgttaccgccgaaagaggcactataaaatcctcgttttcatctttgtcaaattttctttcacaaactggtttactttgattaactcttacttgtgttcatcttgctcatttacgatcttcttagatccattggcaaaaaattaatttttaattttcttaattattcaaaataattttttaagatctaaattaatttttttaaattatcaaaaaaaaaaaaagatgttgaatctttcttatttttatttggaaagagtacgatttgatagttgtcaaagttgctaattcacaaggacatgctagcatttaaattacaaaatggaatcgaacctaataaacaaaaggactaaatttctgtaaatgtaaaaattttggtgggagatattaacaagtcgtatattttaagggatataatctggtagtgtcataattttagggttaaaaatgttgattattatttattttttggtaatgtttatatttatgggatttgttgattcagttgtgttcgtaattttttacgtgctaattagcaaaaaaaatatgtgtttgaatattgctgggatatttttttttttctacttaatttttgttctaaaacttaaattatcagttagatgcatttgaaatatgttgtttgtgatttttttttttaatctagatttgtcttagctgttttttttttcaaagactaataatatatatatttttttaataaatcagagaatttattaaataataaactcattcaaaataatagaacgcacttcagaggagcaatcctccaactgaagcacacaacctgtagagaaacaagagtctcttgccaagcaatgagccaacttgcttgcagatcgtttaacaaaacataactcaacaaaagataaagccaaaagtgaattcctaacatcttgaacaataagaccaaactgcgaggacataaaaacattattttggactgcttagatacacactaaactatccgtttctaacactacattgtcccaggaatgagttgcaatccaactcaa

SEQ ID NO: 398110 - DNA, 1165 bp, Cannabis indica
aaaaaaaaaataaaatttaaaaagttttttattcacactagtaattatttaaattaaaaaatttatattatcattacctatttttttttaataagactattttatcatatgagaagtacatatttttttttctatcgttattgagaaaaatactaaaattaaaagtaacattttaatttttttttttcacacttaatttatgggaaaattacatctgcacactaaattatgatctaatttacaaaaatactgttagttatcacactttaaaaaatataacgtaatttcaaaaacatattactatatataacgtagattaaagtattgagtttcactttcaagttattacaacacgagagtaaatttcttttctttcttaattcatctcagcttaaatattttttgttggtctttagttctttttgtataaagtgtatccattatttttatttttttttcttctagagttttaaaaaataattttgactacaccggtatttgagatgagttacaccattatattctactttttaatgtgatcattttattatgtaagaagcatatattagtttatttttacatattaaaacaaattttatttttcttttgtatattagaacaataatttatttcatttcatatagcttgcaattatatatgttagtaaacctactagttatcgtttgttgggggaacaacattttattttttttcaattagagagtaaactataatcaaacataatgatatacgcctagaaacccattagtttatttttcgtgtatattggaacaacaatttattttttgttttcaaacacaatgtgtgcctataaaataacaaactaattaatctattttttttttcagttgagacatcaaatctagttgtatacaaagtacataactgtaacatgtcttatatagtaaacctggatatataaccttatatgcacttgtcaaatatttgaatatgatgaaattccttgctcataagtttatttggcatatatgcctatactcatactagatagatgttacgtgccaagtcacgtatgttaattttattttagtttttagtttttttttaaatattcataattttaaaatatttaaaatttaactaactctaaatatcaaaatttgaaaataatttttaataaaaa

SEQ ID NO: 398111 - DNA, 1087 bp, Cannabis indica
gcatagctggcccaaagccttcacaccttgaacttgattggtcgaggggatcaccattctcggcatatataaatttcctacctctgctaaagttaaaaatgctagtatggaagatgtatactggacgagatgactttttgggtcacgtcaagtactttgagatgcagctcaacctctagaaggtcactagtgatgtgaactatcgcatattcccagccacactgttggagacagccgaacagtggcactttaaactcaccacagggagattcaactcctgggctaagctctcacgagaattctatacacaattgttgtcctcgagacttgtaccattacagctagaagaccttgttgaagtcaaacaacaataggggaaacctctaaaagaatatatttagagatttatggtggaggctaccaaagtcaaaggccttactgaagaaggtcgatatacaaccatactagaaggcatactcccactaagagacttctagacagatgtcaagaggatatccataaatgatatgaaggagttcctcaatagagcagacaacttcatcaaacttgaagaagccatacgacaagcccagataggccatgtcaatagtaggcagtcacgaggcacccagcagcctcatgacccattaggcatacaggtaggcaacaacaatgctgcccaaaccccttgtggtaaaaacactagaaacaagcgcagcacgaacaactttgggaggaacagtggaaaaaggcggaagtttaaaacttcttccacaccagagaagaacaaggaggagaattacacttgctttaccctcctaatagagacgtacacttgctacagcagatgcacttgcccgtttggcaagcagaaccattggtgacaaagaaaacttggtgcccatatagttcctagaggaaccaagcattattatccaagaagaagtctacatgttggatgacgctccaacttggatgatacatatcgcagcttacctccaaattggagcctttccataagacaaaaatgaagcaaacaaactaagaaaaaaatcttctaggtacctgatgttgggttttatgccct

SEQ ID NO: 398112 - DNA, 604 bp, Cannabis indica
tgctgcaatcccctgtaattttattgccgcaaacagggcaagttactttctcactcttgtcaaaaagttttttcccaccttcaaaatcctccatcttgttcctcgtatcactaatatccaccatcgaagatgcttcagaactctcaatggacgcgaattttccatctttatcagtacacagattcaaagggctctgcaactcacaacacatacacacatatttacatatccacaacgtcgaaaatgaagaaagaaaaacagaatggggaatacctgaataggagtagagagtatagattgacgtgttggaaggaagcgcctacgttttcccaccaatcgaatcaggctttctcttcccctgagcatgattttgacctaatcgaaccagaggttcaatgtgtccaaattttgaagcccgtagctttatatttatattgtcccgccaaacaacagaagagtctccagtcgagccgttaatttaatttgtcacctcaaaatgtaacttatataaatacgtaattgttcatagtattttatttaattttatcataaattaaagggttatttgcggcaaaatctcctaaagtagggaggtttttgcaac

SEQ ID NO: 398113 - DNA, 887 bp, Cannabis indica
attatattcacgtatttcaaataaattctcgtaattaacaaattacgcttatatattcacttattgagtctccagggtcgccaaacctgaaaatatttttattccacatatagctcatattacattcacacatgctatataaatctccataattaacaaattacgattatttactcacttatagcaaaatttaaattttatgctgaaataaattagtaggatcataatcccacttattacctgattaacccataatataaatataaactctaattaggtaccattaggcttatcgggatattacacatgtactcccctgagacttgatttaccaccagatgtgaatcactgtagactttaatgtattcagcgtgtacctttcgagcaagctttagtccagctatgattgcttcatactctactttgtttttggaggctatgaacccaaatttgattgctccgtgcagaggttgccccaaggtgtgatgagagcaattcctgtaccaaaaagctgatcggtggctgacccgtccacatgtaatttccagataagtttgtctttattttcttttggtagggactcttgtactagctcgggactatcctttgaactgtcttcctctttgcctgtatattccaccacagagtttgccaaagcctgcccttttactatgtacataattgaaagattattttatactgtcctaactctatggcccacttgagtaaccgtccagaggcattagacttttgtaaaacttggcacaagggttggtaggtataaacccgaagaggttgtgcttgggaatagggccttaactttcttatggctaagaacagacagtaagtaagtttttcaattaaaggataccaaccttctgcttcaa

SEQ ID NO: 398114 - DNA, 796 bp, Cannabis indica
ggattaacagctggcggaaccctcgtgcttcctgggttctgcaatgtaggatccatcgtctgtgaattggttggatcaacttaacccctacgagtctgcaccaccatcgtagttgtggttagatttttaatgaagagcgcttcttgattcttctttcaatgaaagtaccaaaatgttgacctcgcttttagccaacgacaatgagtcttatttagtaagcgataagtgatttatagcaatcgatatatagtaaagcaatgtaaagacacaagaattttatagaggttcagccccaagcagttcggtaatagccgaatcctcgttatttgtattgacttaagaacaaggaaaaaggttccttttcttatagctcttacaacagtatctctgaataaaaattcttacataatatctttagggtaaagtcttgactaaactgtttgcgaccctttgcccagtgaacatgcatcactatttatagggctgtgaacttggagaggaagtctttcccctctcgttacaatggatataaacagaaaagatcgtgggtaaatgcagaatacaaagatcgcgggataaatacagaatacactgatcgtgggatcgtgggtatgccatatatctgtaatctgatccccaagttatagggatttcgttgatgactcacaatgcaaaatctggattcgctaagtgttggttgcttcggttatgccagcgaggcatcctgttccgactgtactctccgagcagatactcaaagttgattccacgtgtctgttgggttttgtaccctaaa

SEQ ID NO: 398115 - DNA, 647 bp, Cannabis indica
aaaaaactcacgtcaatacctttagtcttcccaaaaaaacttataccaaaaataaataaaagaaataaataaaaaagagactaattaaaataataattaattttttgacaatttaattgcaataacaatgctacttaattttatttttcagtttatattattatgattgtacgttattattattaaacaatgttaattaattaatagtattttatattaaaaaaaatatttattaataataatagataataaaattaaaaataactatactattgtaaaaaattgttattttcgaatcttttaataagattatgagtatatttttttttaattatttttcccttttgtttaataatatgcttgctaattagattttcattttttattttttttggataatgaatgatgtgttttagtaatctaagaaaataattattattgcttttattaaaaaattacaatttaaaaaagttaattttcttctaaccaaaatataattgtcaatattattaataataattgtgcattgtagttaatttacaaattacggtgtcttttcttctcttatttatttcctcgtattgttgaattttatgttggaaaaattaataatatacccaagatctatttgtatataacatagaaca

SEQ ID NO: 398116 - DNA, 721 bp, Cannabis indica
cttttacacttagtttgttcattgtacgtaaagcacctccacgattgatacgggtcgctttctttggtgcctcgctattttcatttagcgacatatggtttctcgttaatatacttagtaccaatttgtacattgattcctcgcctaagacctgggttacaaatatactctgatacttacgtacttaatgatttattccataaaagcaatggcatcgattcacattccatttatcaatgacacgtgtccttcattgaggtggcagccgaattttggatataacaatagtcatttcttgattataagtcagttgatgaaggtaaaatcctaatgtgtaatgatcatacatgcaggtcattagaaccagaaaggtggccatcaaatagtatgatggcagaatcagggtgttgacaaaagtaaggcacatcccagaccttagacaaaacctcaaatccttgggtgtgcttgaggatgaaggatacagatacaagtccatgcactcaagcttgaggatcaccaaagattctttggtaatgatgaaaggtgcaaagataaataggttgtacgttctccaaggagaaacagtccaagctagagaggcaagtatggtgaaaggacttgaatcagacatgaagttgtggcatcacagacttggacatatcagtgaacaatgccttaactacacaaacaaggtataattgaaaatttaaattcttatgcc

SEQ ID NO: 398117 - DNA, 354 bp, Cannabis indica
ggatcaaggccttcttactggtattgctatctctcgcaatgcacctcatatctcccatctcctttttgcagatgatcgtattttgtttgttctgctgaccctaaatcctctgatgctttgaataatgctctccataactattcgaaggcttgtggtcaagttgtcaattttgacaaatcctctattctcttttcccctaacacaaatgatagtatggagactctgtttgcccaaacttttcacttggataacaaaacttttatctcaaaatatcttggccttcctcaatgcctctcccgatccaagtaccaatcttttacctttcttaaggataaaatgttggaaattatttta

SEQ ID NO: 398118 - DNA, 521 bp, Cannabis indica
ttttagtattgtccaaattcatccgacaacaattaaaatgaaaaatttatttagatcggccatgaacatatatatgcatatacgtatataagctcaaatgaactaagagagagataaaaatttactttgataccaagtgttagagattttatatgaaaacatgaagcatatatgattgtctatgaaaagtagaattaatcgaacatatacacgatatagctaaaggatcgaaatatcttgagccattgattctttgagcttcaatcccacaccgatctgcaaagaaaaggaaactgattagtgtgtgtaatcagacctctaaactctctctactctctttagataaatacattgtgtgtcacagaatgagtagtgagcccagggaccgagactctattattatataggtaagacattttatcaaagtctctgccacattaattatgagaatattttgataattaattttggaaattaaattaggtaattgaaatatttagtaatcaaatatgaccattatt

SEQ ID NO: 398119 - DNA, 1238 bp, Cannabis indica
aactgaagcaaaaaattatttagtgtcggttcaaagttgaaggaaaaaaaattaatatttaataatgtcggttacacaaactgaagcaaattatttatgtgttactttaaaaccgaagcaaaaagtccttttttgtagtagtgattattgtgtttgtttttcttatttcttaagttaatttttgtgtatatgtacataaagaaatgcatgccatgtgtttgatataatgcctaaaagaaagagggcatcttcattgtgcttttttttttcatcttttaagataattttcttcatgatatcgttattgtctttattttttgattattcagcttcttcgggggtttgcttttgtttgttttcttgttgttgtatggtttatcctgttgttaaagtgctagtatcaaccaaaataatatcttttgaaatttattccctccctggagcaggtaaaagttttttaattgttgttgttctgttgttttcaggttgctgcacatctgagtgtactagttattgtcactttctgtcattatcacattgttgcacactattgtttgggtagctgtcaaaaattattgtgtttctatattgctgaatgtgttcacacacaatggatatcgtgtaaaattggtttcgttagttaatagttttatgtaaaacaacaaatttttgtcatccttgacttggagtggttggcagctttccttcaattagtattttagttttttttgagttgtttcaaggatgcattatagttccttcagcatgttggtctttgtgccctaaataaaactctatttcaatgtaatctttatcattaaaatattaataaagagacagaagtattttcatcacttattaatgtgtcatttggttcatgttatcatttatatgtttatttgatttataaattcatccaaacccttatcacattaatattcttgtttattatgtcgttagcacagtggaaagtaatcaagattatatgatgaaatatatattcctagatttatcagtacacagggttaaactaatatgataatctagaacatagtttacttgcacattggataagtgctatgtcattctagggcattggttaaagtaaagcttgggttggatgcatggagtatgcattagaagggactgatattgaaactttgactagatatgataaaaatttccgtaaatatctaattcaaattcaatatcacctacgttgatcctagatcaaaatg

SEQ ID NO: 398120 - DNA, 531 bp, Cannabis indica
gaaattcctggcaaaactcatctggtttgcaaacttaataaggctttgtatgtcctgaagcagactcctcgtgcatggtttgagaagctccatcacagccttgtctcacttggctttacaccctctaaatctgaccacccactcttcatcaagcgatcagctgaattgactatcctagtattgatatatgtcgttgatattttaatcacaggaagtgattccaaggctgtctctcaactcatctctgctcttaacaatcaattctcactaaaagatttaggtaatctaaatttttcctgggaattgaagtgcaaacaacagagaatggtttacacttatgtcaggccaaatatgcacgggacctcctacagaaagctcaaatgattggagcaaagcctgctccaacacctatgacaagtggacttcgtttgtcagcccaacaggtggatcctgtagcagatgttcaattgtatcgatcaatagttggggctctgcaatacctcaccattaccaggcctgagctgtcgttta

SEQ ID NO: 398121 - DNA, 667 bp, Cannabis indica
gaaagaggtcaaacaatggacaaaaagcaaggtaatggaaaagaaagcatgttcaatagaaactacgaatagattcctcgagagaatgcctcaaagctcactaattttacatcctaaaacaagacatagaacaatctatgcaaccacccattctttggtgccatacagaaaaccctctcccatgaagaaggacatgagcaatagggacaccaataagctatgtcattttcctgcatactatggtcacgacacaaatgaatgtaataacttcaagaaaaaaatagaatttctcattaggaaaaataacccgcacttacaaaaatatgtcaagaccgaccaagaacaaagggccacccaagaaaataacacccagaattagataatgcctccaccattgggaggagatcttaaggtttgttggagattattttaccaggatctagatttactaccatgtatgttgtttaacatcctaataagaatttctaaaacaatgtaatttaaacacatataaagtttaagaaatcttacattggttgcagcagaattaaatgactccttccgctcagatctcgaacccttgtatcctttctgtagcagagtatcatcaagatctgagcctgattctccttcacttgaattggattcttcacagtcttacacacta

SEQ ID NO: 398122 - DNA, 1304 bp, Cannabis indica
gaaaaatggtctttttgcccaatttgaatttttgtttttagtggattaatttaagataacaatctgattttttatgttgattattattaatgaaacatgtagttttcattttaatttttacaaaataagaaattagaaaaagtgctctctctctttcgaaccccatagaacctagctagggtttgaagtttttgctgcttaattcaaggaattccagcaagtttttagtggtttttctttgttttaattgttgttcttgttgatggtgtttgagtttgttttctaaagttaaattaaggttattcatgttgttttgaggtagatttaagggctattgtgataattgagcaagctttgaatttaagaactcaagcttggctctttaatggtgaattttgattttgagtgtattaggttgttctattgcttggattatgttctttggggtatattaagcaggtctagaaggttcggtatgatttggattcgaattggtttaggtttcgaatttttgggttacctggtgcaaaccggttacccggttttacaggccctgtaaaatcggttaacaggattagcagctgggttcttaaattttttcgtattgtcgatttgtgttagtttcagagctttggttggttgattccttgtttatttagggtattgccatgttaactttcaataggaaaacttttggcttaaaacctaagtctccagaatgtgatttagcgtgtcactcacccctgttacgaatgatgtgatttaggggcctgtaattcgccgagcagttgttccactcaagttggccggcacacctgaattcggaaacgatgtaagattagtatagtgttatgcatatgtatttacatgtttaccatacatgttaattgtgcctgttagagtacattgatagcagtatcagtatacgtatagttgtactggatactgatagatgtatgtttggctcaaatattgatcgatgctatcacatcagtatggctagagtgtgactatcatattgagtataagctaatattatggtcgatagtattgtcgtatgaacgttctagactcagcaccgtgtgggacacgggatagggttattgttgggtgtatgggcgcttgattataatccgggttattgcaatgttaatatttatgtttttcttaccgagtctgttgactcacagttgctattttcatgtgttggtaagggcaaggctgaggctgagcagccgtgagagcgagcagatggagattgtacatatcggggcggctaggcctggagcgtacggtctttggga

SEQ ID NO: 398123 - DNA, 1199 bp, Cannabis indica
attcggctagcacttcagaagaggacacgtgccaaactaggagaatatgaatcaccaaatataatgatagttatatttgaataacttattaaatgcgggagtaacagagtatatttccaacttgttgactgtgaggtcttaagcgagataaaaatatacgaactgttgcctcgtgtattaatgagaaaccatacgacatcagtaatgctagacgagtcatcaaccttgctacgcatgaagagacatagactagacataatgactgttaagacacatagcgtataatacacattatacaaactaatcataacagccaaatgaatcaaaaactacgaatatcgaggcatccatctcgctatgggaaggcacactcatggtatcttcactagtcagctccagacatctttcaataagattcatagctccatcagtcagctctctcaaatagaagctgacattcaaatgatgttgactgctgatattcaccttgtcactaagaactgcgattgtcagatggggtgttatgtcttcaatagcataagcaatgagatttacattatcaacctcggaaagacatgggaaaaactctggctctctaccagggttattgttgctatgctcttagcgagatctcccagaacaatacgctttacaacgtatttaatacacgtttgcattgacccggtaaaaggggaccaatcacagttgtgtgattttcaaataataaccgcatttattttacgtgggacgtaattaaatcccataatttcaggggattattgttgtaagatatcattcagatttgtaattaactgccctcctatgtaattataaataagagggggttacactaaaaagggcacaaaaaatttattagagaaaaaggccctagaattgtatcagaaatctaataagattgactcatggactatgcaaaatttaactacaaaaccacgtaaaaaattttgtgttctttattattttctgtgcaaatttatcacagtttaggcttcaatatagttaacgaaaatctgcgttaacacttgtttataagataaagttatagttttattgataattatttttctaatataatttattttaatatatatgattttatttatttatctagataataaacatatattaaataatttttgaagaaaatatttaagttatatttctttaacaatcttgag

SEQ ID NO: 398124 - DNA, 621 bp, Cannabis indica
gggagcaccacagtgtgtacaccaagactgctagtgcagcagccaaaactcctcaatggaattaacttgctcaatttggcctttccaagccacccgtggcaagcttcttttgctcatgctccagttcaaccagcttttcacttgatttatacatacctgccgaacatgacattcaaaaaataagtgttccactgtctcaatttcactgctgcaaaagagacaagttttatcaattttaggatggtatttagttatcctgtcctttatcttgagtcggttaagcatggtcatccacataacaaaactatgcttcgggaagtttagccgactccaaataatgctcaaccaatactctttattttctgcagcaataattttgagatagccttgagtaatcacatacttgttgcacatattcttcctttcctgatctaaatcatagagctcttttactctctctttcaattacacaatctttctccaataccaactatcattacttttggctttgtattcccaccaagattgatcttttatatgcacacaatgtacccacttcacccacatattatcttccttttttcgcaatggcccaaatatatttaaacatagcagcaatat

SEQ ID NO: 398125 - DNA, 512 bp, Cannabis indica
aattttaaaatatatttgtattacatgtattaaaatttttaaattactaatttttttacatttaaatagtaattgtattcaattgagaaaatgacagccagaatcaaaacttggagtttgaggaacttttcttatgtaggaagaatggtccttatcaactctgtcttgttgtctattaatacttattggtcccaaattgttattttgcctaaagctgtaattcaaaagattactcagatttgtcgtgcttatctttggaagggagtggacatgagcaatggtaatgagaatgttgcttgggatgatctttgtaaacctaagaaagaaggtggcttgtgtttcaaagatatagtcttatggaatcaatgtgttattggtatgtgcgggctattactatcaagaagaacaacttttgggtaaaatggattaagtgtatctcaaaattaagattggtgggattaccaagtctttttggaggctgtttggtattggaaaagaatagttcaaaccaa

SEQ ID NO: 398126 - DNA, 585 bp, Cannabis indica
taggtatgatttcaagtgtttattataagattttcgtgacaaatattttttttcacgttatttgataagatttgggtctctccaatcatgaacacattattcctagtgacgttattggccctacgatagcaaagttcgtcaaacaggtatttcatcattctaattattattattttgttcttgtaatcaaatgaataatttttttaatatttgaatttttcaatacaattaaagttattagggttttgtttgtcaagatttgtggtttattttagaatctcatgtttatgattgttttattgatttaattaggtatttagagaagctgaaatgtcgattgagtgggaagcccataattgatctagaaaaatagaaatttgattgtcttttttctcaaggtttgcctttttttttttttgtttctttctttttttgtaatcaaggggtcaatgaattaaaaaacgattatatagtctgttttgtctttgggtttttgttggtgaatatactaaatcttctctgataagaaaaaattggctttgctaagtgttggcacttacaacttttaaggaagttatatgaaga

SEQ ID NO: 398127 - DNA, 591 bp, Cannabis indica
aaagcacgaattttagcccggatatgaaaatagactggcttgtttaagaaatacgagccaacacgagcaaagcacaacacgaatccgagcatgacatgaaaataccaggcctacaggccttgtcgagcctaccttttaaaaatattggcacaacctatattatatgtggcacagcacgacacaatctgtgttttgaaaagcacagataaataagagtcgagccagcacaacacgcacgaagttacatcactatataatgttaataaattatatataccattattaaaatatatataccatgctaaaaaagttatatataataaaatagaaactaaattcatcttaaataaatgatatatatgtatatacaacaaaatatgtatatcatacagcaaaatatatatctacaataattaaaaataaaataaaataatattttaaaaaagtatataccatactaacaaaattagagtaatttgcggcataaatacttaagtttaacttctaattgtaaataaatacctaaatttaatttttggcggtaataatacctaagttatattttgtaacgccccgatattttgccttatt

SEQ ID NO: 398128 - DNA, 546 bp, Cannabis indica
ccaggacccgatggtatgactcccggattttttcagaagtgttggcacattgtgaagcatgatgtttgttctctcataaggcaattcttttctgatggtgtattgcctactggtttaaatcgtacacacattgtacttgttcctaaaaagaaaaacccgattaacatgggggatttgagacccatttcgctgtgcaatgttctctacaaaattatatccaaggtcttgtctaatcggcttaaagtggtgcttcctcaattgatttcagacactcagagtgcgtttgttccaggaaggtatatgacagacaacattttgatttctcatgaagtcatgcactacctaaagcgaaaaagacgaggtaaagaaggcttcatggccttgaagcttgatttcagcaaggcatacgacagagtagaatggtcttttcttgaagcggttttacttaaaataaggttcgatcccaaatggatttttctggtacttcaatgtattacttcagtggagtactttgttattcatggtgggtggaacattggaccaatc

SEQ ID NO: 398129 - DNA, 499 bp, Cannabis indica
tgttcataaaatagccgatccaatctaatccaatccgtaaagtgcggacatccgcacttgtgcagattggattggattggaaaattcaaaatccgcaattgtgcggattggatgttgattgacatgtaaaagtaaccgatctaatccaatccacacatatttataaaaaaaaattaaaaaattatatatacaaatattattttaatgtaaaagaaatagtaatttaaaagtataatacatataatacaaatacaattatattgtaaaatttaatagatcaaatgtatattttattcttatatatatatttttcttacatacaatttaaaataaaattaaatattttttaatacatacaattttttcttcttttaaatttgttatttgttattttatttattttaatgtgttgttggagacttaaaacaactataatttattttattttgttgtctagttatgtgaaaaaaaaataatttttttccataaatattaaata

SEQ ID NO: 398130 - DNA, 672 bp, Cannabis indica
atcacgatcccgcagtcctagagtgaagaattcttgaggacgaagcccaagaagaggcagtccacagagacagcgaagtctgaagttagccaagtcccctccaaagaaggaatcctccccaaaaaggaaaggtggcccacgctttgtgaactataccgagttggcagtacctcgagaccatatctacgccgtcgaagagaaaaatggggtcttcaagaagcctcccccaatcaaggaaaactgcgacaagagagaccctaaaaaattctgtaagtaccataaatatattggtcacactactctggagtgttggtttttgcaggacgagattgaagagttgatcagaagaggaaagttcagcaagtacaagaagaatgaggaaagtcatccccgagcggatgacaaagaagagaatcataatgcgagtggttagagaactcctcacaacatcctgaccatcataggcggaccccatatcgcaggtgactccagaaagtcgcaggagcgatatgcaagagaagccagagaaaagccactcacaaatgtgaacaacctgagcgagcgacgagagaagctgttcaagagggagtgcgacgacatcacattcatggagagtgatgcgagatgggtccaccacccacattctgatgcattggtcatcgttgccaatat

SEQ ID NO: 398131 - DNA, 720 bp, Cannabis indica
taaatgtatatatacatttatattcatcaaatttacggaaaaaattacaaataagtacactgcaagtgtatatagatgcattcaacaaaactacagaaaaaagaaataagtggataccatatgtattgaacaaaaaatatttctttcaatcaatataagacaagtacagttcaatacaaagtctaaagagaatggtacgggtgttgactggatttttagccaactgacgcggaatcggaataaatgagatttaaatcagaaactaacaataagtatgaagaatgacaccagaatttgcaataaatgtaaagaaagacactggaatttaaagagattcggccccaaatgttaatagcctacttcccttgtattttattgatcaaagttgtaaaatcaagaacaagctcttgaatgcaaaaagtaacaatggcagagtctcttttctctaagtactcaaatttttgaatccctttcccaagtcatggctgaccctttatgtaggaaaaaaggtcagtacttctctcttcaggagacgcgaccaatgctaagccatctcaactgcctccttggttttcaaagatggttgaaatatgattcttatggtaatatcccgctatttctatgggtttgtaaccgtctttgagtttcttgccagatttgaatttttgagctagccactgacgatgagggtctccccagggtgtggtatgatcgttaacc

SEQ ID NO: 398132 - DNA, 930 bp, Cannabis indica
tcaatattatagattttttataagataattgtagaatctttctaattttttaaaccgttaaatttttttcaattattaaaattgttagatttaaaaacttttatttaattttactaatgaaaatcttatctgaatgaaaattgagggggcatatatatgttaaagttcagtggtataattttatagatatcaaaattcgaatcggtacattaataaaattgaatgaaattaaaacaaaaatccttaaattcaatactctcaattaattttttttttagccacttatagtctttataccgttgaaagacataatttagtacattttaaaattcagacaaaaaatcttaattagtctaaaaacattgatttaatgctaaattaaatataaaacaaattactgatttcctttatttttttttttaaaaaaaacttaaacctaaatttaatcaaaattggaaagataatagtaagaaacatgtattaaatttaattcgtttcatacctttggaaattgtaacgggatggtcttaaaaaatctagtaaaaatctttttgtaaaattagtttttctttttttttttaaaaaaaaaaaattactcttttgtaaaaaaaaaaaaatagtgacagtatgtatatatatgtgaatgtgaaataagggaagtactcggttttgttgaacaataagagaaagatcatagtaaatatttaaaaaagaaacatattaaatttaattaatttcatactagtaaaaatctttttcgtaaaaaaaaatgtcttttgtaaaaaaaagtaagtagtgacagtatatatatatatatatatatatatatatatgggtcttatgtaatttctcagttcaaaatgaaagatgtaatccctccttcatttttagccatccaaataaaactaagagttatctgaccattgatca

SEQ ID NO: 398133 - DNA, 1277 bp, Cannabis indica
ctgtgaaaaggtgaccaaattgaaaaacccaataatactatagcatcaagatgaaagaagaagggcaacccacccgttaatggtaatcataactgaagaaggtgaagtccatgagatggaagacttatatcctaggattcaaagcgagcaaaactaacttgaaccaattgaagagttggaagaggtgaagttagacccaaacgacccaacaaaaggtgtcaacattggaaagggtttgggaaagaactaaaatagcaattaatcactttttcaaggtgtttacgcaaattttcattaactaaatatatagcattatgtaataaatttactacaaaattaaataaaaataataaataaacactagatattttacgtagttttgtagttaaaatttacatactctacgagtccttcttattaggtatatttatttgaatacagagtacaattctaaatgaaggtaaataatagtattttctcttaaggtgtgtttggaagtaactgtgtaattactaagtagggtaattactagggtagtaattacacagtctagtaattacactatattttaaaatgcaaggtgtgtttggatatgaggtggtaattacatatgaattcctaatatcttgtttgggaaaatagttagtaattacatgggaaaataatattttttagtaggtaatgtttaatatggaaagtttttagtaattacacggtgtaattacattcaattctcatggggggccatgagaatttgagagtgtaattggaacccctcaattacttccaattacacagttacagtgtaattacatggtcagacaaacatgccaaattgtgtaattacctctaattacacataaatctaattacattgtggctttccaaacacaccctagtttttctgtccctttttccatagattctgcccctatttataggtgcataggttgacaattatttttattgggatctattcatttataactgctcatgaaatgtggacattccccacgtttcatttatatgcacatgagataatatctaataactatccaactgctctttctctttatcctttaaacggttatgctgactaagaatgttgtttcttaaagtttagatttttaccttattactaaaatttggccactaataccgaccaaattcggccaccatgcaccaccacaatataataatcttaaaaatctagaaaaccctaaaaaaatttacaaaataaaaaataaagcaatataaattactaaaattattagaaa

SEQ ID NO: 398134 - DNA, 932 bp, Cannabis indica
ccattctgcctaatgaacaaagaatgatctgaggcagagtgtctgaatccttctttaataagagttgatgaaaacttttcaaaccactgccttgatgcttgtctaaggccatatatcgacttttgaagcttgcaaacagcccgagatggaagctcccccttaggactatacccttgaggtatagtcatatacacttcttcatgtaaatccccatgtagaaaagtgttgtttacacctaattgatgtaaaaaccacccttggatagcagtaagagccaaaatcaatttaacagaaaccaacttagccacaggtgcaaaagtatcattatagtcgatcccctcttgttggctatagcccttggatactaaccttgctttacacctttcaacgctcccatcagcattatattttattttgtacacccatttacacccgattgcatgatgatggggaggtaaagtgacaataatccaagtcccgtttatctcaagagcaagtatttcagaggccatagcattgtcccaaaccggaattcctttagcttgatgataaaattcaggttcatataaactcgaaatagctaatatactggcacaaaatctgggggacagcctattgtaattaatgacctgagataaaggatgttctgtgatggaagaattgccctgagaataaacactgttagttgacaaaaaaacatggtaatcattcaaatatgatgtccttttagtgtttctaatgggtatgttagcagaaacatctgttggtttttgttgctctctgctgtcatgtaattctggtgtagtatcgggtttgtttgggataatatcacgtggtatagcaggctgtggtatgtcatggttgttgtgatgggatgcagaaaaaggaaagaaatcgatagactcatgagacatggttccagcagtcacaaa

SEQ ID NO: 398135 - DNA, 1616 bp, Cannabis indica
atttgcattttgaaattacagagatgttataagggatccactttccttgcatacatctccctgatacagggaaagacggatcccttaccacatctcaagtatttcaaaatgcaaatagatttgcaaggagtacgaggagatgtatgttgtagagtcttccctgctacactttcagaagccacacaacaatggtacttcaagttgacaccaggaaggttcaactcttagaaggccttctcgtcggagtttcatgcataattctcttcttctcgccaactcccactacatttagaagacctggtcgaagtaaagcaaaactaggaggcctctttgagcttagatacgtagattcatgatggaggcaacaaaagtagcgcgattaactgaagaagggaagttagccgccatactgggggccatcgagatcatcggagaactgtggaaagacatcaagaaaagtggtccagtagattctatgagtgattttctcgaccgtgcagatggtttcatcaagcttgaagaagccatctagcgagtagatgtcgtgcctagaccgggccaaccataagcttcttcagctggaacgtccgtccaaaacccccagtaccctggtagttcaaattcaggcggtaaaagatctaacaactacaacagacaaggcaatggaaaaaagggaaagttcacaggcaaagctgaacatacccctagagcgaatccttccaagttcactgctttgtctgtcgtgactgacgacttggagacaatctacatggctcctcagtcagtagttccttacaagaaacctgctcccatcaaaaaggacataagtaagcgggacatgtccaaatttgtcgttttcatggagattatggccatgacaccaatgaatgcaacaatttgaagcgagaaattgaattcctgataagaaaaataacctgcatgtgcaaaaatatgtcaaggccgaccaaaatcaaagggccgcccaagcagacaataaccaagatttgttactgcctccaccagtagacgtgcatttgcaagtcatcattgggggcccgcatatagctggaggttagggaaaagctcgggaaaggtatgcccgaatcttacaacacaagcaaaaagaagtggtccattaataccatgggtcgaggaacccactataacattcaatgaagaagatgttgttaaggtttgcttcccgcacaatgatccattaatcttggaagtatagatagctaacaaaatagttgcccaaactatgatagactatggagcctcagcaaatatcttgttcaaaacaccatatgtaaaaatggggctccaactcaaagatctgatcccctacctccagcctgtatatggtttctccggccagagtgttgcacctttagggaaaattcgcctacccctcactggtgggcaagctccgaagagcataactgtgatatcacaattttcggtattggatatttcatcagcctttaacgtcatcttgggccgaccagccatatatgacttaaaaaatgttacatcgatattccattcgtgcgtcaagttcccaacaaagaatggggtaggatgcctgagaaaaaatcaacaagttgcacgggaat

SEQ ID NO: 398136 - DNA, 1234 bp, Cannabis indica
gagcttcgtgcggcagtgaaccttgacgttcaaagagtaaaggcgtcagtttgccgaatggagggatagagagatggaaacgttgaaagctcaacaagcagccatcaacgaccgaacaagataggctaccgactcatacaaagagcctaccaagttgctaatcagcaacctgcgtccggcatcccgccaggtagcttggacaaaaatccagctaggcatactgcccaaactctgaacggtcaaccgtccaatccttggtcataggttccacttgtgggccaagtggtaggcggccagacctaatttggtaattcattaggcagggtcataccaaataactctgttcaaactagcggttcttgccaagtgctcggctaaatcaacaagtcactgaggcaacttggtgtttcagtatttaatagactgggaacagtccatgatcacagggatgatctgaatagaaggagagggttagaagaacaatatgttcaaccagccactcagcccggggtctgcattcaagatccagctcaaagagatcctgacgtgacactgatccgctaagaggccgaacaagttcatccatctatgcaagcaccaatggatggactgaaaaatatgttccaaggcctggccggtcaaaatctcaatgatctcgagttggaccgagcacgtggatccccatttactccagagatcaatgttcaagaactacccctcaagttcaagatgccgacttggaagatgtatatagggaaagaggatcccttatcatatctcaagtattttgaaatgcaaatgaacttacaaggggtatgaggagatgtgcgttgcagagtcttccctgccacactttcagaagccgctcaacaatggtaatttaagttgacaccaggaaggttcaactcttggaaggccttctccttggaatttcgtgtacaattctcttcttctcgtcaactcccactacatttagaagaactggtcgaagtaaagcagagactaggagagcctatccgagcttacataagcagattcataacagaggcaacaaaagtagcgcgattaattgaagaagggaagttagccgccatactgggggcatcgagattctcgaagaactgtggaaaaacatcaagaaaagtggtccagtagattgtatgagtgattttctcgactgcgcagatggtttcatcaagcttgaagaagccattcatgttggaaattattttac

SEQ ID NO: 398137 - DNA, 992 bp, Cannabis indica
catattcgacactcactcgaagtattaagaccatgttcattttcgattctatacatgttcgggagttgttgatccatttgcacttcaattagcactctagcatagctcagcctctccctatctttagtgacagcatcctccataagaggcttaccaatttgcccaacaatcttaaaaagagacctttggccccaatatttcaattcaagatcctcaagttgcacccaaattgggacacacttgacatcctctttcttgaaatttagtattagggtcccaaggttttcaaaattacaggtctacgattaaagaaaacataacccccattcatgacctgatctctgaattcaagagaggtaaatcgaataataaaaaatccatgagataaagctttcactcgatcaaccttatcatgccatatcctttttgcaaatccttcaagaatgtgcaatggtggatttactccaagaacatagcacacgattgaaggattccaaaacaaaatctcctcttcaatatcatctagagtgattttcactttcccagtatcctgctccatatctttgaaagaagtttccaggtttcgcatcacagatttagaacgtaaaataggaggaattgagttcttaccttgccgtatttcactgttacattgattgttggccatgagaaagtggataaaatcgttccgagcatcactcataacctcatcctgcctttgaatcaccttcaatgaagtattgggagacagaggttgaaaatcatgtcgatcctctccctcgttgagtcgaccctcccctggcgattcctcctcatccgtgacttccaagggctcgatttcagcgattcgccccaaagcatcagcaagatcgacattagtaacaccattaccatctttcttttttgaatttttagcagcagatttcgattttccatagttctttgatcttgttttagccatagcaccagcctctcagctgcaagagctaaaa

SEQ ID NO: 398138 - DNA, 545 bp, Cannabis indica
catgggatttttcatcaaatgcaaggcactttgattgtaacaatggacagtcaagtcttctgaactaaatccaagttcctttgagagaccttttaaccaaattgcctcttttatggcttcagttgcagccatgtactcagcctctgtgcatgacagagctaccaccttttgaagattcgacttccagctgatgcatccacctaaagcagtgaagatgtagcctatcaatgatcttcttgtgtctatgcagctagcatagtcagagtcaacaaacccttcaacttcacttccacctctctcagttgttttgtagattaaacccaggttaagagaccctttaacatacctcataacccatttgacagcatcccaatgctttggccctgggtcagaacaaatcgactgattatgctcatggcgtaggccaggtcaggccttgtgcataccatggcatacatcaagcaacctacatagttagcatatggtatgttatccatgtatctcctttcttcttcagtctgaggtgcttgttctttagtaagttt

SEQ ID NO: 398139 - DNA, 713 bp, Cannabis indica
ccccctggtactccttggggcaaggcccttgctacctgagccgggtagaggtgaggcaaccggttcttaatccattcgtagaggtgtcccaatcggatcaagtttttgatctcgtccttgagatttttgcattcattggtgctatgtccaatgtctttgtggtactcgcatcttttattggggtccctcttggagctgtctttgtatacgggagatagtctccggtagtgcgtgttttgcctggtagcaaaatacacatgctcttgggagttcgttaactccgtgtactgggtatattggggagtgtacccccttttctgtcgcttatcctccgaccggttgctacctttagaggacctcttgctcctagagctttgagaagggcctgctaagcttgcggttggagcggagtgcgatggggcttgcccaattacctctgagggatttccaaagtgagaagatgcaggggccaaggcctggccttgagtgtatctgggagtagcggaaaattgtatgccgctcatcggtggagcggctactggcaaggtgcctgggagctgagctctgggtacatatcctgctatcccggtgggatagtatcctccataggccactatttgggcctcttccaggttgatatacttttggactctcttctggaaatcttaaggttggaagctccttctgttgtaactcgttccagaatggagtcc

SEQ ID NO: 398140 - DNA, 625 bp, Cannabis indica
atcgctaaatcgttaaacatcgctaatcacgtcgctaaatgttactaagtcacactcaaatttttgcgatgtttaacgatatgctatgcattttctagtctcatatcgtaaatacatcgctaaaagcatcgctaaacattgttaattacgcaaaatatcgctaaacatcgctaatcattgctaaacttcatctctaacctcatatttggtctatcattgtaaatataatcgctaaatgtcgcaacatattgcaaaaatggaaaaccataaaaaaaaaaaaaacatagaaaacgagtgatgggttgggactccgacgatgggtaggaatgtcaggggtttcgggtgtggttgagcttgtggattttggggcttcggggtaattaagacggggagacttagttaaagtaagagagttagagagagaggcttttgaaaatgtaagggtatttttaggaagaaaagatattaaaagtatagatacccttcttctaattgggtagtatattaagagaccataattgtaacgtccccgcttcaagcctccattgggcccttacacccacagactaatgactcttatacacgagtacgtcaatgtggctgcttcctggattgatgactgacc

SEQ ID NO: 398141 - DNA, 600 bp, Cannabis indica
tgtatatattgtatgttgtatgtggtattgctaacgtttcaggtacaaatgaggggccatggtggagtatgatacggggtaaggccgttgaatgtagacataccctaccctgtatttgtctgattcgtgtatgacattgttatagtgaggtatgatacagcgatattgctgttgaatgtagagatacctttctctatagcaatggtagggctaagtgaacctaggttaccgtagggccaagttaggcccaggttatgtatgtaatggctgtgatatatatgcctatgttatggtaatgacatattttatagtattgatataattatgcgctatgagcatgatattggagttatgagttcaacttatgtatgttatgaatagttagcgtggacatatatgataaaggtctcatgtgtgcaattacttagtaagggttataaactaaggtatatgatattgttaaaacttaatcagtatattaatgatatatgttatagtgtgctattgtatggtattggatgataagcatttccttactgggcttttagctcacccccttactttccccctacaggcaatagacagggaacattgaatgta

SEQ ID NO: 398142 - DNA, 586 bp, Cannabis indica
atctgccccacccaagctgcttttgtaccaggaagggcgatacaagataataatgtgatagcccaggaaatcgtccactctttcaatcgaaagaaaggtagagaaggattgtttgcaatcaagattgatctcatgaaagcttatgatagactgagctggagctttatagatcatgtgctggactgctttggtgttcccccagaatttcgtatttgggtttctcagtgcatctctaccacctcacttaatgtgtgcctaaatggaggatcagtaggcaagatctttccttcttgtggtctccggcaaggtgacgccttatccccttatttatttatatgggttgcggaaattttatctaggatcctggaagatgcccagctttcgaagaccatcagcgggatacggctgagtaggggaggcccgattttatctcatatcttctttgcagatgatcttatccttgttggtaaagccaacttagaggaagccaaaggttactgggactgccttgaaaaattctgcacctggtcaggtcaaaaggtcaataaaatgaagacctcaattttctttagtaagaatactccca

SEQ ID NO: 398143 - DNA, 548 bp, Cannabis indica
aattataaaaagtaataaatatgagtgcgtcacagtcttctcttcatgctactttaaacttttatatatacacaacaccactctgcatataatttacatatctaaacttataactatatataacaaggattaaacttataactaaaaaaaagtttcaacattacataatcaacaatgtttgaattgtgttttttgatgaaagatagtaatatattgtgtcgaatatccaactattgtatttttcttaattgatgttaataggttatgttaactcaagatatatttctaagaggagaggtgaattagaaattataactaatttcggtaaattaatacgttcaacacaaaactatgcaattaatcaagtaaatgcaaatagtatggtaagcaaatatagagagaaaataatcaagcttgtaaaataagagtttaagggtaaaattgcaaactctcgatttttacttagcttgatagaacaaagccacctacgtctttagtcttcaaagctatggatgtacctttgagttccactatcgagctaagttaac

SEQ ID NO: 398144 - DNA, 899 bp, Cannabis indica
acacattgggcttgtttatttaagaaattactaaaatgattggaaggtgaattatgagttagaaaatcattccatttattctttacaaggtgatagaaatcagggtcctctaaccaactattttcaaaacgaaaccgtctattaataaaattaatgggcctactaatatcattagtaagaacaagctttaaagcacgatgatcggatccataataacctaaatgatgaagactattatcagggaaaagatcacaccaagattcagatgcaacagcccaatctaagcgttcacttatagatttattagtccaagtatatttacagcctacataaggaaggggaaacatagaaaatttattaacaaaatctgaaaaaagagacataacagcctgatcagagacctggcccccaagtttatcagtattaaaaagatagctattaaaatctcccattattaaccaaggcaaattaggagcattataataaatatcatgcaaaagtttccaagtaaaatgcttttgagaatgaacaggagaaccataaaaacaagtaaaatgccatagttcattagtattaaaacaaacagtgcaatctatatgattagaggaatagtttataatatttacagaaatatcagccttccacaacaaaagtaaaccccctccaaaatactgcctagggatttcaagaccaaaatcaaaacctaaacaagctttaaacctatcaactgaattcggtttaagcctagtttccatcaaaaaaataagaacaggtttgtgagacttgatcatgtgggaaagccgattgaatgctcgagggttccccaatcctcgagcattccaacatataaggctcatttttccgggcgggtgtgctcagcatcacccgcctgttcatca

SEQ ID NO: 398145 - DNA, 886 bp, Cannabis indica
ttcttattcaattttataatatactgcaaattatttgtagtggttgtaaaaaaaatttatatatttcaatattagttattgtcacaagtttgtagctaaatggtatttttctttcaaatttacttttcattttaaaaaatatataattataactaaaaaattaagaaaaaaaagtcctttgatgacacttttaatgcgtttaaaaaagtttttgtgcaatatatattttgagaaatttattcttgttgatgcttcaacttgttctcagaaaattattttcgttgacgcttcaacatatacatcaaagaaagtaccatttgtcgacacaaaagcctacctccactaggggtatttttctcctcatttgattcaatctaatccaattagacctcaaaatccaatccaatctaattactagttggattggatcagccttttaattggatatccaattatacacctaaaatttaaggaatttttacaccacataatgaaatttccaactttttttcttttttactgtgaggcagaatttttttcaaaaacactgtattttttatactgtgtattgtgtttagtttttactgttgttccaatattattttttagttattccactgttgttttaattgttctgttttgttattttacagttgttttataaaaagatagtacttttataaaaaattatgtgtgacagtaaaattgtgaacttttgcctaaaattcagtatttttataaaaccctaaattttaacattaactttaaaaatatgaagaaaaaaaaaggggaactttcaattatatacataatactcaaattatttatacacataccgataaaattttaaatataaatattatgtatacttttatacttaatataa

SEQ ID NO: 398146 - DNA, 661 bp, Cannabis indica
cttgaatcaagtacctagcaaatttgtcacaaagacaccatacgagttatggtcaggcaagaaactgagtttgcgttattttcatgtttggggatgtaaagctaaagtaaggccctataacccacaatcaaaaaatcttgatccgaagactatcaatggctattttgtaggctacactattggttcgagggggttatagattctattgtccttctcacaccaccagggtgatagaatcagatagagttgtctattttgaagatgaatttggttcaagtcaagggtcaagagaaattatattcagggaagaacgtatgtatgtccctgtacttgttgcttccgcttccgctcatactattgatcccgtgattaaacaaattccaacaaaagctcatgatgaacctcagaatcacatgcaagatgaaaatcctaatattgagggtggtgaagttgtgttgagaagatcagagagagctcgcaaacctactattcatgatgactaccttgtctatttgcaagagcacgactatgatgtaggagatgcttctgaaccagttacttatcaagaagccatgaagagtcctcaatctaagttatggttgaatgtaatgacagatgagtcaagttccatgtcgcgaaacaaagtatggaatttagttgt

SEQ ID NO: 398147 - DNA, 848 bp, Cannabis indica
ttttatttgtagatgcagctttcaattctcaatcttgcacaacaggtctcggagcttcgattaaacattgcagtgacaatgaaattgtgggtttctcaattctcaaaccaggtgcatcctcaccggtttatgttgaagcttaaaccatcctggaggtttaaattggtgcttggcaattcatttgtaaccaagtcttgttgcatctgattgttctcagctagttctcaaagtcaaaaggggtgggaaagataattctactctttcaagccttgaggaattgattagatagtccttatctgatctctctaatgcctccttgcaacacatccccaggtctaaaaataggagagctcaccattatgttagggaagcatttcagcgtgataaagactatatctggagagtttaattttttctctttgtgtgtagctgcagcttgtgtttagttctctttctgctcgccgcagttccctaaaaaaaatcttcaagacacggttaaggtcatccaaaaatatatacacacatatcttctactaaacacacataaattacataaatttgatgcacgtctatataacattaggagtaggggtgttcatcaaaccgcccaaaccgctcaaaccgcccgtaccgcaccacaccgcaaaaaaaatgcggtttgaaattctttgcggtgcggtcgcggtttgaatttttcctaaactgcgcagtgcggtttggggttttgaattgttaatatgcggttcaaaccgtatcgcaccgcacattataaaaataccaatttttatatttatttaggtctaatatgtgaatgttcaactcaaagtccactaattattgtattgttg

SEQ ID NO: 398148 - DNA, 675 bp, Cannabis indica
ccgctcagaaagacactaacgtagtccaaatcggccagaataccgaagaggtcagcccagccctacaggcccagcttgacgaattaaaaaatatgtttcacggcattgctgtacaacgtaataatgatcttgagttagaccgagcacgcggaactcccttctcacaagagatcaatctcctgccactacctcaaaagttcaaaatgctgacgtggaagatgtatactggaagagaagatcatattccccatctcaagtactttaagacgcaaatggatttgcaaggagtacgaggggatgtatgttgcagaatcttccccgccactttgtcggaagccgctcagcaatggtatttcaagttggctcctagaaagtttagctcatgggaaaccttctcttcagaattccatgcgccattctcctcctcacgccagctcccattgcatttgggagatttgatcgaggttaagcaacgactaggagagccactccgggcatacatcagcagattcatgacagaagcgaccaaagtttcgcgggtaactgaagatggaaagttatccgtgatactgggggcattgaagtcctcggtgaactttggaaagatataaggaagaacgggtcggtagactcaatgagtgatttccttgactgagccgaaggcttcatcaagct

SEQ ID NO: 398149 - DNA, 1538 bp, Cannabis indica
ataaaattgttgagaaaaatggccaaaaactagctagtgtaggacccatcacatggccggccactaggtgctatttttgccctatttttattaattttttattctaaataaatcaaccctaaccctaggtaaaattagtataaaaggaaagatatggtctcattatccaactaatgcttctaaagctaaaaacctagttttctctcttaggcaactaggtttatgagagttcatcatcttccttcttcttctaatttcgaaatcatatagccatcttcacaaactgaattcaagtcttagtgattgagtgcatgcccacacataacaagtgagtcctcaatcgtagtgtgtaagattgtgaagaatccatttaagtgaagtagaatcaggctcagctcttgttgatattctggtacagaaaggatacaaaggttagagatctgagcggaaggagtcatttaattccgctgcaaccaatataaggtttcttgaactttatatgtatttaaattctattgttttagaaattcatatttaggatgttaaataacatacatggtagtaaatctagatcctggtaaataatccccaacaactgacctcagagccatggtatgatttactttcatgacatatggatttaaaacgaagtttgcgttgatttggatggtttcatgttggtttatgtgcatgtttgatgattttatggaaatcacaatgtctattgtaaaacattttttgtttcgtcttgaaaatatttttactggaaagtagatgaaaagtttatgaatttaggcttttatagaacctaatttggattttttatgaattatttatgattttttaaagtatgaaaacaaaatatcttagtgatactcatccgcgcgcgcatgggggacacgaccgagtgttctcgtgcggctcgctcagacaaaacccctttagaaaggggcatgtccaaagtttgtcccccacctgaccgtgtctacgcagccttgtgtctcggctggaccccctattctgcgcgcgcaggggtatgcaaccaatacccttgtgccccaattttgttttttgtaataactttttattcaaaaaatatttttcattgaaaaaaaactcaaactttggtagaattttgtgtagaatctgaattttcaattaaaaatctaattatcagaataaaataaatttttattaatttttaaattaattaaaattagttttagatattagtagcatttgaatttaaaaatttaatttttccacaaactagtcttatggttaattttgaaattgttgattatttttgtttattttatttattttaattataagatcagatattatacttatttaattgttaaatttgaaatgatcttattttgatacttacatattaataaaatttagaaatctagttaaagtttcaaatttgctaaccatatcagattttcaaaatttgttatttttgatatatactttattaaattaaattataagattagaaaaatgtttgtttaacagtttatcttattaga

SEQ ID NO: 398150 - DNA, 731 bp, Cannabis indica
ttgagaaacaaagtgagaaaattcattcttctcaatttgttagcttgcttgtttcagctacccgttgagaaattaggtcactaaaactccatgctttattataagtgtttaggctgtcttgataaagctaaaagaggtgggaagttcatgaagaacttgaagaatggtgtaaaagtcgggaagaggaatattatgatctttcaccttgtactgaacatacacaattttcaaaataaaacctctcactcctttgatttattatactgaatggttctcatttcatccataaaatgtccaactgcaatgttctcactagtgtcatataatttttctacagcattgaaaaactcattagcatttgaggtgtttggcaaaccattaaatgaatattcaggaattgaactttcatagcaatgagagtaagatgatttgaatttttccattgtgcatgaagaattttttgggcaacaatgctgatattagtaagatcagtagatttttcttctcgatggcataagtccaaaattattatgcctaaagtaattttcacatctcgttttcatgttttaaagttggaagcattcaaaattcagatgaaaatattattgttgttcgccaaaaggagaccaaaaaaatccaaaaattaaaacttgatcaagctatatgagccaagcaattagaaaatattgtagagttaactggtcattataaactcccctttggggtgagaa

SEQ ID NO: 398151 - DNA, 673 bp, Cannabis indica
ctttaattcctacaaaataacaacaaattaaattacaattaaatattttctatataaaaatatatcttgttaacttcatgaaaatattgatttaaacttaatttattttgaactttaagatcatgaaatgtcaattttcaccattaatcaggaggtgtccaacttgtattggaaccacattgcataatacattatcctcatatttgccaattcagagagacaccaaaacttgtttggtaactctcacttcaccactattattcaaccattacaacttgtaaggacatggatgtttaagtgtcggaagcaccaacttcttaactatggacgaactagcgacgttagtacaactacccccatcaataatcatactacataccttgtctttcacatgacaacgagtatgaaaaatgttcttacgttgtacctcttcctcctcttcttttgcttgcgagtttaatgctcgtctggtgactagtgcaagcatgtcgttgtattctggcacatactcttcatcttctatagaagcatcttctaatggtggcatgttagcaagctcttcttcatcttcagagtctaccttgccattttctcaaattaccataaccctcttgtttggacattggctagctatgtgttctcgcccctgacatttgaaatactttatctcact

SEQ ID NO: 398152 - DNA, 1480 bp, Cannabis indica
aagacacatgaaccactaagcataatgtaaaacgaaactaagcatttgcctggggttcttcacattcattcgtagtaccaaggtcaagtatctcagcagttgcttcctcaataaaagcatattcaagttgctcaatcctctcaccatcaacatccaaacccatgtgggcacggtaagtttcaatttcaccagccacatcccaatcttcattctttccgtcctagtactcgatcattagttccccacgagtcttgataacagcagtcaatgcaacttgttctgcctcgcaggcaaggtcctctgtccttttcttctcatcaatcaactctttcttcacctcctcaagctcacccttcaaagatttaatggtttcttcaagttcacgctctatttctacatactttccattctccaattttaggaaagcattatcaacagtcaattttttgttcttcttctccaacgcaggatagttttcccgaatgaacaacatggcttgaagaatctacaaacattataaccaagttttaataactaaagaaaaataatcaatcacagtttatattacaattaataatgaccttaccttgtaatcatcagccactccgttgttggcaaccccagttggaccaagcttaatcaatcgtgctcgatcagcaggatggagaattccatccacatgcccttcaattcacgaagggttagagtagaccgatacagtgtgagggattcgaagaatcgtttcatcaacaacctctgggtcaagaaagtcggcattcctcttgattgtagtgcacgtaccaagggaagatggagtcattggaacatcagtgaagttactcttagaaacttgtttggacccttcaatctttgacttcttagctattgtcaatttggctctagccatggcatcactagctttgggaaatttgatcgtcctcttttgggacatcttgtctgcaaacatgcgttgctcttcggtcatgtgagtcaaaatagtaaacttaattccaaacgtctcaaattctcgagttaaaagaaggatgtgaatgtgttcaagggattgaagttcagggataccttcttctataacgtcttgtgatttttgcgggaaatttttggggagaaatttcctaaaattacggtccttttcttttatagattcaatatcctcgataattcgatcaacaaactcgttcgtattaggttgaaccccgaagtctgtttccacgccaagggccaaaaagacattaataaaacatacatagccaacacaataataaaacataattcaacactcactcaatatttgccaagagaatgtgaaactcttctcaaccctcgaatcaaataaaccatcacctctaaagaagcaatatgctttcttccaatctgaatcgccagccttggtcaaacaagttacaaatggttttttcctagtgcgacaaacaaatagcactctacccttctctttttcatg

SEQ ID NO: 398153 - DNA, 775 bp, Cannabis indica
aggcatacaaaaaaatacaagtccaatatgtttttcacttacccaacgtccaggttgacgtcaggatgtcaacctgggctttgggtgctgaacaaccttcaataaaacgatcataactccctcaatattgatttgattgatgcgattcaacttgcattttgaagctatttcaattcatgtatcacatacatattgcaattctgaatatttcaagtctaaaatttatgccaaagacagttgcaattttcccaaagattacctgaaaatgatttgacgaacgagatttaagctctgaataattgacgcttttcatcaagagtcaatttttattgttagatcatcatcaatggtcaagatcaactcaaattgatttttttcattatttttgaattattttattaatattttaataatagtatctctttctagaattttaagttctttccttagctagtttcttgtatttctcatgagaaataaaaactcataatagatgtagctccattaccatcgtgacatggggagtgaactactataaatttttcgtgtctctttatttacttacttgaatatatttctcttctcgctaatccaacgagcgagtgttggtcagatttttgtgccaataagcatgctcagctgatactagcatcgttagctcatctctttgctagcttttcttcagtcgagacgaccgaggctctggccattaaaatgagattggaggttgctaatatcaagggtgttcatcagttctaggtgacttctgatagct

SEQ ID NO: 398154 - DNA, 568 bp, Cannabis indica
agaatcctatatacacattcaccgtaaccttgcaacattaaacacaaaggagatatggagcttagaattttcagaagcaacaaatttaagctctaaacacatacaatcaaaaaccaaactactctatatatctcatacaaaaacctaatcacataatcacacataaaacttattagtatatgatgaatgctaacaaataaataagacaacttcctggaagaaaaaaaatatacatgtgcaccatgattcatttgatcaatattttatggctcacaaagttaagaggttgtgtatacttcccaaccttcctaataaaaaaaatcactgattcaaaaggataagtaggaattaaagcatgaatgaaaattaatgagataacaattcatttatttgatcacgtttaattgtattttcaagagtaaaaaaggtcagaagcaaaaccatttaacaagctcccgaaaaatcctatgttgcaggtacagagttggatgctaaagaagctctaccactccataaagaaaaaacttattacaaatacttaattatgtaccaattaacaaaataacaa

SEQ ID NO: 398155 - DNA, 577 bp, Cannabis indica
cagaacaacttgttgctagcaaccatatgcaaccgttatatgagaggttccgtaagcaagcacctctggtgttcttgggaggtcctgatgtgatgaaggctgagcagtggctcatagtgatagaaagaattctaaatttcatgggggtagttggaaatgatcgggtgacctgcgccacattttagttccaggaagacgccctcgtgtggtgggaattggtgtccctcacccgagacatcagtgttatgacctgggaagagttctgagatttgttcaacgccaagtattacaatgaggcagttcacagtgctaagcgaaaaaaaattcactgagttggtgcagactaagggtatgtcggtaactaagtacacaacaaagtttgaccgtctggccaagctagcgtgcctacagacttcaagaagaaagagaaatatttggcaggtatgaatttaaaaattaggcatgacgtggtgattactacaaatgaggcagcatcatatgcgaagatggttgaaaaggctctgcgagccgagggtgcaataaagtttcttcaggagcccccagtgactccgagtgt

SEQ ID NO: 398156 - DNA, 533 bp, Cannabis indica
tataaatttatcaattattataggtatatattttaatttatgaattattacatagaaaatataaattgacactttatttacaaaaatacctctaaggtgtggacaacatttataccttttatatgattttaattaccaaaataccacttacaccatcacttacacaatcaaataatgattacagggtggttgctgcgtggttgcgcggtggttgcatcagatgaaggtttcattcagacgatagttgcagggtggttggtcgaaggttgcatcagacgaaagtttttaggtggttggccgaaggttgcattcggcggaggttttaatcaaataaaataactattagcaaaatatttatgcaactgtaatgcaactgttatgaaacattaaatattagaacagtgttttcacgtacgtaactctatctatatgtctctatatgatttaatatgaacaaatttactattagaaattcagaaaacaacgaagatacaccaagataaatattttattatagtattgatgtaattttt

SEQ ID NO: 398157 - DNA, 943 bp, Cannabis indica
gtgtgaccccctgcttcttagcacaagggaggcccgtgtgggtagaaggccgcactgggaaagtgacgagggcagtgtgagtagagactgagcttcccatgtgttgggctctgcctggccccgtgagaggcaaaggaatgagaggatgtggctcttgtcctcgtggagcttacaatctgtttgacaaggtaaatctggcattcagggaaacaacttcaaaccatgcaagaaggttctacctatggggaaagaaagggagcaagaggcagacaacagccaaaagagcttatttttccatttacagatgcctgaggtttttgtacacatgttattaaaattattgaggaagtgatattgccttttaggcagaagtttccagtatgaacaacgggtttgggttgccatgcagcctgtggcctgggcggggccctgggagcagtggttgccatgggaaccagttcagccgcccccacggccaagtggctgctgttcccaaagttggtttctgcgtggatggggctgcctggaacctcagagccatttcccatggaaacaatgctctaaatgatgggtgatgttcccacacaggcctattttgtctggctgttaacagagcagagatggtggtgaggcttctcatgctgagaggaggctggggaatgagagagagtgtgtgtgtgtgtgagtgtgtatgtgtgagtgtgtatatgtgtgtgtgtgctcctctccttgggagtaaagtaaacaaggtgagaaagtgagcatttgggcatcttctcagagctcagcatatctcacacattttatttcatgcttagagcaatcctacaaagtatgagtctccaactaacccactttactaataagatactgaggccatagaaggtaatttgcccaaggtcactcaactggtcagtaggaggagtattcagcacagaaaata

SEQ ID NO: 398158 - DNA, 747 bp, Cannabis indica
ttttggtaagtacgttgtttaaaataatcttctatggccaaaacgagtcaaacttgtcaaaatttctcatttttttttttatttttccagcttgtacactttatattaatcatgtttaagctgctgaaaaaaaaaaatttaaaaaggatgcataaaactcatctttggtacatatgttgtttttacttaaatttttgaaaaacttactaagaaatttcaattcttgtcatctaatcgatttaagtgcatgagcatatttttttttttatcgtacttgaggtatgagaaaaggtttgaaatcataactatgccattctttacttgtctctcttactttcaatgattttgacataatttttggtagattgaatatgaactttcatctcttctgcattttgaaatttctgtttacctattgtgctttattggtataaatcatatcttgtatgattaagggggagacatatattttgtttgaccttgcttcttatgctacttttctttatgaaatcaaaaggaggagaaatattaaaattgattattttggcattaatcatattatactttcaaatattaacaagtttatttagtatatatatgattaacgaggagttttttatgtcaagaaaaagtaacgatagatataaaaagataaaatggtataaatcaatgtatgcatatattaaggggaagctaaactcaacatgtttcaatttacttttttttttcttttaaaataatcaaata

SEQ ID NO: 398159 - DNA, 1292 bp, Cannabis indica
ataaagacctatgctccagctccacttcggctacacaatggtggaaacttttctggtctctccaaatccctcaaaaggttaaaatatttgcttggcgtgtcatccatgatgctctaccagttgccacatcacttgtccgaaggaaaatcatcactgattccacatgctctatatgcaaacaagcatgggaatcaacggggcatgccctttttggttgcaaatatgccaaagcggtttggagaagtttcaatctcagctttaattggtcagcagcaacttcaatgaaaaatggggattacttgatacatctttcctctatttacaacaaagctgaaatggaacatatcttctgtacaatgtgggctatttggagtgagagaaacaaggtgattcatggcaagaaggcaaggagtgctcgagatttggctgtctttgcttaagtttttctgcaaaactatagagcggctcagaacaaaactcatgttgcagcagcctctgctgctcctggaacttcacaccagcctccccgatcacctgatgcaacttccccttggtgcccacctgctactgaaggtttcaaactcaataccgatgcagcagctgaagcttctacgaacactattggtgttggggctgtgcttcgggatgctacaggttcagtaaaagctgccctttcaatgccgattctagggaactttaagtcccatgaaatggaagccaaagctctatttcacagtctcaattgggctcttcaacaacagttaccaattacacatattgagaccgatgctcttatggtggtcaatgctttgaaagctcccttcaattcaaattctgaattttcagatttaattatagatgttcttagtcttttatcctttttcccaaatgtaattgtttctcatgtcaagcgttctgcaaacaatgcggcgcatggactagctaaatttgcattaggggtggatgaggcttgtacttggttggagattattcctccgcctatatactcggttattgtaaacgaatcttgattgtttaatgataactagtattttccctcaaaaaaaaacattctaattttgtaattataatacaaattttcaataaaagttgtcaaacactacaaaaaacggttacttttagtgacaattttttagtgacaacataatttttttatgactaaatgtgacttttagtcacaacaaaatgttacttgtgactaaaacataatatttagttacaagttgtcactaatttagttttagtcacaacaagtattgtgactaaaaata

SEQ ID NO: 398160 - DNA, 507 bp, Cannabis indica
aacaaaatatatggtattgtgtcttccacgagctttttactcataagcttcgatattgatttcgcctataaatttacttttgtatattatcacactcttgagaacataattctggtgtgtcggatccaattaataaaaacaaagtagttgtaaccccggttataagaaaaagtatatgtaatcccattatcatcaggactgggaggtgaattagggctgtacatccgtcggtttggacggtttatcctatatattttctaacccaatctaaagttcgggttgctaaaatttaaatgcaccctgcccaatttaaaaaagaaaaaatctataaaccgaccaacggtttgagcggtttggtcgggttaacccgcccagaccggccaaacttttttttttaagttttaaagtcaaaatcaataaaattaaaaaagataaattaaaaatatcacattccatcaaagtacaacatcatatatataactttaaaactaataattaagtatataa

SEQ ID NO: 398161 - DNA, 610 bp, Cannabis indica
gtcttgtcttctgacatgtttttaaaagtttattagtaaaagtgttattttggctttatttcctggtggtgttgatcgagcgaatggcttcaagcagtcagcagggtggcgatttggtggacagatatgaacagattcaattggaggaggaagaggagggagtccttataactggagagaatgtagaagaagaacaagcttttgatgatagatggtgcttagtgggaaagtttctgactggaagaacgatcgactttgatgcaatgagacacatgatggcgtctctttggcaaccaggacgaggtgtttacataaaagagttggataccaatcgatatctttttcagttctaccatgacattgatattcagtctgttattgatggaagcccatggacttttaatagtatttaattggtttttcatcgattgaagaggggggaagatcctcggttggttcgactgcataaattggatatgtggatccaattgcatgatttgaaatatggatttatgtctgattgggtagtgaaacatgttggcaattacattggcacgtacgtgaagtctgacccgaagaactttgtaggaatttggcgggattatctcag

SEQ ID NO: 398162 - DNA, 752 bp, Cannabis indica
atgactaagtataagtacaaagccaacataatttaaataatgcgagtactattgataatataattttaggcttttgccattcaagctcgtggaatcgcagtaccatcgagtgctgcgagttggtatgtagcgtcaccaaccttttctgcgatgagatacggtccttcccaattatctccaaaggtcccatgcgctgggttcttggtatttggcattactcttctaaggaccaagtctcctgttcacaggagttttgccttgaccttagaattgaagtatcttgcagttcgccgctggtaagccgcattttttaggtgtgcttgatcgcgtttttcttccagaagatcgaggtagagtgacttcttttcttcattctgcgagatattgaaaacatctcttcgtagggaacctaccccaatttcgactggtaccatggcctcgcacccgtaggaaagcgagaagggtgtttcgccagttgtggatcgaggagttgtattgtaagacaaaagaacctgcgagagctcgtctggccaagtccccttgcgttcttctagtttccatttaatggtgtgttttattattttgttaacagcttcagtctgtccattgctttgcggataagcaactgcggagaatgccttcttaattctcaaatcgtcacataattgtcgcatctctttataatcgaactgctttccattgtctgagatgagtttgtatggaatccaaaatcgacaaattatggagttata

SEQ ID NO: 398163 - DNA, 575 bp, Cannabis indica
ggcataatgattaagttatatgatatacataagggaggtcatagcatcaaatcccaggaagaggagtacgtggatcaagcacaacaaattcatgatcaccatctacatacacaagcaacaaaatatttttccatataaaaggaggcagataatatcatggccacaaacaatgaaggggggcagacaaagccattgaactcaagccaaacaaattaattaacaagccattttgaaataaatcaattaattaaagactctaaccaaaccctaatatttatatatatacatattataaaaatcacaaaaaaatttatgattataaaaaaaattgtgacaaattataatagtcacaaataattatataaattaaatatatttttactttttagttacaatacttattataattaatactaaattaataacaacttatatttaaaccagtaaaaagctacgtgcgcggcacgtatattaaattttatgctagttttttttttctatgttatttaaaattgatacaattaaaaattaaagaaaaatattattagttattaggtgagattattattatgtgt

SEQ ID NO: 398164 - DNA, 550 bp, Cannabis indica
ctgtaaggccagtcgttagtccaggacgcagccagagtgatgtactcgtgtataagagccataaatctgtgggagaatgcctaatgaaagcttaaagcagggatgttacaaataactaattaacaaataaactcctatttctcttttattctcaaaattgctcaaacttggtgaaaattctcaaataagacatagtctagtttcaaattctaattgacttattaaataaattaattgagtctacaagatgttattatcccaaaaaaatgtggggaatatgggcctatgtaaccatgctcctaataagtagattcgaaattcactaaataaattttctagcttattaattcctcctgacaccactatagatttggaattgcactcttgattacatagaacgctctatacaccaaatatagatatgctatgaattatctattgtttcaatccaaacaatcaatgatcctctatagacattttacattgagtagggaaaattaactgtttacccttcaatgattttatcattaaaacacttagctaattgtaa

SEQ ID NO: 398165 - DNA, 553 bp, Cannabis indica
tagaaacttgtaatcattcgtatacattccaaaaaattgtatatggtaaatttattatcagaatcaagaaccttatatatttatatatgtgttaaatcaaaaaaaaatttcaatcgcagaataaattctgaccggtggcacacatatatatatttatacagtaattaaacgattacttcaaagtaaggaaatatatatatatatacaggttaatttactaaatattccaaatgcaaaaacaataatttaatggaagatcaatgtcactataaattctcaagaactaatttagggatgctcttgataccacatgttaagaatactgtaaatctgtatatagccctaattaattcatgagaatcaaacaatagaatataaattagcggaagcgtacccgagtccatagaatcgatctttgattggtatgatcttccaattttgcatcaaaacctttgaaaccttattttcctgttatattaccaactgttacaacagttggtaatatttattaataatttttaatttggcccctcatcaaatcagaaactatcta

SEQ ID NO: 398166 - DNA, 929 bp, Cannabis indica
taattttagtacacattttatgtctatatatacccatatatatattgctagcaaactctagtatcatcatatgatctatattaagataggaactctgatcacgaattaaagagagagtgatagttttatttaagaggaaattacatttgattttttaaattttattacaaaaatatgacatttttaggtttggtcatttttatggtatatttaagttttaaaattatattataatatttttcatgacatatatgtgtaaattcaaattttaaaacccacacgtttagataaatttattttaaaatatatatataaaatctcaaaggtacttattcttctccattaaagtacctgcctatatcctatctcactcctcaatacctcatctactgacttacattcactagcgacacatttagcaaccgacaaccgacgactcaaacgaactctgaatacgagatctctccaccaccaaaacattaaaggatcgaacggattttgctgcagttggagatctagaaaccttaaactgaaaaccctatttcataataaacaaattactactacaaaaatgatttttctagacacttttaaatagtcgtttaaagtaaaacaggtagaataggcgactgttcaaaaccgtcgctaatgtagacttcccaacgattttaaactgtcgcctataacagggtataggcgacggattaaccgttgcctatagtatatggcatggtttaaaaccgtcaactataccgtgttataggtcgacagttttaaaccgtgccttataggcccgggtacttttaaagttttttcaacgacaatttttttcagtcgttacattggaaaaatatggaaaaaaacaaattcgctgcaattttttccctacattaatttttaaattttttacaaatctgtatagtcattat

SEQ ID NO: 398167 - DNA, 849 bp, Cannabis indica
gtgtcacttatctatgttataattgatgtaatttagggcctgtaattcgccgagcagttgttccactcaggttggccgacacacctgaattcagaaacaaggtaagattagtataatgtcatgcatatatatatttacatgtttagcatacatgttgtttataaccccagatattattatgttttatgttatgcttttcttactgagtctgtcgactcacagtgatatttccatgtgtaggtaaggggaaggctaaggctcagcacccgttagagcgagcagatgaagattgtacatgtcgaggtggttaggcctggagcgtacgatctttgggacatcagggcttttcttgtgtagttgcgaggaaaaaaacttatgtatatgaatattaaacttttttatatgattttgtaaacgggatcccaaaattttatatgtatgtcactttatgtttttaattaaataagcaaaattttaattattcgcgatttttgataacctcattgattaggaaagggctgtacagtaagttaaaaatcacgctaacatatctaaattagttagggtgttacaattcggtattagagttgctaggttgtgttttgaagattgtcacgacatgtacaatcatcatcatcaacaatcagctcgtttcacagtttagtaagcttttattacattagtagtttatttgaatagtatgatttaagaaaagcatgttaggaagcatgttagtagcctcatagtagaataggcgcatgtttttaatttccaaataagtggcatgtaaagaccgcttaatttaatttggaaattagcagttaattatgtttaattatggaaaattat

SEQ ID NO: 398168 - DNA, 503 bp, Cannabis indica
tgtcacccacttattctttgaatatcatcacattgaacaatgttagctataaagatgtggttggggtggacaacagatagtattctgttggcagatttgataaagagaatatgctgaggtaaattgagcaagtttcgaaaaaatgtgatagctttgataatggcagcaactatatatagtattttttttttgataaccaactatttggtggaatagaaaatgattctttttgacaccaaagaaattaaagttaatgttaaatatagagtcataacaacctaagaagataaggcaataggatgtagattggtttgaaaagtcgtaaataatttttggatttttttcaaaaatatacataaaatataaaataattacaaaaataacttaataaatctcaattacaataatgtcttgccatgtcattaaaaaataccttaattctaaaataatatgcctgaaataaaactaatcccgaatatatattttttttttaattttcttgt

SEQ ID NO: 398169 - DNA, 532 bp, Cannabis indica
taaaatgttttccatgatgggtagagaagttctaatcaagacagtcattcagtctattcctccttacactatgaagttatttaaactttctaaatgtttcatcaagaatgttcatgggatgtgtgctcgtttttggttaggggagggggaaatgatttgaaaaagaaaatgcactggtgcacttagtataaattgtgcatgcataaagaagatagtggtatggattttagagatttgtaattgtttaaccaagctcttcttgcgaagcaagcgacaaggatctaccgtgtgttggaatatattttaccaggacttagatttactaacaagtatgtttttcaatatcctaaaaatgaacttctaaaacgatgaaaattagacacatataaagtatgaaaaactttacattggttgcaacggaatcaaatgactctttccgctcaaatctctgacccttgttcatttttattaccgagtataatcaagatctgagtccgaaactccttcagttgtttggattcttcacagtctt

SEQ ID NO: 398170 - DNA, 500 bp, Cannabis indica
ctcaacatgtgcgagacatgtattgtgcctaacccttgagttttttggcttgcaagcgtgtttaggctgacttgctaccttggtgtgtcagcaagtgttgcacgttctgctatttagaaatgtccaaatagtcggcctgtgacattgggcaaacctcgaacatgggtgtgtgtaatcaagtgttagggttggtcggctttaaaaatttaggcattgcaaagaaaaattattgagcgagaaattaaccttatgatacaaaatataatgtcaagacccacaaattatgatttaataaataatagggatttttttatttttacactttaaaacagttttgtttttgcatttttacggaactctacatagaaatttttattgcaactagcagagcaacttaaatcacaactaaaaatcgtatagcttcccacataaaaactaccgaaaaaattactttttttttgaaaatgaaatatcaacttcattgaaatgattagcattca

SEQ ID NO: 398171 - DNA, 967 bp, Cannabis indica
tgtcttatcagacgtcttatttttattgtatacaacaatttaaaatttttttgtaaaaaaaatctataagaattgtcccgtaataaaagtttaattaatatactatttataaagataaccagcaagtagggaacataataactgttctagtttatagtcattacttttcctggttgtcccatgtggatcaaaccaagtaccacaagcttggttactcctagttatcacaagtttggttactcctagttgctaatatttgttataggaagttttccctttaatcttgatacgatactctgttgtgatctaacagccgtagtttccttatttgtgtgttagaatataaagggaaattggaagggccttctgggaacgcacacttttatctatccgatctcatggtatcggagatgtcttttgggtacaaattgctgaaggcgaaaagctttatgactgcggaaccaagatatgttcatggaaagtcgtatccaggtgggattggaccacttctcctttgctaagggtcccactgataggtatgcggtgctgacctggagtccacgtgtccaatactaaaaatgtaaataacagttacaatttggttagcacatcatcaatgccaaaatttgggataacaattatattgtgaattgttacattttattgtatacaaaaattataaaattttaaaaaaataaagtgtataagagtttcccataataataagtttaattaatatactatcataaaaatttaaaatagtttacttctctgtacaatcttaatgtatcgatgaagtataattttatgatgacttgtcctgctccatgttacaattttgattgcatgtcatacaacccaaaatttgggataataattatattgtgcaattgttgatcttaaaatataatggtagcaatttgatcattttgcacatatgaaaaatctcatagttattcaaagttat

SEQ ID NO: 398172 - DNA, 606 bp, Cannabis indica
gtagctaagagacaagatttttgatatgcttgtgagatgttcattgctttccaactccgaacttaggcttgtaagtagtttcttccattcatcagcaaccttgggtttagttgataaaagacctgcaattactaccactgcaagtggcaatccttggcatctatcaacaatctcgcgagacaacttctccaagtgacgtggacaatttctatcaagctcatttcgaaaagccttattgcaaaagagttcccatgctttctctggtggaaggggttgtaaattatgaatatgaacatttgatgatgctttgcaaaaattagcaacttccacatttcgtgttgtgataactactctcccatttctttcattatcacccgataaagcactttgcatctcatcccaaaaacgaatacgccaaacatcatcaaaaatgaccagataacttttgtcttgtaagtaatctcttaatgttctcgtcatcttagtttcatctgctgtatcaattccatcaggatatggttcttttcttgcctcacaaaatttcttcattaacttttgtagtagctccaccctcttgtatgactgggacacctcaatccatgcatg

SEQ ID NO: 398173 - DNA, 659 bp, Cannabis indica
agagtagctcttaagtttgctcagtacaagggtgctcatgccattgctggaaaacttatgaataaaccaagctattcatataccaagcgagacacctgagcgagatacgttttgcagcgtgttttaatccacgtaagtgttgaccctttaaaagatatttaaatcacagcagtgggatttttaaataataactgcatttatttatgtagagcgtaattaaggcccacaatttcgaggcaatattgttgtggaattcaaatttcaatgtaattaactgccaacctatgtgattataaataggggcagattatacagaaaaagtgacaaaaaatattgagagaaaaagagaatacactgattgtaaagaaccctagttctatatcagaaaaattttgataagattgactcgtggactatgcagagttaactgcaaaaccacgtaaaaacctggtgttatattctttttttttttttctatttttctttcatctcttataatttttgtgcaaaatctattacgtaaataggctcatattcgttaatgaaaatttgtgttaacagtttggttacgtgattaaaggtcagaaaaatcccttctaacgaaagaaggaatttttttctccatggctgataatgggaaaaacgataacactcatcct

SEQ ID NO: 398174 - DNA, 816 bp, Cannabis indica
aaaaaaataatctaattaacatttcatcgaatccctgtgtattacgcattatattatatacttcattttgaaatcgtaagattttattaaatctattattaatgtttgttgacgctgaaaaatggccaacactaactcactagattggcgagatgaataatgtaagtaataatttagagagacacacaaaatttatagtagttcactccccatatcgcagacaatggagataagtctactttgaatttttatttctcacgagatggtaattacagaaaaaggctaagtatttaagctctagtttctatagagagatactctaaacttgtggaaagttttctaaatatgaaaaatgagctaagggagctcttattttatgggtgaatgaaacccataaaaatagggagaaaatatagattagatatttttgaccgtagatgatgatctaacggttaaaattagcttctaatggtgatagtcatttttcgaagcccagcgagagccgctgcgggtaacctagagcttatttttgtaacttccttaggggtgacatttagtgtcgatagcttcataattacgattgaagtgtgagacatgaattaatagatcattaaaatttctatgaaatgcaagttaaatcgcatcaatcgtaataatattgagcgagttacagctgttttactgaaggtagttcatgacttcgcgtccaggttgacatccagcacccaggttaacatcccagggcccaggttgagatatgatgtcaacctggacactaggtaagtgtaaaaacgtccaagggatgtactttaagat

SEQ ID NO: 398175 - DNA, 507 bp, Cannabis indica
ttttttacagtaaatttttagttactgtttgttgtatattaattagcaatttagtttgtttttcttatatttcttcttcttctactacttattattaagacatatcatttcattactcacattttatttacgaataataataaattatttatagtttcatctaaaatttaggatgtacagaatattcaataaacattatacctcatttgtgtgacattaatgccaacgtgtggtaataataataataataataatatataacgacctctctaaataatctaagataataatatacaaagagacttatttataggtgtgtaatatataaataatttataccaaccgaacattaaaattgtcctccgatactgttaggctatttttagcctatgttatggatccgatttatgtgcattcttagctgtgttgggacagaattacgcttgttttctatgttttcaggttctttggagtaaaagaggtctcgggtgcagaaattcactgaaa

SEQ ID NO: 398176 - DNA, 715 bp, Cannabis indica
aaatgactaattcactgtactttaataagactaattaggatttttactaccctgaactttaacatgtaccaaatcatgccccttgaacttttaaggtcgttaaaaatgccccctgaactattgagattgttggatttaaggacttttgtctaatttcattcaattttactatttcagtgattgtttatgtactaaatcatgctccccagactttgatatctaccaaattatgcccctcgaactttgacatgtactaaattatggcccctaaactttcatccatgttagactttttttactaaaattgaaaaaaagtccttaaatccaacaatctcaatagttcaaggggcatttttaacgaccttaaaagttcaggggcatgatttagtacatgtcaaagttcaggggggcaaaaatccaaattagccttttaataatataattgctttatatatatatatatatatatattcttaaaaaaagcctaaatgaaaactatatatgtatatgtactttaaaaaaaattagatttagttgacatcttacccagtaagatgtgttaagaggccatgcgtgttaaaaaataaaaaaaaaaacaaatgcacttaataagtattattaatttaagagatattggcgactaaactatctgaactttaggttttgtaacacttaaccacaaaaactaaaattttgggggaaatttgattttcta

SEQ ID NO: 398177 - DNA, 564 bp, Cannabis indica
tttaatgtgtgaacttgagtttttatattgctgtatgaattaagatagcttgatttggtattctcgagtttgcttggtattgtttaagttgatttggattggaattgttagttgagttgaggtttgagcaaagtttgagtttaagaactcaaacctagctctctaatggtgatttgagattttgtgctaattgttaggttctattgcttgaaattggtttgttggagtatattcaggtattctggaagctattggaaagttaggggttgaattgaggtgtggggatcggtttttgggttcccaggacagaaccggtcgatcggttcagggggactcatagaaccagtcgaccggttggtacccaggaaccgggcttctggttgggaactggtctgccagttgggggtttttctggaaccctagttttccctatttttgtgttatttaaggtgttaatatcctatttatcgatagggttatccttagttttgtttttaaatccccgataagtgttttagcgtgtctctcatcgaatttgaaacgttatggtttagggccctgtaa

SEQ ID NO: 398178 - DNA, 710 bp, Cannabis indica
ggttccatatcaatcgatcgcacagcaggctttcgcccaactcgctttttcttcaccatggaagagagagagagagcagcagctaatcgcctccaagttttttatattatttttctaaaattagttttaaaataatctactgaaatttttttttatatattttaaaattaattatgttactaattaaattttaattagattaaactaatataattagcctaatacaattatttaaataaggtaaataatccttcaaaattggggtcgtttgtgtgagggagggttgggtttagtatatcgtacccactactatggccctctaactctcacacaaggcccaaagaagaggaatttaaccattaaataaagagaaatttacggtgggagacggaatttcaaaattaataccatgattaccactatttcttttatttcaattacaatacctttgcattttattttttaaaaaaacacgtgtatacactcgaaaaaatgagcagcacatcaacacaaatagactaattgtttccttgttcttttctttcctttgttttttcatctttttttatttgttaaatatgaaacacatatattaaaatattaatgattttctttaatattagaaaaactttctctcttctatttttatttcttttttaaaaaaaaataaaaagttttttttagtcacactagtaattatttaagctaaa

SEQ ID NO: 398179 - DNA, 895 bp, Cannabis indica
atggtgatttgattttttttttctaaggggtggttgatctgagattaattagactaatgggtgtgtaattttttttaattaaaaattgatttatttaacaaaatcttaatcattgagttttctcttaatttatttagaaggattaaggagtattttaattatctaacttcgaaacagagatagatctaacaaactaaagtgaacgtttgtaaattatttccaaagtgaattgtccttacctatatgtatcaatttaacctaattaggtgaaaaaacattaatttttaccttatttttatcctttatttcatatacactaaacttttgtacgtctagctgcatagtctatctcctaatagtagtaatagtaataggtgagccatattaaattcatagattggactataattatatattcaccacacaatgtaataatatatggggtttatttatttatttattttttttatttttatacttcataataattttttattttgtatttttatagaaatccacataataacccacataataacaaacagagcaacctaaatcacaatcaaaatccacataacaactcacataaaaattactggagcaactattggagtaacctaaccgtaaatttaaaaaaagttaaaaaatagtatatgaagtaattctccataatataattaattatcacaaaggcactagggctgtgttgcgcgaccatgaaggacgggcaacccttttcagctgtgtggcccttttcggccacttattctcctgatgtggcggaagtttttgctattctccaaagattgtatctttgtaaaaaaaaaactgaggtatccaaatgttggaagttattttaccaggatcttagatctactcacaagtatgttgattt

SEQ ID NO: 398180 - DNA, 661 bp, Cannabis indica
ggtgagaatctttaaataaagtaagccagaagaatccactttgtaatacgcttgcagcagttcgatttcaactaaaatgtcccccacattgtaagctatggcagttaatatagagagcatctcctcttctggcccacatcttctgataatctgatcagcacaatgcttatagagaataggctcttcccaatagtagtgtttgacttctgagtagaatttcttcaattgttgccttgtcagatctggtggtgtaatgtttgcagccaagaagttccataatctgcaaaccaaggtacaatagaatctaagagaaacagctgctcatcaaggaagtccacattgattttaacctctcttgtgttctgactctcttcaagttccaaccttgatagatgatctgctactaaattctctgtgcccttcttatcttttatttctaaatcaaattcttgtagaagaagaacccatcgaattagtctttagttttgcatcgttcttagtcatcaagtacttgattgttgaatggtctgtatacactatcattttattaccaatcaagtacgggcaaaatttgtcacatgcaaacactacagccagcatctcctttttctgtagtagcataatttaattgggcatccgttagaaatattttaccaggatc

SEQ ID NO: 398181 - DNA, 529 bp, Cannabis indica
tagagatggtgttgtctcttatgagaatcgggagttattctctagagagtccatgaattgaaatttcgcacatggccattaacggtgcaagagtgagacatgcagtctcaagtgaccattagcaaggttgtgtgtgttatcaccagtttgtactaaaggaatagttgtttaatgctacggcaactaaaaattcatcaaactttgtggtaattacactaaggtaaaattcaagtcgaaagatattttacctaatccacctaagcaagacttctttaaaagtgtgcatttagtcaatcaaagtgggagaacgttatattttgatataatatttttgattgattaaataaatattgcaaaagttacaagtttgttacaaaaaagataatatttaatctagttaagaattgttatattatttataataatatattatatagattaaatatgtgtaataaactaataatatgtaacatatgacaatatatattagttgtcatttttttataacatttaggggagttacttgtta

SEQ ID NO: 398182 - DNA, 501 bp, Cannabis indica
ctcaaattgcttaatcaaatacacaattcaccacttcactcaatcacaattcaccacttaactcaaaatcaccatctcacatgaaaattaagctcaaattgcttaatcaaatacattcaatctaaacagccattaaaatcacatgatgcaaacttcaacacaccccaaaagagacctaaaaacaccatcacaactcaaactaaacctacagccacgaaatcccaaaatcctcatccaaaaccaacaaaattagtgaagttttcaatccccaaggaaaagaacttaccttcaaagcttctaggatgatcttgggtatccaatttgctcaaaaactgagagaaatcaaagtgaatcccttggttttagcaagctctaggtcacgaaagagagagagagaagaagaaatgaggcttccttgccttggaagttttctttctaaagaaaatgaggtttttccatttttttcctattcatttctttccttaaataagtaataggcag

SEQ ID NO: 398183 - DNA, 1085 bp, Cannabis indica
ggcccaagttgacataatgtcaatctgggcattttgctttgcttctggcacccaagaataattgtttcttccctgaagtacctatttccctatttttgatgaagatgaagataatgcaaaagtcagatcgtcaatttgatacttggaagtcacccagacatcgggtgctttgggtgctcaaaaatgaacttttttcaagtctaattatgatgcctcaaatatttttgtggtatgtctagtttatgttccaatgcaaaatttgacccatttacactaagacgatcttgaaaatagataccctagttgaggatgtcaacttgggcactgggtgaaaccctagtgcctaggttgactttagaggtgttggttcgtgtattttcagctcccagggcctagacttggatgcttcatgttttcatggtacagaatactgaaaaatagtgagttcgaaacaacttggcagaattaaaacacccattctggagttctctaagtcaacttagtcccagggctagggatccctccaggtcaacttactatgattcaagactacttaactactggatgtttttcttcttgccaagtatcaaacattaatgtccacgtcactaagactacttttggtataaaaaatttccccccaagtcaactttacacttgtgtgaggttgatttaatgatgtgaactaagctcgtttctctcgaaactactaggtgggcatcaattttgacaatcttggacaattgtttctattcttcatgcattcccagtgagagtaggatttcaaattctcattccctgttgaatagtggaattcaaaattttgagtataaaaggagaagaggaaagatgatcattttttttatcgcttatcttttccttttcaacttaaaatttaaatgaatgcgttgacttcgcttttaaccaacgacaatgagtcttttgataagcgataaatgatgtgtcgtaataagaatacgcaataaagcaaataatcataataataagaagacacagaaatttatagaggttcagccccgagcagttcggtaatagcctaatcctcgttagttgtattgacttaa

SEQ ID NO: 398184 - DNA, 652 bp, Cannabis indica
tggggttaattggaaaggggacatatcatactgcttgagaataacggagatgaatggatggaaggggactgacactttgcatcggagaatggggatagagactacaacgtcttctgagggtatgatcgcagggttggtaaaaggaaggtgtggtctttgagtaggacgaggacacatggtgtcgagacacaataaatttaatctcgaaaatgtggtcaggtcagatttggtgacccacgagactaagtcttcgtaggagaacggctcatttaattgcgtgttttcaaccgaatcagactcgctcccctcgacatctccatcctcgccagatccacgatcaggaacctcttaatcttcacccatctcctcgactttgacgtcaggagcgtgcctggagtgaataaggtgatcacggcctgacaccgtagactcgctgtctcgaatctcgatagttcctggttcagcgagctcctgcaccatcctctcgatgttgcagaggacaacagacccagctctgtgtctccagcagtagggacctcctcttctgagattaaagtctagataaagctatcttcctgatcgccatcgaacgtgttgcctcccgagccaagcatttggctgttcgatagatcgctcatctgaaagataaaag

SEQ ID NO: 398185 - DNA, 540 bp, Cannabis indica
atatcccgaagattatgtaaatataatatttattaatgtataatattgattgaaatataataaatcatgaatatatatatattattatatatttgataataatgaaaaataattatcatattgctatagattttaataaatatttacttcaataaatgttttatatttgtcaagaaaataaattatatttatgaatatatacaataatagaatattgaaaagatttatgattgaagcaaatgtttatattaattatgaatttatcgtatatgacatattaaagatcagattttgcaaacatcttaaaaaattatgcaaaatttatatttatttattctttaaaattttgtaaaaaataattgttgaataattttttatatttttatagatgaattaacaagtttttaagaaatttataataatattgtacttgtttaacgttattttcgaaagtgaatgcaataatttcaaataatcaatgacattatttactacttaaatatttttagaagaaatttattgtacataatgtatgaattc

SEQ ID NO: 398186 - DNA, 871 bp, Cannabis indica
gcttttcttaaggtcacgatcaaacatccctaaatctagttatggtttacactaagtatacaaccattccatcattctgaaattttcctatcactagggtattttgttaggttttcttttttgatgaataagaaattttattgctccaaccaaacttttacatcactaatctttacaatttactaacaaaacatttacattttgattctatacaattcaagtcattaatatccatgctttatcttcatccttagcttttttaggaagcagccccttgattctaagcttactcatttgctgagttttcttgaccgtggtgttgatgagccattgttgttgattccataacacctcattccttgctttccacacatagtacaccaaacttgcaggtacagtcttcaccatactcttcctagccgctgagaatctttttcgtgttgttgcaagcttgaagtagctgctgaatgttgattgttggtgtgttccattgcaggaacttttttcgtttcttgcaagcagcttcggctgtattcacactcaaaaaacaagtgtgtaatggtttcctcttccttgttgcagaataagcactttgcatccatgttggccataaacttacttagtctatcttttgtattcagcctttcccaaaacaccagccaaaggataaacctatgctttggaacaataagtctatcccaaactaggttactccaagacagtttttcatattcagcaaatagcaaatgatatccctattgtattttatatttctgcataacaagtattttgtaaggttatttttagtattaattttggattaagtttagcatatttttaattaagttttaatcgtgtttggagcattttt

SEQ ID NO: 398187 - DNA, 554 bp, Cannabis indica
ttttttttttttttaatattgtggggaaagagattcaaatttgagacattcgatctctttataagaagaagtacataaatttttataattcgctcaatctgataatccactcaacctaaatctagatacctcgacgaaaaatacaaattgaaaaacccaacgaaaatataacccatatttttaacacgcaagtactatacatatcgttttaacaagtaatacttaagtaagtgagattgttgctacgattactgtagctaggtactaatcgattgaattcttatttctatttggcaatcgaatagataaattttgaaactaaatgaactagcaaaaataaataaaacaaataagaggtttaacaatagatgtgaaattaggaatataatttcaattgtatctatctattatggtctaacatgatttaattaatattatattaattattttattgttatatacaattttcttaataatattatattattttataagtatatatattttgttgtatggcatgaatttttgttgtgtatagtatatcatttatttaa

SEQ ID NO: 398188 - DNA, 1106 bp, Cannabis indica
taggtcgaacagaggcggaagaaatctgctacattcttaaagtatgggtgcaaaggcaaaaatgccccttgttgggcatgagcacccgaccaggtgcacatcccccttttagggtttgtggctcgattattgtgggcaggaatgtaacagtccaattcgcctaggtagccatcctagtcgagagcccacaggcgcgcctcagtaaccttggacggaaggctcacccacctggcacccaaggtacattgccttctatgaggaactgcagcagtaagctcctcattgacgtagtccacgccctcaaccaggacgtcgccatcagcatcaactggctccccagcctcattgtatctcacatattttgggggtgcaacctcttcctcttcctccgcctcagagggactgctaggacagacattgtcctgctcttcaatctcctggacctcaaccttcccttcatgatccccctcctcttggacgactggatcttgttcgacgctgggtaaagtggtgtgccgagccacttgagggtgagatgcgtcagccatacgcattgcctttttgtacgaaccatcattctatggcttgacgaaagacttcaggaagaatgcctttcactagaagaaggtgggctagaacagagacgaggatggtcctcgcgtaagagttgaagcaagtctcggtcgattcgatgttcgctctcccaaaactaacttggattcatctacaaaagacaacacacaagatgagtgtttgatcgaaatatcgaacgttaaaacaagcaaatatgccgactaggagtactcaacagattaaagaataagaatatccaaaaaaaagtcaaaactcaggaagtttgaaattttctcgagttagggcaaaaaatttcatgaagcttagaataagcaagatgaaagacaggcattatgcagttcagaaagcaaacattatggactgtgatatcgcatgaacccatgacgaaggagaatcgcagagtttctaaacctagggtttcctacatattttctacagcaaagtcgaagatgcattcaaaaagtaaacatgcaaagtaaacataaaggaaatcgagaacttactcaagaatc

SEQ ID NO: 398189 - DNA, 531 bp, Cannabis indica
agagagagagagaagaacgattggtttagtcaatggaagctagtggtagctgtcgggcagaggtgagtgagggaggcggaattggagggtggatggggtcataaggattaagctgtagggttaatgaaaatacagtgttttaatttctaatttctaatttgttttagtttttattttcttttgtttatttttttgtatattattattgttgttttgattccgagcaagaattgtcaacattagtggagaaaggtatgtcattcaagcttattgaacatgggttagcggaatgtcggagagtgtagaatggttgtgatatgggtgtcaaaagaggtgttttgtgtctatatgaattgcttacttctgaactatgcatccaagttaattcttaggctacattatacaataagcacaattataccaaacaagcaccctcacttatccattctttcatcccaaagaaacgagtaagagattacacttttctttttttctttcctatgtgcctacctcattgttcacatttgattc

SEQ ID NO: 398190 - DNA, 1195 bp, Cannabis indica
ttttgtaatgaccgtgaggtttagttaggttctttatctaatgcattgcgacgctaatttttttttaaaaaaaattatgttgagaaaactataaatactaaataaaattatagctaactaaatatgacatatctcatatttatttagtttttcttaataaaaatactatgtgaatatgtatatattgctatgtttgatatgaccatgcttcaatagatgaacatgggtaaaatttgttgagattttatgctttaaataaaattcgatttcaaagtaaacttatttacttaataataaatatcaaagattactttttactattatatatatatatattgtttggttcacatgttacttatattattatttaataaaataaattctgttaaatcccgaatatatagttattcacaattatagtgttgttgctacagtagaaaataatcgtgattatatacttcaaactatttagtctcgtaatttatcagtgcactaaatttatactgacgtgataattactgatgtcatttacttacacttggctaagtagaatgcctttttcagggtactagcaaagtaaacttgtatcagatgtatataatttacatcagactggactgatattaatagactaaaaatatattataaacttatcgttatatgttttctaaattaatttcacttagttgatcgtaaattaattgatattaatcatgagataattacattctttctagttctagtattagagttctttgacttgttctttactgacttatccattagactaactcattttacatattaggaactcgatagtgcaattgaataggagcgttaatcatagatatggacatttataacttctatgattatttagaagtgaaatattagttttctttgagcttggctaaatgagttaaatggtggagtacttattttaataattatggtagtttactaaaatattatttacaaggagctaagtgtttaaaggatgaaatgtattgaaaagtaaaataataattttgtcattattcaatgtagatcgtctatagaggatcatcgattagtttgattgtaacaattgataattcacggcgtatctatattggatatatagagtgttctatgtaatcaatagtgcaatttcgattctatagaggagtcatgagaaattaataagttaagaaat

SEQ ID NO: 398191 - DNA, 817 bp, Cannabis indica
tctacaaatcagctcacatagcaatcaacatagtaatctaaaagtgcattaaaaaatctaaataataacctacataaaaaatcaaccgaaacaactatcgaagcaacctaaactatagaaaaaaaaaataaaacatggtaaatgaaataattcatttatcattattttatttatcaatttatccatgccatagtaataataggattgcattcaattaacaaaatgagattgcatatgtgggccacctataatgttattatatggatcaatacgtttgttgtgatggtgacagacgtgattggatgaaatttaagtttattaattatattggagtgatcacaagtatgtgtgattattgtttgtttccaaccattatttgaggactatttttattttagaaatttggctttatatatattgtagtttaaaatgaataatcaaaacttaacctacgcaatattgatagaatagggtaaattttatgtacaccccaatatatcttctcattttaaaatttcataatatctctctatttctctcttactcttttttctctctttccctatcacttgttctcactaaaatacctatcgaaatcccactaaaatgatctaagactgtgactatcgccaccatctgaccgagaccacaccaatccaattgatcgagatggctccatttcaatcagactgagacctcgcccatcccttcctcaactgcgaatggagagaccactgccactaacacagatcacaaacacagaccacgaatgaagagaacacgaacaaagacattctctgtaattttctagtttttt

SEQ ID NO: 398192 - DNA, 629 bp, Cannabis indica
aatttaaatgacaaacaacctttcagatttacacaagaggcttgaagaataaagagccaactaaaagaaaattatttatttatttatttatttttttaagaaacacatgaagtgatgtttctttcattcattttattctttttttttttttatgggaaatattttttttttgacaataaaataaaaaggaaacacaataacgaaatgttgctcttgttctatttttttatttttttttattaatatatattttttttaatttttgattttttttttttcaagaggcaacataaaaatacatgaataaagagaaaaaaataacattacaacaaaggctcttttaacaaatgaaattatccctccggtatatgtcatgtgtttaaattccaaaaatctaatttgaccaactcaaatgatcaataaaagttcacaaagtcgttttctcaactctcacaacttaccaaaaaaaatgtgaaactttaagcttgaaaattttctcaactatttgtgttaacaaccatcttaccacatgtttggaaagtgcattaaagaactctgaaaatcactccttaatagctaaacatagcaaaatccaactcaaacaaaatatttcaatcatgcttagaaaa

SEQ ID NO: 398193 - DNA, 797 bp, Cannabis indica
gtagatatacattccgattttatagtgtatagtgtatgaaatatctggcctggtaatggtcaaatactacaatttgccaataattcttctgtatagtgtatgatcaggcaaactttccttctcatcttgcccaagtttcaagttcccatccattggtgtactcataggcttgctgcccaaaaatacaagatcttcaaggagttgagtgcatatggtctttgagaaacaaatatctctttgcttgatctagcaatttctagccccaaaaatgtaacatcctaactaattaggcatgttaacgtgatttaaacatactgtgcagctcgttgctaatcaacgagattaatgaaagacgtgattaattaaaattttcttatttgattaataaacttaaagtaatatatatatataaaatttcgggatcccgtttacaaatacatttacaaaagtttgctactcatatacaaaagttttgtcgcctagcgactatacagcaaaaggccctgatgtcccaaagatcgtacgctccaggcctaactgccccgacatgtacaattttcacctgctcgccctcacggttcctcagctttagccttgcccttacctacacatggaaataacaccgtgagtcgacaaactcaataagaaaagcataacataaaacatactaatatctcgggttataacctggcgcccatacacccgatcataatcctatcctcgtgtcccacacggtactgagtctagaacgttacgacaatactatcgatcataatgtcagcctatactcaatatgc

SEQ ID NO: 398194 - DNA, 596 bp, Cannabis indica
tagagaagagatgagaatttttcagtttcttatttttatgggtgatctcctatttatataaatatcaaagtcaaagattaggaaactgagaaaaaaggaatagtaattacattaatggtaataaagaaaagatttggacatccatattgtaacaccctactagtttaggcgtgttaacgtgtttaaacttcattgtgcagctcgttgctaatcactgagtttattaaaaatcgtgattatttaaaactttatttaattacttatagatacaaaaataatagtatgtataattgggatcccgtttacaaaatatttacaaaagtttcatagtgcataatacaaaagttgtcgcctagcgactgtataaaatacgctaagctattccaaagaccgtacgctctaggcctaaccgccccgacatgtacaatcttaatttgcttggtctcccggttgctctgccctagccttgctcttacctacacaagcaagtaataactgtgagtcgatagacccattaagagaagcatgatcataaacataaacatatatccaaaccgcaaccaggcgcccatacacctaatcacaatctactaact

SEQ ID NO: 398195 - DNA, 973 bp, Cannabis indica
cagaaggagaatataagtgttactgaatacataaattggtttgatcaattggctaggttggcctcgagaattgtgccaactaatttcactacgaaagaaaagtacctagattgattaaattcgaagataaaacatgatcttatgattactactgacgacaacaccacaacatgttgacatggtgggaaaggcattgcgagctgagggcgcagttgagtgcacccaagagtctcgagggactcaggttgctggtggggcccctactcctcctacccctagttatggaaggggtggtagtggctcgaccacagatcaaatacgaaaggctctaattgcacccggtggctcaagtcagaataagagcttctgagggaaccagggtcgagacaaccagcagggtggttctgaaaccagatacacttacccggagtgtctcatttgtaagaagaatcatcatggtgagtgtagagggcaaggatgtttctagtgtgggttgccaggacactataaaagagattgtctacagcttaagaaagaggaatagaagtcaacagcaaaactcgctctagcaagggtgtttgctttagctcaggctgacgcagaagtgagcccctcagttattaaaggtcagctctcagtcaacaactcttacttcattgtattcttgactctggggccactcatttttatgtggcagccaggatttttagtaaattggatagaatgcatgatagttatgataaagggtttggaaccctactacctggcggagaattagttatctccaaaggtggattttgtctatgccgattagaattgaggatagggagttgagtgctaacttgatagaattgggtttagcagattttgatattatacttggaatgaattttttatccaagtactcgactagaattcactataaagatggtgatcttccaacctgagggcgaggaactgtttgtatttgtga

SEQ ID NO: 398196 - DNA, 1172 bp, Cannabis indica
atgtccagatcaagtttagtatgcagtattatcttttattaattagtaaatctgattatattgaaatgggttttatttagggcataaaattccaacaaactcccacttgcgttaatataaaactaaaagtacatttcaattaatctcaataccttgatgtccagatcaagtttagtatgtagtattatctttgtaatagggcctggcagtttgtattcaataccaactttctctatcattacatcttcatagttacaaaatccttgatattgtgaaatttatttctatatgtttactcatcttagggtattggattttttactgtttggcaactatatatgtgttattaggaagtaacactagtagttaatctataactggaataatgccaaaaattgtatagaactttccataggatgaataattatctagtagagttagagactccggattagtgtttacacttctccaaaaatcactgctccaccctaaaataatcaccatctcataattagactttttagcattaacgcaagtctagaaacttgtttggtgtagcctaaaagtattaaaatacaactcttatagactaacatatagttcctcttttaatcttaagatttatatgattgtcttccaatattcctttcctagactaagttaatacttactcacaactcacactcaacaacaggtatctggtataaatgcataccagagcatacatgagacctctcactgttgatgcttaaggaattctttctttgttctttatcttttctagaatatatgaaactgttctttagataaataaattctatgtttagaagccaaaagacttcctttagagtaagtaaattattaggtttagataatctctaacctatgatactaggatcaagaagttttgttaagtctactgaatagacttattatcacaatttcccttcttttccttgtaatagaaaattttggttgctccatatgagtggttttgttgacctcaaaatttggccaaccgacagtagagtcgtatttaatgttgatgcttactgtgtgttacacaataagaacaataaagtaaaataaacgccaaattttatagaggttcaacccccttagttagcgggtaatgaactactccccttttggttgtattgatactagagata

SEQ ID NO: 398197 - DNA, 691 bp, Cannabis indica
acttgtaagtgtccatatacgggtaaaggtagcagatcctagttattttgaccttggttggtcttgacatacttctgcaggtgcggattgtttttctttattagaaattcaatttctcgcttcagattgtaacattcgttggtatcgtggcagtagtctacgtggaaccgagaaaatttcgtcatgtcccttttgttggtatgtttcttcatgagctcgggcttcctgtacgaaattaacgactgagttgccatataaacaatctctatttcttcagttagaatagtgaatgcagtgtgtttggcatgatcaaggggagtctgtccagatttatcggtgaactttcctttcttcttgtttccttgcttgtggttgttgcttgaacgcttaccgaattgttggaatactggggaagttgggcggatgttccagtggaaggagccttcgttttgcccaacttttgctcaccttctgctcgttgaatgacttcttcgagcttgatgaagccttcggcccggtcaaggaaataactcattgagtctaccggcccattcttccttatttccttccatagctcaccaaggacttcaatgccccccagtatcgcggataactttccatcctcggttactcgtaaaactttggtcccttccgtcatgaatctgctgatgtacgcccagagtggcttgcc

SEQ ID NO: 398198 - DNA, 504 bp, Cannabis indica
ggacgagattatagctgcggcccagagggatcttccagattctagggaagaggtccaagaagtcactaccaaattaaggtcttcagacgagcttcaccaggctgatttggaaacaacaactaatttaactattgaagtaaaagagctccgtgagttcagggaacagtcctgccgtgcctcctcagcaagttgctcaggccattgcagttccagcggtgccagcagaacaacttgttgttgacaaccatatggagccgttgtacgaaagattccgaaagcaagcacctccagggtttctgggaggtcccgatgtgatgaaggctgagcagtgcctcacagtgattgaacgtattctcaattttatgggagtggttggtaatgatcgggtgacctgcgccacttttcagttccaggaggacgccctcgtgtggtgggagttgataagcctcactcgggacgtcactgttatgacctgggaagaattcaaggagttgtttaactcca

SEQ ID NO: 398199 - DNA, 1679 bp, Cannabis indica
aggatagagatggatagagagagggggggacgacaaggggtacagttattgtatatatttatttttttatacatatatattgtattatttattatatataaatactttttgacccggtcaaaccgaggtcttacatgagcaaacttaaaaactgctctttgaccataagactttgcagactatataatcatgtcctacatgctctcaagcttttacacttagttattataatgtgaattatacccattagtgatttgcgattcagtacgattttcttcaagtaggtctaaggaaaatttaaggagttcttgattttcttcttgattatagaaatctcatctatgggtcgcaatattaacctctactggcagcattgcttccaagccaaatgccaacgagaatggagtgtcccatgttgctgttttctctgtcattctgtgagcccaaagtacttatggtagttcatctacccatctcccttatgtagcatccaacttatttttaatagtatcctttaaggttttatgaacagcttctacttgtctatttggttgaggccttgatactgacgagaagctcttaataattttgttcctttcacagaactcagtgaataacttaccatcaaactgggttccattattagatactattttaatgggtattccaaatctgcaaattatgttcttgacgacaaaatcaagaactttttttgcaagttatggaaactagaggttcaacctctgtccactttgtgaagaagttgactgccactactgtgtactttgctcctcgtcgccctatgggcaatgccccaatcaattcgattccccatattgcaaatgggtatggcgaggtcatccttctcaattctgttggtggtacgcgaggtatatatgaaaatctttgacacttgtcgcacctcttgacaaattcatgtgtgtctttatttattgttagccagtagtattaattcttgtcagattatcttctttgacaagctttgccaacctgcatggtctccacacaagccttcgtggatctccttgattatctcgcttgcttttgtgagaagcacacaccgtaggagaggcattaaacaacccctcctatataattttccttctactatcgtgtagcgaggtgttgaatacaagagtttttgtgcctcatttttgtctactagaagttgtccgttgagtagatagttaactatgggtgtcatccatgtgggcgaggcgtctatcatttcaaattcttccttttcacatatactaggttcatttagaacttcgactggtaccaaattcagtttatcaagttcattttgcgaggccagttttgccaaggcgtcgacattcgagttaagttctcttggaatttgttcaattttaaagtaattaaacttttccaagttcttccgaactttctccaaatatcttaccatttttaaatcctttgcctggtatttgcctagagcttgattcacgattaattgtgagtcactgtagcacataagattcttaaccttcaaaacttcaactatttttaaactggctattaaagcttcatactcggccttgttttttgaggtgtcaatttggaatcttagggcgtagtgaaacttaaagttatctggcgagatcagcatcacctctgcacccaagccattttcatta

SEQ ID NO: 398200 - DNA, 522 bp, Cannabis indica
attgcacctaaatatttttcaatacaaataatagtggagaaagtgcctaaataattgggagaaatggaatatacgtctggtgagtggagaccgtgattcagtctactatagtagtgggatctgcataattggagcttgcaacggtacaagtgccacatctagtcttgattggtgagtgtactgctgaattggtttgggtcgtaacttagtcactagcccattttgaaatttaattgataacacatgattggagagagaaacaacttctaccaaacatgggccaataacttgtgttagatttcacacccatcattttatgacatgaagtcccatgtacgtgatgtatatgccatatatatgatggtgtagtaaaactttgggccttaatgtttgtagtgaaatacaaatgttgagcccactttcaattaaggaagtcccgtccaaagcctcaaatctaaataacacaaaattaaaataaatcaaatattttcaaataatgtaattttacaattaaaaccatga

SEQ ID NO: 398201 - DNA, 781 bp, Cannabis indica
ctggtgtggaattgatttgccataccttccttttgcttgtttgtcttgaaaccaggaggatagccatggattttgtaacacctttcaatggtatgtccatgaatgttacaatgtgtgcagaagggtcttcccttcttggggttttgatttttctggtttggattatcattcttgttccctttatctccttgaaaagcaaaggcatgactggttgtgggatcgtttcctacagtgatggttgatctctgattttcttcctgagtgacaaggtgaaaaacccgatttacatcaggaagaggatccattaaaaggatgctcccacgaacttgagagaagttgtccgagagtcccatgaggaaggacattatatactccatgtgattgtattcttgcattttctttactccaccacaggagcacccattgcaggtgcaatttggcttatagttggctaattcttcccaaatggtctttaacttggtgaagtatatgctgattgtttgtgcttcctgccttaaattcattagattctttctaagattatagatgtgaggaccatttctttgttgaaaccgagtttttagatcattccatatgttggcagcagattcatcatatagaatactggaagaaatttcttttgaaaccgagtttaatatccaagaaatgacaatattattgttcctcacccaagcattatacaaagtataatctgaggtcattggtttaggaatacttccatccaagaacccaattttatttttgacagatatagaaagtt

SEQ ID NO: 398202 - DNA, 1372 bp, Cannabis indica
agagagagagagagaagaaagaggtgaaccttttccttaattttctttgattttccttctaccttaagtaaaatagattttcttttaaaaaaaatcaacttatattcaaccttattataattcaaataagacaaaagaaatcttgccaaaagactttcttgcccctctagataaataaaataattacacactcccaagggtaaattggtcatttaccaatccccaaaaattctaacacctctaacatctaacaatgataccccgataatattctaaacatacaaaatatgactctctaaaggcccaacgtcgctttccacagcttccgagcacaacacagaattgaataatttatataaaatagcataataaacatatataaacttaaatatactttcacaacatgcattttataaatattaattaaatctcatgcataaaccctaattattcaataatccaaaatattaatcttaggtcgtctttacaatcaagtttaagtgccataaccatccttccctcttcgttttctctttaaatgatgcataatctcataggaaattgcgatattatctgagattaagtggccttgtaaaaatgcactttgagtatcagatatgaaggacggcataacactcttgagtctattagcaagcactttggacacaattttgtacaacacattgcataaagcaattggtcttaaatctcccatatccataggctgcttcttcttaggaattaagataaaaatggttttgttaagacctataggaagaaacccattatgaaaaaattgcttgaccataatgatgatatcatctttaagaatcggccaacacttctgaaaaaagccaggagttataccatcaaggccctggggatttatccagatgcatttggaacaaaactttgcaaacctcctcatttgaaaccggtagcaacaacttggcattctgttgtgatgatacacgagtttgcacactgctagtgacttctctccaatcggtttgagaagataaaaaaagttcgttgaaataaaaaactataagttggtccaaaccactatcccagacaacccacgcaccaaaaaccgtaagttggtccaaaccataagttcgtcttgtagttgtagaagcatgaaaatatttgctattattgtctccttcttgcaaccataattgcttcgatctttgacgccagaaaacttccctttgcacataaccttcggccaaatttctctttgcttgtttgtaattagcaacagagacttcatctcgacccaatttccacctttgcatctcatttttacacttttttaatctttttttaaagttcccaataacttgcttaccccaatcggccagctttt

SEQ ID NO: 398203 - DNA, 1108 bp, Cannabis indica
ttgggataagagtaattaaagccgaattgattgagtccatatcatcaccttcattcagaattttcagcacattttgagtaacaagaggcccaactatatcccaatgatgttggaaaaacatagccgacatgccatctatcccaggtgatttatcgggagccattgatttgagagcattgtccacatccgtagcagtaaacggcataagtcgctgctggtttaattccagagtgatggctgtatgaactgtagagagtacatgattcaaagcttcatgatcgaccccgtttgaagagaacaaaccagaaaaataattaacaatttctgcactaatttcctcctctgtatgtacaaaatccccagtagaagattgaatccttttaatcttattgacagcattccttgttttagcacgggagtgaaaaaaattcgtattagaatcgccactttgaagccaatcaacacgtgcccgctggtgccaatacaactcttctttctcaagcaaatcgtcaagaattcggtcagcagtttccatttgttgaatatgatcagaagcacttgatttcacattatgtaacagagctgagttacgatgagcggctgctatatctcttcccatactgccatatttattatgatgccatttttgcaaagctgtagcacaacctgcaatattttgcagcaaaggattcagagattgatcattagcagatgcattccagtgagtagcaataatgcttctacagtcaggatcctttaaccaaaattgttcaaaacggaatctagtgtttcttttctgtggataaaccggttgatttggatgagagacagtataggcgatggctcggtggtttgaatgatagaaatctaggtggtgaagatcttcctcagcaaaaacagatgaccagtggctataagtaaatcctctatcaagtctttcccttaaaatgttaccatgatggttcttattagtccaagtgaaagagtctccacagtacgggataggccgaagattacacagatcaatagtagtgcgaaagttgttcattaaagcatcatttcgtgggggacctccatctttgtcatcatttgaaagcaactcattaaa

SEQ ID NO: 398204 - DNA, 500 bp, Cannabis indica
tttaaaagacaatatttttattaattgattttgatgggttgtctagagaataatctatacgtgtatttttagaagctaatgaataatgtgagtagtggaaatactatatttgcaaactgcaaactcacaacaaaatttaactaaaagcaagaattttttatgcaaattgaatgatcatatggggtaaatgttgcaactgatcattataaattattaaggattgaataagtattatatatatatatttagggatatgattttatcccgtgattgtactttcacggaatacattccgtgatgtacgacagtcgttagatgagagagttatttgatctgagggctgaaattgatctaagggtaattaaggttaaaatagtaatgtactctgacactcatctaatgtaccttgagactcatctaatgtaccacagaatacattctgtaaaagtacatcacagtacaaaatcgtgtccgtatatatttatatgataacaattttt

SEQ ID NO: 398205 - DNA, 1331 bp, Cannabis indica
ccaatagatctgtagatgtgtgtacattaaatgaaaatcataaatggtaagtttagaataaatacctcttcatgactatcagggtatcctcaaaacttctcgtatgttgtatcccttaatctagttgatgaggatgatgcaattggactcacaccagtgtcttccaaatttttccaccatacataaggaatagtgtcagatatgaagataaagtgtataatgtgttcttgttgatttctcaacacatgagaaagaacactttgagaaagaaaactgttttctttttctctattaatttttaaaattataaagtaaagtgatggtctgatttctcaaattaggcttctatttatagtagttaaaatcctttaattaaattatatttaattttttaaataaataaatatatataaccaagttcgcttactgatatttatgagggaatctcttaattaattgagagaatatctcaacaaatttgatatatctataaccacttttcaaattagatattacctaattgagttaattaaataataattaacataaaaagacaaactccataggaacaggacataggtgtaggcgactaccttattgttaaggacaaggttagtgtcttttgtcatgataacttttgttttaacaaatgttattttaatttttttttcttccctatttaattaatttgttatttttttattacaaaataaacaattactattttgccaattcaaaatttatttttttaaacatcattatactactctttatccttaccttgacagtgttttaaggtggcgattcggggacatggacctataattctaagctccaataaactagattatttattgagtctcatcaaccaaataatccttgtttattaattctatgattactccactataaatatggacttgaaatcttagtaattatagaattataattactaagtttaactgcaatgtccattgatataatcaattccaatgattatccctctatgtgttggttcataataagttttggtcaaataattattttacccttctaattaattctttatcctttagtaccattaattcactagtggaagtataatttagatcccatctaaatttgtgcacaacattccagttcttgaattaatacttaaaaggaacaaacatttgatctgttaggaaaattaggattctataattattaaggctaaacatttccagcgggtgcaacccgaacccgagcaacccgcccgaacccgaaccggtgaaccctaaatttttttttttgtaaaaaatagttcgggcgggtcgggttcaacccggtac

SEQ ID NO: 398206 - DNA, 786 bp, Cannabis indica
atatataaaggagaagtatgtggcggtctaaaattactcattcttttttctctatttttctaattttttattaagttatttattttttttttatatatattttttaacttttttattcttttatgcgatgttggttctctttttttattttttattgtttttaaaattgatatttattcttctataaaaagatattatattgttcaaaaaaaaaaaaaatatatcatacagtacacgtggtgttgcttctttttttctttttttttttttaaatttgatatttactcttctataaaaatgatatcatattgttcaaaaataaaaaaaaaaataaaaaaaatcttcaactatttaatttttctgttattaaacataaaaaaaaagtttactagaatacttattcatactattaaaaaaattaaataaaaaatgtaagaatttaaaatttcatatagttttataaattaattatcagtaaataaagtacaaccgcacgagaagcgcggtttgtttcctaattttcatacgtgagaaacatatatttttctatctccataaaggacgactaatattaaaagaaatttttttgtttcttttttatatttttaagttatttttttgtttaagatacgttgaagttaggtttttttttttttaatataactcatatgatgtttcagatactattcaacttattgacaaattattttataaacctattaaaaaagttttataaaaataagtttatttttatttaatcttgtaatgtctaattataaaaataaa

SEQ ID NO: 398207 - DNA, 512 bp, Cannabis indica
aattctaaaccatgaagaaacgtgactctcaaatggcccaacgtcgtgtcccacggctaccgaacacacatagaaaaaaaatgagaaaatcacatatagcataattaatacattctgaatttaaataaatctccacaaacatgtaaatcataattaataactcaatatcataattaaccctaattatttaacaatccaatatattgaacttaagcggtctttccaattatcccccagttaaaaagatttcatcctcgaaatctaacctgaatagctctagatgttgtcctcatatcagactccagctcccaagtggcttcttccactttgttattcctccaaagtaccttaaacaatgctatggttttattccgaagggctttctcttttttatccaagattttcactggttgttcatcataagaaaagtctggttgtaactccaatgcttcataactcaagacatgcattggatcatatacgtattttctcaacattaagccatgaaatac

SEQ ID NO: 398208 - DNA, 714 bp, Cannabis indica
gaaccctgtgacgttgggaccacttggcgaaaggtctcggccgttaggcctattgcagtgaacggcctctttgaacagcagattcacggaactcccatttgcgatttaggacccctttgccacgatcgttattggcaatggggggtctcgtatgaccaacggggtcagtggtggggaaaacgcacaattttggcgtctctttcgtgaatgtaatgggttgatccattagtcggggctttttgagctgggagttgagtaacttcccacacctcatcatgtttcacagcccctgcgtaccgtttaagctccttacgggtagtccctctgatgtggggccctcccaagatcatggccactctcctgttgggtctaggtggcagtcgggaatatgctgagcatctctggggggaacaaccggagccaatactcctgctgcaccccctggtgctacttgtggcaaagctccaaccgcctgacctgggttgagatggggcaaccggtttttgatccacttgtataggtgtcccaatcggatcaagttttcaatatcgtctttgagatttttgcattcattggtgttgtgcccaatgtcgttgtggtactcgcacctcttaatgggatcccttcgggagctgtctttgtacaaaggaggcggtctctggtagtgcgtattttgcctagtcgcaaagtacacacgttcttgggagtccgtta

SEQ ID NO: 398209 - DNA, 883 bp, Cannabis indica
ggtctgccccggcccgctactgagccgacctgactcgacaagcaattgtcctggcccgccccgtcccgattaactcagaaatttaattgggtctgacccgacttttcttttttttttctaacaaacactaaacaatattttcaatgttatccaaaaaaattataaagtttaggcatttcgtaatttttaaataaatatcaaggacataggttatttgttttatgttttattattagttattgtaattttacaaggtaaaattatttaatacaaaataagatacaagacatatttttggtatttaattacaagacaagttagaataaagagattgacaaaattctttttacatatcttgttttcgttttttttgatgagaaatatctcttagtattttgcttgcaaaataattagaccaaatatgttggcttctataagaatttttttatttaattactattatcattcttaacctagttgcttgtttttcatgaattcattaagacatgcttaaaaataaatttctaaacaagattttaagtgacacaaacaataaacaatacccaaaaaaatgaagttctaaacaaattctcatttataatttgagttgagttgaaatatcaattacacttatattactaataacaaagtatgttaataataaaaactaacactaaaacaacaaatattctaatcaagatcaacaatgtaaggctcctgaaaaaaaaaaacaaagaaaaatattaataataaaaattgataatttatttgataaattacaaaaactaaacttgttaccattgttggatcaacatcaacatcttcatcatttattgttaaggtaaaaaaacaaaacaaaataaatactaattatgaaacatat

SEQ ID NO: 398210 - DNA, 876 bp, Cannabis indica
ttctttaaaaaaaaaaaaaagaaacttagaagtgggattagattagtgataaaaatttgaaagacaaacattaaactaaaattaaaattttaaactgaagtgtcataaaaaaagtatgtagaaatctgtgattcaacaaatacagtacaaatattttacttaaaatattcatagaaaaatgtattaacattaatttaacccaaataaatagaaacccaccaaattcataaaagagcatgaaaacatctgccaaaaaaaaaattacacatccgtaaaaaaaaattacaaacataaaaaaaaaaaaaattcatcacaaacagagagctgtcgtcaaccccaaagccatagccgttggcgaccaccaactcgaaaacaagaactcaattctatcttcgattgccagcccataaccacaaatgaaaagatcaaacaacaagatctagagctagcacgtcaaccacgaacccaacatcgtcgtcgaccggtacatgcacagatcggacagaaaacacgtaaaaaaacataagcaattgtgggtcgaataataaagcatttggaagagatagtaatgaacgaatggaacttgggatggccattaactccagcaaggaggggaacattctagtcgccattattctcatcaaggaaaaacaaaaatccataaataatgaattgaatcacctgttttgacggaggtggtagggttggaatttattttaccagggtcttagatctactcacaagtatgttgtttaacaccctaaatatgaactttctaaaacggtaaataaacacatataaagttaagaaaaccttacattgatagcagcggaataatgtctccttcgactcagatcgcagagtattatcaagatc

SEQ ID NO: 398211 - DNA, 426 bp, Cannabis indica
tatttttaaatattaaaaaaaaaccattattctgattatttaatataattaaattaattataataattatttcataaatatattattaattagaaataaaacattaaaattaatttgtccattacaatataaagtatattatcttaaataaaattaagaaattgtctttaaataaactttaaaacataaaaattgacataattaaaaaaaacctaattatcatttttcaaatcagtatactttaaaaattcatctacattcgagctaagtcttgaaccatcaagattatcacgggattgagcaggcggggtagggtaataaggttgtccagtctgcggtgttggtaagatctccacatcttgtcgaggctgcggacgaaccaaattggttgttgctgttgttgctgattctgcgcactgaaaaact

SEQ ID NO: 398212 - DNA, 573 bp, Cannabis indica
agctttcccttatatgcaaacccaaaccccactccagtgctttacgggctccagtgcttcgagggccgaaactctcctccgacgaaggcgacgacgatgatgctgaattgaaactctccatcctcttcagctccaaaacttccttccttctcttgtaacaaaaccacgccgcttgtacgaagcaagccgcccatgttcgccactgaggggagtggaacctgaacgtttttcgtatctgtttgttgtgcagttgttggaattgagcgccacgaatttcagatcctcggagatcagagcaaaggcctcgacttgcgcaaaggctttgaccgtacgtgtagacgacgacagcaccaaacctggtcgaggatcaagtgcccaagttagtagctcctcgccgcagaactcgccgggaccaatatggcacgagttgaagaacccgctacggccaccatttgtagttcacgaatccaaatggccttggattaatgaagagcattgtgttgacacgaatccaccatctgaagaggttaggggctgaattgcagttgacacgaagaagaaagaagaagaaaa

SEQ ID NO: 398213 - DNA, 1101 bp, Cannabis indica
gaaggctaatctcaacctaaaacctaaatatcctattacggtaggtatgcatgccctattttggtactttttgggaacttgtgcatgcccatagttggcacttaaaggcaagttactccttttcttcttccctccaattgctataaatacgcgtcaccaattttggtgaggggcatcgaaaaaaagacaccaagaacagtctttataagaaatactcactcattaataacagagactcgtggactacggctcattaatgcctgagccacgtaaaaactactcgcattaattattcctaagctctcattattacgttagatatttagttgccgaaaacctcggtcaacaatgtgcatgcaaaaaaaataactatacgtaaattataaaagttcttagattctctaatattttttctaccattataggaggattatttcttaaatatatgaaagaacttaatataaaatctatttatatctacgataaaatattatttcgtagccaaaaatatttttttttataaactaataggtaaattatattataaaatttatttttaacttatactcaacggcgaactcatgaaattttacaaacgttaatgcaaaatttatataatatatatgaataaagtatattttaaatattttggtaagaaattgaatttatatgaacacttaataaaataaagtaaataaataaaacatattaatataattatcttatcaaaatattaaaattatttgaatttaacacaaaaatatattaaagtaagtaaaatacataaaaaaaaatataaaaatatcaatatctaagatgaatgaagtttggatggcaatatttagaacaagtctggaaggttgcatgaagtttggggttgatttgtttgagaaatgaattttttaattcctgcactgaactggaatttcgattcaggatagcctgtaggaaccggaattctggttcagtatagcctgtaggaaccagaattctggttggtattctgggttcctcccagaaccggaaatcccggtgtagaaccggtctaccaattgggaaaaaattgggaaccctagttcttcccatttttgtgttgtttag

SEQ ID NO: 398214 - DNA, 624 bp, Cannabis indica
gaacttcacttaccggcgaaggcgcatcatccaggcactgttccattgcctcatcactctgtttcagatcttcaatctcatctacatcttcatcaagctctaattcttgaattccaatcagcgcatccatggacctagttttaataactctgtccgatgaagatggaccagctttcttccccttgcttttgattttcccggccattttccccctttttgccatagccccggcgagtcaccgaaagagagagaaaagcagaaaaaaaattttaataactttttcaatttttatcggaattgagtttcgtaaaaaccaaaatttcttaatttttcacaaggaatccaaataaaatattttcagaaagaaaaaaaatatttttcatggaaaaatttcgtacaacacatacattcatcaaataagcacataaaccacatgaagccatccaaatcaatacaaatcatcgttttaattcatattttatgaaagtaaatcattaccatggctctgaggccagttattggaattattttaccaggatcttgatttactaccatgtatgttgtttaacatcctaatatgaacttctaaaacaatgtaaataaatacatataaagtttaagaaa

SEQ ID NO: 398215 - DNA, 1218 bp, Cannabis indica
cacatacaaacaataactgtgagaagacaacctcagtaacaaaagcataaacaataacatagcaataactcgagttataatcaggcgcccatacccccaatcataacctaattcctgtgtccagcacggtgctgagtctcgaacgttcgtatgacagtactattgaccataatatcagcttatactcgatacactattcgtactctagtcgtaccgatgtcacactatcaagtagttcagtactatcgacaataatatcagcctatactcactacgagtcatactctaggcgtaccgatgtgatattatcgaacaagacttaagtcaacatacatttctaaggtaatctaactggcttaactaacatgcatcctaaacatgtaaatacatatgaatatcattgtactaatcttgccttgtttctgaatttaggtgtatcggccaacctgagtggaacagctgctcgatgaattacaggcgcctaaatcacgttattcgtaaaagtgttgagtgacatgctaaataactttcctgggacataaacttgaagctaaatgtttccctatcgatgaataacatggcaatactctaaatatcgccaaaacaggaaaaactaggcttcccaaaactgccccaactggtagactggttccccaactggaattttggttctgtggggtttcttggggaccaatcgatcgaccggttcctacaggtacccctgaaccagtcgattgattcagtgaaagaaagttcaaaaattcataactctcacaaatcaaccccaaatctaaccaaaccttccagacttgatcaataaaccgtaaagaaaataaacaaggcaataaaacaacctaacatgctctgcaacaagaatttccattaaagagtaaagcttgagttcttatactcaaaacttgctcaaaccttacaacatcctctaaaaccactttaattcaacataaataacctcaaattaacttcaaaatacatctacaaacaagaacagcaactacaacacgtcaactcacaattcatgcataaaaccgtaactttagacttaagaaattataaaaacaaggtactagagtggttaccttgggttagaacacttagaacttgctgagatttcttgaattgtgaagcaaaaactcaaaccgtagctaggttctatggggttcgagagagaaagagagaattggagagagagagagagag

SEQ ID NO: 398216 - DNA, 897 bp, Cannabis indica
gcctggagagaaaatgcacgccgtatctaaaagtaattttaattaattaaaaaattaataaaaattaattttattgtgataattagatttttaattagaaatttagattctacacaaaattataccaaattttcaattttatttcaataaaaatgatttttagataaaaaaatatgacaaaaacaattttagtgcataggggtatgcatacccctacgtgcgcggatggaggaggctgactgagacagagggctatatgcagcctcagtggccgaggatgctcggtgtgaacagcccttcagacagggatgtgtccgagaattctcggtcagctcgtgtctgaaggggcatgctgtccgagcgatgcctggtaaccgcgcgcgcacacgtgtgcatccgatttcagatattttcatccaaattcaatcataattaattcataaaaaatccaaattggaaactgtaaaagcctaaattcattaatttttcgtctacttttcagtaaaaatatttctagaacgaaataaaaaaaattacaacatacattgcgatttccatacaatcatcaaataagcacataaactatcatgaaaccatccaaatcaacacaaatatcgttttaaatccatatttcatgaaagcaaatcattaccttggctctgaggccagttgttggattatgttttaccaagatctagatttactaccatgtatgttgtttaacatcataaatatgaatttctaaaacaatataatttaaacacatataaagtttgagaaaccttacagtgggtgcagcagaattataatggctccttccgctcagatctctaacccttgtatctatgtctgtagcagagtatcaccaagatctgagcccgaatctccttctcttga

SEQ ID NO: 398217 - DNA, 497 bp, Cannabis indica
atgaagatcccctagagccatcatgagctgagctcagtatcattagggcctgaaaacaaagcaaaacaacatcagtgtaaaaaacacaacactggccggctagtcccccttgggactgatatggccggccagccgcccataaaagcttccaaggttggccagccacatgcaagaagccacatcggcggccagcctatatagtgccaagaagatgaacagagctgaaagtataacttaccaaagaaagatctcggagaccggtggagtaaagcctgtcaggtccactgtcacctagctccttcaaatactcttctaagaaaggaagatccctctccatgtgtgagatggctacctcaacatccttctgtccagcaactgaccccgcttctctgctgggcctcctagcaccttggtcaacaggccatgtcataggttgtctatctaatgcaggccttagtggaggggaggcagtgattgacctgttgggttttatgccc

SEQ ID NO: 398218 - DNA, 673 bp, Cannabis indica
atcttaaagaatatgaaaattaaggcaaaaaatgaaagcaagtaaaataaaatgggtatataatgtaattttctcataattttataagaattatctcaaaaatatcccaaaaaacacaaaaaacttatgtttttacggaattatgagtattttttatatttttgcagatttttttttcttacaaactgttgtttacacgttgtttaaaaaaaaatagttatttttacattgcgaaaataaaaataaaatgaaaataacacaaaatggaaaggaaaagaaagttggtaaaaatataaaaaaattctgtttttagaaggacctactattataccaaatgaaatcaaaccaaccctgggtatgtatatccttctctcaacaaattacagagaagtttacataaaatacttaaattcacttttattttaaataataattaatggatttttttgtattttttatataacgtctaagttaaacttggatatggaagtcttctttcgtttctcaacggtgaagtaagactaagctcatcagcttattatcctaggtcgaaataagttgataggatccccttttttacgtccctatgtccctcccgtgtggcgacgtgagggcgtaaaaaaagaaagagaggaatgaggtttctctcgcttttggcatagtgggcccccag

SEQ ID NO: 398219 - DNA, 516 bp, Cannabis indica
taagtgtgacgtctcgaaaaatcagggcgttacagttagtcaatacaaactatgtgaaaatttagtttactgttgatctcatcacaaagaatttaaaataatttgaccatataaagttcatcaacgattcttcctcttccaaagattatcaaataacaattcaatcgtctccaaaatagatcactaacataaaatatgagcaatgtactatatcaagtaacaatataaacatatcattgctcccattgatctctcacatagtattgactaacaataatgctttgaattgaccattttgaaaactacagtaatcactatcttgatgtccttcctcaaaagggattaaatctattgaattcaagtgtccttttagttaccttttctaggcttagtcgagccatttaacaaggtatgatctttaaacaagaatttagttctcaaatccttatgtattgatttccaactagtcaccactttacaactcataacaaaaccattgttatagtggtagactta

SEQ ID NO: 398220 - DNA, 641 bp, Cannabis indica
gagtgaagtccacgtgcgacctcggaggtctcgcgcagacttgggcaaatgttatcctattttttgcactataacgtggcaacgcatacgagtgacacgtgtccaacattctttgcacttgggcggagaggaatatcccgaacagacttcaagtagcacatctgcacacacaacgtctacttacctgaatagggtgaaggggagactatccgagctgagaacaagtttggttttccgaactacttaccagtacttgactatttcagaatggcatcgtggtttctaagtacgaaggcgatccctacaatcatgggattgaattagagggatatgacaagttgtttcaatcccccatttcatgtattctatttatgtagtgaatgttccttccgattatagacattgtaagcaaaagggaaaccttctctcatgcattaaggccctataaatagtgatctagcttcactgtaaaagggatcgaaagaattgctttagagagatatccaagagaaatactcagagatttcgttgtaagagctttgagagagaaaatattgtattctttgttctcaagttaatacaatctaaggggattatactattaccgtaataaagtaatcgaacctcttcaaaatctggtg

SEQ ID NO: 398221 - DNA, 742 bp, Cannabis indica
acttgaagcacctcctcctcgatcgataggaagtttttcagaatcgaagagatcctgcatgttgaaaaacctgacttggatccaagaatcctcgaccatacaaacactgaacaagttgcagaagaaacaattaaggtaccaatcgattcttttgatcataataaagttttaaaaattggttctaaactaacctttcaacagcgacaaaatcttgtcacttttctcaagcagaacctggatgcttttgcgtggaaacattcagacatggtcagaataaagcctgaggtcatgtgtcaccggttaaaacatcaaccccaaagtgcgaggtatccgacaaaagcaccgcaaaatggaccccgcgaggtaccaagcgctcaaggaagaagtggatcacctcttggcatgtggcttcataagggagtcattttacccaaactggttagcaaaccctgttcttgtaccaaagccaaatggctcatggtgcacatgcgtcgattttacagatttaaataaagcatgtcctaaggacaactttcctttaccaagcattgaaccaacttattaatgctaccgcaggtcatgaactccttaatttcattgatgcatactcaggatacaatcaaatttcgatgtatgaacctgaccaggaacatacttctttcatcagtgatcaaggtttgtattgttaaaatgtaataccttttggtttgataaacgcaagagccacatatcaaagattagt

SEQ ID NO: 398222 - DNA, 720 bp, Cannabis indica
aaattgatattgggcctgagcagaggtgttgggggagaagagaattgaggatttctctctattcaccaattggccagtagctttatggtagagatcaagaataccattgagggaagtactagcttgaggatggaccggagaaaagaccatgctatcatcagcaaacaggagatgagacaaagggggggctcccctgcaaatccgaataccagaaaattgatcctgagtttcttgtaaccgaattgctgcagagaggccctcggcaataagaaggaaaagatagggagagaggggatccccttgcctgataccacgcgttgaatgaaaggggtcagtaagagagccattaatggaaagacgaaattgaaccgttgaaagacaacgcattatcagggaagaaaactggcgcgggaagccaacatgattgagcaaatgatttagaaaaggccattccactctgtcaaaagccttttccatgtcaagcttaatagcagcccaaccaaccttcccagatctcctagaatgaatagcgtgaataatttcgttggcaaggagaatattgtcagtgatttggcggcctttgagaaaagcactttgattaatactgataatggagtgaagcacaagctttaaccgattcgcaataattttggaaagacatttatagaaagtgttgcaaaggctaatcggacgaaaatcacggacattcttaggattctt

SEQ ID NO: 398223 - DNA, 538 bp, Cannabis indica
aaaaatatccccaaaatttttggacaaatacatatttatagagatttcccctcaattgttgatcttctctcgcgagcttttatagagatctctcatcattaatcaccttgtcatggcttaatatcaaagcaaagttcctcgtcggcggtgttcatggagattgacaaaagcttttgctagcatttatggtaatcaataaaaacttttacatcgttggtagtattgttgatttcagatataaaatcgtttggagaaactttgtcaattataaagcaacttgtttattctatttactagaagaagccatttagggaaggtctcctatagaccatatttttgaaaagaaaagttaagtttttttatttttgtttatttctccatatagtaataaaacaaagtaatattttgacttaataaacctataacatttaaaattccaaaaaaaaaaaagaattactattagaatacattgaaagatcatactaatttttatttttgcaagatagatatgctcatattatatagtaagataacaaaa

SEQ ID NO: 398224 - DNA, 916 bp, Cannabis indica
catgtagcgtagtgttatttttacgtgtcaatgtcatttacaactgctacttcgattttcctttctaaagagaaaggtccaatttttgagtgtgggtttttaatatatcatgtatttgtagataaattccagttgatcatacacatatatatgccctcacgtaattttaaagaataaaactttgtaattacttgaataataatacttaaactttattaataattaaatattacatcacaaagagaaaaaacaagaattacataagtttaatggtagtacggtcgtaaatgttcaacattccagtggttttttattagcaagccgtttagccgagtaaatttataaatcccagttctaaccattaccttgaaaacatagggaccctcccattttgggttaaacgcaccagcaaatgcatctctcgtgtttgcaaatacccgtctaaacaccaaatctccgacattaaaaagccttttcttcactctcttgttgaagtatctcgtaattcgatgttgatatgttgcattagtaatttacaattctatacgcctttcttcaagtagatctaaggaaaatttaaggagttcttggttttcctcttgattatagaaatctcgcctgtgagtcgtaatattaacttccactagcaggattgcttctgagccaaatgccaacgtgaatggagtgtgccctgttgctattttctctgtcattctgtgagcccaaagtacttgtggtagttcatctacccatcttccttttgcaacatccaactttttcttaatagtatcctttaaggttttattaatagcttctacttgaccattttcttggcgtcttgaagctgatgagaagctcttaatgattttatccctttcacagaactcagtaataattcgccatcaaactgagttcc

SEQ ID NO: 398225 - DNA, 795 bp, Cannabis indica
gaaatgatgcaggtaatatctttcgaaaattctataatatatctccgtattactacatctttataccttttagtatccaaaataattttttacttaattttttttcacctataattatttaatacattttgcaaaattttaaaatttttgaaaaagtttaacacattaaaaaaatgtgttcaaacaatgtgttgcacgtgtgactatcttattttatacatgtaaaataaactgtttaattattattttctatattagaaattatttcaaatttcttcaaattttgtaagatatcttaaataactatttaagatatcctacaaaattttatagagagtgcatcaatgcacttattttaaagaggtgtattgtagaatcacccaatatctttatctttatctataaaataaccgtttttattgaaatattttaaacatataaaaatattttggtgattctacgatgtgttctcttaaaatttaaagagatatactgatgcacactctccttatttcggcatctagaagaattttttagtatatttttttttatattcatgtacattatagctatttaagatatcctacaaaattttgagaaatttgggataatttacaatatagaaaataatatttcatcagtctattttacacgcgtataaaataaaatagtcacgcgtgcaacacattgtttgaagtttgaacgcaatttttggggtgttaaactttccgaatttcttaaattttacaggatgttttaaataactataatttacataaccatgagaaaaaattt

SEQ ID NO: 398226 - DNA, 944 bp, Cannabis indica
aaacccaaaaccttgaaaatcccaaaccccgacgcccaaactcgctcgctctccctttctcttctcggttctttcgttatcacgggttcaccaccaccatcaacttaggcgaagcgagacttgagaacccaaggaaaacccaaaggtcccacccttctcgcaaactctctctgtctctctctctctcttgttagagttgaagttttctggcctcgattgtgtcatctccaatcctgttctgcctcatcctcctctacttctctcatcgtcaaccaagaaaagtaatttctttttctttagttttttagttgatttgacgttgagtttatcgtgatatgtgaattatgtgtattgatgattatgtttggtgacttgaacaaatcaaaattacaagttttgtttggattgaatatttggatttagttttgttttgtgtaatgagggtttttttttttcagaattggatttgtttctttatttttttattttggagaaatgttgttggtggtggtgttaatgatagtatagtggtgataatggaggtggttgtggtgatggtggtggtggtttcaatggaggctagtggtgcggagtggtggttctgttggggattgggtgtgtgttgaagaattgagttgaggtggtggtagtggtttcccgatgattcaagataaaaaaaaaataaagagaatggatttagggatgcatatttttccctaatggggcggggattccccgtctaaatggggaacggggcggggatgggaattattttttgtcaccgaatgttaaacaaggcggggacggggatcacactccccgccccgacagggacctgtttagtattttatcttatatttctagtaatattttataatttataatttatgtttgtatttttttagtatattaatatcttttttatgaattttatgttgtgtttt

SEQ ID NO: 398227 - DNA, 704 bp, Cannabis indica
aaagtacatcacgggacaaaatgtgtccctataaaaataaagaacactcactcactcactctaaagaaaaaagaaaaaaaaaccaatacactcacatgggccacaaatggatgagtattgtcggcccaagagtttacaaaaactgtgcaaattcgtataatctacttatagtaggtctgacagaggggacaagaactttggacactctcatgtgaactaccaaatcattatttaaacaaaataaaaagaagaaatcattaaaaaagtaataaaagatttatatttatcataatacaaaccctacatttgatataattaatattaattgtttttaattgacaaattgttttggacaaattcatgcatatgctaggtagttctggcagaatcatgcatgctaatatatggtaggagaaaatcaaacacaaattcaagttttgatccaatccaaatggttgtttttgtcatttttcagttgctcttaattgtttattccactgaacttgttgacgcactgttctttgtggggaattttgaattgaatttgctctcgattgtctactatacaagactatctttaataaattaaaggtaatacactcgttttgtaatttgtgtttttatgaaaaatacattagatatttttatttttaatagggaaatttataaaaatattggaatttaagtaatttttataaataact

SEQ ID NO: 398228 - DNA, 629 bp, Cannabis indica
cttaggtctggaaagaatattgtcaaacctgattatacccctcaagttgaaaaagataaagaaatagaaaagagtcaacctaaaagttctaatataaatgacttaccaaaagatgatgttccgattcttcctactattccaaaagttccgtttccacaaagttacttccactcatgaaaggaaatcaatacagtgacatcttagaagttttcaaacaagtaagtataaacatcccattcttagatgccattaaacagattcctgcctactcaaaattcttgaaggacctttgcactttgaaaagaaatactaatgttccaaaaaaggcatttttaactgaacaagttagctctataattcaatacaaaagtcttgtaaaatacaaagatcctggttgtcccacgatttcatgcatcattagagatcacattattaacaaggctttacttgatttaggtgctagtgtgaatttattgccttattatgtgtacaaccaacttggcataggagaattaaaacaaacttctataacacttcaattagctgatcgttctgtgaattttcctagaggtattatagaagatgttttgattaaagtggataagttttatttccctgtggattttatt

SEQ ID NO: 398229 - DNA, 648 bp, Cannabis indica
ataaaagggcaggtgctagcagaattcatcacggagttccaggaagaagaagctaacgctaacatacccacactgccagtcccaacatggaaggtatttgtggatggcgcctccaacgagaatgggtctggagcaggggttgcgatgatatcctcgaacggacttcgactcaaggtagccctacggtttgaattctcaacttctaacaatgtggctaaatacgaagccttgatagcaggactaagattggcaaaaaactgtgggggccaaaagggtagaagtctacaatgattcgcaacttgtagtaaaccaggtgttgggagaatatcaaacgcacagagaaaagatggttgcatatgtgggaatagtccgggaactgctccacgagttcactgactataaagtagaaagaatccctagggaaaggaacactcttgcagaatgtttcgctaagttagcttcagacagtgaaattgagaaattgggggtggtacctgtggaacgcctggcggagccaagcatcaaagtcaagcatatcatagcaacagttgagcaagagcccagttggatggtccccatcatcgaatacataaggaaaggcaagttgcccgaagagaaggctttatcagaaggatacaatatcaagcg

SEQ ID NO: 398230 - DNA, 608 bp, Cannabis indica
cacaataataaaagagtgacaaaagagagtagtaaaataaaatataattagcacttctcatatatatgtgtagtatatatatatatatatatatatattatttttaaaatttaggtgagacgccttatttggagttttgataaatggattggagatattataaccaaattctttttatatgaggatttatattatgctataatagatatttcatttattttttttaaaaaaaatatgaataatctacgatattaataagttacttcaaaataacaattgcatgcgcattctcttgccatccttgcttcgtcctcaaatacaaaacactgctagcttcgtcctcctgaggcgcttatcgaagttaatactaatgcctctcttgatcttgtgagggattattgtgaattgggtatggtagcttgagatttttaaggagtggtcttgatttctactctttggaagttgaagggaagcttttgttgggtccgcccctttgttgtgggcttagaccatttaagggcttaaagcccattttgtttgaatcaattaaaagaaaagaaaaaaaaaagagagagaggggagaaatagtggtatcgtgagcagccaag

SEQ ID NO: 398231 - DNA, 634 bp, Cannabis indica
aagaaattaaaatccactaattatatatagtcttgacaaaaacaaaaaaaaactaaaaaaaaatgaaaaaatctatattgagttacacgtacgtacaaacattggcatcatctattgtcgatgactaaccgtttttcacaaactatagtataaatatattaagatcattgatattaggcacattagtggtgtctagtattttctcgacatgtcacgttgtaattgactagtaatactttctaaaagatattatgttaaactatgtaggactcaatacttagtttaaccaataacgatactgacacataaaaaaatactaaacaccactgataccctttaccatttctcatatattaattagaaaaaggaaacataataaataaatttagatgtaatatggtggctacgttccccaatgagtttgatagatttaggagacagaatactgatgtggcagtttttggagttgtagtattttgtcgttcttattaaatggttgcatgtgattaaatacatctttaaacaggccgtactacgccttcttcttttttttacatattaattataaatatatttatatatataaactacatgatcttctttcttcttctaaattaaaaaaaaaatccaaaaa

SEQ ID NO: 398232 - DNA, 1041 bp, Cannabis indica
taccagtttcttggtattttttgtcatttttctggcaataatgccaatcccgatgacttttttagcgccgacagcaactccggtgactttcccgatgtcggcagtaactccggagactatgcaaattttgatgacttatttcagttaactttattgtttagcatttatatttcgttatgatttttcatagtgttgaatctggtttcatagggttcataagttcaaaactggttttacaggttttaagggttctgtaatgaggttgctctattttataatgttattgtatatttttttatcatcaaactttcattgggtggttaaggaataccattctagcaaagttgaactaaccgaatcatggagtatctgatgtgttgagtcatattgcccttggaccaaattttgcggtagcaaagcatgaagcgtacattgtaaggggtaaacgttttcatacaaagtcaagaggtgatgctcgagaggttcaaaataatggcatacgtatcgtcgcagaaaccatgtattttgcaagtgcaaaagatagaaaccctgctttaggtaccacgacatattatgggattattgaagaaatatgggagctcaattattttgcgttccaaattccagtttttaaatgttctttggttgacaacaatgttggagtaaaaactgacaagcttggttttactttggttgatttaagtaagaggggaagcaagaatgatccattcatcatggctagccaagcagtacaagtttctcacattgctaatccagctaatgataaatggtatgttgttttatcgacaccagagaggaggttcttagagaatgaagaggatgaggagaatgttgatttatgttatgatgacttcattgttgggcaaccaattcatgaacaagttgtggaaattgaccttaatcttgaggaagacgatgctgagtacattagaaacgatatcaatgagggagtatgggtcaattgtgattcaggcaaacataaacgaaaaaagaaaagaaaacgtgtctaattggtaactt

SEQ ID NO: 398233 - DNA, 1010 bp, Cannabis indica
gagcagtaagcaatccgaacagcacgtcgacacttagaaatttcagctttcgcatcatgagtcacagaagaaatccctattatttaggatcagatcacagagatacgccaagctatccgaatcccttcattagtgtattctgtatttaatatgaaatctttccacttatatcaattgtaatctgaagggaaattcttcactcaaagcttatagccctataaatagtgattcattctcactgggcagaaaaagatctgatctaagaattcatattcagagatatcattgcaagagccctaagaaagggatcattacgttccttgttcttatgtcaatacaaactaagaggattaggctattaccgaactactcggggctgaacctctataaaagtattgggtgtttagttactctattatattccatatacattatactacttgtcgcttacaatctagactgtctgtcattggccaaaagcgaggtcaacagtaattgtgattatatgcttcaaaagataatgtcccttgattcatcagtgcactggatttacactgatgtgatagtcagcgataaagtatgcttacaccttggataagtgttatgttctttccagaacattggcaaagtatgcttgtttcagatgtatgaaggatacattggactgggaccgatattaatcttggtaaatatagtatagtcttactgttgtatctttctaagtcaatatcactggttgatcttagatcaaaagatcttaatcctgaaatggttaggttcaatctcaagagagttatttgtgttctttgatttgttagttaagcctaccttttggtccaggtaaaacgtacattttggcaacatgatagtaaaattgagtaggagtgctaaacatagatatagaatttattggttctatctaaagatagaactaaaatgatgatttctcgtgcttggcttaatagagataaatggaagagctcttgtttcagtgattatattagtttact

SEQ ID NO: 398234 - DNA, 378 bp, Cannabis indica
acaaaaaaaattacaaaagaaatctcattgagcagcatataatttttttttttctttttgagatgaatatagcatataattgattatgctaattttagagtaatataaaatgtcatgaatgaaaatcaaagttaatacctttctcttcaactatatataaactaattacatattttaaaaatattattagttacctactatagtaaattattagaagtgttttatatatatatatatatatgagtattgttattgggtaccggtgcctagcactcttaacacatgtcgacttacgattggatagcaatactctctaaaagttattttattaaactatatgggacccgatacttaattagaccaatagcgatattgaca

SEQ ID NO: 398235 - DNA, 538 bp, Cannabis indica
ccgaacccgtaccctgtgacccagactttgacccaagattgggattcggatctggacccagggcttcgaccaagcccgtagtcggtgtctggctttgggacccagccttagacccaaatcctgataaggactcgaacccacacccggacctgaacccagtcccaaaccttaaagtggaccaaaacccgtaacctgcgacccaaaattggaaacaaaaccggaagttgaccgggacaaaactaggacttggacttggaatcatatctgaaattggacctagatccagaaccgtaatcggagcaggacccggacaccaaatcagacctagacccgaattgggagccggacccgtttcccaacgcaaacctcgactcggtacccgaacctgaacatgaactcaaacccaaacatggaaccaaactagggacataaaataagggtcgggacctacaaccgcaccccagtctcgatcccaaacccaaacttagaaatgggacctaggacctgaaccagaaccagaccgagacccaggacagtg

SEQ ID NO: 398236 - DNA, 587 bp, Cannabis indica
caacaaaatattttgataaaaattgaatctattacctaatttttaactttttttttataatttttttatgaagcacaacattgaaaaataaaaaaaaaaaaaaaaagggttaatttttcttttaaacatagtatccaaacaaattataatgatgcaaaataaatttagacacaaataatccttagtcattaagaaactgatgcatgtttcatattgaaaaaatatataagatttacaagaatatattattataattatagggcaagactatggtaggacttagcataagttctctaccggtagggaagcttttttgatcattgattttagatcatgtggttattaagatataaggtttatactcttacaataagactgcttgtatacaattaaaactttatacatattataataatatttaattatatatttatttttaaaataaaataataattaaaaaaatattaatttttaatttgaattattgttattttttttaagttctctcatataaatcttcacaatttccgcaccaatatcactgttgttctattttttttctattaaactagtgtgttctttttttt

SEQ ID NO: 398237 - DNA, 1798 bp, Cannabis indica
caacttcctgttttagtgcccctgcctcttggaatccaagcgcctccctttttgtctctctaccgggtagcttgaatcaacatttaagttatggcagataatcttagggtcgatccctatcatatcctcatgactccacgcgaattgatcctagttcgcctttaaaaatctcactaattgctatttgaggtgcttgtccaggttcttcccaatgtacaaacatttggtgggagtttcctgggtcgagaataacctcctccaattcttcaattggttttagcaggtttctttcatcttgaactcggggatcatgatcttcatctttcttctcgttttctcctgccaagatcgtcatcagctgatgaccgacctttctctgctgcaactctatacgatagcaattgcgagccaacatctggtcgccacgcacaactccaacaccatctggtgtttggaactttaaagacaggtgcttaattgaactgactgcccctagtctgattagtgctggacgacccaacagtatgttgtaagccgaaggcaggtcaacagccaagaagtcttgcatagcaatagcagttaaaggtgcctcgcctacagttaatgcaagctcgattatgccaaggctagcaatgctatccctagtgaatccgcaaagattcaccatacaagtccttaacttggcattttcgagccccattttctttagagtctccttataaatgatatttactgagctcccattgtctattaacactctcttgatcctctcattggcaagttgaatggttatgaccagcggatcaacgtgagggtatctcacgttcttctcgtcttcctccgcgaacgtaatgggaggttcctcggttttcaccttcttggaaggttttggagaaaagactaactgctcgttctttatctccttcacgtatctcctctgagcgttatttctttcccctataaaatgagaccgtcccgaaataaccaggatgtcttctccttccacaggaataggttgtaacccctggttatttgggttatcaggatgacggggctggttgtatccgtggacctgtcttctcacatattgcttaaaatggcctcgagcgataagactctctatctcatctttcaattagtgacattcgtcggttttatgcccaatatctttacgaaatttacaatatttattaggatctttttttctcctcgaattcctcatcggctcgggtttaccaaaggctaccttctgctcatgtgtgaggtaaatattttctcgagtttcattaagctcagcataaatagtatacactggcacgtatttgtcatgcttcttttctttatttctatccttcaacagttccctgattccgtcctttcttttcggaccaaaagcgaccgagttatcaattctcgtggaagtagtccctattgagacactgctgggtttagctcccaagcctatatttaacaagttcatttccttttgcacttcttccttctggacaaacacctgagctctctcgttgaactctatgacgtttctgttggaatattttttaccaggatctacatttactaccatgtatgttatttaacatcctaaatatgtatttctaaaacaatgtaatttaaacacatataaagtttgagaaaccttacattgggtgcagcagatttaaaggactcattctgctcagatctctaacccttgtatcctctctgtagcagagtatcaccaagatctgagcccgattctccttctctagaattggattcttcacagtcttacacacta

SEQ ID NO: 398238 - DNA, 853 bp, Cannabis indica
cctatgtaattataaataggagctgaaaaggggacgaaaaattcattagagaaagagccctaaaactgtatcagaaatctaatatgattgactcgtggactatgcaaaattttaactgtaaaaccacgtaaaaaacctttgtgttcttattttttctttattgcttttgttttctgtgcaaacctatcacaatttaggctcaaatatagttaagaaaaatctacgttaacattttggtgctttcattgagagccttcgtgaaaaaagctcagaagaaaccctccttatatacgtataaaaaaacaactttctccatggccggtaatggagaaaacgtcaaaacacctcataaagaaaccactcactgtcctagaaaagagccaatgggctcccagaggcctcatgattcacgatctaaacggaccactcgttctcaacttgacgttggcccaagtacgcggaccacttgttccaggaggacccaacctgagggtggaccaagtacacggaccacacgttcaaggagaacctagaatctgggaacaaggtatgaagaacttaaaatgaatagtggtagaccccatcccaatccagttggtgaggatggcgcctaagtattgaaatatattttaccaggatctagatttactatcatgtatgttatttaacatcctaaatatgaatttctaaaacaatgtaatttaagcacatataaagtttgagaaaccttacagcagttacagcggaattaaatgactcctttcgcttagatctctaacctttgtatcctttctgtagcagagtatcaccaaaatctctaacctttatgtgtgggcatgttggaaattatttt

SEQ ID NO: 398239 - DNA, 594 bp, Cannabis indica
aggattttgctaatccgttctcttaatcccaaggtattacagaacctctaggcttcaatctcatggggatttttgcattatttcaacgatccaagctccccatctttgtcttcatcagaatctagttgcgggtaagctttctattccctctctttcacttaatttgaatgattttgccatgaatggatcaacataaattcttgttttgaacatgtgttgattcctacattacattgtaatccattcagtattttcatctgcgtgatagacttaggatgaacaatatgtgatttatagatgaaaaggaactgaatttgactttcgttgtgatccttagctctttgagtcatgaagaacatgtttgagttcttaaaaaatcacgtgttttgatccatgcatatgttggccagccaaggaggctttgtttgaagcctgggcagccatggatggctttcatggtgtcgggccggccatggggactgtgtccctaggctggccaacctatgcctagaactagggttcctggccggcctctaagctgggtctttgggtctggccgacctctaggacctcgtgttggaaatttattttacc

SEQ ID NO: 398240 - DNA, 555 bp, Cannabis indica
gagacattgattttcattgaagaaatccaaaaatttgtatttcttcttcttcacctctatagataggctttctggtggagaggaaaactaataagtgggtagagaaatagtcaatttctatatattaggggttttcttttctatatatacacattccatttaggtcataattgaaaactactaatatttattattattatagaaattacttaatatattaaaaaattataaaaatttaattttttatggcataaataagtaatattatgtattttatttttattttttttatatttatatgggctttttttatgtcatgtttttagtaaaaaaaaaaaggtaaaaatctcatatttggaaaacaataataaattttgttggaaaagttgctagtgttaaaaaaatcaccgaaaaaattattcactagaaaattcgttgtcaccaaaaaagtcactgaaaaagtcaccaataagtagatatctcagatataaataaaaatagaatcggttctatgacataactgttaggttattttttgtattaattttagattaa

SEQ ID NO: 398241 - DNA, 823 bp, Cannabis indica
gagattaagagagagatacaagggatttttattagtttttttatttttttagtttaataatctattttttaattttaaaatcttttttatctactttcaaaaaatttcaaaaaagaaaaaaacttttttatctatagaaataaatatgagttaattttattttttattaattatttaattattttttaaaaaaattaaacatgaaccaataatatattgacatatggtatctcacttgctaaatcagcacttaacaaaaataatagtgacggaagtaacataaatgtaatttaaggtacttaataaaacatgtgttatttaagtgtatataattgaaaacatgtggtatttatgctgcaaatatccctataatataatataagttaaggggagttttcataaatatgagagttgagggtataatttaattttttatggcataaataaataacactataagtttatgattttttttttttttttatatggatttttttatgccatagttttgtaaaaaaaaagtggaaatcccatttataaaacaacaaaatgttttgccggaaaagtcactggcatcgaaaaaattgctggcgccaaaaaagtcactagaaaagttagtgtcatcgaaaaagtcgccggaaaaatcatcatttccgaaaaattcgtcggaaaagtcgctgaaaaagtcactagaaaagtcaccaaaagtaaatgtctcagatataactaaaaatataactagttctatgaataaaaactaatagctcaaaccgattataattgaaatataacctattctgtaatataataaataaaaataaat

SEQ ID NO: 398242 - DNA, 1690 bp, Cannabis indica
agttaatcatatatatatatatatatatatatattgaataatatttacaatttttaatgaaattaaaccacgtgactaataaattaaacatttctatattggaatgaatgaatagatataatatatagctagagtccattattgctactttcaatgagtatatatgtatagtttatttattttggaatcaagctagatatttagagtgatcttaactcatcagatcgtaaaattaattagcacgcctacattaattacaacacatttttttttctattaaatttatatattgttaattaatatatatatagatggacaaagcttctgttcttggagatgcaattaagtacataaaaaaatcttcaagaacgtttgaacacacttgaggaacaatcagcaaagaagacagtggaatcagttgttttcatcaagagatgtcacctctcggccgacgatgaaacgtcgtcgtctgacgagaatttcaacagcaactcgaatcagccacttccagaaatagaagcaaaagtttcagacaaggacgtactcataagaatccattgtgagaagcataaagggtgcttggccaatatactaagccaagtagagaagcttcacctcaccattctcaacaccagtgttttaccatttggaggctctactactcatattactattgttgctaaggtaataataataataaattagtcttattagttttaattaaaccctcaatataaattaataaactcgattaaattatataacttaattctaatttgcatgtacatttatatatgctattttaatttgtatttgttaatttattagtgacttaatctcacaaatattttttgataataatttgtagatggatgtggagtacgacatgaaagtgaaggatttagtacgaaatctaagacagacattactcggcaactgactatagattcgttcggatacatcttaagtactttatagatttattgtgatctcatgactaggaaaataatcggttgatctctcaatttcaaatgtttgtttttctcgagactttttttggaagaaaagaagatgccctagcaacctaaaatcgtgtctcagcacagtaccccaccactaaccataatcatcatcatgagaattgaggacttcaatcatcaactctgccaagttttcatttttgcaggtagggttttgtcacatttttatgtgtcgtttttgcgtggttgaccgttgaccatgttcacctattatacccacgtgctatatttgaaagcttggcagcttttttcccagagagatttcattagaggtttttgacttttcaacaacagacacctcttttttttctctccaattcttttgagtacgtccctcgtatatatattatggtatatttacaatagttatatccatctgaattaaattgagagacaaaaaaaaaaaataggcactcggtttctttgagtttttacatttgttgtgttacaagaaataattcctttttgaggtcctctagctaggccttttgtgtgtagtgtaaacttctttgttaattgtgttatgtaaactttccattataataaattaattaattctaatttaatgtctttttatttaattgttgaatatagttgattctcataagcagaatcacaaacagagaaagagagaaagaaggaaagggaaa

SEQ ID NO: 398243 - DNA, 1627 bp, Cannabis indica
aagtcactaaaagataaaagagacaaaaaggctaaaaaaaagaccattttgccccttgcctaagccaaaaagcacacttgacacttaggggtattttggtgatctttaaatcctcaaacaattccgacattctcaatgtctatctaagttgccccgctaccacaaaattactaaaatataattctattggccaaacgccgcattccaatgttaccgagcacaaaatatggaaaacacaaaatctcatatacaatatacatgataaaccctaaattgaaataaatctccatatattcataaatcataattaataatctaaactcataattaagccctaattatctgctaattccaaacaaaaacaattaagcggtctttacaattatcccctcgttaaaaggatttcgtcctcaaaatctgacctgaacagctctggatattgagccctcatgtcagatttcaaatcccaggtggcttcctccaccttatggtttctccagagtaccttgaccaaagctatggtcttgttccgaaggactttatcctttctgtctaagatttaaactaattgttcttcatatgataaatctagctgaagtgctaaactttcataactcaaaacatgagtaggatcagaaatgtatttctataacatagagacatagaatacattgtgaactgctgaaagtgttggaggtaagaccaggcgatatgccaccagctcaaccttctcaagaatctcgaaaggccttgtaaacctatggcatagcttgccttttttcccaaaatgtttgatcccttcattggagaaactcgtaggaatacatgatcccctacatttctacgcttcagatctgcatagctcttttacctactgttagaggcaagcattctgatcttattcttttctatagcttcattagtccgttgcactgattccagacctaagtatttcctttctctagtttcatcccagtgaattggagatctacacgtcctgccatacaacatctcatagggagccattcctataatactatgataattgttgttgtatgaaaactctatcagcggcaggtacttgctccatgagccttcaaaatccaacacacaagcacgtaatatatcttccattatctagattatcctttcagactgtccaccaatctgaggatgaaaagttgtactgaactttagtttggtacccatggcccattggagactctaccagaatttcgaggtgaacttcggatctctatccgacataatggactcggggtccatgtaacctcactatttctttcacgtataactctgcgtactgatccacaataaggttgtctccactggtagaaaatgtacagacttcgtaaatctatctaccacaacccaagtagaatcatacattcctctagtcctaggtaacccaaccacgaaatccatggtgacatcctcccacttccactcaggaagtgccagtggctgtactaatcctgcagatctctgatgcttagccttaatccgttacaagttaaacattgggatacaaactcaaccacatatttctttatcctacaccactagtaaaaggagcttaaatcttgatacatcttggtagtgccaagat

SEQ ID NO: 398244 - DNA, 679 bp, Cannabis indica
gagaaaattttgatgataccatagctcgcacaaacaatcagtgaagcactagctgtcaaactgtttgccattgtccgaaactattttgtacgacaatctgaaccgggagattatgttcttcacaaaaaggtcttgaactttcaagatctaatggttgccagtggttcggcttccatccacttagtaaagtaatcaatcgcaaccactgcatactacactccacccttgcctttgggtaattttccgatcatgtcgattccccaaatggaaaaaggccacggactttgcatctgagttaacccgttgggcggagctcaaggtatctttaaaaatccttggcatttgtcgcattttttgacataggcctttgaatcttcaatcattgtcggccataaataaccttgcctgagaattttcttagataaactctgccctgtggcatgatttccacaaaatccattgtgcacctcagataaaagtcaagcagcttcttcttgagtaacacatatgagcaacggcacaaagagtcctcttccgtacataattccctttactatgatataccatgcagccttcctcctcatcttttgagcttcatttcgattatttgggagttctccagtgttgaggtaggctgctattggtatcatctagtttggggaagtatcaatcatttcga

SEQ ID NO: 398245 - DNA, 662 bp, Cannabis indica
tcttctctcctatgatattgattattttggtgttgattgttggttattgtccttgagtcagagaagaagccaatgtttctttgaaaaagcttaaagggatgctctttgaagatgtaaaatatttcaaaaagctaaatgggtgctttttggagatgtaaaatttttcatgtaagtttcctacttgttgggttatgtttcttaaatcaaggctgtcacgttcaatcaaaagttgggccccaactgttcgaaaaaattcttcacagtctcatcaatcaattttccatgtagagtttgctgttaatgttcttaatgttctgggttggttcttgtttttgggtttgtattctcatatcatttatgattgttgataaacaattcttctacctatttggtagctctggtctctttatatgagcaaaatgagaagccttctgctgctctcgagtaagttctttcctatgaattgcaggccccatttttaatatgagtttaggatttttttcttactttgattttctgtagacagttattgctccaattatgttaattgaagatctggcttcaaatatgtatacttgattaattttttttggttaatatatatatatatatattagtttgaaaaagacatacagtcaatctcaattattactcttaagaga

SEQ ID NO: 398246 - DNA, 508 bp, Cannabis indica
agtttaagtgtagcttcgtagagattgtattttattactgtaattggtcttgtctttgtgatatggttttaagtgttttagttttgtttgtgttacatgattttattttattttgttctattgttgttcttttttgttcttcgattaatcgtcgtcaaattgttgttagtagttgagaattacaaatttgttgtgattgaatgggctattagtagtacaattatgtacattacacaatagctgagtgctcaagctacgagattgaatgaatttgcagcaacagttcctattgttgtgtttttggagccgtaaatgaagcaaaatataggtgttcttaaagttaattatgatgttgcaatcatttttatttgattttattttagttttttgtcaaatgatctgagaattaagcgattgattgtttagtttatttttttaattttaatcctaatcgtgtctctaacgatatccttattaaattgcagactattattttagttgattgtca

SEQ ID NO: 398247 - DNA, 886 bp, Cannabis indica
agcaatacatttacctctatcaatagttaacttaggtttgtctatttgcatgatttattgatttagttcaaaggtatgcaaggaccccatcaactcctccacctccatcttgctgatatcttttgcttctcccatagccaatagcttagcatcgaatctattagaaaggactctcacaatttttttttactatcactattcatcaagtttttctcccgaggcaaaaaaattgacagcaatatcaaataatctttcataagattcaaacaaagatttattatcagatattctaagatcatcaaacttggtgtgaagaattataaatctagatcgcttaacatgagttgttccttcaaattgggtttgaaaaattttccaagcatctttagtagattcacaagaagatataagtttaataaaaatttcaccaactccattgaatatagcatgtaatgctttatttgttgaaatttattttaccaggatcttagctctacccacaagtatgttattttaacatcctaaatatgaactttctaaaacaataataaacacatataaagtttaagaaaccttacattggttgcagcaaaataatatgtctccttccacgtatcaccaagatctgactccgaatgtccttctctttaatttggattcttcacaatcttccagacgatgatgaggtaccgcttgatgtgtgtgggaactactctatcactaagggtttcgaaaacttgaagaaggaaagagagagagagagaggtcggctatagtggaagtgatggctcaaatttttttgacggcaaaatttctgattttcaatctcttaacaagtgtgagccatcactatctatttaaaccactaggtttaggttaggaatta

SEQ ID NO: 398248 - DNA, 938 bp, Cannabis indica
aatagtgaacctaccacctatacagaagctgttactggaaagaacagaaagaaatggcttggtgccattaatgatgaaatgggatcactagaaagaaataaaacatggattagagtacctagacctaaaggacagagggtaataggttgcaaatggatatttagacacaaagaagggttacctggtgaagaaatcagatacaaagcaaggttagttgcaaaggggtttaatcagagagaaggaattgactataatgacattttctctcctgtggtaaaacaaacttcaattagaatcatgatggctaaggttgctatgtttgatcttgaaatggatcaaatggatgtaaagacagcattcttacatggaagtttagaagagaaaatctacatggaagagcctgagggatttaagaacatggaaactgatcaagtttgtttactacaaaaatccctatatggcctgaagcaggcaccaagacaatggaatcttagattccatgaattcatgctgcaaattgaattcacaagaagtgaatatgacccctgtgtttactacaacaagactcctatatggctactactctatgtggatgacatcttgataattggaaaggatagaaaggctattgacttactaaaagaacaactcagctctgaattcgaaatgaaaaacctaggtgaagctaaaaggatactcgggatagaaatcaagagacaaagacctggttttgtgttcttatctcaggaaggatacattccgaaaatcattgacaaattctgcatgagtgagtccaagactgtcaccactcctcttgcctcacacttcaaacttgctcaaagtcaagcccctgataatgaagaagacagaacttacatggacaatgttccttatgcttcctgtgttggaagtcttatgtattgcatggtctgtaccag

SEQ ID NO: 398249 - DNA, 530 bp, Cannabis indica
aaaataaaaattattaaaatagaatgtctttataaatttatttttgggatgtaaataaaattttcctctttacgtaaattcttctttatattattaaaaggaccacatttgtattatttttttctgcaaactacaaattgaaaatttaaaatgactaaatttgtatgtagaattatctttttggcattttatgatggaaggttgaaatcaagtttaacggagggcctattttgtattatcccgcccccattatcggtagcatcttcctcagtcaatgcattcttaatcatttggaatatatttcaaatagaatcagtcctaaaaagaacaaaatatttcttctgtgagtcacgaatgttacgagatatactatgatacatgcataatgtaaacggtataaggttggagaaatctgttatttctttctgtaaggaataaatttcattgaaagtgttgtaggaattttcttggtgaaattccaagaatgccctacaccaactcaagtatatagtcaaaaacgacagggacaa

SEQ ID NO: 398250 - DNA, 965 bp, Cannabis indica
ggtttagtgccagggatggggtcagggttcggttcggtttgggtctagtcagagtcataaatattgattaagaaaaaaatttttaagaaaatattaaagtaatttttttttgttttcaaaattttgagtctcaattaaaaaatgaaaagagaaaacaattttatagaacatgattttgaaaaatattttcacttttctaattttaaaaactaaaaacttattaaaaaagtgttaccaaacgtcacctatattttttattttattaaagacattgttatcaaatatcagtggtgcctagtactaccttgaagtattgtcttgcaaattaatagccatattccataataattattaaattaaattgtgtgggatcaatacttaattatactaatagcaatataatattttaggtagtgctaaacaccaatactaatgccctttagcacttttttggttaactctaacttttacattacatcatgcactatttttatatatattttttttattaaatcatttaaaaattgtatttttagtaattaaaataataaaaaaagaagacaaggaatattaaaaataattaatttagaaagagatggaataaataaaaaataatttaaaaaaaaaacgtttagggcccgtttggtacgcaggattggactggactggacaagattggattatgctgaaagtaatcctatgtttggtttaagaatagactggactattttatttatttccttttagaaaaaaaaaacttaaattaaaataaaaatatataataataaattaaaattaaaatatataataataaataaataaaaatgaataattcgtaacaaaaaatagaaataaaataaaataatatatcaattaagtatatatcataaacatataatgaaatattttatcatattttttatttaataaataattaaaatagtaaaataaaaatacttaaataa

SEQ ID NO: 398251 - DNA, 738 bp, Cannabis indica
gtattatgttatagatttgtcgggattaaggttagcagcaatcatgtcattgcaccctacaatatggacaaacacactgcttcttccaattccaaaaattatgttcccgcgtttggttggaggtaatgaaatagaatggaataaaaaaataatttttattctattttttgtttagttgtattaaaatattgaaatgaaatcaaaggctcgagagacctctcaatccacagctttctctcgaacatctctggttttctttgatctttgaagtcaatttatcgggcttttgtgaaaagttgttggtatgccggataaaagggttagtaaggcggtttgccatttaaaaaaaaaaggagagattattccaatgtaacaaaaaaaaaattaatgatttttttttattcaattttttatgcattaattttattatattacattcctattcctatattttcatttctcccaaccaaatacctttctctaatttattttaaaaataatctactaaaattttattttctttattttacatcaaacttttacagtccactgtaatttatttattttttttaaaaaatatatcactataattttctttctcaaattttaatatattttatttatttcaaatatataatattaatatacacatattctcatataaaaaaattattccaactcaaaataattaataaaatatatttatagcaataaataatattttataaatatagaaca

SEQ ID NO: 398252 - DNA, 980 bp, Cannabis indica
ctatttcaagaaaaccaactagtcgtaacttgcgattaaataggaaaaaagaaaactggacgtatgtcacaaatggcttggtgtatcgcagtaactcaaggaacatgcaaacacacccatcaacattaagttacagcgacacacccaccatttgaagaacctaacctgtattcccaacaaagacatgaataaatcaaaaggctaacaaaaaccctaaatcctaatagaggttgaaggggctaattctcaaatttgatgaaagaaatacatatgcgagtattcaggatgttcatcccaatactcacaagtattcaaggcatttaacaaaaatagatgtgaatactcgatgtgttcttcatgaaactagcagttacgcaattttcaagcctatttttataaaaaattacccagcctttatagaaaaacaaagttctatgtatacccatacaatgtcatgcatattctactccctaaaaacactgaatgcggattgtttcttaaaattagaacaaaaatttgcaaataatttcgaaaaactaaccttgagattgttgattcctccttcatcgtttccgtttgcctctgaaactaataaggttcgagtttctagaggaaagaggagagaaatctagaagaggtttggagtttttgaaatttcagagaaaaaggggaagagaaaatgaaaatgagagggaaaatattaagttggttcgtattagagagcttaaataccatcatccctcattaattgagattatgacatgtggcaaaaggaatgcctaaggtcatcccatctaacggttatccatgggcacgcctaaataaattccgaagagtttcgtgacgtggcaccctaaatggatcaaatataataattacagctgtcattttgaagccctcaatgggaaaaccaaaggtcaccatctcatgacatctcttcgcctgcctctcgattatagtttccctcatgaccgcatctg

SEQ ID NO: 398253 - DNA, 766 bp, Cannabis indica
gacatatccaaccattccgccaagttcccacgatcgccggacctgaagatattttatttcaaatatagtatccacgatacccacaaatcttaataaaatcttcataattaataagttacgctttatttattcatttactcaaattccactaattaactcataactagcttaagtaagattataatcttactctaatatccacataattatatatttaataaaatatggacaaataaatatcattataattttcgggatattacatgtaaagcccgcttagtttaatttggaaattagcagttaattatgattgattatgaaaattatttatagctatttaaataatttattatactgttatttattgaattcagtgatgcatttttatgtcatgtagtagtttgcataattttgcattccggtgcccggtattttggaacccggtgtttggctcagtagaaatcacaacttagtatgttagtagtttgggacggtttattagacattgggaatgtcgggaatggccgggaatttggaatttcccaaaaatacccctttagtgattattatgtggttttagtgtggaggggcaaattggtctttttgccccattagtattttgtcttctagtgtttttattagtggaattagatgttatgtgatattaaatgttggctgaaacaaagagtaaaatgttgcatgttatttactttcattttacaaaaaaatacaaagtttaaaaaaatagaaattttcaagaaaagct

SEQ ID NO: 398254 - DNA, 611 bp, Cannabis indica
ctttgatgtattgtataattatttggaatatttgttatggattttcactgtaggtgcttttacagtgcacccataaaactaaaagtgttccaatggtgcactccttatttatttcggtgcctatttgagaaattttttaatataatatttttatagtcatatatgttgtaattatttgagacatattgttaaattttaagaaattcaaaaaatttaatatgccaaaaatatattgttaagaaaattttcataaattttgaaacagatagagttgagtgcaccattctaaggggtggatcgttaaattttcatatattatcactactacaaaaatgggttttcgcgacgcttttaaacagtcgtttaaagtattgtcgtcggtttctataaccgtcgcctattcggccgtcgtaaattgggcaatataggcgacggttcaaaaccgtcgctaatctgggattcccgacggtttaaaaccgtcgcctataactgggtataggcgacggttttaaaacgtgccttatatgctggtttcgttttgaatttttttaagcgacggtttttttcggtcggtactatttgaaaaataggaaaaaaaaactaaattttac

SEQ ID NO: 398255 - DNA, 554 bp, Cannabis indica
atgacctaatatgtcattatcctccttgttctaacggtttagctccacttgcagagcttggaggattgcggcttgccgatccatccacttcaggaatttacatctctactaggtgaaagcatcgcccatagtagtgcatgtttcttgttgatcatggtgcaagaggttagtatgaccctgaacttgtcctacggcctctctcagcatggcaaggtcagtatcatcccccaagtccatgtggggttcgtcaatgctagggtcaccaaccccaggcctagtcttaccagcatagacatgaggtcccactcctatgccaagaattttagttgtgggctagacaaagggtctagtaggaatttgttctcctagttagactatagtggacactctaggcagctggccagaacttggtggttgtccagcccctcctggggtggtcgccatgggtggcacttggacattcgaattcgtggctataggatctcgtaatttagtcaaatttctaagtcttatgatagccatgataaagatgagagcttcttgaacgagaattc

SEQ ID NO: 398256 - DNA, 635 bp, Cannabis indica
atgtgatgcctttaaccaattctgagtgcaaattagagcctccaccatttttggactcaaagaccttctaactgagtctgaaatgcgaccactagtactaaaagcagattcagatgccacagtagaaacatgtatagcaaggacatctcttgcaatcaatgacaaaatattgtatctcttagcattatccttccaccaaataaggatatcaaatgaaaaagtcattggattaacaactttgtctcccaaatacctatcaatatcattcttctcattcaaaaaattcacctattcttgttgcaaatataaagttagtaattttcttttttgaattttcttgatctcactctttggtggtgatgcacaactatttttattttcagcctcagtctcacctttgttatttatactatagtaagcatacaaacgatgaagggttttctcaactttgagcacaatctttgtaacagttttagtatcataaacactctcaaaacaatatttaagatacttcaacttttacctaggatcaagcacaacagcaacaaacaacataacattgatgttttttacatccccccaatatttgtcatacttttttttcatactggcagccataacagataatagatgtt

SEQ ID NO: 398257 - DNA, 956 bp, Cannabis indica
ctgatcggacaattacctaaagggaaaggcggggtacagtacgcaatggttgcagttgactattttaccaaatggatggaggccaagccactggccaccattacgtcaaaaaaagtccaagacttcattgtaaagaacataatttatcgattcagattaccatacaagatagtctcggacaatgacaaacaatttgacagtcaattcttcactgatttctgtgcgaaccatgggatcataaaaagtttctctgcagtggcacatccctaagaaaatggtcaacttgaagtagttaacaagacctcaaagataccctaaagaaacggcttgaagatgctaatggaaactggccggaggaacttcttgaagtattatggtcataccgcacaactgagaaaacagcaaccagagagaccccgtttgccatgacatatggttatgaagctatgctgctcgtagaacttgaaccgccaacccactgaatactgacatataaccaagaagttaatcatagagtccttgccgaatcacttgatgaagttgaagaaaaggaaccacaacaaacttgaaactgatagcccatcaacaaagggtagctctgtattttaacaaacaagtgagagcacgtaaattctttgtgggagataaggtcctaagaagagtatttctgaacaccaaagagaatacgacaggtgtgttcggaccaaacttggaagggccatatcaagtggtcaaagttctagaaacaggagcgtacaaactgggtaagtatgatgaaaaaatgcaactcgttctagtaccaaggtattggaacagagaacacttaagaaaatactacaaggtattggaacggattgttggaaatattttacaaggaccaagatttactaccatgtatgttgtttaacatcctaatatgaatttgtaaaacaatttaaataaacacatataaagtt

SEQ ID NO: 398258 - DNA, 1542 bp, Cannabis indica
ttcgatgccccccagtatcacgactaaccttccatcctcgattacccgtgaaactttggtcactttcgtcatgaatttgctactgtatgctcggagtggctagcctggtcgttgcttaacttcgaccaagtctcccaaatgcaatgggagtttgcgcgaggaggagaattacgcatggaattccgaagagaaggttttccatgaactaaactttctaggagccaacttgaaataccattgctgagcggctttccgacagagtggcaggaaagattctgcagcatacatctcctcgtaccccttgcaaatccatttatatttcaaagtacttgagatgcgaaaggggatcttctctccccgtgtacattttccacgttggcattttcaacttgtggggtagtggcagaagattgatctccggtgagaaaggagttccgcgcgctcgatctaactcaagatcattatttgtttgtccagccatgtcaagaaacatatttttcagttcgtctagcggagtctgtacggctgggctgacatgctcgacattctgggcaacttggattacgtgagcatctttttgagcgggtatttgagtacgggctccgggcggtacggttgctgtaatgatctgatcatctgttcccctcctgttgtttagatcgttccttagttccttaggtcatgggttttttctaacctttcaacctttcaaacacagaaatgcctggttgtcttagcgattgattcgcttggttgatgggtgtaatggcaccattcatctggttggagccattaggtatgactcctcctgatgaattaccagacaaggtctgctcgcctaccgctgggcccacaagaggaaatcgtgactggggattggacggctgaccattagtagaatgggaagtgttcattgttggatcctcttccgtttctcccaaatgacgttcggcgattgctgacctacagtttggtaggcttttcgtatcaacacggtggcttgccgactatgatcttcaatctctgcatgatgagcccttaatgcctccatctctttatctctccattcggcgaatatacgcctttgtttgtcgaacacgagatttactgtagcacgcagttcgtcctgatcattatgcagggtgttgttatgaccctatatgagtccgagcgcgtcacagagattttgtaattctgtggcatctccgatagtagtctaggcgttggttcttggcaaaacacttgtattatggacgctctggttgggtgagcaacagttattcccagtctcttgcacactaggcacaattccatctataggaactgtttcaccattccccacgcttcccgtctatccgggattaacaacaggcagaaaccttgaactccatgggttctgtgatgtaggatccagcgtctgtgaattttttggatcagacagacctctcagagtttgcaccatcgtattggtggttggatgtcgaataaagagcaatttgtcatccttcactcaatgaaagcaccaaaatgttgacttcgctt

SEQ ID NO: 398259 - DNA, 2181 bp, Cannabis indica
gattttcttctaattttaaataaatgaaaataaaatgaaggttaactatcaattttcagcaataaaaatcagatcaacttaattaaatataaacgactaaagacaaaataattcccttgtcaaaaagaccatttagcccttcacttagccaaaaagtcataaaaccaactaggggtaatatagtcaattctaaaatctcgactattcccgacattttgaatgtctaactatattgccccactatactaaaaatactaagatgtgattctaatagaaaaacaccgcgttctaatcttgccgagtacaaaacatgcaaaattatgaaattctacatatgacatataacatgaattctgaattcaaataaatctctataaactgataattcataactaacatgcaagtttcatatttaaaccctatctatctgctaatttccaaattaaagttaagtggtctttacaattgtccctcccttaaaaggattttgtcctcgaaatcttacttgaacaactctggatattgagccctcatgtcggactctaactcataggtggcttcctccaccttactgtttctccaaagtaccttgaccaaagctatggtcttgttccgaagacccttatcttttctatctaggatctgaattggctattcttcatatgataagtcttgttgcaactcaagattttcataactcagcacatgagcaggatctgaaacatactttcgcaacaaggaaacagggaatacgttgtgaactgccgaaagagcttgaggcaaagctaaacggtatgccacttgtccaaccttctcaagaatctcgaaaggtcctataagcctcgggcataatttgcctcttttcctaaaacgtttgatcccttacatgaaactctataattctgcgtttcagatctgcataactcttttgcctactctgagaggcaagcattctggtcataatcttttttattgcttcattagtctgttgcactgatttcggacccagatatttcttctctcccgtttcatcccaatgaatgggagatctacactttcttccattaaacaattcatagagagccatccctattgtactctaataactgttattacatgacaactctatcaatggtaggtatttattccaggagccctcgaaatccataacacaggctcgtaacacatcttccagtatctaaattgtcttttcggactgtccatcagtctaaggattgaaaactgtactgaatttcagtttggtacccatagcccactgtagcctttgtcaaaatttagaagtaaactttggatctccatccaaaactatagtctttggaacaccatgtaatcttactatctctttgacatacaaatctgcatactgatccactgtaaaggttgtttttaccgatagaaaatgtgcagactttgtgaatcgatctatcacaacaaaaattgaatcgtatatacccgtggttctacgtaatccaaccacaaagtccatggtgatatcctcccacttccacttaggatgtgtcaaaggctgcaataaacatatcggtgtctgatgttcagccttgacctattgacatgttaagcaccatgatacaaattctaccacatttttcttcatcgcgctgcaccagaagtatggtttaagatcttggtacatcatggtggtgccaggatgcaaggagtatggagtggtatgagcctctttaagaatctagtttctaagttttgcactccttggaacacaaaccctagtcttaaacaacaacatcccactatttaacactgtaaaatctctggcttgaccagctgaaacctcttccctgatcttcactaattctggatcagttaactgagcagctttaatttgttctaacagatcagattgcagcgtcaagttatgaagttttcctacaacaaacttgatgcttgatcataccatgtcctatgctaactgaggtgaaatctaaatcattgtagttacctgcccgggaccctccctgctcagggcatcagccactacattgaccttcccatgatggtagaggatttcacaatcgtaatccttaaccaaatctaaccaatgcctctgtgtcatattcaaatctttccgagtaaagaaatatttgaggctcttatggttaatataaatttcacatttctctc

SEQ ID NO: 398260 - DNA, 2394 bp, Cannabis indica
actggtttgggataacaaaatcttttccaacacaagttctcacatcagcatggaccacacttgaccattggcgcaaagctcaagataaaaactgtttattatccttgtctctacaacataaggataataacattgagcgatggattaaacctgatttaaatacggtcaagatcaatgtcgatggagctctttttgagaaagagaatgcatatggatttggtgttgttgcgcgtgactcagctgggcatcttattgatttaactgccaaatatcaaggtggctcttatgtagctgaagttattgaggctcttggcattaaggaggcactcagttggataaaaggcaaaggatggagtaaggtagaagtggagactgacagcatggttacgattcaagcaatctttagtaaacaacaaatgacttatgttttcggtttgattattaatgattgtaaaattttactgtcagctttacacaatgttagccttcattttgctagacgatcagctaatcgagtcgctcactttgtggctaggcggtctcggtttttctctgattgtagcattcatcggaatgttgttcctgatgatcttcaaaccctcttgtatgataaatgctaaatttcaatgaagttaatattttatattcaaaaaaaaaagttgaaaaaaaggaaaatgggacaaaacagaggagtatgcactgcataatcccccgcgcatgcatgagggggatttactgaggatcaaggctgcatgctgggtccgtgggcgtgaaatctcgctcagtggcccgttcagacagcttcatgttcaagaattctcagacaaggcttgtctgaagccgtgtctcgaccgagtgaggcccaccatccgcgcgcgtaaggggaaaccttagccctgatatttccaaaatttcaaaaaatcataactatttcaattttaatccaaattaagttttgtaaatactaaaattgcttaattttttaccaacttttcaaataaaatattttcagaacgaaaataaaccaaatatccttttaaattcatatttcatgaaaataaatattgttttaaattcatatttcatgaaaataaatctttaccatggctctaagaccagttgttgaaacttattttattaggaactagatttactaacatgtatattaattatagaactataatctaacatcctaaatatgaatttctaaaataataaaataaacacatataaagttatagaaaatcttacattggtggcaatagaatataatgtctccttctgtttagatctttaacccttgatcctttctgtcgtagagtatgatcaagatctaaactggatctttttctcttgttggaattcttcacaatcttctacaaaggcctgagtattggcttgaattatgtgagcgattcctcaattcactatagggcacgaaaattttagacgaagaagaagagggtttcgaattctaagaggctctttctttatattctaagttgtctgacaaagtagtttaaaaaatatgtaaaaaataagatcatcttattctatttataggatttcatctagggttaggtttagaattatatggtattaaaaaaagataaaataatactttattggccccttgagtggccgaaccctagtggaccctatagtgtcttaattttatcattttacttcagaacttatcttttctttcacaaatgtcatattttaattctaactctataaaatatcaaatctatctataaatagttataaataattatcaaataaaattaccatttaacttatttattaattaaaccttacaaagtctcttaattaataaataaatcctaaatcctctattttttctcaaataagccattgcttagtgaaaattcataaacaagacataatcttatttagaattctaattgattaataaaaaccaattaattgagtctacaacacaatattatcccagacaatgtggggcccatgggcctatgtaaccaagctctcaataagtagattcgaaatttaccaagtaaattttttaacttattaattcctcctgactccactatagattcggaattgcactcatgattatatagaaagctctatatgttccaaatagagatacactatgaattatccatagtttcaatctaaataatcaaagatcctctataaatgatctacatcgagtagtgacaaatttacagttctacccttcaatgtattttatccttaaaatacttagcttcttataaatgatatttaaattaactaatataattactgaaataagagctcttccatttatatctattaagtcaagctcaaaggaaattattatttcacttctatatagttataaaagctatagattctata

SEQ ID NO: 398261 - DNA, 1226 bp, Cannabis indica
ccgaacaccgaaaaaatcgacactgaaaaaactgcctcggttaaaattgccttaacatggtcggttttagtgtcaatggcaaaccgaccgattaaaccgagaactgatcgagcatatatattatatataatatatattatttttgtacatatttaatgtacaattttattaaactagttttacttatatcttttttatttaaagtctcaattattcattgctttattttattataatttgatgtatttatgtattatatacacacattcataaaataatacgagtttttttaatataactcattaccatattagtagaacaaataatttgaacaaatttaaaaaaatatatatattttacattatttatttagctaagttttattcttaaattatatgatatttgatacaatactctatttttttttagtttttatataattataaaaaatttaaaacttgtttttttaaaaataataaagttcaccgtggattaaacagtcaatttttttacatttgtataatggtcagacggttttcagattataactatgaaaaactaaaattttttttgtgtaaaaaaccgaccgaaccgaccgttgctcacccctagtaataataaaaataaagctttgtttcattcattgttcttctccaatttgtcaatcactggagttttattttatagaaaaagagtttggtttttagttaagtgttgggcgaatttatcgtgaataaatatttggactcatcgtaacgagttggtctggaactccaaacaccctgatgcgggggaggtggtggcaatggctcagttaaattatattgattggtttaatgttcaaaaacttaatgccatagatgtaagcttaagcgggccaactgcactacctgtggagcaatgggcagcacctgatttcccttttgtcaaagttaatgtggatggtacactttttgccgaccaagggcggtatggtctgggtttgattgcaaggtctactgagcgttgggttttgggggccagaagcttatctagagaaggtgctttgcaagctcatattattgaagtcattggaatcaaggaagctctctcttggagtaaagcaaatggatggtcacatgttgtcgttgagtcggattgtttaagggtcattaatgatttgcaaaagttcaaaattatggcttttccttatggccataatctttatgattgtatgactttggttg

SEQ ID NO: 398262 - DNA, 577 bp, Cannabis indica
atataattaattcatacacatatacaaagctttatttgttattcttttttaaaaaaaaatagttatgatatagtgacacgcaaagactgttggtaaacatttacccagtcgcgcttagcgcgtcactataagttaatattttttttttaaaaaaaaaaaattagagaaattgaatgatttaccctatagtgacacttcatatctttagtgacttaggttctaggacactagtactaaattttgagtcttttttatgtatgtcactaaaacttacccctaatcttttagtgacctacactttttgtgcatgtcactaaatgatgtcactaaaaggtaagtttgtggtagtgaacggtggcttcatgtctggcaaggccttgatctttctttggattcccttcaatacctcttgagttgataataaatctaagaaacttccctgattggacgtcgaaggcacattttagagggttgagtttcattcgatattcttctagaatgttgaagcactcctttagatctttgatgtggtctttggatctttttgactttaccagcatatcatcgacgtagactt

SEQ ID NO: 398263 - DNA, 742 bp, Cannabis indica
gggataccaattggctcaacattaccaacatattcagagcaaaactctatagcttcttctgcaatgtagcattcaacaatacaaccttcaggtttacttcgatttcgaacatatccctttaatatcttcatgtatctttcaaatccatacatccacctcatatacacaggcccacctaactcaacttccctaactaaatgaacagttaagtgaaccattacatcaaaaaatgatggaggaaaaaattgttcaagcaaacacagtgttaactcaatttctttctgcaatggctttagagacgatacatcaatagtttttgaacaaattgcattaaaaaacatacaaagcctgatgattgcagatttaacatgagtttgagaaattcctcgaatagcaatagggagtaattgttgcattaaagcatgacaatcatgcgatttaagcccaataagtcttaaatctttcattgaaaccaagttgcgaatatttgatgaataaccatatgggactttcacattggccaacgactcacaaacttgatgtttttcttcctttgtaaggttgtaacaagctgctggtaataactttctcttttctcccactttaacacgaggagctaaatctgttctaattcccatttctaacagatctagtcgtgatgaaaaactatcttttgtctttcctggaatattaagtaaggttccaattatactttcacaaatatttttctcaatgtgcatga

SEQ ID NO: 398264 - DNA, 647 bp, Cannabis indica
cctctttcttcaataacttctgagaaaaaagtgttgcattgtctcacctttcaaacatatgtaaaataacaataaaaaaaaggtattacaaataatatcacctagtacaaatttttttcagtataataatgtataatgtatcaggttactttatttcagttttcaaaatatagtattaatcaattaaaagcaaacaagatacctcaaatttcgtagattttagatagttctctctcagtatagcttctgcttctgatgatatctctgtaaaagtttcattcgcttcattaccattagtccaaacttatttttgtacaacacttcaacattcttatgcattccaacattaaggttattggtaaattccttactgctttatttgctgcattgatagactctgctatatttgatgtcatcatggtatatctcctttttggtgagtgagatctcgcccatgtatggtaacctactttttccaagtaaggccttatacgggcatatattttgtcaagagcagccatatagtactcaaactcaaccaatgtatatgcttttaatgctttaacaaagtttatagtcaaatcatctccatggatatgaagattggccttaatgttgttaagtagatgaaaaatgcatgctccacg

SEQ ID NO: 398265 - DNA, 551 bp, Cannabis indica
ttttttttttttttgaaatgtgtatgtatttatagtttaatattatatatttaaaataaataaaatattttaaaaaaattgatgatgatataatctaaaaatttgatataaattaaaaaataaattttgataatctaaaaatatataaaaaaaaaaatggttaaggttgatcttagcatctttctttgatcccaaagcaacctccaaatgatttgaaatttcttaaaagttttctagatagatttttccactactaattaagatgaagattatggagcagatagatattatgtgttactaagaaaatgttcaacaaaggcttctatagtaaagtattagatgcatttattggtcaaaaaaacaaggcataaagtggccattgtggaatgatttatggtacatattacagaaataaaggaaagaaaataaaaaagagaaaaaagcaagtttatttagggaaatttcaatttttgaccctaataatacaacctatatcaaaatttatacccctttataatttgtacaaatttagtccattaattacatgaact

SEQ ID NO: 398266 - DNA, 707 bp, Cannabis indica
ttctcagatgcagattgggctacaaaacttggatgaaaaaaaagatcaactattgacatttgtgtatgtttcttggtggaaatctgtaattgtaatgtaatgaagaccaagaaagtttgagtgtggtgtgtgattgtgaataatacactaactagagtgattagagtactgttgtgagatttggggtttgattattttctgccacttttccatattgacctcacattaacttcatgcctttaacttccataaattattgaagataatggattagtcttttaatctgttttagctagctgcataattaattaagaaatgctactaatgtgttcatcttttattgcggaattcaaatgaagttgtttattgaaaaaatgaagaaaaaggactataatgatatatgcataatggactataatgatatcaccaagcttcctgattcaataggcaatttgaagtatttaaaatatctgaagttagattgttataatcatgaaaagatacctaatacaatatgtaagttgtataatttggagacattattgctgcagcatacgtgtgttactagactaccaactgacacaggaaatttaaccaagttgcgacatttaattcttcttggaaattagaagagatgccatcacaattggggaagctacaaaatctgcaaacacttaatgcatttgttgtgggaagaaatagagatt

SEQ ID NO: 398267 - DNA, 1083 bp, Cannabis indica
atctataccagctgctatctctcttgaaaatggtgttgttgtcactgcaagttcaacatcacagcaggttcatgaaccctcacctaccaggtctgctactcccactcacaccagacctgctccagacactagatcagcacctattttctcttctccagccgccttacctctcttagctggttgtctaaatgccccaggaagaaataactctcaccacatgacaaccaggtctaagcttggagtgtttaaacctaaagcactcatggccttgagagaacctacatcccttaaagaggcattacaacaagagcattggaacaatgctatgggagatgagattcttgccttggccagaaataaaacttgggttcttgttagattacccgaagggagacaagccatagggtgcaagtgggtctataagaggaaggaaaacccagatgggagtgtgctcaaacataaagcaaggttggttgccaagggatttcaccaacaagccggctttgatttcacagaaactttcagccccgttgtcaagcctgttacaattagagttgtgttgactttggctttgtccaaaggatggtctgtcagacaactggatgtcaacaacgcctttctcaatggtgatctgcaagaggaagtttacatgactcaaccaccaggttttgagattcctggacaagagcatttagtgtgcaaactaaacaaggctctttatggactcaaacaagcacctcgagcttggtttgagaagttacaacacagcttgaactcccttggtttcatctcttccaaatctgatcactcactgtttattaatcattcttccaactcaacaacactagttctagtgtatgttgatgacattctaataacagggagtgatgagatagctgtaaccaaattgatcaccacactcaacaatcaattttccctcaaagatcttggtcctcttagatactttttgggaattgaggtcacctatacagaacatgggattcatctgtgtcaaactaagtatgcaagagacttgttaatcaaggcccaaatgctcagctctaaaccttctccaactcccat

SEQ ID NO: 398268 - DNA, 693 bp, Cannabis indica
tttttaataatcttcaaacgaccacactaggggcactaatctcagaaatttcttgtgttaataacgaaattgcttttaagtcgagcccaatacctaatatctaagtaaaaatataattttaaataattagggaatagacacaacatctttaattatataaaataatatattaaacataattcagcttaatggacataacttgtaattcatgatatatgtataataacttcaccccacatggattttgttatatttatataattaaataggataatatgttaaattaattctcttaatttaccctatagggaattatgaggatttaatttaatagtgtaatcacaaatttaattaagatagataataaacctttatttttcctaaactaattgtttaattaaatatttcacaaagttcatctgattttattatatttaatattttgctcgcatgtaattttagatttagtaaatattttatcttaagtttatacattggtgtctactgaactacataattttgaataactagggagtagctacaacatccttaattatataaaattatatatactaagtggatcatgatcacataatggacattaattataattaattatatggatattacaattttaccccatagggatgttattatgtttatataaaaaattaggataatatgttaaattaa

SEQ ID NO: 398269 - DNA, 598 bp, Cannabis indica
gtcctatgttcaagtgcgggtcttggtcggatactatgttcaggttcgggttcgggttcgggtcccgagtctaggcttgggttgggatctgggtccggctccctattcgggttaagttctaatttggagtccaggtcctggtccggttactgttctggatgtaggtccaatttcagttataattccaagtcaaagcactagttccagtcccagtcaacttccggttttggttccaattttgggtcacagggtacaggttcaggtccaatttgggtttgggactgggttcagttcctggtgtgagttcgggtttcgtcagggtttgggtccagggcttggtcccaaatctagacaccgactccgggttttgtcgaagtcctgggtccaaatccgtatcccaatctcgggtcccagtctggttccatttccggtgccggttcacgagctggttccttggttcaagatctggtctgggtcaggtactaggtcccggtcctagttttgtttcccaagtctctatcctgattctaggtccaggtcctggttattgtgtgggttttggtcccggtcaaggttcgggttcgagtcctagtctcgg

SEQ ID NO: 398270 - DNA, 962 bp, Cannabis indica
aaaacaataaaaaattgaataaccatataaaaaacaaacctcattgagatctggaagtgtgcctaaataatcaataattttagcatcattattggtgcctttgttagcaatagatgcatcttttgcaccttcatcatcctttgcacctatttcaacaataacattcacctcatcatttttgatattttcagcaccagactcaccttgtccacgaccatctccatcatcgccatcctcctcatcatctttactatcatccccaccaatcctcatcaccatcatcatcttcttgcccatcatcatcttcctggaaactagcttcttcatcaccaacatcatcttcattatcaacatcaatatccacatcctcatcattttcagatgtgtgaatcacatcatctaattgggtcccaggttgtgtagaagcaacatgcgagcactgaataaagaattaaaatttgaataataacctaaaaatatctaaaacaactaaaaaacctacaaaaaaaaatacttggataagaatgtccatttttttgttcaattcagccacaacagacataagaatctgcttttggctaatattaagggacaaatctttcctcaaatcctcgtagtcaatacgagtgacatattcataagcctttgatgatgatggaaaaacatattcaacatccaaagaagacttggggagatttacatagcatgtgtgaatgtaatatgagctataggtggaataaaaatatcttcaggtttggcgacattggagagtcgatcaggggccataaatgtcataatggatttaattgatagattttgtgtgaatattgtgatatgttaaaaatataagtattggggtaattaagagtatgtgggatttgacttaatgccctagaagtatagatttcgtagtggctaagaaacgataagataattatgaataataaaatttatattaaatt

SEQ ID NO: 398271 - DNA, 552 bp, Cannabis indica
taacaattgacttagtttattgactctgataccatgtaattgaaacagagaaacaaacatggaagaagaataagagattctgagatacaatcttgatttatcaaaagctcaactttattaatgatctaagtgatatttatgttagagattttattgcaataaaagataaatcaagatatatacaactcaattgtaaaataatacaagaagaataaaagagattgataaaataaatgttacaacacacacacactatatatatcatatatatatatgaaaggtagaagaagaagaatacaatacatgtaatataataatatatgtatatacactcactcacaaccttcagtgtagattagtggggatcaccatgacttgaacaaggtattgcacctttgtccaaaagcttatttctcctatctctaagcactgaggaagctctctaagaaatagctttggaaattatcaagccttaggttttttagcaatgtgtttttttgatagaaaacttctcatctcaatctaagcaccttagacctctttatatagtgt

SEQ ID NO: 398272 - DNA, 523 bp, Cannabis indica
gcatttgtagaaacaaacaatttatatagtccctagtctccttagaatttccgacaaacatgtaaacttcagttcacgcttctagttttccttctttctttcttaagacatgagtaaggcacccctaaattctataatagcgtaaactagttacacgaccattccatagttttacaagtgtcttagggactgctttagatggaacaacatttagaatgtcgttgaccatctgaacagcatatccccagaaggacgttgacagggttgaatagctcagcatagacctaaccatttctaaaagtgtgcgatttcttctctctgcaactccattttgctgtggagcgctagggtcagtatattgcgattcaattccaagtttaattaaatgatctttgaactgcatatccatatactctccacccctattagttcacaagatcatgaatgttttacctaattggtagccaaagcatgaaattcttgaaatttctcaaacgttttagatttcttttgcattaggtaa

SEQ ID NO: 398273 - DNA, 541 bp, Cannabis indica
ctttattattatttactgtttcatgttagtttttaagacttgtcagcatatatatgcatcatatttataagataaattagtagtacacttacaacatgcttgtgttttaatttgtttgctttttaacctatctataaaatttaaggagaaattatcaggtgggggttcacattagtttgtttatatgacactagttaaattttgttagtgtttaagatattctaaataatattaacagttggttgaaatagtttattggatgcaaataaaaaaaaagatagacttacgtgcaataaatagtttgaacgttattaattaagttactaagactagttcaatagtaagagaagtgtggaatatgagttccaacccaaaatttctaagtttctaataaataggtaacaagattaatattatgctacactcaaaaaatagtttcaaccttgtttttgaaattataaattaattatttcaattttttcaaaaatgaaacctatatattatataaaaatatgagattattttacaaatacataaaata

SEQ ID NO: 398274 - DNA, 531 bp, Cannabis indica
ggagggagctcggacaggcccaacagtcaaagcgcggattcgagctggtcaaaagcggatctgagcagatttgggctccttccccacctccagtactgcatccagagactacgagaggcaaagatatgctcactcactacatgactcggtcggtccctgaggtgaatgagcatctagccgaagctaataatgacctttttctggcgctgatgatgggaaaagtcttgaaggagtttacgagggtgagtcttccctgacagtttccttttatccttctttacttggcttagattctaatgtttttttctctatgcagaccggtctgaagatggcttatgcttattctcgagctaagtcggctgcctccaataacgctgccatgtccaacaccatgagggcagaactagacttagcttggaaggatgctgatgaagctacggttcaacttggagccgtccgaactaaaatgggtgaagtcaagaaaaacttcttgctgcccaaaagaaggtggctgagctgactaaagacctc

SEQ ID NO: 398275 - DNA, 1163 bp, Cannabis indica
tgaccgattgcgatgagctggcggtggctttgtggttgagcacgcgtttagagacgcggcgggtcgcgacttcgcattgccacgtcggtcagttgtttcgtttggtttctgagaaaatgatggaaagagagagaaagaagtaagaagaagaagaagtactacgacaccgaaagacggtcacttaggattggctgaaaaaaatggtgtttttatttttttggttttataattttaataaaattaaataaatttaaaatagaagcgtcaaacgcggaccctgtgactttttacgagtctctccctcctcttccgattctctaatctcgagcaccacgtggtttagtgggtgtcgagaaaggaaggtgatcggaatgtggggcccactttagcaaagaaagaaagaaagaagaaagacaattttttggaaaattaaatgaatttattgattttttaaaaaaaaaaattaaatagatgtgttcaacgctaaaaacatgattaaactatgaataatattgggtatcaatgaggcaccactatgtgactgtggccttttagaaatacagatatttttataaataccaaaaaaagtcaaaaaaaaataataataaataaagtgtaacgatattttaaatatttttgtcattaatttataaagtttggttgtttattaaaaatacagaatagttatgttttcatgttattttataattctaatttcttatttttttattatttgtgtattatatttttatatatatatatattttttaataggataatgtaaaattgtaaaataaaaataaaaaaaaaaaaaaaaaattagtaaaaaaaaaaaaaataaaaaattatttgacagtaaaaatgttataattttgttaaaaaatattattttgctataaatttttttaattaacaatatgagcatgccagcataaattttatcattttttttttatctaatattaataaaattgtaattttttgctaatttagtcaatttagaattcgttttgaatttattaaaaataatcaattatatttttccatctagactcaatgatttagaatataattcttacttgtgtattaatcaagacactaacaaagattatattgataaaaattaggaaaatttacatggtatactaactttatcatttttt

SEQ ID NO: 398276 - DNA, 1271 bp, Cannabis indica
ttgattggaattcaaccaaggaagaactacttttcatgttccaaagaatgtcaaaggtgcatccaatacaactgcctacaaaaatttcgatcaagtgaagtgtctgtgctcatcaagaagaagaagaaggtttctactttgtaagagcttatccattttcctagagcatttgttatttttactttaaaaaatctctatattataaaaaaatttctatgtaattttatttactaatatcttcttaatatattagtaatatatttttggtgaagtggacaacaaataatatattttaaattttatcttattactcgtaatcagaaaaatcttctaatatatttttattacgttttaaattttttaaataaaagatttatatataaacctaatcctaatatatttattcaaatgtcctggtacgtttcctatttaagttaggagagtgttttcattatatatagactgtgttgtttaaaaaaatgaaaataagagtgttgtagatacaaacttggttttggggaaaaaaaagtgtgaatttgtagaaaatgattatgaaaaaaagtggaagagaaaaagaagaaaagagtttattaaaaaggatacaaagatggggatggatgaggggtaggttgttgggagttggaactcatggttctgttttcgaagcgattatccatggcaaaactgattctagaccactacaattcaaagattacccttcacttttggtcgtaaaatctgctaattctgattcctattacggcgagctcataatagaaaaggaagagtttgtttatacgtctctggggtccaatcctcacatcatcaagttctatggccacgattataccttttccaaagatcatgatggtggaaattatggcagagttagatataacttattttttgagaacgccttaggtggatcactgagtgatttcatcaagagaacaagaggttggttgcgtgagtctcaagcaagagcacatactcgctctattcttaaagggttggagttcatacaccaaaagggttttgtccactgcgacataaaaccatccaacattttactggttcattgtgatgataataatcctcatggtgtagatggtccggttgccaagattgctgattttggtctgtctaagagaattaatgatgattccgagagtgggaataaagtgacaggtagttggttgtatctatctcctgagaatgtgtgtgaagaaactcaagaccaggcgtctgacatttgggctcttgggtgtgtt

SEQ ID NO: 398277 - DNA, 621 bp, Cannabis indica
tgaatggatttactttaggaaaaatcattccattaccagatccattccaatcaactaaacactaccctagtaattagttaattataacttatataacttaatatcatgaaccgaactaaaagaagaattttagtaatatataaattaatataaattaattgtgagaaacctagttagttacattgtgtaagtagtaactagttataattgattactaaatactgaatttttttggttaagatatttgttatggataaattatggatgcatatccattaggaaagcagggggtagatgatatactacttggtattgacatggcgaatatttaaccgatgatccatatctattaggaaagcagggggtagatgatattgagggcaatgatttcgatgtcatccattggacttgcttaacgaagcacatgagaaatttcttaatgatcctgaaaaatttgataattttctaagtgatgctgataaacccctgttcgatggttgtaaaaaactaagattaccaacaatgataaaattttacaacatcaagacagaaaatggagtgagcgataaatattttactcaatttttagctacttttgaagatatcttaccatttgataac

SEQ ID NO: 398278 - DNA, 626 bp, Cannabis indica
gacatttctgacctccccgtaaaattccacaattgctaggcccaaatatattttatttaaattatggtatctaccgtacccacatatttcaatttgatctccgtaattaataaattacgatttatttattcatttgctcatatttccctaatcaactcgtaaatagtttaagtaggatcataatcctactccaatgcccacttaatcacatatttaataaaatatgtccaattaaaatatcaatatattttccgggatattacaactatcccctccttatagaaatttcgtcctcgaaatttattcaatcaactcgggacacagctaccgcaactgcgactttaactcccaaatacctatcaatcttgcttttctttcacagcattataactagcgatatagtctttgttctgcaatactttctcttttctgttcataaatctttaccgattattcctcatatgataagtctgtttgaaattcaatattctcgtaactccatatatagattgcttctacctcatactcctgaaacattgaagtgcatattggaaaccctagataaagcagggagtatagttagctaataagctacccgacctaccctttccagaaattcagacgga

SEQ ID NO: 398279 - DNA, 834 bp, Cannabis indica
tttggttgtatttgtaattagttcttgaaatatttgttttgagatatgatagtaaacatcaaaaacagggagagttatagtgattgtaaattgtaatagattggttgagcaatacaatgatcttattcatcaaaaaaaaatttttactttcattttattcaaaataagaaaattcaagaaaagtttcttctctctctttccttcctctctttcttcgaaacccacctagaaccagctagggttggggtgttttttctgcatttcaagcttgatccagcaggtgttaggagattttaagctctaggtaatttgttgtatctttctcttaagtttcttgaatttaaagatagatttttgcatgaaatggtgattttagctactgttgttgctgttgttgttagatattgtattctaaggtttaattatgttagattatgttgaattaagcatgtttttatggttgttagttagtttaaccaagtgttgagtttttgaactcaaacttggagctttaatggtagttttggattatgagcttgggtagatgatttattgcttggaaatagtttattgaggtataatatataggtctgaaaagtttggttaagtttggaatcgttttggtgaagctttgaaattttttgggttctctgcagaaaaccaggtaaccggtttatgcagcagggctcccaaacatttcagctttgcgattcactttagtttcaggtttctggttggttaattctctgctagtttagggtatttccatattaagttgcagtagataaagttttgggttaaaacctaagtcccgggtgtgatttagcgggtcac

SEQ ID NO: 398280 - DNA, 658 bp, Cannabis indica
tgattttaatttgttaggctattgtaaagactattaatgaatttagagtcttttggagggattttagcatattttggtagaaaatagtggaagttggggagctcgattttacaaggtagaacttaattgtatattaagatgaccttaggggcagaattgggcttggagatcaacatgaaagttttagatctcgttcttagctttccagaacatcttgaatcgttcaattccaagtaatatcgagagttatggctaaaatactatcagtcgtcgcagtaggaaatttctgaagaaaaaaaaaagatagcaaaaaaaaaagatagattttcaagaagagttgcaatttttttatcttttgtttacaagatgagttatcttttcttttagtgagatatttcctaatactattataaatagtatcctaattctaaggggatttatctatccactataaatataatcctaattctaaaaagattcatctatttttcaagcactataaataggacctcttagaatatgaaatagaagaattcaaaaacaacacattagagagagaaacccagagagagcaaggaagagacagagatcggctacgaagtgttcttcattctagttcttttcttctccttctacttttactaaatattatgatttt

SEQ ID NO: 398281 - DNA, 529 bp, Cannabis indica
aaaaatttgattaatttggcactgttgtcaggaacaaggccaaacttgtggctcatgggtataatcaagttgagggagttgagtttgaagaaacctttgctctagtggctagacttaagtctatccggttactgcttgctatgacatgttttttgaagttcaaacttcaccaaatggatgtaaagagtgcctttctgaatagttttcttcaagaagaggtgtatgtgaaatattcaaaaggttttgaggatcccaagtatctggaccatgtgtataaactcaagaaggccttgtatgggctctagaaacctcctagagcatggtatgacaggttaacttcatttcttctagttagtggatttgtgagaggtactactgataatagcttgtttatcaaacttttgcaacatggtatttttgtagctcaaatttatgttgatgacattattttttagtctacttgtgataataaggaggttgccaagtttgttgatctcatgactgttagcccttaagatatgtttccaag

SEQ ID NO: 398282 - DNA, 1128 bp, Cannabis indica
agagttttcctgtttctgcagcagggaaaaccggttaaccggtttcacaggcatagtgaaaccggtcaaccagttttggtagcaggggaaatcctagttttaggcttcgaaactggttttgttcggggtattttcctagatcttagaataggatattttaatgatgtttgaattattccgaattagtggagagttagatatgtccggttacgaagttagggttattctaaagtttggaataagttttttattgagctttgttgtcgtgacataggacccgggattgtcaagctttgactccactggaggtcagcatgtacactaaatttttggactgaggtaagaaaagttttaaataccgtatatggttaacgttataactattacagttcgattatgatcaaaatctcggtatgtgtttgttataacttaatctcaaacgagattaacgatatgtattcattgtgactcgattatgatcgagggaaataataggaaacgattattattgttgtgactcgattatgatcgaggaaaaggatagggaacgattatcatcgttgtgactcgattataatcaagggtaatgtcatgaaacgattattatcgttgtgactcgattatgatcaagtataagaaacggtcattaccggtatgagtaattactcctcaaaccatggataggtttcttacttatcgtttgctgtatcgggcaacgatagtaacatatgtagctcgtggttaatgagtggtaagggtactttatgaagtaccgaaattaggtgcttacgatgttgtgaaatggatcaagtgtattattatgtgatgagttgtaatagaatacatttctgttatagtatgattgaatgaatgttatattgcttatgaaattggtcacttttcttccagtctcaatggcccaggatgtaagaatcatgtttttaatgatgcttgattagagtgttttatgaagcactgaaattgtgtggatatgttaatgggtgaactagagtgctttatgaagcatttaaagtaagtgtttataataaattatgattaaggtgtttaatgaaacactggagtatgttgattatgtatagttagcaatactcttaattttgtaataag

SEQ ID NO: 398283 - DNA, 632 bp, Cannabis indica
ccagacgcatagcaatagacatccgtatactcacacccgtcatccaacacataacctaccaccccaataggaatattcaaaggatcatcaagcaaactggtcgtcttattagatgaagtggcacaactaccatggttgctgatagacatagcaaaaaacccacctagaacaaagatactggactaagtgcgagttcaccaaaaacataatcatatagaaagtaaaacaccggctagacagaacaaaaagatatgtatatatacatatatcaaagctcaaggtggccaaaaataactagacataaaaacggaccccataataatgttcaccaaccggacatacgtgttctaaatagaccaccagttatggtcctctaattaactaaaggaagacaatattctagctagccaggcagtcattattcaaatcacacttactgctacgcaaagacaaacagtaaaaatgtagatttttactacccgcaaagatcaaacactaacacaaacatacaacaattaaaatatatttactcatctacatcacaaaaataaatatgaacatgtacaagaacatgaaaaacataataagaacattcaagggagaaggtttagaaaacttacctcttgaaagcc

SEQ ID NO: 398284 - DNA, 929 bp, Cannabis indica
taaaggtgcttatgatatctttcaccagatgttttttttctcagtaccaaatacttaagcccgaaaattttatcttgcaagacctattgattccgaaaggatgttgtcaacattagtggagagaggtaagcatggaagcatattggctatcggattgtggaatgattggaaagagtaagactattataacattgtttcaattgtgaggccattttgtgtttatgcattgtgtgataagatgagcatctaaattaattgttattgtttgtggaattaaaattctagtttgagaaatggaaggaaacggaacttgaggtagcagtattatgattatttgatagcgtagttgatagtaatttttagtcttactcgaggacgggtgaggatctagtttggggaaattttgttgcgctatttttagcctaagttccgggtcacattaataagcattttctcaaatattgcacctttttggagcagttttacgcttgattttctttgtttcaggtttctggtgcattggggttcaaaattagtcaattggcgaaaagacgggacaatctggtgaaaaatcggctaaatctgccaaaactgaatcagtagtcgcgaccagaacaaggccttgtcgcgaccctttgttctggtcgcgactatggtcgggacttgagaattttggtagaaaccctgttttttgagttttgcctgtggtcgcgaccagccattaagtgggtcgcgaccaggcacaaaatacgggattttggacctaattctgatactttttcaattggaggcacaaccttcattcctatataagggactcgactcagattgccaaaggcatcagaaatcagcccgaaaagtgaatgaaggaggagaggaagcgatcttgaagacccggagcaaaagcaccatctagtttctttctttca

SEQ ID NO: 398285 - DNA, 1860 bp, Cannabis indica
tctttattcattcattggtcgaagcatttttgttaccgcagtaacttacataaaatctattatattgatctaatctgatctttaactaaatttaaacaaaacaaattgcatttaaaagaaatttttcttttagagatggtcatctgacttgagggcttagtcctttcatccgaacctttgggtggggttcgcatagaaggccatttacttaagagtaaatgttcttttaatttgtacttagagtggtcatccgacttggtacttttactggtagtattttcttgaatgttccccattctagtaccttggtactagaactagtttcatattttcatgatactgccccagtttgtatgctcccgattctagaacttcaactgtctgatatggcccttcccagtttggtttgagcacaccacctgtgctgtcctttgtgttcaaaaatactctcttgaggaccatatctcccatttttttgtgtcttcacttgcttgttaaagtaccgagctaccttttgttaatgggccattaactttaggtttgttgcagctcgtttttcttcgatttcgtcaaatgaatctgctaggagggcatggttagcctcttgatcataggtcaatcttctgtaggacggaggttctaattctacgggtagcatagcttcataaccataggccatagcaaatggagtttatccagttgctattttttcagttgtgtggtacgaccacagtacttctggtagttcctctagccagttcccctttgcttcttcaagtcgtttttcaaagtatctttaagtgtcttattgactgctttgacttgaccatttgcttgagggtgtgccactgcagagaaacttttcatgattccatggtttgcacagaaatcgatgaataattggatgccaaactatgtgccattgtccgagactatcttgtatgggagtccgaactgacatactatatttttcacaacgaagtctagcaccttcttagatgtaattgttgccaatggctcggtttctgtccatttagtgaaataattaactacaaccactacatactgtactccccctttacttttaggcaattatccgattagaccaattcccaaaatagcaaaaggttaaggactctgcatctaagttagttcattgggtggtgcacggggtatctttgaaaatctttggcatttatcacatttcttaacataggcctttgaatcttcaatcatggttggccaaaaatatccttgctttagtattttatttgacaggctttgcccagctgcgtggttgccgcagaatccatcacatacttcagacaaaattcgtgcagcttcttcttgtgtaacacatctaagtattggcatagagaatccccttctatacatgactccttctacgatgatataccgtgcagcctttctcctcaacttccgagcttcatttctatcatttggaagttccccagtattgaggtaggctgctattggtttcatccaattcggagctgtgtcaatcatttcaatttctttcgcacaggtgatgctgggttcttcaaggaattgaattgggattagattagccttatcaactatgctgctgctcgcaagtcgggctaaggcatcaacaatgtatttttttctcttggaatttacttaagaatgtagctcttgaattgcgcaagtagatcatgttttttctcaaataggctatcattttccccacgggtctcgtactctccaaacacatgatttactaccaattgtgagtcactacagatctcaatgtgttcagcatgtagctcccgagcaagttttagatcgacaatgggggcttcatactcttcttcatta

SEQ ID NO: 398286 - DNA, 1378 bp, Cannabis indica
ttggggtctattagtgatgatttatgttactctgttttgccgcttacgtcggcttgtggaaaaagacttgtaataatattttgtaaaatatttttgggatcccgagacatgtaacttttgttggtttgtaaagttaaaattattacaagtttattttcattatttttgcatttaaagttttatttccgcgcttattttattagtaatcccgtctaggggattagggtttcttaattatcttgggtagcgtgcctaatagttagggcattacaatttggtatcagagcgccaaggtttttaaacttcttgtagactgaccaaacatgtacattcatcgtcagagaaaagctcgactcgtggatgagtaagtgttgagagtaaatactttactgcttatgtgatcgtttaattaccactttccattttaggcagtttgcaagcatgtagagtatttatgtgatatgtgatgccatgcttaaaatgttatatgttaagtgtatatttatatggagtaaatagttgagttggggtttaaggcaataagtgcataagtgtggtattggtgcttaactcgctgaggttgttgattataggggtacttgtaaaaatggaccctccgcaatcatctagaccataggccgagcaagtagagcctggggttgaccaaactaatccatcggcaccgcctgcacctccgtagaatccgggggataatgcgaaggttggcaatgctaatcctccatctgactggtagcaaatgtttcaagaaatgtgaggtattatacttcgtcaagaagaagagttgcgttgattaaggcaaccggcattggttgcccctgttgagcaagtgttaccaccagcatatgtgctagtggtgggtaactagaggtttataatgccacatagggattccgtgtttgaacagtttgtgaagttacaacctctaacttttctggaaggtactgacataattaaggccgagcagtggatgagtacaatcacccatattctggacaatatgggggtgacgggaacagagagagttaattgtgcagcttttacgttgcaagatcatgcccgtgtctagtgggatattgtgggacagacttgtgatgtcagtgtaattacttgggaagagttcaagagtctgtttgaggaaaagttctataacatcgctgtgaggacttcacacatggaagactttgtgaaactaactcaggggaaaatgtttgtggctgaatacactctggagtttgattggttgtccaagtttgctagtgatctggtacccacagatttcacaaggaaacagaaatttgtgagaggactgaatgccacaatcagttgggacttaaaaattaccacttcacatgacact

SEQ ID NO: 398287 - DNA, 962 bp, Cannabis indica
aactgagaataccagatgactggatcttaaatgacaattgttgaagatcaaatcgattgtggacctccttgccactattggtcacaaacagacagcttaagatcacatcaaatccattttcaatggccttcctcctaaatatgatgtgtttggcacatctgctgcctccagaagatacatactctgttgccgagatcaaggccttactcatggcttaatttgcaagaatcgacaagaatgctagaattcttgatatcaaaaaaggagaggcaagagcttaactaatcataaggtcatcaacaaaacacttaaaatttgatatgttccctccagtgatcaaatagttttattgcctaaccaagggcttagctaatcacaagtttaatttcttagcagacaaacttggtgtaattcagacaccacaaaatttaagatgggatataaagaaatgaaaattacccccatgcttctagaagtgatgtgcttgcataataaactttggtgatcctataagtaacaaacgatgattgtaccattgaaatatcaatatgtatataaaggaaggtttaaaacatcatatgtgacatatgaatttatttgaaggcttgggatcatcttttcactcttctcttctctctcatccttccccttttctcttctcttctcttctctctctctctcttttccatctctcattattttgggcaatatgtagtttttctatattcaggttctttaattcttcatgttaaacatgtttctgttagattatttaagattgaatatatatatttctgttactggtttattttgttattattttaaggttgttttactgctgttttattttatttatttatcacattttccaaatttattgtactgctctacttttaatagtaatagaaaaataattaattttttatgtaagttattttcttcagtattctatgctccaatat

SEQ ID NO: 398288 - DNA, 582 bp, Cannabis indica
gtttatggttttattttgaaagggttatccaatttgtttcgtataaatgcgtacatgttaatttagtcctcttcagttcttattctctagtttctatctatgtaagatggtaattaaatgccgatatattatgatactagctttcgcaatatttggatatgagaaaagtttccccaatagtagctgagatatgattcaaactattgtgccaaagactaatttgcctcaaattaaaattcaggtgattgaacagtcagcagtgacttaggcccctggactgtgctataggagcacacctgctgtcattataactgcagtaggccaaatggtatgtgtccatagtaatcttttaggttgtgtttgctgttggttatgggtttttactttctttagtttgccttcacatttaagtaatggatgattggcctttggtctattgtgtggaatcataaatgtcaccaaccttgtatctgtcgtaaacttgtgattattgatgctaggtatctgttcttctacttccttcaatgtgcctcttctgtagggacaaagatgaaaaaacaaaagggaaattgtgttcaaata

SEQ ID NO: 398289 - DNA, 741 bp, Cannabis indica
gcaccttatgattagttaatgatattttttaaaaaattattttcttatatgaaattcaatagttaattagaccaataacaatataacaccgaaaaattaaagcgttaggcaagaataaatttttttaacatttctcatatatatagaataattatatggtagtgactatctttttgttcctaacttactatactaaacttacactttttaaccattgattatataacttttaaaagtcaaaattgtgtaagatgtatttgtttgtaggttattaaatttttttttttaaaaaaaatagaaaatctcacacccaaatgaaaaagtgagaattaaaagtatttttgtaaaatgccttggaatcataaaaatgcatttctatttggccaaatgtttgccaaaaaaagatatctattaaataaatgctaaaaagaatctgtaaaataaaaatagtacaatagggagttaacttttttttctttataaaatgaattttttttttttttaaatttgttgctattactatattatgaaaaaaggtcgtactattatatatgtgaaatgtattttataaaattataaaaataaaatataagtggataagaaaaaaaaaattaggagtatgattattttttgcagagcataaaaaaataaactaataacagattaaacaaattagaattagtaatggggttttttaattattgtatctaaaattaatcttatttacaaaaaaactttgat

SEQ ID NO: 398290 - DNA, 500 bp, Cannabis indica
tgaaagacagacgatatgcagttcagaatcaagaattatgactgtaaatcgcacgaatagatgataaagaagaatcgcagaggtttctggacctagggtttcctaaacattttctacagcaaagtagaaggtgcatttgacatataaacatgcaaagataagcataaaggaaatcagaaacttacttgagcgtcaggtgtctgggttcgagcaatgtcaatccaacaagaagtttgtatgaaggtacttcgacaactttgaagccaagcatctctcttttcgctctaaagcttacttagcaaagaagggtgatgaaaatgagtttatgtgccaaggctttttgatatttataggcaagtcacgaaaagaggtaatcatctcaaaggaacctcagacgcctaagtttccatccttaaaagcgaatatgggaaatcaaaaataatcaagtgcagcagtcaccgtggagagagaaaatcaaatttcgaaatattaattgtcag

SEQ ID NO: 398291 - DNA, 1003 bp, Cannabis indica
gatggttgtatcgtccgtgctcgtcaaccacttgaagcctggttgagagaagtagaagtaccccgacatgccttgcttggggtggacttcgaatcaaagaaccaagcaacctcgtggggtgagggcataccccatttttgggaggcatagaggacgaagagggcagacagatacttgatgcccttaggagtgaactgggtcgggcagaggccgaagaagtccaccacattcttgaagtattgatgtaacagcatcaatgccccttggtgaccatgggcacccgaccaggcgcacatccccctttcagggtttctggcatgattgttgtaggcagaaatgtagcaatccaagtcgcccacgtatccatcctggtcgagagactgaaggcgcgcctcactaaccttggacagagggcttacccacctggagtccaaggcactttgccttctatgaggaaccgcagaagcaagttcctcactgacgtagtccacgccctcaactaggacgtctccgtcaacatcaactggctccccagcctcgttgtactccccatagtttggggtttcaacctctgcctcttcctcctccttggaggaactgccaggacgtacatcgtcctgcccctcaatctttaggacctcagcgtccccttcatgatccccctccatctagacggttggatcttgttcagcgctgggcatagtggcgtgctgagccacttgagggtcaggtgcgtcagccagacgcgtggttttctttgtacgagctatcattctatggctgggtacatgatttgaagaatgtccttcaatagaggaaggtgggctagaacaaagacgaggatgatcctcgagtagaagttgaaggaggtcttggtcgatccgatgtctgttttgccaagactcacctgagttcatctacaaaagacaacacacaagatgagtgtttggtcggaatatcgaacgataacaatcaaatataccgaccaggagtactgaacaga

SEQ ID NO: 398292 - DNA, 806 bp, Cannabis indica
actttctcaaccaaagtacggtttattcgttttgccatgccattttgtcgcgacgtacgaggtactgaaaaatgtctaatcatcccttcttaacacacttgtaaaaaaggatttgatttgtattcttcactattgtcagatccgagcctttagatcttcctgtctgtttgagtctcgatcattttcttccatttaaggatgacatccataactgttggaacttgttttaccaggatctagatttactaacatgtatgtttgattataatctacaatctataatctaacattctaaacatgaatttcttaaacaatgaaataaacacacataaagttgtagaaaaccttacattgatggtagcaaaatataatggctccttccgttcagatctctaaccaaaaataccatgggtaggggaacctaccataacgttcaatgaagatgatgttgtcaaggttaacttcctgcacaacgattcgttggtcgtggaagtacagatagccaaaaaaacagtggcccaaactatgataaataatagagcctccgcaaatatcttgttcaaaacactacatgaaaaaatgctcaaaaatttaaccctctgtcttcagcccgtatacggtttctccaaccagagtgtcgcacctttagggcaaatttgccttcccctcactgctgggcaagctccgaagagcatagctgtaatggcacaattttcggtattggatgttccatcagcctttaatgtcatgttgagccgaccagccttatatgacctaaaagcagttacatcgatatttcattcgtg

SEQ ID NO: 398293 - DNA, 572 bp, Cannabis indica
gatggaaagttatccgcaatacggggcggcattgaattcctcggtgaaatttggaaagatataaggaagaacggtccggtagactcaatgagtgatttccttaaccaagccaaaggcttcatcaaactcaaagaatccatttaacgagcagaaggtgaacaaaagctgggcaaaatgaaggctccttccactggaatatctgcccaacttcccaagtattccaataattcaagctcaagtggcaagcgttcaaacaacaaccacaagcaaggaaacgggaagaaaggaaagttcaccgataaattcggacagactccccgagagaatcatgccaaatacactgcattcactattctgactgaagatatagagagtgtatatatggaaactcagtcagtgatcccgtacaagaagcccatgcccatgaagaaagataccaacaaaagggccatgatgaagttttgtcagttccacggagagtatggccacaacactaatgaatgttacaatctaaagcgagaaattgaatttctaataaagaaaacaatgcgcacttgcagaagtatgtcaag

SEQ ID NO: 398294 - DNA, 630 bp, Cannabis indica
atacatgacattatatttgtttttatttgattttcaacatatactcgtgagtaattgaatttgtatttatttttcttaagctactaggttttttgatatggtttttctgatttcttgcccatatatgattgttcttattatctatttttcatatgatatagtcatgatattagctgttgatgatgggatttctttattttattttatttttttatagaaaatttgaacaggacagctttgggttacatatcaagatgattagagatatggttggaacatgattctgtacaacatttcctatgctttgctctttacagagaatcttccagtatgctaaacagtgacaatttaccaaatattgtaaacaagctacaacttggaaatggattttatccctaaagagtttggagttgatgaaatccatgttaaaagacactccattctctatccaatatcaagaagacttagacgaggtttagctgctgatggctttaatccatttggcaacatgaccctagcatacagtatgtggcctgtcgtgttagcaaactataatcttccaccttggatgtgcatgaaagacaataatttcatgttggccctactaattcctggaccaaaatcaccagg

SEQ ID NO: 398295 - DNA, 615 bp, Cannabis indica
acctgccctatcttccatggtacgatattgctcgggtatacaataaaatgactcgtgacagttgatctggacatggaatctagggtaccaactatcaaacttatgagcaatgcggtccacgagaatggaattacaagtataaaattaagacgtgagtcttggaaggtaactaatgtattacgctcagcccttagaacagtaggtgacaagccacattgattacctcgagatgctccttcaccgaattcccgaggggtagtgctttgaaggtattgtgcttaggctgagcgatcccaggcttggtcttcgggtggaacaattatttgctgccaagaagtatacttggaatcttgtaatcgcaactgtattctttgtcagggagaaggcccgctgatcgcaagtttacttcgttcaaaaggaattttcatgatcgaagaacgtaagggagagtcatcaagcgcctgtgcctactaaccatctcggaggtaggggtaggtctcgccagaagagctgtcaaaacaaacaacacattagtcaagcacgtaaaaaaggaagacagatgtaaataagaaagaagagaacaatcacttatggagtttgcgaaatgtggttgtg

SEQ ID NO: 398296 - DNA, 506 bp, Cannabis indica
aaaaaaaggaaataaagaaagaggaggaaacttggaaaagaaggtcattgaaatcattggtaatgcttagattacaaaacctctgatgtcagatagaagaaagctaacgttcatctcaaaaggcaaattataggcaaatctgatattattgatcatttcccatcgttatgtttagaggcatattattgtggtatctttctatacacaataaaaggctaaaggccggaggatatatgattttccaccaataaatgtaccactttaactcttgtacaatgtaagtatactactgtctgcaccaatatatacattacatataaataaatacaatgtgtaatgtagtcatgatatagtgattacatatattaaattcatatgggcttaaaaattaaagaagctaaaaaaacactgaaaccaagcttgatcgggtgaattacctgtgagagagattgaagttggccatgttgtaaggggaaaacagagtgatcctttctggtgaagtgatt

SEQ ID NO: 398297 - DNA, 539 bp, Cannabis indica
ttgtaactgatttatcttctttaatctttaatctttgtttttgctataagttgtaagggtatgtctgtcattttgaaaccctgtgagtagtgttataaaactttagggtatataagtgaatctgtaacaacgaattccacccagattctcttatgtacccaaggatagttgatgatgctatgaggcttgaatgaccccaagggtcagtaccatttgtttatccctagcaagttcagtttgagcttagctagggtcaacaccttggtcttcatgtttgtgacacctccttgtgtcaccttgtttttctcccttgcatagatcgagtcacaaaatccttccatttggttttgtgactttctaaacgcaagtttaacacatgttgtcctctttaagtaccttaaaatccattttatagtcaaccaatgtatttttccagtcattaccatatatttgctaacaacaactatagtatatattgtatctagtatggtactcatcatgaaatacatctttgaaccaatcccattagagttgaggat

SEQ ID NO: 398298 - DNA, 502 bp, Cannabis indica
cttctttagtatcttaaagcatttcgcaagtctgaggtatgatccctactttaattaattttactaacatatcatcgacgtaaacctccatattttcccctgtttggtttgcgaacattttgtttaccaatcattgatacgttgtgttatatccaaaattcggttggaggacacgtgtcaagataaagggaatgtgaatcgatgcaatatctttttatggaataaatcattaattacgtaagtatcatagtatatttgtgttgacctcgcttttggccaacgacagtgagtcttgattgtaagcgacaagtagtatagtatatatgtaatataacaaaataaataaagacacaagagttttatagaggttcgaccctaagcagttcggtaatagcctatgttgggcattgtgccctaaataaaactctatttcaatgtaatcttttctattcatatcaataaagaaatagatttaatttcattacttgtttaatgtgttatt

SEQ ID NO: 398299 - DNA, 887 bp, Cannabis indica
ccatttgagatatagtccattgacgaaccgatgccactactataagagtacgaatagtagtcattttggaacaggagcaaaagtctcctcaaagtccatatactgttgtgagaaacccttagccactaattgagccttgtactgttcaatagacccatgagacttggtcttgattttataaacccaatgagaaccaatagcatgtttaccaagaagcaaaagtgctaaatctcaagtacgagtcttttgcaaagcaaagagttcctcattcatagcacgctgccaaaggggatcaataattgcctctttgtaggacaaaggctcagaatgacaatgagtagatgctaaaaaacaaagtaaaagaagcatgataagaagagtatgtaaaatttggttggcgagtagacttacaaatgcgctgaggatagtgaggaggagggtccacaatctcaggagggtctggaacaactgcaggaggagggggaggagcgaattcaagttgcaaagtaccagtatctaatggaggagtaatttcaggttacaaagtaccagtatctaattcttgagacctttcaacacaatgcatgcgagagtatgaagaagggaaggaactgtaggagtagtggatgattcagactcagataatgggtcaatgtgaataagatatgattttgtcaaattacgaggagtgccaggaatagtaaagaaaggtatatgcttaaaaaaacaacatgaagagatacatacaatttttgagaaactagatcacaacaatgatagcccttttttttcttatccataaccaagaaacacacaaagagtagagtgtgatgacaattttttacgctctacactaggacgaagcacaaaacaagtaaaaccaaaga

SEQ ID NO: 398300 - DNA, 522 bp, Cannabis indica
cccctaataagttcatactatttcataattaattgtaatattttttattctcctaaactacatttttttaaaaaaaaatatttatcttttttgtcataaactattctttttttttttttaccgatttaaataatgatgcaaataattagaagatagtccgatcttattaaaaagtgacactttgtattcatggatcatgttcgtgtcaacacatgtattagaagtatatactgaacacaacccgtttaatattgtgtacaaaaaataaaatttaaagacgacccatgtaacctgtttataaatggtagaatgagatatgatgatgacaataatgactttgaataatataatgacaactataagtgagatacagtgatgacaacgattttcatttaatgtaatcccgactaattttgagatcatatatatggtcattttctttagggattttttcataaatgtacaacaaaaataacataattacaaaaaaatgtgcaaaagaaattattttaaaaacttata

SEQ ID NO: 398301 - DNA, 840 bp, Cannabis indica
gttaaaggttttatttacagttgtatgacctaacttttatctttacagttttacaaattaaaattttcaaacaaaaaatacaattttaaagtttaaaattacaaaaatacaacttttttagcaataaaaaaaaatgaagtgcaagaaaacgattaaaaaacaacgagaaatcaacctcacaacaactataaatcaactataaaataacaaacaataataagaaaataaatctcatattaactttaaatcaactataaaaaaccaaaaaagaatatggaacaatttattatttttctaaaatgtatttttataaataaaaaagttcaaatcgtaaaaataaaatttttcagtataacgtattttgtattttcttaaaaaacaatttagtgtattatgtgaaaaatacttaaaacaaatattcaatcaatttggaaatgacaatgacagagacaagaggtactatggcccctaatttttttaaaattatgtatatgtgaaaaattattaaaagaattaaaataaataacttttttatacttgaaaatataaaagaatctgccggtattagggtatattaaattggaaaataaaaaaaatataaaactaatagcaatataggcgggcttaggttaataccggcagacagcctaccgttattagtgggacgataataagtgcaggaaaattcatgcgtggtgcatttaaatctttttagcggcgaaccaataccggcgggtgtccgccgctaatactttttgttgcccctgattttacccaatatacgcggaccaaccagataaggacacgtggatcaagcaatttacaatatctgctaagtct

SEQ ID NO: 398302 - DNA, 682 bp, Cannabis indica
aaagctagagtttggttatttcgctcagtaatatccataaaattttgtccaatgcctattgattatctgctctctaataggctcaaatacagaaggaatggtcctaggttgtctaaggtcaccaatgtctatgcccctatcttctatgaatggtctatccttgagttgtagaaaatgctcttgtgcttcgacattcacaaatctagccctatcaacatttgaacggcccgatgacctaggtgggttagatgaagaagctccccctctttcattcactcttgctcttttaggacccatggtcactccaaatttctaacactcaaaaattcaagaaaattttggcagcacttccccttaaaattccactttctgggtgaaaacccaatcacaaatatcacaattttaattcacaaacaactctccacaatgatgcaatgaacaatatcccaaaaatcatactaaattcacaagattctccaaaaatcaaaaattatctattaataattgcataaataatctaagaaattgttacctcaatgaaaatctccttcactctacctccattgaagaaagcttaaagttcttgaggtatcagatgatgaatagtgaaatttttgaatttaggtgaggtttagggatttggatatggtttttgagaggaaaagagtgtttgatgagagga

SEQ ID NO: 398303 - DNA, 750 bp, Cannabis indica
gtagggtggacgagaaacaccatgcttgggaccaaactagcagcaaggaaacggtttcgcatacctcctagaagactccagagagagaaaagctttttaattaattattgtttcacctttaaacatatatttttctttttttttgttgtgtaagttaattatttagaatcttttgtaaattcttttaaaaaaaaattgaataatttaagatacaaaataaagtttaaatattttattgtacgtgtgattaattttagtaataaattttttaaattttatttttaatattttaaattattcgaaattttctaaaaatttatcaaaaaaaaatcctaaaagctataacgtacaataatcttaaaagaagtaacttcaatacttttctggatacagaatcagataaaaaatgtaccgaaaggagccttttaagaggggtgtgtagtatggatttttgcaaaatattttcttttttcaaaataatctcgaagatctctacagagtcgtaaattttggagttttttcaaaaatatttttttatattttatttacaattttacgacctaaagtttttaattacaaaaagacgatttaaaagttttaaaattacaaaaatacaatttttttagccaaaaaaaaatacaactaaaaaacaacaaaaaatcaacgttacaacaactataaataaactataaacaaccaaaaacaacgagaaaaccaaccccgtgacaattataaatcaactataaataa

SEQ ID NO: 398304 - DNA, 514 bp, Cannabis indica
tattaaaacttaaatcaaatatagtttattgtaaatttcatttatatacacataaaatatcaatcaatatatatacctttaacgtttttagttttttttttaagaatataataattataataactataacatatgtgataagaaaaaatagactaaaatggtaattattctaatataaaattagttttttatccttgtgcgagatatttttataatttgacatatttataaaagaaggtataaattaattttgtggagcgaaaatctaagtttttagttttgaaacttggtcattaagaaactataaatttaattaccattttaaatatagaaacttggtcgttgtctcaactatatatataatagttaaaaaagtataaatctataaattgatattttactattattttcattttttattccataaaaatataatttttttaaaaaagttagaaaataaaaaataaatttcaaaaaaaatattaaaacttaaatcaaatataattaattgtaa

SEQ ID NO: 398305 - DNA, 597 bp, Cannabis indica
cagatataggaaaatgagagaaagaggtgtaagaaaaaggagggaaagaaaaagagaaagggtttaaaagttacctgaagcatgaggttgtcgcagatatcggcgatcttggcgtaggatttggattccaacgcctctgatagagtggagaagtccatggccgcttgctttagcttccccacggatactactgacacccacagctcgcttattgtttattctctcaaatagaaggacacctaagttgcaatggcaaatatcatgttattttttttattttcttactaatccatataagaaagagtgtttacatttggtttatggtgttttatctgaatataaatttggtattttatatttttaataatattttggtattttatattttaaaattatacatatttagtactttaaatttaaattttttgataaaattttatcactataatgtctaaaattttatgaattctgaattcaagtttaattatatgattacatataacttagaactatttagttaaattaattaaattttactttaagatactaaatatgtacaatttagaaatataatgtactaattaaatattattgaaa

SEQ ID NO: 398306 - DNA, 695 bp, Cannabis indica
gtttagccatatttttacaaaattaattttttaaagctgaagttaaaatattaaaaatgttgttttttattttataacatatttttttttctcgaacattgttttcttacattttctctcacataacttttttaatcatcataagccctagccctaagggtcggggtcaggactgggtctggggccaaggctgagtccaggtaagagtttcgaggtaggggccagatccaaggttcaagttaaggccagggccggagttcaagtccgagatcgggtcgtgtctgggtctaaggtctgggtccaggtccaaggtcagagtccagggtcttatgtctagaccttagttaggtgtgggaccattatcagggtcgacatccgaagtctgtgtcagggttggggtttggattcatgtcgaggcgtagtgttatatctagttttcagaataataataaatgattaggtggcattgcacaacacatgtcgtaatttgtctgttcaaagtaaagacaaataagacaggttgaaaaaccgaaatcatgactagtagagtaatctcatccaacaaggatcatagtgtttataaattgagctacttcaacgatgctgagaaggagtaattcaacattgctgagaagagatactttagcattgctgaatgcattcattttgttaattccatttttggcatatttaat

SEQ ID NO: 398307 - DNA, 1543 bp, Cannabis indica
tattgatgtgtgtatcactgagtagtgaaaatggtggaatggatggaggttaacgggattatatggagagccaaaccgaagcttgcgtagaagaacttgggatttgttgagaattcttcgtgacaaatcaagactaccatggtgtgttattggtgacctcaataatgtgacttctcaagatgataaaaaaggaggcaatccttatccaaactggttgattgatggttttaatgaagctttgggggagtgtgggctttgcgacatggatctctttggttacccgtatacttgggaaaggcatcgtggtacggatgattgggtagaagtgcgtattgatagagcggtggttaatcaatcttggcttgacttgtttcccacggccaagctgtttaatttggaagcttctagttttgatcattgtcctcttcaccttgtgcctcataatgtaacaactgttgctacaaatcgggtgttcaggtttgagaattcttggcttaaggaacctctttgttttaagattattgaagaaagttggtctctttatcccaatcttgatgtcatgcgtaaagttaaaaactgtggtgaagtgcttctagtgtggggaaaagattatactggtaatttttctcaccgtattaaggaatgcaagcagaatattcgaagatggaagaagggtcgggatgtggtctcggtggccaactataagcaggcggttactaagcttaatgacattcttcttcagaaagaaattttttggaaacaaaggagcaaacaactttggctccgggagggagacagtaactcgaagtacttccacgctactgctacggcaaggaggcgcataaactcaattcagaaaatgaagaacgaggatggtgtgtggtttgactggcagaatgggcttgattctcttgtaagtgattatttttcacaacttttttcatcttctgatgtgaattttgctgagattctacattgtactcctgtcacggttacacctgagcacaatgaaaggttagttgaaccgattgttgatgatgaagtcagacgagccctttttcagatgcacccagataaatctccgaggccagatggcatgacaccgggcttctatcaaaaatgttggactacggttggtaatgatgttaccaagtttgtgaaggacttttttcttgaaggttctttccctagtgaggtaaatcatactaatattgtccttattccgaaaaagaagcaacctgtgatgatgactgatgttcggccaatctccttgtgtaatgttctgtataaaattatttccaaggtgcttgcgaacagattaaaaagtgttctgcctttggtgatctctgatacacagagtgcatttcttcctggtcgtttgatatctgataatatcatggtctcattcgaaattatgcactatctcaaacggaagagaaggggaaaagatgggtacatggctattaaacttgacatgagtaaagcttatgatcgagttgaatggagctttattgaaaatttgatgcttcatatggggtttggt

SEQ ID NO: 398308 - DNA, 637 bp, Cannabis indica
cacagttgaactgttctgagtgtgtgaaatatatagtttattaccattccaatggtgagatgttccttaccaccatagtcctgcttgtgtagcatgttgttctcatcaacagttacatgattgcttgccccactgtccacgaaccatgcatcattgtcaaccacttttggtgttgttgtgtaagctgttggaggttgattggatttctggcttgttttcccaccaagcttcagatctgaacccatataggcttcatcatatctgttatagcagattacagcagagtgaccatagcgcccccacacttgacaagttggcttgggtccatttgttcgcccaccacgacctcttccactgttgttgtttcctccacgattatagttgcctcgactgttggaaattattttactaggatcttagatctactcacaagtatgttgattaacaccctaaatatgaacttttaaaacgattataaattaaacacatataaagtatgagaaaccttacattgggtgcagtggaataatatgtctccttccgttcagatctcgaacccttgtatcctttctgtcgcagagtattatcaagatctgaacatggatctctttctctcctttctttagtgttgaatctc

SEQ ID NO: 398309 - DNA, 993 bp, Cannabis indica
agagagagagaggtttccttgagggaaaaaaccaaaaaaatttcctttaattcaatcaaaactatcctatgttgtaaataataaaaatgtgggaaaattaccaaaatgcccaaggtcataattcacatacacaaactttcaagggcactcatgtcattaacttaacataactatccaatataaattcagattattcatacataataaaatgtcaatatttcatcccagaattgtattttggccccgaacccaattcggcccgaaatactcgattgtgactatatcgcgctaacttgtcaaaacacacctgaaaaaggacaaaacatgtatactatataataatatagtccataagcacatcataatataaatttcccagttttatccttctcggatcaaaattactaaaatacccctagctcgccaacgaggtcttaacatgtcatatatcatatcaattcaaatataataaattatataataatacacaattaactagttggggtttgctaatccgttttcttaaccttagggtattacaatatgaattgagattgttttatctattttatgaggagatcaaaatgtagggttatgaatttaaagtcatgacatcataataaacaccaaatcaaaaactcctcactaagattagaaaaacaattaggggcaaagcaaaaatctcaaatcaatcttcaattaaactgtcaaaactctctgtagctggcgtgttaaaaatagtgtcgtttcggtcaaaaggaaaaagaaatggtgtcgtttttctacattagtacagaacgacaatacccgagttcagacaagtctctaaactgagtagagtgcgtgaatgaccgagtcaggaagagcacaaaaaagaaaccacaaaggaaaaagaggacccaattagattggaagcaggcgccaatttcaatcctggataaaggttcttcctttctgtctttctctcaactcaaaagcttgtggctctcaaag

SEQ ID NO: 398310 - DNA, 1469 bp, Cannabis indica
tagcagaacgtaaaaacaaacattttcctgaaattgcacgtgccctcctgtttcaaatgaaagtttctaaacctttttgggtcgatacagtttccacatcatgctttcttattaatcgcatgccatcctctgtacttaatggtgaaattccatttaaaattctttttcctcgtaagtcattgtttctagttgctcttcgggtatttggcagtgtttgttttgcttgcgatgtttgtctacatgtcaccaaattagaccctaaggcattaaagtgtgtcttttttagttattctcatcttcagaaagggtatgagtgttattgtcctgatctcaacaaatatcttatttctattaatattacttttgtggcaaatacactttatttttcattttcaactacttctactcgtcaggggaaggatgattatttgttggtatattctatcatatcctctgtgcctaatacatgttctgacgagtttctagttccttcacctgcctcggtcatacctcccacaacgcttacacctccaccacctataccactccctcggcctcctatagtgtacactaagcgtccccatcctccacctcttgtttcatgtcctacacctgcatattcgtcatcagatccagaactcaaagatgatcttcctattgcactacgtaaatgtatatacttttcctattatttttttttgtttcttataatcatctctgctcttcttcttgctcttatattgtttttcttgattctatcactaatcctaaaactgttcgtgatgcaatgtctcatcgaacttggtggttgaactctactgggtgacgatactgtaggggaggtcctgcggaaaaatagctcaacgccaggatgatgaaaaggttaacacctctcattcttattactttcttttttagctatgaaaaagaaaaaaaatgaaaaatgcaagggtcgtcttattcaaaaccccaattatgaaatcccttctctcccacttcacacatcggaacgcaccgttggttagcttcctgcaatgatacaagagaggaatgctttagttgccaatggtacttggaacttggttaatttactttcaggaaaacggaccatagggtgcaaatgggtgtttaaggttaaattcaatcaagatggaacaattgctcacttaaaagcctatcttgttgccaagggttatgctcaaacctatggcgtggattattgtaatactttttctcctgttgctaaactcacatttgttcaactgttcatttccatggcagctactcatcattggtttttgcatcaacttgacattaaaaatgctttgcttcatggagatcttgaggaagaagtgtatatgttgatgacatcgttattactggcaatgatactcaaggcatctcattccttaagtctttcattcatacccaatttcacatgaaggatttaggggagctcaaggatttct

SEQ ID NO: 398311 - DNA, 451 bp, Cannabis indica
caaaagcattgggatattgtggggaaagatgtcacgggtatggttcaacatttcttcagtgttggtgagttccccgatcacttaattcatactaatattgtcttaattcctaagaagactcaccccgaaagcatgagtgatttgcggcctatagccttatgtaatgtcctttataagattgcgtcgaaagttttggctaatagactcaagggttgtctccctagtgttatttctgagacttagagtgctttcttacctgggcgccttattactgataacattttggtttcgtatgagataatgcattatcttaaacggaagcaaaaaggtaagcaaggtttcatggctttgaagctggatatgagtaaggcgtatgataggattgtaaagcccgcttagtttaatttggaaattagcagttaatcatgattattatgaaaattatttatag

SEQ ID NO: 398312 - DNA, 806 bp, Cannabis indica
taaaagattatattcacctaatctctaagatacctacgacattggtcatgtatttgctattttgtatctgttaggaatttgtgcccttaggaggctaacacaaaaagacaagtgatccatttctagggattctcccgaaaaacactataaataccccaaagacagaatggaaaaggggtcgatcgattaattaaagaatcgaagggagtaaagaagagagaaagattcaccaagaatattctctgtataaatactctcataaataacaaagactcgtggactaaggctcattaatgcctgaaccatgtaaaaatcagctgcattaaagcttacacagctcttctcattctaattttctcggtcaacattttggtgctttgattgagagttgaaggaagagtcgtcacaaagataacagtcaaaacaaaagagtcagagtaacaatggtagaaactcgtaacaaaacacgtcagccccgtcctcctcaagatgctcaaaacccagaaggcaaagaagtggcctcacgagtaaatgtggactctgaggagcaagatggggcgaacgatgaagaatacgaggaaaacttcaaagggtacgacacctatgacaaaggcagctatacgaaactaatggtcttgaggcaaaaggcggctgatcatgaagccgaacttgcagctcaaaaggaagagaataaaaggatgcaagaggtgatggttgccatgcaaaaagccatggaaacagcaaggatacatatacatcccaaggccatcctagcgggacccgaggaaacaccggaagaatcctca

SEQ ID NO: 398313 - DNA, 1443 bp, Cannabis indica
aattcttgtagatgtggtagatgatgagtgaggaactagatggggttttttgggtataggtgctggtggcagtagttcagtagaaccagattgattttctggtttagaaatcgctggtgtgggggttctgtttgaagtattttctggttctgtagtagatttagttgttgaatgagtgccaggaacaggtgaattctgtgatattgttgctggtatgtaggcagttggtgtagagtttaagatgcctggagcaacaatagttgttgggctatttgggcttcttgatgcagcatgattatgtgcaccagagtttggtgctggtgtagaaccaggtacaatgtgaggcatgttcatagattggtgaacacgatttagctgttgtactggtttaattgtagggagtacaatattaggaaacaatttgttgatctcatgaggagatgttgtgaaagacaatggaaaaattgtttcatagaaaacaacatcccgtgagatgtaaattttctttgtttcaatatcaagaagtatgtaggctttcatgccttggggataaccaataaaaacagaagctctacttcttgatgtaaatttatgtcgtttagaggtaagggtggagccataggcaagacacccaaaacttcttaaatggtcatatttgggtttagtaccatgtagtacttgatatgatgtcatacctttgaataattttgattctatttatgagataagtagtcgtttgaactaggtaaggccaataaactaatggtaaattggattggaaacctagagcacgagcaacatttaatatgtgttgatgcttcctttcaacaactgaattttgttgtggtctttccatgcatgagtggtagttgattatgcctttagaagcaaagaaagattgtaaattcagttccttggcattgtccgatcggatggccttaatattttttgaaaactcggtgcaaaccatgttgaaaaaagtgggaattatatgttggacatcggatttgttcttgagcaagtaaacctagatttgtcatcaactatagtaagaaagtacttgtaaccttccacagtaattatgtgaaagggaccccaaatatccatatgaagtaaatcaaacacattcttggaaaaattattattggaaatgaacggtaaacgtttttgtttagccaaatgacaaatgtggcaatgtaaaatcaaattcttatgtgaaatcttattttctttattgaagaaatttgaaatacacatagaggggtgtccaaagcaattgtgccattggtttacactggttttattgaaagaaagaaagggaacagtagctgctgcagtgggaagattgtcttgttgaagcaagtacaatttgccatatttttcagctgtcccaatcaccacattcagagtaggatcttggattacacaagaattatgatgaaa

SEQ ID NO: 398314 - DNA, 844 bp, Cannabis indica
actgtttgggatggcatcaattcgagcttcctttgagccgactaagaatttcatcaatgcacggatgaaacctcatcaaagcgtgcgtgatcacctactccagatgactagttacttccaagaagctgagaatcatggagctattatagatcaaacaactcaagtaagtttgatcttcaatagtttgactccagcttttctaccctttacatcaaattatgtcataaaaatttggaaattgactttcacgagttgatcaacaaccttcaaccatttgaaaatttgattggaggaccacagaaaagaggaactaaagctcctaattcaggcactactaatggtacggccaaggctgaggcaaacatagcctctgcttcgaaacccaataacaagaagaattggaagaataggaagaagcctgttaaagctgtgaaaacagttaaaaagaagaaggccgctaatcccgagggaaaggcaaaaggaaaatgcttctattgcaatgaaaagggccactagaaaccccaatgccctaagtttctagcaaagaaacaaggtatttctatctatgctatacactcatttgttttagagaattattatccccttgggttattaattctggatctactaactatgtttgttttcttcttattttagctccggctacttaaacttggattgttatcctagcgagttgagtcggatggttggagagaggggtggagattctccaagattgaagatgaagcttggaatcttcttttaatttttgaattaattgttttaatttatgaacattttaatttaaattattggtttgcgattttatttcctatttcatatt

SEQ ID NO: 398315 - DNA, 685 bp, Cannabis indica
tatttacaacaagaattgcccaaagattttttgataccagttccttttgtgttgattaggaaggtaatcaacatgaaaaccctataaacattaaaagaattaatattagatgtaattaatgtacaattggagaaagagagaaagtataagtaagaataagaatacatacatcagtttcaagttgtttgttcacaatggcccagtcttgttcatattcatcttctgcttcttcatcggatgaatctgaaactggtaggctagctttaagttccctaataataataagtagaacaagaatattattagatcaaattaatattatacataaaaagagaaagagagaaaagcaattaaatataagaaacaacaacaacaataataataattataccttgctctcgttatcctttcatcttcaaaaataataaaatcgttttcatcttcatcttgagagtcataatcatcatcatctaacaaacatttaccattcctaatttctttaaccacctctgccatctctgccattacattatcagattagacaaacaaattaagtaaacctaaactaatacttattaggatagatgctattgattattcccacaaattaaagcattacaatatatttttcgatctaaactcaaaacaaaaacaatcagaacatgcacctcaatcaaactaaaat

SEQ ID NO: 398316 - DNA, 676 bp, Cannabis indica
gaagcataaagacgtgcaaagccgaaccggaaaggttgcaaccctgagccgttttatctcccggtctactgacaagtgcatccccttcttcaacatattgaagaagtgccaaaagttcgaatggtcggacgagtgcgaggaggcattcaaaaagctgaaagaacatatggccaagcctctgatcctaccgaaacccgttatcagagaggacctattcctaaatctggccgtctccgagaacgcggtcagcctgccctagtccgggaagaagagaaaacttagcatcccgtgtactacgtcagcaagcgcatgataggagcagagacgcggtaccccatcatcgaaaaactggttttctgcctcctaatggcctcaagaaaattaaggccatatttccaagcacacccgatcaaggtactgaccaaccacccactccggcaagtcctccaaaagccagaagcatccggaaggctcctcaaatgggcaatggagttaagtcagttcgacttacactacgttccccgcatctccataaaaggccaagccttggcagacttcatcaacgaatgcaatgaagccgaggcaactgcgaatgcgccgatgccatcgatccccacatggaaagtgtttgtagacggagcctccaaatgaaaatggatccggagcgggggtgggc

SEQ ID NO: 398317 - DNA, 523 bp, Cannabis indica
cgatatcatttatttttttaatactatttgcaacatggtaattgaataggaagaagatgagttgggtaattgcgttagaaagtaaaagagaggatagtaaatgagcataattgtcctaattaaattcttattgtaccttcttatattttttactgttaattagttgttaatttattttttttaacagttatttaatcaaataaaaataaaagattggctgactctaattggtgaattagtccttctaggacaatacttggtcttaccaactttattactaaaaaagatagggattatttctacaaaaacataaaacaacaaaaaaaattacaaaagtacggtttcgaagaattttaaacattttttacgatatttttgattttatttacagaaaatacggtctttttatgttgtaatcttgttaatttgttgttgattttatgttatctgtatattattattttttttttgttatgttcatgttacttttatgtagttttcttgttgattttatgttgttttc

SEQ ID NO: 398318 - DNA, 670 bp, Cannabis indica
ttacattcaaatttaattatatcaaaactttccaaactcgtcttcattaaaactctgaatttgaaaaacaaaaaagattaaattttaagtcataatattgatcattgtttaaactagaaaatcagttgagaaattacaaaaaatatttttcataatccgaatttttgacttatatataattatatatatttggagataaaaaaaaatataacttcaaattttgggaaaacaaaccaaatcaagttttaattaatatataaatatatataattactaaaagatattattagtctttatattatattcttcagtatcatattactaagtgtaattacgtatcgagtctcatataacaacttaagaaaataacttttagagaatatcgttaaccaattgtgggtgctacctatagaaagtgatgtgtactactgatatatatggatatttgtagcgaaacccccttaacatttataattagggtaaataccattttggaccttgtgttttgtaaaagttaccaattggactatcttttttgttaaatgacaaaatagaccatgtattttctaaaatggtacaaatagaccctaaattgattttttttttttatcaaaataaaatttagttataatccaatttaaaagtgatatgacaaaattatttacatttt

SEQ ID NO: 398319 - DNA, 1081 bp, Cannabis indica
ttctttgacttgttcgttaaaagctgaccaataggatcgaccccaatacttatatcttgggaactcggtagttcaattaagtgggagagcgttaatcatagatatagaatctatcttctacaactacatagaagtgaaattagaccttggctaaacgcgtttaaataattatggcctcgtttctgtaattatattggcatcccaaaatatcatttacaagtagctaagggcttgattagtttgagatttgaaaacaattttatgtttttgaaaacttaaatacttgattggtttggtgttttcaaaaactaaatttgaatatgattttgagttttaagcttaaaaatgaaaacaacaattttatgttttctatgttttcaaatcattaaatctaaaaactcttcaaatactctcttctttttttattttgagattcccaactaatcacaaatccaactttttaaaactcaaaaacacaaaattatactacaactaatcacattttttagaaacaatttttcacataaaaaatttaaatttttgtttccaaaacactcttttagaaaacataatttttaaatctcataccaatcaagccataagtgttttaaggataaaatacattgacgggtacaacggtaaaattgtccctactcaatgtaaattgtctatagaggatcattgactatttagattgtaccaatgaataatcacagcgtatctatatttagtatatagagcgttctatgtaatgatcaagagtgcaatccaaatctatagtggagttaagaggaattaatgagttagaaaatttacttggtaaattttggatctacttattaggagcttggttacataggcccatggtccccgcactaactgagataatattattttgtagtctcaattaattaatttatttaatcaaattaagaattctaaaaaaagaacaaaatttaattatgaattttactaaggaatgacataattgagaagaaaagaaaaataacgatttatttgttaattagtacactttatgagtttaattaataaatatatttaagttgtattttatttgata

SEQ ID NO: 398320 - DNA, 1055 bp, Cannabis indica
gtcggctacagatcaactgtccgatgtaggaattgaccttgtcacacctaggggcaacacctgcacgttccagtcaagtttggattcaaggcatccaataacgaagccgagtatgaagctttgatcgctagcctaaagctagcccgagagatgaaagccgaacacatcgaaatctgcagtgattcatagctggtggtgaatcacgtatctggagaatacgaggcccgtggagaaaagatgacagcatatctgagcaaaatacatgacctgctcacataattcaaaagctatggtctcagacaaattccaagggaagaaaacaagactgcagatgcgttagctcaactggcaagcagtaatgtaagtgataaagcgaacttggttcctatccagttcctcgaagagcctagcattacttgcacgaaagagatcgaaatgattgatacttccccaaactagatgacgccaatagcagcctacctcaacactggggaactcctagataatcgaaatgaagctcgaaagatgagaaggaaggctgcacaatatatcatagtagagggaattatgtacagacgagggttctccatgccgttgctcagatgtgttactcaagaagaagctctacgacttttatctgaagtgcacgatggattttgtggaaataacgctgtcgggcagagtttatctaataaagttataaggcaaggttatttctggccgacaatgattgaagattcaaaggcctatgttaaaaaatgtgacaaatgccagagattttcaaagatacctcgagctccgcccaacaaattaactcagatggaaagtccgtggccttttgccatttggggaattgacctgatcggacaattacccgaaggcaaatgaggagtgcagtatgcagtggttgtagttgattacttcactaagtggacggaagccgaaccactggcaaccattacatataaaaaagttcaagactttgttgtgaagaacataatctgccggttcggattgccgtcaaaatagtttcggacaatggcaaacagtttgac

SEQ ID NO: 398321 - DNA, 911 bp, Cannabis indica
gttaagccattatatccacgtgtcattttctattggtatatttgaacttattttttaaataataaaaaatttataacttggaccaatcagggattgccacgtggcaatttatttaaccaggtacctacaaaaattctaaaattataatttaagtattattaccgcaaaaaattaaccttaagtatttattgcaactggaagttaaacttaggtatttatgccgcaaattactcttttaaaaattaataactttgtaatatatagtgcggtgcaatttaaactgtaattattaaatttaaaacggcaaattgtactgtaccgtgagatttggtagacatgcaaactacaatcgcacaataaataatttcaaacttgagtttttttttttttttttttttgtcagtgtggataatttgatgaacacccactatttgtactaataacaatgaattgttgggattaaatttgatttaagagggtaattaattaattaagaaaaaagaggaatattaatgtattgagatgggtcaccacgtgtgagatagtcaagtctcactcaatggccttatccaaatgcaatgctttttatttattcattagtcaaaaacaccattaccactatgtcaatatgatgactaggatcaccctcatcttctactatacacaattaatcattattattattcctttatttatttatttcatatatatatttttttcccattccccaagatgataaaacttataaaagaaatgtaatgatccaattaaataaataatttttatttaccaatagttaaaatgatataatataaaaagaatattttattttagtttattaaatactaattaggatgcacttattttatttatttattttttttttgtacaagatgcacttatttgatatt

SEQ ID NO: 398322 - DNA, 514 bp, Cannabis indica
attttttgttatttgtatatattctttacgttgtttttcagttactttcatgtgattttcttgtattttataaaataccgtaaaaatatacaaaaaaaactttcaatgtaaaagtgtaaatattttactaaaaataatagtttattatgcaatttttccaatttttttatgtggcttatttagatcatttcagtgtaaattttgtgttaaatttgacttagaaaataagttaagtttatatttggcccaaattttataattgtgttctgtattatgggtaaaatatgttgagttttgtgtcctaaataaaactcatttcaatataatcagatttatgaattattaaagatcagaaactacattttatgttgcatgtttacatgatttatttcatgattatttaatgtataaattctattaagtccataacatatataaatatgtatatatttgttcatgattatagtgtcgtcagcacagtggaatataaacatgaatatatgctcaaaagttt

SEQ ID NO: 398323 - DNA, 647 bp, Cannabis indica
gggcaacagtagtaaaatgtaatgccttcattaccttcatggttaagggagtgactgagaaccaaaaaaaactcttggtctggtgtgagagtcacgaataccaatatgaattgaagagtctttttttttaatttgattaaaaaaataaataatattaattaagtattgacaacttaattaatgacaagtactagtattaagctgaccaatagtcagcgttttagtgaaataaatagtttttttttctgaatgtgattaataagtaattaagtattattaattttattttttttaaaaaaaataaatagtttcgggttacgggttaaacccgacaaaaaaaataggcttatccacacccgaaccagaaacccgtttggaggctttttcgggttgataatcgcatctcttattgggatcccttcgcgaactatccctgtacaggggaggaggcttccggtagtgtgtatttttccttgtggcgaaatacactcgctcatgcgtgtccgtgagctctgtgtattgagtatattgaggggtgtactccctttgttgtcgcttatcctccgtcctgttgctaccctttgaggacctcttgcttcgggagctttgagaaggtcctgtcaggcttgcggtaggagcagagtgag

SEQ ID NO: 398324 - DNA, 1453 bp, Cannabis indica
gaccaaacctttttgacgagagagggtcgaatcgttataacatacttgatcaaacctttttaacgaagaagggatcaaacaactataattttttatttaaaacctatccgaacggaaaaggaaaatcaaaagttataacttgcatataaaactaaatacgaacggttctcgcgagctagaaaagtacaaaacgaggcatcacgacgccttgataaaagtacttgaacctagaaaagggatagataatataactatccatacgagcaaattaaaaatatacaaagtgataaaaccattaaagtatatttaagtttgcttaagacagattgtaactgctttagcgaggcggaattaacaactattcggaaatcaaaagtttggtagatcaccaactacttaaacaggaagagtatgagcaatggggtactgtacatttcatcaaaatatagttgtttacattgtgaataaaaatgcaagcaaacacaattgtattaagttcgaatgaaaatagtacaaggcatttaagataagaaaaaacctaaaacgggttataaacttatctttacaaaaatgccactaggggcaaaccataaagtcatcttcctaaacaaaggatgcgaaaggagtcgataaactcgagaaagaccgtcttcatatagcatgagaaagaccgtctgcacgtagctcggagaaagaccgactacacatagcttgagaaagaccggctacatgtagagagccttaatatctgcacaaacctcattctcctcatcatcagaagatcccatttcctgtagccgagactctattcccagcctcagggaattcctcgatcccataaagaggttggcgcaaaggtcttctggcacaggtttgggtcttgggttggcaggattacctgatagaaacaacgccaactttcttcctggattcaggtgaaaccacgttaacttcactctagaattctttatcagcctgaggaggacctttaagatcgctcacaagatctatgccctcaaggatcacttgtgaggatctcccatggcgggttacggggttcccctggtttggattggtccgaagctcctcagccttggaatccatcgtttccggatccaattgaggcttgaagtccttgggaaaaaatggaaaatggttgatgcatcctggtattatgagtttgggaggatgaacttctgaactcagaagggacattctagccggaaagagatgatccattctgaaaatggatctcactaaaaagccagaggtttgtgaaaaatgacaagcttgagccgtccttttatacacaaagtccagtgacaagaaagctaaggattgaagaaatccaacagttgggagtagggaagaatttttgggttttatgccctaaataaaactcattacaatctgattagttatcaatttagaagtgaattatgattacatgtat

SEQ ID NO: 398325 - DNA, 529 bp, Cannabis indica
tactcaacctcattaaaaaaagtttgaaaattatattttatataataaataatatctttttttttaataaaacatattccgattataatatggatcaattggaataatcatattcctaatgaaattagaattaatattattctatcatctgccctatatatatataggtagggatacactaattaagaacgaatatttaagaaacctatattacgagagataacacacacgtagtaaatatggataatcaaccattctctcaagtttttatttacgcaaaatttaatagtggttttgaagaaaataatccatcaccatcaccattaatgaaggtggagttgaaagtgatccaaatgtactattcagataccgatcacagcgacaccttcatctcatacaactccactcaccgattccaacaccaaattgatcacctattccaagagacctcaccttccatcaacacactcattacctccatgttttcaggcgaactgatccccttccccttggttaacatgtactggag

SEQ ID NO: 398326 - DNA, 559 bp, Cannabis indica
taaattcttgcacaattttcacatattcatatacttaaatatttaaattataattattcaaaaagaaaaatggcaaagtcatttccacttgtagcaatttttgtttttgcaatggctgtgaatgtttgctatgcagttgattacatagttggcgattcagctggatggaaccctggtgttgattacaatgcttgggccgcaagcaagactttcacagttcgcgactcgctcggtaaataaaatgatatgtatacacataaattacacacaaatatatgttatggattaatttttattttgtatatttttgtgttgtgtagtgttcaggtatacaaagggagctcataatgtggttcaagtgaatcaaataagtgactatgcaaattgctattcaggacagagtgttccattgacaagtggaaatgatgtaatcccactaagaagttctggagccaaatactttattagcagtgtaaaggatgactgtgccaagggtcaaaaactcactattaatgttaaatgagtaatttaattacattataacaatcaatgtaatttc

SEQ ID NO: 398327 - DNA, 506 bp, Cannabis indica
catttttggagcagaaaaaaataactgtcgcttttggttttttgagaggatcgaattttgtattttgaccataacttttctattgggtgtctattttagacgttctatatacccttttaaatcttgcggcgagctctacaatatggtatatagtttagacctaaagtataagttttactttagggtgtttatactacgaagtttggtagaaatacttatattgttttatgcaagtataggtagtgtttggaataaatacgtatcggtttaccattgttgcaacgtagggataagattattaggaattttctctacagccgacatgcatgaatctagattaaaggtaagaagaatatatatgtaccacatggcatgccagatacgattaagatcgtttatgagttagttgattatgaaagcagcgagacagtcattatgttagaaatttattttaccaggatcttagatctactcacaagtatatttattaacaccctaaatatgaa

SEQ ID NO: 398328 - DNA, 507 bp, Cannabis indica
gttaattgatttttgaaaattctcaaggactaagcaagagaatcgaaggtcctaattttattgggaatgcttgaagaacaaaaaaaaattacctaagaatgtgaaaattgatgccgatctggtagtttcaagagaaacgggcttagttcacttcatcaagtcaactccacacaagtgtaaagttaacttggggggaaaatattaacccaaaaactttccctagtgacgtgaacatcaatgtttgaaatgaggcaagaaggatgacatcaaatagttgagtagacctgagtcatagcagtcgacctaggaggggaccttagccttgcacccaggttgactttgggagcttcaggatggaagtttggacttcaataacttgaatccaactcactatctttcagtattttgtaccatgaagatatggagcaatcaaatccaatccttgggagctaaaattacacgaatcttctgttgaaaattattttagcaggatcttagatctactca

SEQ ID NO: 398329 - DNA, 716 bp, Cannabis indica
gtgtaatttttcattgaggtcgtacggaacacttgaattcggaaataaggtaacattagtatagaacatattatatatgcatgttgtgtttgtgcttgtatatgttttgggtgatttcatagtggcacaactattgtgtcggttcggcagtacaggcatcgtactagttaagtgtgatatttaccccagagagtattaattggcactatcatagcgacacagccattgtgttggttcggcagtacgtgcacaatactggttaagagtgatatcatggccaattgtactcttgggtgctattgatgctatcatagcagtatgaacacagtgccaatcccgcagtgtgatcatagtgctggtagtgggtaatatcatggtcaatagcaccaaccattaagaactttcttattcatttggtaagccctgtggataggtgtatgggtgcctagacagggcaattatttatattttgttgtatgcttttcttactgagtctattggctcacagattctacttttctgtataggtaaaggaaggcgaaagctgaacaggagtgagttccgagctcgggtaatgattgtacatgtcaagatagagcaatctggagtgttcggtctcgggacttcttgggatatattttgtagtcgctatgtgacaagtttgtgaaaatattttcaaaatatttatagaagttttagcacgggatctcgattat

SEQ ID NO: 398330 - DNA, 1072 bp, Cannabis indica
aaagatgatagttttcctatgccaccacaatgtattaaaattaattaatcttgatacaattagaaaagaaataattttctatgttagtaatatttttctttagaatgttcttactaataattgatttgaatataggaaaatactatgttgttgattctggctatccaaatatgtcggggtttctagcaccatatcgtggtgaacgttatcacttgtgtcgttttagaggaagagggaatcaccgcagaggtgtaatggagttattaaattataggcactcatcattgcataatgtgattgaacgttgttttggacttctaaaagataaattcccaattttaaaggcaatgcctccatatttgcttggaaagcaatgtagaataccaatagcatgttgtcctatccacaactggattaaaatgcaatatattgatgatagaatgtttgaccaatactccgttgatgccacaccattagaagatattgaaggcattcaaaactaacaaggaggagatgaagcagaaatttatgagacaccagagattaattttagtcaagcttatatggctcggatggaaaatgtcagagatgacattgctggacaaatgtggcttacttataacaataacaatagaacatagtttaatttttttttttaaaaaaaaatgtaactttaacttaaagaaaatgatgttgtgatactatttttatgaattttaattagttaaattttaaaattacataactaaatttatatatataaatgaaagtttgttatcatacattattatttaaaattaaattgttttcaaattcagttaaaccaatcacatattctgatactgttatatttttaaattttgtaccaatcacagatttacaattttaaaatttaaaaatagtttacaaatactgaaccaatcatattttcagaaacatattttcagccacaattttcagattttcatttcagaatcacggattttgaaaataaagttttcaaatactgaaccaatcagcccctaagtgttttaaggataaaatacattgaagggtagaacggtaaatttgt

SEQ ID NO: 398331 - DNA, 1238 bp, Cannabis indica
taaaataattccaacagatagtttgtcgattatgttaaatttctgccatttttagttttcataattttttggtattttccctaacttactttttttgtttgcaagatcgtttgtgtttcttgttgtatcgtacgatagtgtttggtgtgttgagggttttagttggatttataaagtcaaaggtagtttgactttgacacaaccatacaacaaatgcgcgagattttatatgaagagttggaggttgatcctttggcgtatgatttaaaattggagatttattccttgtacatgacgggacaaatggttctgccagaagttattaagaaagaattccaactgataacgttgttagagatgagggcaacaatgtcaaacacagatgttttgcctttatttgtgactatggtgagaaaagttgggaatttagagcctaccctgcctactaatcctctccctcggagtgtggcagggtctttcattcccgaaacagatgttagaattggtgtgaatgaggaggttcctactaatgtagatcaatatcaataagcgacaggatttgatcagtttgaggagtttgatactcccttctacaataacgatattcctattgtagatttgaatatgaatgatgaacatgatttggcagtcgatgaagtcgtaaaagtaccttccttgaggttagagtgtgcaccgagcaaccatggtacacagcgagaatgacaaccccgtaataaaaattaaaatacacctggaactagctgtagtcgacaaggcagattcaaagaacatgctcctcctcgtcatgcgaccttctcaacgttcttgtcatttgaagtttgtaccaagttcaaagctcctacgtggataaaggaatgggagcttactacttgtttacacagtaaggaatcgggggagatacaacttggaaatttttatgaaaacaaggaagaattgagacaagtagtgggtaggtttacacttaataacaattttgagtggatggtgaagaagtaagcccccgatgtgttgtacgttacatacaaggatccagattctaaatagagattgaggggcaggaagaagatgcattctgacaactttgaggttattgtatttcacaataaacacacatgtaacctgaatgcgagacattcagatcaccatcaagcagcaccatgggtggtttgtcaccttattaaggggaagtacacccaagatggaactaagtacaaggc

SEQ ID NO: 398332 - DNA, 1254 bp, Cannabis indica
ctggagtagcggagaactgtatacaactcatttgtggagtagctggaggtagggttcccgagagttgaactccgggtacataccctgccactccggtggatagtatcctccgtaggccactatttgagcttcttccaagttgatgtacttttggactctcttctggaaatcttggaggttagcagctccttcttgttgtaattcgttccagaacggggttcttgtacggatcctgagaagtgcaagctgttatctgtcatcaactttcttggtttttgaggcttcttccttgaacctctttataaaatttttcaatgtttctgtgggtagttgcttgatgttagtcagggcgctaactttgagattaatctttctcacggtgacaaactatctccggaaactaacttgcaatttgttccagcaatccacagatcctggttccaactttttgaaccattcttccgcgaaaccgcttaatgttagcggaaagcataaacacttggcatcattactgtctctcataacgtcattactcggttaaaccgagacaaatgatcgctggggtctgagtcccctatgtaggctgccatttcgggcatcttaaattttttggggagttctgcctccaaaatgtggcacacggctcccggtccttgcaatcagagttagagtcatcacctttttgtctcctggagacttgagcaatgtctttacgcagtatcgcgagctcagccatgattctctcattcagcgtccctggggagatcgtcggtatgcgttttttttgtccaagtgatctcgcaaatcaccgtgcttctcgttgatttggtgtcttaagtcgacggggggtatcgccggctcccccttcctttttccccgagttcctagtgcacgaaactttcggtcctctcgatcctgaggacaaagactccctttttggagtttgcccctttgcggacctttccgttttggaaaatctaagcgaacctttcacggatcctgcactcctgcacctttttcttttttcctgggatggaagtagggtttctctatttatttccttcagagggatatcgtatagggctaagttcccgggacttatgcttctgagtgcttggagagaactctttcagcatttcctcgagtcctgctgggatggccttagggtgtatatggatccgtgctgtccatggctttttgcattgcgaccatcacctcttgcatctttttattttgttctttttgggttgcgat

SEQ ID NO: 398333 - DNA, 606 bp, Cannabis indica
atcattacagtactcgttaataactattatattgtaaatggatttacaaaattaaaagacaaaatcaaacataataaagttaaacatttttttcttttttcttttcaaataatgaaaaaaaaaagatacatatttactttagaattatatgcttataaaaagtatgtaagttcaaaatctatatcagcaaccgtctcatcaatcaaaccttttgcagcctaatacttacactgaaataagcctacaactgacattcttgcttctaaagaaacatgtaccagtaccatacgattttattagggcctatatatcttaagagcttgtccatggtcttgccacatatgtggatattttaatttttatttagttatttaacaaatgaaaaaatttaattagtaatttttgtaaaatagaaagtcaaaaatagtatttactcaaaattttatgtaaagtgttgctcaatataaataatagtcataaaggtagcttgggttatcgaaacttgcgggatttcaatttggctatgcttggcaaacaaggttggcgtttgctaactaatccaacatctcttgtcactcgtgtttttcaagctagatattatcctca

SEQ ID NO: 398334 - DNA, 535 bp, Cannabis indica
ctctcattgaactcggtgatgttcttcattggaagactctataaattgtcccacaatacgcccccagtggttgagagatcagtactgatccctggctaaagtgcaataagttgtgtactatcatccaaatttcttactcttgtagctatcgtgataaaatgacttaagtacgccttaagcatctttccaggctgttgctttatgttcgtgaatgaggacgcttttggtcacctatcccttgcggcttggaactgctttttaaagtccttggacagctgttcccaagaagtagttgaatgatgagtaaatttattgaaccagctgcttgctgctccaactagtgaggtgggaaacaaaatacatcataaaatttttgtaacattactagctcgcattatagtgttgaagttattcaaatgcgagaccgaatcggtggtcccatcatacgacgagacgttacggtttttaaatcccttgggaaaaggagtgtccatgatatctagacagtatggctcgagtgttggaaattatttta

SEQ ID NO: 398335 - DNA, 660 bp, Cannabis indica
ttagttgaatttttatagattttagataatgtgtgttctttagtagtatttgtatatttttacagtgttaacgatgagatatcgataggttatcgatataatgtcgacaaaaattaaaaatagtttgagcatcataatttttctattttattactgtatatcgataggttatcgacattttatctatgatttctcgacattttgattaggatatatttgtaagaatttgttggttatatcgatattttgtcgatgaaatgtcaatatgttgtcgataataggtctttgtttgaacataactagttttaaagaatataccaataggatgtcaatgggatgtcaatagttttccgacaatttgagaacatgttatggttgtcgatataatgttgacagtttgtcgacatgttttcgacaccatatgtgcaataattatctaatgtaatttatcgataaattgttgataggttatcgatatgttgtcgacaatatgattttattgtattctgtcatttctaagtgtgatgatatcgacagaatgtcgacattttgttgacaatattttgtgagggcatcaataatattttttgttatacattttttcagatggctccacgactcatagttccaacatcctagcattttactggtcgcgtgaca

SEQ ID NO: 398336 - DNA, 629 bp, Cannabis indica
atagagtatctctatattcaacactaacaccattgtttcatatcccaccataacaatattttacactactcagtaaaatgtagggtagggtatatatctctacatttaacgaccttaccccgtatcatacctcatcatagttcctcactttacctgagacgttagcatataacatattattgggttttgtgccataactaaaactcatttcaatataatcatatttgttaattaataaaagatcagaaatcgcttttatgttgcatggtttacatgattatgtttaatgtatatatttgttcatgattatagtatcatcagcataatagaatataatcatgattatatgtttaaaagtttaattctcatgttttatcaattcactggatttaaactgacatgataatcggcgataaggtatacttacatcttggataagtgttatgtcattttcagggcattggcaaagttacctatatcggatgtatagagtatacattggaagggaccgatattgatcttggataagatatcataaacttattgttatgtctttctaagtcaatatcaatggttgatcttatgtctatggatcttaatcctgatatggttaggttcaacttagttgt

SEQ ID NO: 398337 - DNA, 967 bp, Cannabis indica
taaaataagaagaacataaacataaatagtaaatctagaattaataacccaaggggataataattctctaaaacacatgaattcacaacaaagttagaaataccttattttttttttccaaaaacggaggacactagggtttctagtggcctttttcattgtaataaaagcatttcccttttcatttttccttcggattagtagcctttttaaacttattagttgcggtcacaactttaagaggctttttgttgttgttccacttctttttttgcgggtttcgaagtaatttgtctccagtttttctgtactaactgtagcattgcaataactaagagccttgttacctctttcatttatctctattaagcaatgctcaaaagaaatcatcatttcacttctatgtaattatagaagctatagattctatatctatgattagctctcccactaaatagtactcttatgttcccaagatgtaattattaggaagatccatttagtcatctttaacgaacaagtcaaagaacacaaatatgaatgttaagctggaacctaaccatctcaagattaagatctattgacttaagattaactaagtgatattgacttagtaagatataatggtcagatgatgatatctttttcaatgtcaataccggtataatttgatgtatactccatacatctaatactagcatactttactaataccgtggaaaagacataccacttatgcaagtgtaagtaaactttatcgctaattatcacgtcagtgtaaatcgagttcaatgataaatcatgggactaaaatattgaagcatataatcataattaaatttctattgctatgacatcattataattgtgtataactttatgttttgaattttacaaaaactgcatttaaaccataaacatgaaaataacatgtaaacttaaataacttctaatcttctattaatag

SEQ ID NO: 398338 - DNA, 573 bp, Cannabis indica
ctaaggttgcttttgggggccaaggacctttagagattgatggaggtaaagacaatggtaaaactaaaagcagggtgaaaaaggcttgtaaactaaggactccaagcactcgtccttccttcggtgtccaagggactctgcctgttaagaagacctttgttggggtagagaaaacctaagcaaaagtgggagatgcttcccaaagtcaggcaatttcaagtggatgaagagttctagaggttctacctcttcaacaactcagtccggctcctgaaaaggttcctttcgagataacttcccctaaggtaacccaagatggcatggaagccactatgccatcagatgagagaggggaaggttttgtgttccccaagaaagtagctacatctacaaagtgtccccttcctcctactggctctaagaaggtagccaagaaggcaaagatggtagtaagtggggtagcagtctccagggggagaaggagatttgaggcaggttgagatcccaagacaataacaaaccaagcagtaaccatcccaatcacaacaaccaaaatagcaacaaaaactctac

SEQ ID NO: 398339 - DNA, 654 bp, Cannabis indica
gattatgcctaagctcgcgacacagtgccttctgtagccacataaagttaccatacaaggtcttagttttacctcttctaatcccatcttcttcaacatttttttgtaaaggatgttgacagagcttctattatccacaattactctccttactcttttatcggagagtcaaacttttatcattagaggatcaacatgtggataccacacatgtttcaaatcttcttcagagaaaatgatgggtggttcattttacttcactctctgcgaaggttctggagcgaatgctggtaattcatttttcacttcagtaatatacctctttttgtgcactgttactgtttcatgtgaggtgtggcactccagaaataactaaaatatcgtcggcctctacggaggaggttgcaatctcaggttcttcgggttatcgggctgattaggctcatttccctgtgttctcatgtattacctaaagtgtcctcatgatattagctttcaatttcatctttcaattaacaacattcctcgatagtatgcccaatatctttgtggaaatgaatgtctcatcggttctggtgtgcgaaatgcgaccctatttttgttggcgaggtagatgttctcgtgagtttcattcaattcagtatacactgaata

SEQ ID NO: 398340 - DNA, 653 bp, Cannabis indica
aaatctcatctgggatttgagcttttttggtttttcttactcgagttgagtacaatttttttttcttattagtctatgttgttagtataacaaatatttacaatactgctggcgccactcttgtctttggggtcttaacattctgtttctgtggtgaatcagagcattctgcatcagctctgatgttatttattgggggagtatgcaaaacttttttattatttgaagtctggatcaatctttttccccataaaagtcctgaactttctttctttttttaatattttaaggtacaagagttgttgatgttcagggatattatattaggcattacccacccactcattttttttttattgttttataagtgatcaggccaatatccaacttagtaagagtgtaagagtaagacaggtattaattacaccgattattataattgagaatatgaaacagctaaaaaaaacaaaacaagcaaaagaaaatccaatttcatttttctaccactaacttacatactaacaagacatgatatttacttcaataagcataaaatatatggtacctgagcactagcattgtgagtgtcctgtgttagacatttattatgtataaaactgaaacatatgtatgtatatataaaatgcggaaat

SEQ ID NO: 398341 - DNA, 1832 bp, Cannabis indica
acaaaatacagttacaaaagttactatttacttacaaaatatgtgtcgcctagcgactaaacaacgaaagccctgatgtcccgaggatcgtacgctccaggcctaagcgccccgacatgtacaatcttcacctgctcgctctcactgctcctcaactttagccttgcccttacctacacatagcattagcactgtgagtggacagactcaataagaaaagcataacataataagcatactaagatcccaggttataatcaggcgcccatacacctaaccataaccctaactgaatcaggatcgatctagacagagtatgactaaccgcgaatccagcctatactcagtactctaatcgcactgatgtggtagcagtaaactcatactatctgatagcctagcatacatctgtcggcatatcggtgcatctctatatacacgtcactgatgccctgatatgataatctgagggctatagatttgcctattctgacgacaactaacaagcaagctaaacatggataaacatatgcaaaatattatactaatcttaccttgactccgaattcaggtgtgccggccaacctgagtggaataacagctcggcgaattacaggctcctaaatcacatcaatcataacataggtaagtgacacgctaaatcacttttcgaggacataaaattgaaactaaaagttttcctatcgatgaataacatggcaataccctaaacatctcaaaaatgggaaaaactaaggttcccaaaactgccccaaccggaattccggttctgcggggtttcttggggacaagccggaatttcggttcctacaggtccctctcaaccggaattccagttcagtacaggaatgaccgaaaattccatatttcaaccaaaacaaccccaattcacatgaaaccttccagacctgttctaagcatcttaaagatcattttccaaacaacaaaaccaattcctaaacttagaaacaagaaatgatattaaagctccaagtttgagttctaaaactcaaagcttggttaaactaatcaacaaccaccaaaaccagctcaaaccaacataactaaacataatttaactacagagaacacaataaaacactagcaacaagaacagaaactaaaatcccaaaaacatgcataattcatttcttcaaaaacaagaaatcaaagagggagctacaagagactttacctttgcttggatacactagaaactagcgagaaaccacttagaattgctgaagaaaactcaaaccctagctagtctaggggttcgaatgagagagagcttgaaagagagagagatgagcttcctttcacaattttgaaataaaagaaataatgatttttgttttaaaagttaactcagctcattactaataaaacctgatttaaaataaattaaaaatcacacaaaaggacaacttacaaactggaaaaaagaccagaatgcccttcccacacaaaagccataaaaagaacactaaggggtattttgggaaattctaaatcctgactattcccgacattcccaatgtctaactataccgccctactatactaaaatactaagatgtgaatctaaatagccaaacaccgcgtttcaatgttgccgggcacaaaacatgcaaaattatgaaatttctatgtatgacaaataaaatacattctgaattcaaataaaacatcataaattaataatttaggattaataaataaatttccataattaaaaccctaattatctactaatttcaaaatttaaagctaagcagtctttacaactatccccccttaaacggtaattc

SEQ ID NO: 398342 - DNA, 542 bp, Cannabis indica
ataaatttttaattatttttcttcacattatttcctattaatatcattacttaattttattttcaccttttttaaaatcatgtttattttttaaaaattttttgaaataaaatttcatataaatttttattttacttattgtgtcataatatttaaaatatactttatttttatcttaaaagtatattaattaagaatattgaaagaataataaaaaaactaataaaatttaaaatatatattttatataaaataaaaattattagaatgggtgtactttttttttatggtttttttgagaaatagaactgactaatcctaaggcaaagggtcgagaaactcaacgccactattcttgaacaacttggagtcgggccttcttttcgcactatcacggatacgaaaataataggaaaaattggattcaattgtcaactgttcctatcggaaataggatcgactacggattcgagccatagcacatggttttgtgaaaccgtacgattttctcgatctaaataaagcaggttttacatgaagaa

SEQ ID NO: 398343 - DNA, 770 bp, Cannabis indica
gtgcaggaatcacccttgtcacgtctagggggcaacacctgcacactgcagtcaagtttggattcaaagcatctaacaacgaagccgggtacgaggctctcatttcttggctaaagctattccaggaaatgaaggccgaacacattgacatctgcagtgattcacacctagtggtaaatcatgtattcggagaatacgaggctcagggagaaaagatgatcgcatatatgagcaaaatacatgatatgctcgcacaatgcaaaagctacggtctcagacaaattccaagagaggaaaatacaactaatgacgcgttagctccattggcaaggagcaatgtaagtgacaaggtgaacttggttcctatctagttcctcgaagagcctagcatcactggcacggaagaaattgaaatgattggtacatcccaaactggatgacaccaatagaagcctacctcgactctgtgaaacacccagataatcgaaatgaagctcgaaaaatgagaaggaaagttggacgacccctatctgaggtgcacaatggattctgtggaaatcatgccgtggggcaaagcttatctaagaaaattctaaggaaaggttacttctagccaacgatgattgaagattcaaaagcctatgttaagaagtgtgacaaatgccagagattttcaaagataccttgagctccacctaatcagttaactcagatgtagagtccgtggccctttgccatttggggaattgacttgatcggacaattaccca

SEQ ID NO: 398344 - DNA, 557 bp, Cannabis indica
aaagaagagcagaagcaagaggcccgtatctgcttgcggtagccagtccttccttaatgacatgtcagtttcttgtcaacaactcacattttactgtgttatttgactctacggctacacactcatatgtggcaacacaggtaatttatcaattgggtaggccttgtgactttatcgaaagagggtttggaatcctattgcctagcagagaattagttatcttcaaaaggcgaattatgtctattctaattagagtggaaaagaggaagttgagtgctgacttggtagagctagaagtagcggagttcaatcatacttgggatggattttttatctaagtattcgggcagcattgattacaagcgaaaaatggtaactttttagccggagggcgaagatccatttgtttatgctggatcggttcaggggtctcgaattctagttattttagttttaaaggctagagatttactacacagtggatgtgtaggatttttagcggttgtaattgactccagcagacctgaaacatttgggcctgaagtggtcagagttgt

SEQ ID NO: 398345 - DNA, 1202 bp, Cannabis indica
tttgcaaactcactgtcttcatccctcacgatcaaactcgaccgcctcaactatctttcatggaagtcgcagattgtccccactgtaataggacatgatcttgatcagatcttgttctcagatctcaccccaacccagaccctcatcaatggagctcccaatcccgagtatctacaatggaaaaagaaggaccagctccttctttcttggattcgatcctctatgtctgaaccgatactcgcgtctgtggccacattcacaacatcatccgcggtttggagggcccttgaaccaagattctcaagccaaaccaaagctcgccttctgcaactcaaaggtaatttttccagacttcaaaagggaaatttacctattgctgaatatgttgagaaggcccaagccactgccgatgctctcgccattgctggctccccagtttctactcaagatttggttctacaactcttgaatggtcttggaccagattttgatccagtggtctcgggtattacttctcgaagtgacaatctgtcatttgaggaagttcaagccttgttactctctcatgaaacaagattagaacaacatagcaccatcactgatctgtccctcaaaatgcaagcaaacctcagtgtaaaccagtcaagaaatggtgggaatcacggtcctggtgcttcatcttttcgtcctcacaacaatcaacaagggcgcttctttggtcgaggaaatggctcaaaactgttgtgtcaagtgtgtcttcgcattggtcacaccgcggctgtttgtcactactgctttgacaagaatttcatcaccccctaatatggtagttcctcttcttcctaagcttttttaactgaaattgactctacctatgatccacaggccttaaccacaactatgctccctgacttgggagatgatgacctttggtatgtggataccggtgctactaatcatgttagccatggcaatgttcaacttgacactgctgtcccataccaaggcactgagaccttagccgtgggcaatggtaagcaattactcatctcccatattggtcagttatctatcccctcaagtccttcctcttccttacatttgcaaaacattttacatgtccctgctattaagaaaaatttagttagtgtctctcaactcaccactgataatgatgtctttcttgaattccataaatcttg

SEQ ID NO: 398346 - DNA, 938 bp, Cannabis indica
aaaaaaaagtcggctatttatttaaaagtttttaactattttaatttttttttgttttaataataatattatttaatttcattttatgtatggaaataattatatatgtttatttaatattttgtttttaattaatttttagtcaactatagtattaattattaatattaatgatattcatattttattatgggtaattttcttaattaataatattataatgtgatcatatttatttaaaaaaatttaactaattttatttaatttgataaacttataggtagtcttttaaaagagaatctaatggttcttcctttttgctctaatctatctaagctttccttttaagaatttgaaattgattatttaatttttaccttttaatgtctattgaaaatacataaaagataactctatataataatttaaattagtttttcttgaattaatgattttattaaaaaaatatatttataaaaaataatatttagactatgataataaattaaattatatgattatttattgtatcattttcaattaaattagaaagtatctagcataaaactatgtatacgtgccttgcacgtaattttcttttagtatatatatatatatatatcgagttcggggaccaagagtgatgatctctttttcttcgataaaaataaaaataataatagtaatcaatttctaattttagttggactatttatttcacaaaatatttcattgttttattaaaagaaaataaataaataacgggtatggtagtgatccaattccaaaccgtatataaggtattaatttgtatataaaggaaataaacattttattataatattatattttcaaaatgtaacatgcatgactctgctatacaatatatatctttatatattaaaagtgcctatctaacgacatttcttggttttaac

SEQ ID NO: 398347 - DNA, 595 bp, Cannabis indica
tctaaggcaagggtatttctggcgaataatgattgtagattcaaaggcctatgttaaaaaatgtgacaaatgttagagatttttgaagatacctcgagctccaccaaacaaattaactcagatgcaaagtccgtggccttttgccatttggggaattgacctgatcggacaattacccaaaggcaaaggaggagtgcaatacgcagtggttgcggttgattacttcactaagtggacggaagccgaaccactggcaaccattacatctaaaaagttcaagactttgttgtgaagaacataatttgccagttcggattgccgtacaaaatagtttcggacaatggcaaacagtttgacaacaagtccttccttgatttttgtgcgaaccatggtataatcaaaagtttctctgtagtggcgcatccccaagcaaatggtcaagttgaagcagtcaacaagaccctgaaggatacactaatgaaaaaactcaaggatgctaaaggaaactagccggaggagcttcctgaagttctatggtcgtaccaaacaacagagaaaacggcaactagatagactccatttgccatgttatatg

SEQ ID NO: 398348 - DNA, 1303 bp, Cannabis indica
caaatagggaactgcccaaggcgaacattaagatgtggatccccgacttggggaagcaaataccagtgttggtccagtggaagaattagaagaaatcgaaatcaacccaaatgttccgaccaggaaggtcaaaattgcaaaaggtttggtgctcaaaataaaattagcattgataaaatttctgagagcaaacctggacatttttgcatggtcacatgaggaaatagtcgaaatcaatccttctataatttcacatgtcctgaatattgaccctaatttttggcctgttcaacaaaaaagaagattgttggacaaggagtgagccctagcactaaaagaagaggtagaaaagttgcgcaacaataatttcacaattaaagctttctacccggcctgggttgctaatcccgtactggtacccaagccaaaaccgaaatggtgagtatgtattgatttcaccgacctcaataaggcgtgcccaaaagactgctttccacttctaagaatagatcaacttgtggatgcaacagcagggcatgagatattaagcttcatggacgcctattcagggtacaatcaaatcaagatgcatccaccggaccaagaacatgcaagtttctgagtagatattggtctgtattgtaataaggtcattccatttggtctcaaaaatgtcaaagctacataccaaagattggtaaacaagttgttcaaagaccagatcggatgaaatatggaaatgtatgtggatgacatgctcgtcaaatctaggaaggctggggggcatatagatgacttggacgagtgcttcaaagtcctcaggaaatacaacatgaaactcaatcccctaaaatgctcctttggagttagctcgggtaagtttctgggctttatcgttaatgcccgaggaattgaagccaatctagaaaccctcctggatatgaaatcgccaacaaaacccaaggaagttcaaaatttgattggttggattgccgcactcagcagatttgtttcaaagtcaacagacaagtgtgtctcattcttcaacattctacgaggaaataagcaatttgaatggacggaggaatgcgaaaaagcttttcaggagctaaaaatgcaactcgcaaaatctcctgtgctctcaaaacctctggacggagaagaattaggaatatacctggctatcacggaacatgctgtaaatgtcgtactgatcagagaagaaaaaaatattcaacacccagtctactacatcaataaaagactcattgaagctaaaagtcggtatccattgatagaaaag

SEQ ID NO: 398349 - DNA, 829 bp, Cannabis indica
ttaattggaaaggggacacatcagactgcttgagactagcggagatgaatggatggaaggggactgacactccgcatcagagaatggggatagagactacgacgtcttctgaaggtatgatcgcggggttggtaaaaggaaggtgtggtctttgggtaggacgaggacgcatggtgccgagacgcaataaatttaatcttgaaaaagtggttaggtcagatttggtgacccacgagactaggtcttcagaggagaacaactcatttagttgcatattgtcaactaaatcagactcgctcccttcggtatttccatcatcgttagatccgtgatcaggaacctcccaatcttcacccatctcctcgacttcgacgtcaggagtgtgcctggagtgaataaggtgttcacggactgacaccgtagactcgctgtctcgaatattgatagttcctggttcagcgagctcctgcaccatcctctcgatgtctgcagaggacaacggacacagctctgtgtctccggcattagggacctcctcttctgagatcgaagttggaataaagctatcttcctgatcgccatcgaatgcgttgcctcctgagccaagcatttggctgtccgacagatcgctcatctgaaagatagaagatcttttcagggtggtgaatgtgggaaaaacaaaataagtgacctcacccgcatattaaatttacaatctccttagagggccgattcagattcttgtgaaaaccaatcagcccaccaagacacgaaatcgcaggtgtgcgaatagaaggacatctcaaaaaatggctgggtgtatcccagt

SEQ ID NO: 398350 - DNA, 880 bp, Cannabis indica
aatgatcaagcaccaaggcatgctcatgtttacaaaatgggcctagtgtgggtgtgccatggggcagcacgccacactttggcaagagacttcttgttttctctacaggtcgtgtgcttcagttggaggactgtttatctaaagtgcgttctattatttttgaacgaattttattaattaatagatcttatgatttttatttaaaaaaataaataaaaaaatgagtgaagtaaataacaacttataaaaaatataaaattcaattaccatcacactctacttaataaaaataggaattttaaataaaaacattttaaattacaattgtagtgaataaaaatttatcttagaaatatcttgaactaaatctcttataattgtattgaattagccgtttttaattcttcaaaatatatgttttttaattttaattttatcaaaaataaaatctctaaaattcttataaattatttatatacttttttttagtacattttttttaataatgagagatagaagtttggatttcttctttataatgagaagtgtcgaactactagattatatttatgacgagttttttaagtacaattatttattcactttcaaaatagcacatttaaaaatatttaacgaataaatcctttaaaactatatttttttttatgatcaaaataatttactcgtttttcaaatataagggggtttatcaattttattagtgaaaattacatgaaatatgagattttgtaaaaaagttacaaaaatatggtatttataggtttgctacttttctatggcattttttcacatttaagactttttatggtatttgatatgccatatttttgtaaacctattatccatactcatatttcat

SEQ ID NO: 398351 - DNA, 982 bp, Cannabis indica
tagaaaaataaataaacaaacaatgatttttaatctgaaagtaaaaaacctagagcattgatttctttatttcaaactatgaatctcaatttactgattatcctaatttatcctataatttgtagtttcaagaatcctaatgtaacctattaacctctctcgagggatgatagatttaacttagaataactaacatgatatgtctattcaatgttaatcaaataagcactcataaagcaatatgattctctttaaatgaaactcatagaattagtggaatctctcaatctcacacttttcctatgtcatgcaattctaagtccgattttagattacctctctcaagtgtaaaacctaaaatctctatactaattaatggtgatcaagcattaagaagatgataattagcacaaaattgcataaacaaataacaagaacaaatatgggaataatctaaaaacttaaattcataatctaaaatagttccatcaacactctagaatgagtgtttagttcataatcacaaacataataaccacaataatcatgttcataattaaataactaagcaaaagaataaagaagaagaagaagaaaagaactctaatgatgatagttgatgatgattgcttgaagtctcttctctcttgctcttcaatgtgttttctaatctcaaagttgcttgtttctatctctctagtcgtctccctttaatctgatttacatccttctttatataggccaacaaagatagattaatcctcttagaatttgaaatttcgtattttaatattcccaatttaattatttaattaagtgattaattaaatgcggaataatgaaactggtactgaaaacagtttttttatagttacaaaatacagctctgtaactccaaaagaacccaaaaaaacaaacagtggataaaagtagaaacacacaaggattttgtatgtggtttcaacaatcctttcagattgtt

SEQ ID NO: 398352 - DNA, 1698 bp, Cannabis indica
taccaatgcactctgtaccatagttgtaccagtgttggtagcgcgactaacatataagcatgcatatacacttaacacatatatacactcagatattcacattacacattatacacagttcttaacctctttccagattcaagtgtgctggccgacctgaactgaaagttttatgctaaatggatgccctagtcacaaaatgaaactgcgtaaatcacatgatcgaaaccctaatcctagaaacccgaacccatcactctaggttctgttatacactctagagatcacactagttcagaaaacaggaaaacacccaactacggcactggtattgacgagaattgagaaaatggcttgtttggggatcctggcaaaactggctagccggtttgcaccaggtttccgcaaacaagctccaacttgctcaaaactcatccaaatgcatccatactttccagagcacctaaacaatgcataaacaacattttccaaccagtaattcacagaaaatctcactgaatcacaatatgtcattaaagacctaaacttaggtttttaaattcaaacttgcataaatccaatctcatacaccaaaaccagctacaagaagctatattcaactcaaatgaaccctagaattcgaactagcaaacaacctaaccctaacagccactaatttgcaaaaatcactactcaaccaaatcttaaaattcaagaactaagagatagagatgctaaggcttaccttggcttgatttcccttgaaattctttgctgaaaacactaagaatcagcaaccaattccttagtttatggctggttcgaaagagagaaggaggaagagaggtttctttttatgttttggtttatttcctcaattttctttaattctttctaaaatgaagtaatggtttaattaaattaaaccttggttgaaattaagtggccatgtgtcactcacctaggcagccaccaaatcaccattaaaattactaaattaccctttcgattataacctaggcatttctcaaaactaggggtaaaatggtcaaattccataaccccgcttaatcccagtattttatgttttttttcaatacacatcccactaaaatataaggttctagacttacctatttgatcaaactacccatccatcgcattttccattgtcgccgagcaaaaattacaaaaataatataattcacatataagtcaaatgataccctagagtttaataaaatctccggaattgagaaattataactctagtgtccatttctaacaatagggcccacaaataattaaattcataaataattataaaaatatcagaaattagtgctaattactaaagcggtcattacagtcacgtttttaacgggatgcaaagatatcaccagttaaattgagtagtgagctcttctaaaatgggcatcattttaacaacctttcatttgatcaaaataagaattaacgttctccagtattggactcgatgtaaggttaatcttattttatgagctactagtatttttttcatatttgtaaaccatattctaagcagtcactatcggggtgagcgttactaagaatataaaatttataaaaaatatttatctttcgagattacgatgttaaattgtctaatggatgaccatctattgggatggataccatgagaaacaacaacattac

SEQ ID NO: 398353 - DNA, 862 bp, Cannabis indica
ctcactcggcttcagcagggtgactattctgtttctacctattttacgaaattgaaatccctttgggatgagttgaaagaatttcaacccataaccacttgcacttgtggtgcaatgaaagttttcttggattcttacaaccaaaatcaagtgcttcaattcttgactggtttaaacgaatcctatgcttcagttcgtgctcaaatcttgcttaacgaacctataccaaatctgtcccgagtgtttgcaatgattgttcaagaagaacgtcaaagatcacttggaaattctgattctattaccttggctgctgcatctagttctaccaatccccgaagaaccaagaaacctagaccatcttgctcaaattgtgggaaacccggtcatcttgttgacaagtgctatttcctccatggatttcctactggttatggggacaaaagaaagcaagacaaaggcaaagccaaggccaatgttgctactgcaaacaaccaaaaaatgacattgatagcagctcgggtcacattgatctatcctctcaatgccaacaattaatttctctgttgagccagcaactaagcaacacaacaaatgcagaaccacctgcaatagcccctgctgcatcaaatctggcaggtacaacattaaactcaacttcttggattgtggatagtggtgccactcaccacatgtgttgcaatttcaggtgtttttcatcattttctaatataccattccctaaatttgtgtctttaccaaatggacaatctctccctgtccacaacattggcactgtcaagattaactcaaaaataaaactgcagaatgtactttttgtaccacaatttcagctcaatctttt

SEQ ID NO: 398354 - DNA, 516 bp, Cannabis indica
gcacatattgatttttaaatggttgcatagcagttgatttaaacttgtatgccatatcaaactcgatcaaacgagaattttgatttttccccttttaaccaacaacaataggactcccctcgattccctctcctttaacaatattagatttcttcttagtagaaaccttcccctatttgggtatgtgcgcctcaacaaaattatcataagaaaaactatcatttaatttcattttttctttccatttccttttttggtgatagatttcaaccctatttctgaagttttagggcctgtaatttaaatttttttacataaggagatggaaaagatgaagaacgagttatatttagaaaattgtagaaaaaaaaagagagaaaaaaaaaattggagctgattcttcaatagttgaagattgtgacattttaattttttttttgagtatatttctattagaatatttctaattaaggaaataaaataatattattgattctgataaatgaatatttatat

SEQ ID NO: 398355 - DNA, 500 bp, Cannabis indica
gaaaaatcctctattattgtttgctatttctttcttctctcttttaatttctttaacttaacattcaaactccatgtctaagttttatcttgtaatggtggttcttaagttagctatgagctaaactttttaatggtttgaattgttgaagaaccctatgtttagttgagtaattttcttatgcaaatatttagtaaaaattctcatgttcattcaagtgtgtgtattgctaatttcttgatattgtttggccaccaatagcttgattattgagttatatttaattctggaaaggttaaatgtaatggacttagcttgaatgacacaagttcttaatcttttttaggttagatttgaaataacataggaatatgttatatccttgtgtaacaattgagaactatgcttgaaatggtattcttgagcttgcttggcataggaatatgtttgaacaggtccaaggattgattgcataaaatttggaagagttttgtgcactt

SEQ ID NO: 398356 - DNA, 1053 bp, Cannabis indica
gaacgctggggaaacgtatcagcgattgataaaaaaaaatttcactaaccaaatagggcaaaacatggaggtttacgttaatgatatattggtaaaatcgataagaagtaaggatcatacctcagaccttgcgtaatgctttaaaatattaaaaaagtataacatgaagctaaacccgaaaaaatgttcctttggagttttcttgggaaattttttgggattcatagttaacgcgagaggtattgaagcatatcctgaaaagatcaaggcattaatagacatgccatcaccgacaaagcctaaggaagtgcaagccttgacaggaagaattgcttcacttaacagattcatttcgaagtcaactgataagtgtgtgccgttctataacatattgcgaggtaatgaaaagtttgagtggaaaaatgattgcaagcctttcaacataaaggcatctcgcaacacctctagttttggcaaaaccaataactggagagacgttgtttccctatttagccatctcggaagatgcaattagtgtagctatagtgcaagaagagagcaagcaccaacaacctatttactacgtaagtaaaaggttactaggggaagactctagatatcccactctagaaaaactcgcgttgtgcctagtccatgcgtctcgtaagatacggccatacttccaagctcaccccataaaattgttaaccgatcagcccttgagacaagttttatcaaaacctgatgcttctagaagattgataaaatggtcgattgaacttgggcagtttgacatagcataccatcctcaaacatccatcaagggccaagctgtggctgacttcttgatagaaggtataactctagaagaaattctacctgattagcgagacaaggaaacctggaggttatgtatggatggcgcatccaacgagcaaggttcgggtgcaggggcaatattaacatcgcaagaaggctttatgtaataccctaactagcataggattgttaattttaaacatattgtgcagcttgttgctaatcaacgagatt

SEQ ID NO: 398357 - DNA, 430 bp, Cannabis indica
ttccgtaaaaaataaaattgcttgattttttttaaccaggattgcaaataaaatatttttagaaagaatataaaattattttcatggaaaattttcttaaattacatacattcatcaaataacacataaaccaacatgagcacatccaaatcaacacaataaataatattcatcgttttaaatccatattacaagaaagtaaatcattaccatggctctgaggcaagttgttgggaatattttacccaaatctagatttattaacgagtatgttgattaacatcctaaatatgaatattgttggaaattattttatcagttagatctactcacaagtatgtttgattaacaccctataaagtggccggccatggcatatggatttgggcctcactttttgcaattttgcaattttatcacttttgtatct

SEQ ID NO: 398358 - DNA, 636 bp, Cannabis indica
caatttccttccaaatagtgtgtgtataccgtgtacataaaatttacacagataataatacaacatcgatgatggttatacattttaataattctcatttaataaatatatatttaaaaattgtgattttgaaataaaaatttgaattttacaattgaaacactacaagaaaaactacttttactggcgctcaaactcaccggcaaaagtaggagtaacgggtcgacaaagctttgccggcatttttactcgccggcaatggcttgtcggcgtatcaccttttgtcggcgagattactaaatgcgctagtaaaagtttttacaacggcacatttatttgccagcataacgacctcaccggtaataggtccaccgtctgatgtgcccctgacgaagttttgctggtgtttattgtcgccggcaaacttttggcaggtattttggcgccaaatggcaatatggcgccaaatccctaaaaagggaatgtgcgcctggtcgggtgcccatggtcaacaaggggcattgatgcctttacatcaatacttcaagaatgtggcggactcttttggcctctgttcggcccacttcactcctaagggcatcaagcatttgtctgccctcttcgtcctctatgcct

SEQ ID NO: 398359 - DNA, 1131 bp, Cannabis indica
tatgtctgcatgttatttagtggaaacccatttgacgggatagatagattagagaaattacaatatgagttaaatttgctagtattcccaagtgaaatataggacacgagtagttaatggaggcattgattttattgattcaaataacaaaatcttttgtttaggagtgatttagcattagcaaaggtgggacaatttatgagtattgtctagaatcctaggtgaattgaaggcgacaattgtgtagtaattttgagattatgtaggtgtgggactacctatgttagcaagaagcatcttgttttggtagcccacaatgaaggaactccatggttgagtgtccttgactttgggtcatttcatttaggaaatttccctatgaagtgtgtgagtcagagcaaatcacattggaaacacttggatttgtccgtgggggctagtcatcagtccgagaaacagctagagcgatgcactcgtgtataagagccatcatcccgtgggaacaatagaggcttgaagtggagacattaccgaggtaacatataaaagaacgtcaggaagagtaatggtatcactaaagtaaagaagattacctaaattacttaacgtgatacggtaatgatggagagtactttataattgactggatagtcaatgtggtgtatacggagaccattgatttctatgaaaggattactttattaagcaattatagaaaggcatactcacccagaatgggaaaaaacttatgaattgagatgcaatttaatagacatgtaattggtagatgttggatcacaaagtaggttgtttattaaacaacgaactatataattgagtgtaaaataaattttaaagtggttaaccaagtatgaagatagtgatgattgcaaggaagcaggaagtgaaaccttagtggtaatgatggaaaaagaacacgagagtcttagatgttgatgaatcagcatcatcaacgggagactcactataagttagtatggtaatttctaccgaggggttatcaatgaaataaagaatatacttgaggcatgtatatttctggatgtgcttgaaaagattatcaagatttctaccaaacatagaaaagaaacttcaggatcaaggaatgat

SEQ ID NO: 398360 - DNA, 738 bp, Cannabis indica
gattaactaatgattacaaaagggttggagagctataagcaaacgctgctaaacatggattaacaaatccgccttgaggcattttcttatccatctaaggtttacatagatatggatgatgcctctactggctgacttaaccacgcaatcttattatgctaagctctatggggtcgtatggccagatcacaatgctaaagcaaaggataggcaacatatttggttggaagccgcgccttggtacgttaagggcaagcattccaattttgtttccaaggattgtaactagagaagataatgtagtggctgataagtaggcatactatagataaatcttaaaagatattttgggtgataagttggttttgatagtgctggctacacgaggtgtaataagagtaagagattgaagaaatgggactgtaagaagtgtggctttgtagaacttggttgactaggtttcaactttagagtttgtaaagactaaaatcttcctgctattttgtaggataagaaaatgaacttagaaagaggaaaaaagaaaaaggtccatagaagaatatcattacaactacttgatatcctcctacggggctcattagccattggattaaccatccaatggctaataagcatatctctctacctgcttattgacttcttcagtttgtacgtgacgcaaatctagacacgaccatatatcccctaagcctaaggggggatgaccaacactcaaat

SEQ ID NO: 398361 - DNA, 1145 bp, Cannabis indica
ccctcagtgaggacttgtacaagctccaactcccttcttcaagacaagtcactcacagtctcttcccttcccagtctgtccctcccaacaacactactcctcgtgtgttcaattgcactactgccagtaatcctgtttttgacaaagccaaaactgctacagtttggcactgtcggcttggtcacccatccaagcaagttttacaaaaaaatctgtctactgtttgtcccaattttaaatataataatgttgaattttgtgattcttgtcaatatggcaaattacatcaatttgccttcaaaccagttgctaataaaaccacaacaccctttcaaatagtgcactctgatgtatgggggcctcatgtatctcttgatggatataaatactatattagctttcttgatgattttacaagatatgtatggatttttcctatgcaaactaaatctgaagcaaccaccatttttactcagttcaatgcttatgttgaacgtatgtttgagacaaaaataaagagtgttcagttagatttggggaaagaatatcaacccttgtacaaactgtttcaaaccttaggcactaaaagaaattcgtgtcctcacacacatcctcaacaaggccgtgttgaaagaaaacactggcatgttgtggacattggcctcacacttctggctcaagccaatatgcctttaaaattttggtgggaagccttcacttcagcagcttatcttatcaacgggcttccaacctcagttttaaagtttgtgtctccctatgagaaactctttcaacaaaaaccagattacaacctttttaaagtttttggttgttcatgttttcctcttctcagaccatacaacaaccacaaagtttcttttaggtctgccaaatgtgttttcataggatatagtatctcctaaaaagggtacagatgtctacatcctactggccgaatctatgttgctcgaagtgtaacttttaatgaaacagagtttcctttctctcacctctttccccagtctgtctcgaattctcaatcatctacccctatgcttattgacacagccaattactgtgtgcctacacactctgttattcctcatgctacacccacaaactcacctattgttggaaattatttt

SEQ ID NO: 398362 - DNA, 896 bp, Cannabis indica
gtgctcgcaactggtacaagttaacataatttgccttcagtaaaatgggaataactctcttaatttttatccaaatgacctagttcaacttgtattggaaagataattttaagatggatcaaagtgtgtctcacaaccatggctcaattctcaagttatcgggtctaaaatgtgctcacatagcataatagtatattttacttgggaattgtctaatgtggttaagtgagagttgttgaaggacactgccacagcccatgtggcattgtattcgagcactgacactccaaaacacatgcttttagtacttatcaccaatatcatgcctttctaggcatgaggtgacatcccatcactccatttcgaattggtgcatcctcaactgaaaacaaccaattttccaatatttgtgggatataggcctacaaataaggagatttttatagatatttattttcttgtaatattttattcattaaaaagagtggtatatgggattttttagtgagataccccgacatgtgggggatcactaacaaaccctatagcctatatatagataaagtaggaggctgagaaatgggacttttggatcttcctttaggatcatctacgtcaaaaccttctccttgaaaattacttgggcagccaagaacaccacattattgttgagttttatgccctaaataaaactccaatttcaaataaagttttctctatctgcttaggtcgggcagctctctgctgaagccatggcgaaaactcggtcgaagagaggggggaaactgaaatcagatgctaagaaatcgaagaaccagggaaagcgaggtatccaaatggagaggcaatctcaaatcaatcttcctgatgagattgaaccgcttgaacttactgaa

SEQ ID NO: 398363 - DNA, 1003 bp, Cannabis indica
gtttgggtccgggtttcagtctgtgtctggttccgggtcttggtttgggtttgggttcaggtacgggtctcggttctggtccaggtcttgggtaatgagtcctgggttctgggttcttggtcgtaggtcctggcgaaattctgggtctgggtgtgggtatcgatcccggtctaggtccagctccgtgtttggtttcgcgtttagatcttgttttgggacaggtccaattccttttccagggtcttgattccggttctttttctgattttgggtctcgggtccaagtttgggtttgggtcctggtctagaaattgttccaagttcaggtcttggtacagttccaagatctagacaccgactactggttgggtccaatgcccgggtcgtgggtcaagatctagatcccgatcatgggtctccaactcatttcaattcggatcttgggtcacagtccgtgttcctgtcagggttcgggtcttcgaccgagactaggtcgggtcttgggtcccagtcccagtattaggtctcgattctacttctaattttgagtttgggtgctcaacctaggtccgactatgggtccaagcgcgtgtctgggtttaggaacgtgtcccgagtcccgatctgagttttgattcgggtccgcatctggtctgggtctaggtctgtgtcctagtcagattccagttctcgactcaaacctagactcggacatggacccaggtttgggtacggtggtctgggtctgggtctaggtcagagttcgggtctgggtttgagtccgggtatggtcccagatccaaacactgacaacaggttaggtccaagcctcgggtctagatctggataacaatctcgggtcccaatctagttcaagtttgggtacccaggtcctagtctaggtcctaggtattgggaatatttttccaggatctagatttactaccatgtatgtttgattaacatcctaatatgaattcgaaaataatgaaataaacacata

SEQ ID NO: 398364 - DNA, 627 bp, Cannabis indica
tctgtggtaattcttgttgtttgagattatatcctgaggttgagattagattatttgagctgtttggaagatagttggtgagttgatttggttgttagacaaagtttgagtattagaactcaaactttggtctttaatggtaattttttgttttgagcttatggagttgttttgttgcttgaattatttttattatgatatattaagcaggtctggaaggtttggtaaagtttggaattgatttgagagagtagtgaattattaagatttcatacactgaaccagtcgaccggttcagggggacctgtaggaaccggtcgatcggttggtcctcaaggaaatcatgtagaaccagaattctggttgggaactggtctatcggttggggcatttttaggaaccctagtttttctcatttttttaatatttagagtattgccatgttatttatcaatagggaaactttttgtttcaagtttaagtcaccgaaaagttatttagcgtgtcactcactaattttacgaataatgtgatttaggggcctgtaatatgtcaagcagctattccctcaggttggttggcacacatgaattcaaaaacaagttaaaattagtataatagttgcat

SEQ ID NO: 398365 - DNA, 1139 bp, Cannabis indica
aaaaaaattaagaaaaaataaatagatatagtaacgtgccacatgggtaggtgttacttttacagtttaataaggttgtgtctctaaaagcttatagtgacgcacaatgagggtttctgtaatgacgacattttagattatggattagtaaagataattagcatcaattattgatatttctataattatgcatggatttattatattatgggtctcattattaaaaatgagcattagagttataattctcaattctggagattttattaaattctaagagtattatttaagttaaatatgcattatgtaatttttatgatttttgctcggcgacgacagaaaatacggttgatggccgtataagtcacatgggtaagtctagaacctttttcttagtggaatatatttgagatgaatagaataccgagtttgagcggggttatgatttttgcccattttacccctaggctcgaattagcttaagtttaagcatcaagggcattttggtcattttattagtgagatgtggtggctgttgggagccttgacagctggctttttgtattcaactcagcctaggtttatccattaatttgtgaaattaaaaattaaaagaaaaagaaggaaaaccccaatttttcctacacctatttccctctctcttcgattcgtgtaaaatcggttaaccagatttagggcaggtttcccatatcgttcgattcgttaattcgtgttatttttgaatttggaaataagataagaatagcatagaacatattatatatctgtgaatgtatgtatgtgtgatatatatgcatgcttgttatgattgatacactactaacactagtacgtacggtaacggtacagagtacattggtatagtgtacaatgtttaaagagtacattacagtgttaccaacactagtacagaaagatacggggtgtgtgtggtacaacacttagtggtactcgagatacgaaacaaaccataccaacactcgtacagtaatggtatgtagtgtatgtggtacagtggctataccctagtaaagaacgttcttacttatttgttaagccttgtggataggtgtatgggcgcctagatgcaagtcggtattatattatttgttatatgc

SEQ ID NO: 398366 - DNA, 707 bp, Cannabis indica
ttttctttcttgagccttcctctttcagatctatttcactccaacgctcttctttctgatcctccatcaaagcttgttgggagaagtcagtggttccactactataaaaatagttttttcctgacgtttttaatcagtcgtttaaaagtattcccgtcggtttctataactgtcgcctatacgaccgtcataaaacgggcaaaataggcgactgttaaaaatcgtcgctaatgtggacttctcgacggtttaaaattgtcgcctataataggatatgttaaagatcaacacctactctacaagtatctagaattttctatcattttggtaatattatagaattttctagaatcatagagagtaatagtcataagaagtttcaagaatattttagtaacacaattagttagaattatctagaatattgtagttggtttcttttgagtggtataaataggggtcatgggtcttcaagttgtgcatccaacaagagtgtctttaaagtgtgttcaaaagagtgagagtgtgtccctaaagtctttcaaaagtgtgagctatacacaagagtgttgtaaaggtgtctagtattaaaataagagtgtgaatatttggtgtattgtggtctagtaaaaagtgttcaagtcttaatgtaattacttttacaataataaagtaattacgtttttcacgtgttgtggtgtccaaca

SEQ ID NO: 398367 - DNA, 607 bp, Cannabis indica
ttttttcttcttcttttttcagtttctctgttcattgtcttctcattttcctgcattttttctgcattctcactcggttcactatggatcctttcattcacaaaatgaaatccacaatgactttgtctgacaatgagaaatctgtttttgccattgctgatgatggctcctgcgaagaacaacctcctgaagaattttcgttatttgccagagtaatcacgcataagaaagtctggcttacaactttccaacgtcaaatggcagaacattgggatggccggttcaaagtaaatatcaaggaacatttctcaggcctttttattctctgttttggatgtgaaggtgatcgattaagagctcttgataaagaaccttggcattttcaaaatcatcatattgttctttatcctcctactgcacttcaaaatgtcactccggaatctatggttttttctcctttttgggtgcaagcgtataggcttccttttctcagtaaatccagattgttggctaaatctttgggaaatcttttgggtgaatttttgactgttcatgaagactcattgaatgaaggttggggtccgtttttacgattcaaagttcgttt

SEQ ID NO: 398368 - DNA, 530 bp, Cannabis indica
ccaaattgtaggtcagcaatcgctgaatgtcattcccctgggagatcggacgaggatccaataatgaatacttcccagactgcaaatggtcagctgcccaatccgcggtcaagagttccactcgtgggcccagcggtaggcaagcggaccttgtttggtaattcattaggaggagtcatacctgatggttccaaccagatcaatggtgtcattccacccgtcaaccaagcgaatcaactgctaaggcagccaggcgcttctgtgttcgaaaggttagggacaacccatgacctaaggaatgatctaagcagaaggaggggagcaggcgattataatgttacggcaatcgtgcagcctagagcccgtactcaaatcccagctcagaaagatgctgacgtaatccaaattgaccagaatgtcgagcatgtcagcccaaccgtacaggctcagctagacgaactaaaaaatatgtttcacgacatggctgcacaaaaaaataatgatcttgagctagaccgagcacgtggaac

SEQ ID NO: 398369 - DNA, 905 bp, Cannabis indica
caggagggtctagccggaccacaccctggccggccaaggaagtctatggaaccaaaaggtaggccaaccatcacagataaagagcactaaaggaagcccgattgaatggtggggtccacaaccatctttctggatgggtcaaaacttagtttcaattacaggacagctccaacaacccacgaaagtaaggattcaaccccaaattatctacctaccttttagggatcattaattagttatttttataacttaagagtggttttccctattttaaaggatatttacttacttaaagattaatcttttgtaagtcctaaaattatataaagggcattaggcaaagtgagagaagaactaaattctaagtccatcaagccctagagcactcttactcctctctcacacgccattccttagtcattggacacttggtctattttctcatctcacttgtttagaactatgattcatcagttctcatcattgtactattcaaagagagtcatgcctaaaaattacaaggtcaaagcctgtaatctgcgtagtgatatctcttgaattaatacaataaaaacagaagtaaattattacccgaaaaacaaggggagcaaacttctataaattattgtgtcaattttattatttggttttacaatttacctgtgatgattatcaatcataaataaagctcggttaacaagtagtttttatattttcaccaaatatagatccataatattttaaagacactttgaaatatgggatttgaatttataaatattggtaaaactaaaattggctttgtttctaaattaataagaataatgatttccattatggagtataatcgttaagagtacttctacataataaattaggttcatcagaatatatttatgtaaaaa

SEQ ID NO: 398370 - DNA, 733 bp, Cannabis indica
acaataagtcggccacaagattgatgttgggagaaagacccccaatcggtttggggcagaatcctttacgatgcggaatccagggatccccccagatcttagtattttgaccagtggtaaccaacttgcaagcaccttttctcaagatggaattagccttaacaacgcttttccagaaccaagaatcagaatctttatacctgcagctaagaaggtcattcccttttaggtatttggctcttaagactctgcaacacaaagattggcatccattaaggatattccatccccatttggccagaaatgcctggttcatttctttggtttttcggaaacctaagccaccaagcgattttggaagacacagtttatcccaagccttgagatgaatcccatgatttcctttctcgaacccccaccaaaaatctctgaccataccatcaatcttgttaaccatgcgagcagagagttttgttgtttgcatagcatacataggcatagccaatcccacagatttaataagagtagcacgcccagctttagataaagtttcagctttccacccctgaagctttgacgtgagattgtccagaataaaattgaagtcagcatccttctgcctggacctaaaaagaggcagacccaaatatttgatacaaccttctggggaatcaatccccaaagcttccttaatttctcctcgtaagctgaccggggtatttttactaaagaa

SEQ ID NO: 398371 - DNA, 538 bp, Cannabis indica
tagagctaactaattaatactattgtttattaggtggaactgggaaggttcataatgttattcatattatataatatattgatttgttttttcatattgaaaatattagtagtaacatataattccgtcgtgaccaaattataatcatgagataactttgcatacaagtttcctaccaaaacatatatagacaattaaaccacttcaaccgccgcaccataccgcaccgtaaaataaatatggtttgaaattttttgtggtgcggttgcagtttggattcatcctaaaccgcacagtgcagtacaatttgcagttttgaattgttaatatgcggtttaaaccgcactacaccgcacattataaaataccaatttttatatgggttatttacaaaaatatgcaaaaataaagataagttttgatgtatatatatggcataaaaacttaattacattaagtatgacatttttttttaaaaaaaaaacttacaaatatagaaaaaagtcatgaggaatgccataaaaaactttaaaattgt

SEQ ID NO: 398372 - DNA, 769 bp, Cannabis indica
tcgagaaattagttttttgcctcttgatgacttcaaggaaactaagaccctatttccaggcccatcccattaaggtacttacaaatcaccttctttggcaagtcttgtagaaacctgaagccttaggaagtctcctaaaatgggccatggaattgagccagttagatatacactacgtcccgcgcatctccataaaaggacaagccttggtgaacttcataacggaatgtaatgaagcaaaggccagctcctatattccaacctcgcgattgtcggcatggaaagtgtatgttgatggggcgtcaaatgaaaaaggatacagtgctgggatagcaatgatattgccagacggactccggccaggccaccctatggttcgcatttccaacttccaacaacgaagcccaatacgaagcactaattgtagcactaagattgaccaaagatatgggggctacaaaggtagaagtcttcagtgattcacagttagtggtcaacctggtatcaggagaataccaaacgcgtggagaaaaaatggccgcttacgtagcaattttcagagaaatgctccatgagtttaaagaatacaaagtgggatgaatcccacgagaaagaacgcttacgcagattgtctggccaagctagcctcggacaacgaaatagaaaaactaagggtggtacccatcgaacacctcacggagccaagcatcaaagccaaagaaacggtagctactaatgagcaaggaccaagttggatggactccatcat

SEQ ID NO: 398373 - DNA, 1044 bp, Cannabis indica
gatggaattagtgagaacaaatacttaaacagcacaaacaattttgtagggaggcagatatgggagtaccgtgctgatgctggtactcccgaagaccgagcagctgtagaagctgctcgtcttaatttctacaaccatcggtttcaagtcaagcctagcagtgacctcctttggcgaatgcaggtctaattattcacttttatttattttacttaggaatttcaataattataatacaatatttttgttatatatattgtatagtttttgaaagagaaaaacttcaaacaaagaattggtggtattaaaattgaagataatgagaggatctcatatgaaaaggcaacgattacattgaagagagctgtgcattttgtttctgctttgcaagctagtgatggacattggccagctgagaatactggcatattattcttccttcctccattggtaatattattatatctataataaatattttttgttatgattttataaatatataatataaactatatgataattaactttttcatatttatgtaggttatgtgtctttatattacgggtcatcttaataccatatttagcgatgagcatcacaaagaaatgcttcgttacatgtactatcatcaggtacattataaatactaaagagataaggataactccgaaactaattaaaccttagatagcaataaaattattggatcattttcaaaaaaatatatatcatttttattttatttttttggtttttggatccctaagctgggtgggccgaggcctagctcggcttagctcaagttcagtcccaatttctatgagttaacaaaagcttaatatatatgtaagaatttttctgtattcaattaattaatttgtacagaacaaagatggtggatggggattacacatagagggccatagcaccatgttttgcacaactcttaattacatttgtatgagaattcttggagaagggccagatggaggacaagacaatgcttgtgcaagagcaagacaatggattcttgaccatgg

SEQ ID NO: 398374 - DNA, 1351 bp, Cannabis indica
  modified_base (178)..(178): a, c, t, g, unknown or other
catttagtattttattttatatttttaataatatcttataatttataatgtatgtttgtattttttagtatattagtattcttttatgaattttaagttgtattttagataatagttagtttgttggataataattattgtataatattttaatttttatataatttaatatttttanatttttattaattttttattataaattttatatttttattaggggattccctgccgcgttcccgccccattagagggttccctgccctattcccaataggaaataagcggggatggggattaaaatcattaatgggaatggggacaaggggaatactccccgccaattccccaccctgtgtccattcctagtcccagtgcccacgttgacatataacgtcaacctggacgctgggtgagtgggaaaatatcttgaggatgtattttttaatgcctcagtgatattttgacatcacttagtcgtgttttggtaaagctggttaccaattctcggaggtgttactacagcccatttctgagtaaattaccatgttggaaatgcaaaaatgtgaagttgtgaatttgatttttttgacttcatggctctcagttattgtgaaaaactagatgaacgatcgagacggaatcataatcggataagcaaaacccagcgcaacaggctatttgtcaaccaaggcattgggtgcttattttggagctttcgagatgttgttttgatactttcgaggttctagaacttgaggacaaggtctcttaccccattttttaccatttcagggagaattcccataacaaagttggtatttgaatgatcgaaaccagtgtaccaggttaattgtcaacctggacgctgggctcaatttctaagcccgcgggtttgtatttttctcaccgagtttgcttatatcttcgttatttatgatgaccaaaaaataatcgaaacactttttctagaaattgattggaaattgcccaggttgacaatgtgtcaacatgggcggcgggcccagtgtcaggtgtcaacctaagcgttggctcttaactcagacctcttggaagttccatttggtccccaaaagtagctgaatcttaatctttgctgaaaaagaagaatatgtccgtaagagttcttggaaaacatcctcgaaatggcccaagttggcaaaatgtcaacctgccagccccaagtgttaaccttggggctgggccttgattctggcacccaggaagtattgtttcttccccaaaagtacttgtttccccattttcgatgaatacgagcaagatgaacgagtcaaatttttgatctgatacttggaagtggcccaaattg

SEQ ID NO: 398375 - DNA, 786 bp, Cannabis indica
gctgaatggatcagaatgagtgaggagctcggggaccgagaccctatatttataggtgagatactccatcagtatctgtgccacattaatgtcagaatattttgacaattaattcaggaaatcaaatcaggtaatgaatatagaaatctgaccatatatagaatattacataattgattttgtccagatttaatgaatataaaatattcatttatcagaaaatcaattatttatttatttccttaaatagaaaatcattttcttaattagaaaataatttccataataaaaatattctaataatatattgtctgaatcttattttttgaatattttaaattattttttttttttgaaattttacagataattataaacaactattatgtatacaattatgaaaaaattgaactaaaacttaattactctagaatgacaaaaaaaaaaattcttaagtggtgtattataaacttatcctatattatatagtatatcttaggatagtattgagtttttaattaaatagatactattacccacctcaactcaaatggtaggccaagagctgctctgctggcataataaaatgtgaaatttgtaataatatgggcctgtgcaagcagattaaaaaaaaattaggaaattatatataaattttataagtgtttatatttttagtgtaaaaatatagtttcttttgttttttttgttttttgttttttttttttatatgagaaatctggtaactagatactcttatagtaagcagagaggtaactaataatt

SEQ ID NO: 398376 - DNA, 642 bp, Cannabis indica
acaagttgtgaaatgaggaggatgaagctaggggtcatgatatataaccctattgcatcgattatttgttattaacgaaggccataggtgccacgtgtcgaaaaacggctgctcctatggcgttggttaataccaaataaccaacgcaataaggttaatctaaaaccactcattcaactcgaactcccaaccgacagcatagatatatataaattcaatacctatggtttttaccaaaaaaccgcccctaaatgtcaatgtgggtattttcacaccctttagcttccctttttataaaatgggttgaaaaaagggaagctaaaggcccatattgcagtagtgtgcctcagcaagatatattttacagcgtgtcttaatctacgtcagcattgaccctttaaaagtggttaaaatcacagctgtgagattttcaaataataaatgtatctatttacatggagcataatgaaggcccacaattttgaggaaatattcttgtgggattcaaatttgaatgtaattaactacaaacctatgttattataaataagggcaaattatctagaaaaagggacaaaaaaatcttaagagaaaaagagaatacactgattgtaaagagccttgttctatatcagaaaaatc

SEQ ID NO: 398377 - DNA, 683 bp, Cannabis indica
gacttctttgaaagtgtgtattaatttattcaatcaaagtgcgagaatattatattttgatataatattttgattgattaaataaatattacaagtgtgtcacacattttaatctagtggaggattgttatattatttataaatataataatatttagattaaaatgtggtaatatgtgttattatgtgaataatatatattaagtgtttggtaaataaattgtgtaacatatgatttatttaacctaaaattgtaatctacactttgtaacatggagaagagttacaaaattaattgtttttgtaactttttttggctgatcatatttttgtgtaataaaagagatgttacacaaaattaattataggattcaaatattatgaaatatagttgttacaattatattaatgctcattatatgagagaaatgagatgatgtgtttgaatatttctaagtgtaatcacctaaacactatataaaagagtctaatgtgttcatttgggagatcaaattttatattaagaaagcactttgctagaaaatcctaaaaggcttgataatttccaaaactattttcattcccttagtgcttagagatggggagaaataagcttttgagtatatgtgtaataccttgttcaagtcatgatgattcgtactattctacaacttaaagttatg

SEQ ID NO: 398378 - DNA, 919 bp, Cannabis indica
ctctcagatatataaatctcaatcacatgaaaacattctatgaaaccctataagctatactaaaccatacaggtactctcgtacctatatcgaaatttcagttctatttcattatagcataattgacactcacttctcagatctcgcaatcaaaatcatagacagttaattggtggaaaaacaattaaagtaattaaggacgaatgaaatagaatacataaaattaggggaaataaatcatatttaaaccataaagcaatgtaaaaaaatatccatctaaccctaatcaagtgtttagctacacatgttcatggaagaaaaattacacatattaactttaagaaagagaagaagatagagaataaaataatgctaaaaatcctttatagaatgcctccagtattgactttggtctctaaaattcgtactcctttttccctctcaattccttgactgaaatcaactttagttcaccatttatgtaggctttcaaggactaaaagatataaaatgcccatgttaaatgcctattcgaccaaaacccacgtgagagaaaaagacaatttttgtgcaatttaggggggcgggccgcgacccatgttagagtttcactacatggcttcatttcgatggtaatttttctattacattcactgatagtattttggctataactctctcgatattgcttggaattagataattcaagatgtttcgaaacgataaaagagagatctagaacttttatgttttgccattttccaaaatataatcagaagatagtccaatttaggcttgaagtttcagtttattttcttgcacaattttctctattttatcatctttttgtgagatttttttgatctttttcccatcttattcctttgatagtttctaatcttcttctattttaaatctg

SEQ ID NO: 398379 - DNA, 730 bp, Cannabis indica
aggcatcaagtcacgaaacctagcagacagctggggcatgatactgttggagaacttaattcagaagcctcaggatcaaagagaaaagacgattccaaaaggctacttaaggataagaaacccaacaaatatatccctctttattttgaatataccgagctcagtgaaactcgagaaaatatatacctcgcacatgtacagtaagtcgtttttagcaagctaaaaactatgaaacatgcgaggcgcaaaagggatccaactaaatggtgtgaatatcatggagatattggtcatgccacagaggagtgtcgtcagttgaaagatgagatagaaggtctcatatcacaaggacactttcaacgatatataaaggggcaggacgatgtccatgatcagctcgatctgcccaataactcgagcgacccgagattataaccctcctctgtaagaggaagggacacctcggttatctcgagagggagagagtcacaagaatataaggggcaattacttcggtgaagcaattttgtaaaagaattgcgacgtgagtaaatatcggcccactatggttgccacaccaagctgccacgtggaaagctggacgttaaccaatagcagacaaacaactaaaaaccaggattactttacctggaactccgggatatgttagggattgaccctggatattgaaacgattgtgggagtatgttagggattgaccctaaacatc

SEQ ID NO: 398380 - DNA, 509 bp, Cannabis indica
aacgtttaaaatatatatggtttcgttaaatgtatatatttatagtatatatgtgcatgcattcatttgtatgattatatatatgtaatataataataatctcaatgctttatgtatttattatttgattataattttgtgttttttcaaatttgggagaaattctttttgggctcatttattcaataaataataaatggtccgtattagtttgtattataatatttacaaagaatttggggtcaacaccaatctccgacccggacccggacccggaccaggaccccaaacctcggacccggaccccgaccccggaccctgacccggacccggacgcagaccccggaccccggacccagacgcagaccccggaccctggaccccaaactcggaccccgatcctaacccggacccaggacccagacccgaacccaggacccggacctcggacccaaacccggacccgtgacccggacccagacccagatccagacccgtgacccggaccc

SEQ ID NO: 398381 - DNA, 627 bp, Cannabis indica
tttaggaagaatgcttgaatagttgcaactttatgttttgaatacgcgcggatattcggatgaacacttcgaatgctcgcatgtctgttcatcttaggcttcgcaaagacttaatcacttctaactgttacttagaactttaggattttgtactctgtaaattttgttgtgggaacattggttaagtctttcaaatggtgggcgtatcacagtattctaatgttcatatatgcgattatatgttccttgaaatactgagatacaccagccatttgcgacatgcgctaatgttctgataagcgtatttttggctagtagatattctcgaaacggtgggagtatctcagtaacttcagggttatgcttgagaacgcatgccccttgagtcactgagattctcccagccgtttcttgaggtatatcgctagctaaagatgcgtgacacactcgcaggttgtgattagttggactcctcgaaacggtgggtgtctcccagttacttcagggccatgctaaaagacgcatgtcgcttaggtcactgggatacacccagccgttttttgagatgtctttctattcgcacacctatcttttcgcgtattggtgggatggttagttttcgtgaga

SEQ ID NO: 398382 - DNA, 656 bp, Cannabis indica
tctattgtgttgtttgtttttagcttgagtcttagatttactcggggcgagtaaagattcagtttgggggagtttgttaggctatttttagcctatattttggattgattttatgtgcatttttcactgtgttaggacagaattacgcttgttttttatgttttcaagttctttggaataatagaggactcgggatgtaaaaatctagtaaagacgagttgggccaagaaaaacaccattttgaggaaaactgaatatctggccgcggctagacacagcttggccgcggctagatcacgaaatggataggggaactttgaggctacagtcgccgcaacaagatacaccctcgccgcggccatagtgaacttacagaaaggcattattaggcacctatctggccgcggcgagaggaagcttggccgcggcgagatcccgtacggctgaggggtatttttgtccatcgaaccctaaaaattagttataaatggaaaactgcgattggaagtcaggggaagcgatttggaaccctaaaacacagtagagagcggcaggaagagcgaagtgattcaaagtgaagatccagaattcatccaccaacagtttctttctttattcctgtttaatttatttatgttgaatattgctataggaat

SEQ ID NO: 398383 - DNA, 866 bp, Cannabis indica
aagtttctagctatgcttaaagagggcttcttttctggctactgggtatgcttaggccacgcatacacattttcatttctttaattttaatttttttattaaaaaaaaaagaagaaagaaatatttaatagaacgttcccaatgggagaatggatggtgtgtgtcattatcagtttgtggtataaaggggagaattcacaccaccaaggatggaatccaatccacatactaattttcccctacaaaactaaaagcaacgttaattttttctcataaacaaaaagaaaataagttatccatctttattagattactaataatacaataataatttgtaccacgttaaggtttgtaataagtaataggattatttatttatactccttgttcttaaattatataaagttggtcctaaattttattttttagtaaattactttataaactatataaattttaataaattggtctttaaattttatttcattttgcgaattggtcctcaaatttttatttttttaaaaacataaagtcttcattattaaatgatgtattttatttatttaattatttaattttaaataattttatattgatatatcttatcaaattaaaaaaaaatacatatttttaattttatatatattttaaatatgtcaaaataagaagaaaaaaacaaatcaaagacatattttaaaaaatatatcaaaataagaagaaatatatatatatatatataggtagtaagtgatatactttttacttcatgctacagcaaaggaaattaggtcaatcaaagattaaaaacaactgattgtacacaaattttattttagcatctacataggattatttcatattctttt

SEQ ID NO: 398384 - DNA, 1109 bp, Cannabis indica
taattctattaagaagttactagttaggaatggaaagtgctttccaccaggagtgcattggaataagaattccttttgaacaatagaattgtgatcgtatgggaataagttctcctcaattttcaaacccttcctattccaagggcaattccagccaaacaaaaatttaattcatatcatataagaatacttacaatagctttgcattttttatccaaagaaaatataaaacttatacaagcattaaaatatgatatataaagctttgaaaataaaacttgaaagtaagaattcaattttttgttaattaccttgagattttagttgattttttctgtcccacttccacttccagaagcattgtcaagattctcaacattagtaatacatgatccatcacctaaaaaatattcattaacataaaatttaacatctacaaaataatttcaattaataattaatatataatggttgagtaatttgttacctggaataacttgttcacatgtctctaaaccttcaatttcatccatgtattgtcgaagtacaataggttcctcatactcacaagtataccaattcttagaacaaatcaaagcctccaccatcctcggagataaagaactcctaaatgcatctaggattcttccacctgtagaaaaggctgattcagatgctactgtagacatttgaacaaccaagacttcctttgccatacgagcaacaactggatatttgaatccattctgcttccaccattggagaatatcaaatgtaggatcaagcttctcacgacgatcattcaagtagtattcgagatcatcttcttcaatgtcgtcactaagttgtagctgcccaagaagaaatgattctgtagttgcactaataacaggctcagatggttgagattgagatacctgagactgagattgagatggttgagcttgggattgttgagcttcaaatggctgagttgtttgttgttgtttataaaacacatataactgtgccaatgtatcggtgaccaactttatcattttttcagcctcacttggattgtacacaaatctaaaacctcgattcacaacctctaatttatacctcggatc

SEQ ID NO: 398385 - DNA, 681 bp, Cannabis indica
attattgtgggcaggaatgtagctgtctagctcgcccaggtatccaccctagtcaagagttcgaaggcacgcctccgtaatcttggacggaggacttacccaactggcgcctaagggaccctgccttctatgaggaaccgccgcagcaagctcctcactgacgtagtccacgccctcaaccaagacgtcttcgtcagcatcgactggctctccagcctcgttgtactcctcgtaatttgggggttcaatctctgcctcttcctccgcctcggagggactgccaggatgtacatcgtacagctcctcaatctcctggatctcagcgtccccatcacgattctcctccatctggacggccggatcctgttcggcgctaggcaaagtggtgtgccgagccacttgaggatcagatgcgtcagccagacgtgtggttttcttgtacgagccatcatcctatggctgggtacaagggttgagaatgcccttcgctagaggaaggtgggctagaacaaagacaaggatgatcctcgtgcagaagttgaagcagggtcctggtcgatctgatgtccgtgttcccaagactcacctgagttcatctacaaaagcaacacacgagatgagtgtttggtcggaatatcgaacgataaacagcaaatatgccgactaggagtactcaacaga

SEQ ID NO: 398386 - DNA, 509 bp, Cannabis indica
aattatttttatattgatatttaattttaaaaaataattacttttcttaaactcatttttgttggcttcttattttttggcatttcataatttactgctaatttttttatgtttacatttagtcttttctttgttttgcttttaggttgtgcatagttttggtattattgactgtttgttgagtgttctggtttttatcttcttgttgtttggctgcacttttgagacgccacttatcaaataaaaattaattatgtcaattagatattatttttcttgcaaaaaaaaaaaaatgagtttaggaaaagtaaattggtacggtactaattaaaggacatctaaaattattcaagtaatcttacattggaaaaacttttgaaaataaatatctatataaaaacaatttaaattaactttaaaaaataataataataattaaaaataaaaattattaaattttttaaatattaatatcattttattttttaaataaatatattattataata

SEQ ID NO: 398387 - DNA, 535 bp, Cannabis indica
gtgaaaaatgatgttaggcacataaagagaaaagtgcattctcttaccagtttctttgggataaaagtatggataagtgtgggtgcttgtttggtatgttttgcttatggtataatgtagcctaaatgactttttatctacctttcacctaagccaagacatttcaaccgagaaagaccttttgattccaagcaggggttgtcgatattagtggagagaggtaggtcatgcaagaatattgaacatttgttggtggaacgttggtaagagtagaatgattgtgatatgttcaaattgaagtgttttgcatctatacgtgattttttttaacttgtgcatccgagtttatacctagagttgttgaattgaaattttggtttggccaattgattgaagttgcacaggtggcagtggtagtttaattatttggaggctcagttatctgtcgtgttgtttttgctttgtcttagttttaagttttactcaagggcgagtaaagatctagttcgagggaatttgttaggctaaaattagt

SEQ ID NO: 398388 - DNA, 871 bp, Cannabis indica
aattaataaaaataaaatttaaactcctaaactatgatacttgtagaattttcctcaattaattattatttttattttttgttcgaactattgaggtagctacgaattttctctttcgattctattttgctcatttttaagataatttattataatgtgatctcgagctacgtgtataattacaatataagggtttattcaactaatttaagctaattgaaatcaattataatgatttcaaatattgaaaaattaactgtaaaattatgaatacaaccccagattttatattagattagtattatgatctatacaattattattttttttttaactttcaaattacattaaattagctctagatcattggtcttacacattaggaaaatgtgtggcaaaatgaactaaatattgcaaatgaaaggcgcaaatttataattatgaggagaaaatcctataagtgtctttgagaagtaaaaatcctatttattcttaataaaaaaatatacttaatcataattaatatatatatattatatacctgctgatttcactaagctcctttttgtgctgggattgtagtagattaaaatctggctttgcaagttgtagcaatactttgttatgtgaggcatctttttcacatatcgaaatgaaatgcttagcatgaacatttactagggtctttcttaagggtctctctagggctcgagatatttcttttgactaagaaatcatcgtcatcatagtgttcttttttttcttgtccaaaaaactcggtcaagtgtgttgttgtgaaagcaagtgcttcatcaagtatattttctccaacacaactcaaatgtgaggcttcatataggctaagcaaacc

SEQ ID NO: 398389 - DNA, 924 bp, Cannabis indica
taaaagaaagaaaaaaacttaaaaaaaaaaaaaataagacaaaacaaaattaagaaaaaaaaaaaacaacaggaagaaaaaattatagtacaaaagattaaaatgtatatatatatttttttttttaaaaaaagtagagtacataaaaagagagaattttttttaaaaaaaaaatttaaaaagaactaaaagaaaggggtactaaacaatttttttttttttaaaaaaaaaacacatgaagacgaaaaataggtaaaaaaatcacagaagacaaaaaatgatgtttccttttaaaaaaaaaaatggagcaaaaatactcaaaataaagtgagattttttttaaaaaaaatatatatatactaacttttttgagataatatacataattgaaagaaacattgagatttataaaaaaaaaataagaaaaaaaaagagatttataaaacaaaacaaaaaaaggacaaaaacaagtcgtttttttattcttattacatagtaaatatataaaatcacattaacatctttgatctctaaaaaagatgtatgattgacttaagataaaatatttcaattgttgggatttttattttcttgacattgttgaaaataatcataatttcattaaactaaaaaaatatctttagaaaaataataagactatcatctatctaaacaaattttatattcatagagttgtaatcaataaataatataacactcttaaaaataatacaagcttgtgaaaagtacctttacaaaatcaatgtcaatgaaaaaatattatcatatatatataaataggaacacaagtgttaagcaaatttggtgtaagtaaaaaaggaaacttacaaaataaagacaacaaatgaaattaataacatcatcaaatattaagtaaaaattagaatataaaaatatagaaat

SEQ ID NO: 398390 - DNA, 515 bp, Cannabis indica
ttagttttttttttttttcattcaatcttaatatgtactaaattatgtttgtgaattttttttgccgttaaattttttttgaactattgattgttgaatttaaagaattttatttaattttattcaattttactaattcagtaattatttatgtactaaatcatgctccaaattttaatatctatcaaattatgtctctcaaattttaacatataataaattatgacacgtgaactttcatccatattagatgttgtcgagtgaatttcgcaacaccaaaaagtgtgatttaattgataaaaaagagaattatttgagaaatgacaagtgcgagtattcaacctaaaatggcgagtactcgactgggaatgcaagaacaaacaaccaggccggaaaaagtaaacaagacgatgaattatagtggttcagtcagatttcgttctgcttagtccactgtagcaagggattcgtaggtgcattttcatggtggatcacccctttatatacaaagtagg

SEQ ID NO: 398391 - DNA, 455 bp, Cannabis indica
aacaaggtttatttttctgtaaaatagaagggttacagtctaaaatatcctagtgtaaatccagtcgcttgtgagacaaatggccaagtcgagaatgccaagtttcagctaaaactgagaagatttgagtggactttagtgcagtatcgaggatgtaaagatcattgacagtactacctattccaatcgtcatcctactgacattgtcttgcatagtgaagctattagaagtaaaatgcacagtgataggtgcactattagtaaagtagctgacggatacgatgttgtacttgaaagtaggagcatacaggacattggtcagaaaaatatcattatctaaactaactattccactttgattgaccattaaacaatcattgttaggatgtatgagtttagttgaaggtatcctacataatacattgaaaaaagattgacattagagcatatgtgtc

SEQ ID NO: 398392 - DNA, 816 bp, Cannabis indica
gagaatactagcttattcggtattaattttcagtttcaattttcaagtggaagttttgactcttgttgaaattgaattggattattactattgatatacatgttaaaactagtttttttttctaattatttattgctggattttagccttgaataactctaatgtatacaataatgagttaggagttttattttttcattaaggttttgttgtctaaacttttggagacatttaatatagcaacttatagattggctaaacatatgttctttaattggacaataaggtttttttgaatgaaagaaacctccttcttccatatattactcaattctagtacaatttcaataatatatggtaaatataaaaatgtaaaattttaataatatatcataaatataaaacgtaaattttaataatatatcgtaaatataaaatttaaaatcaatcaccgagacatctatgatattatatatcgtatatcgtatatcgtaaatatatacacatgatggtatattgtacacgtactatttaaatttataaacatacatgcatacattaattaagttagtacgagtactttgttgtttttatcagcataatttgcatgttttttcatttaaatatatagggtgcacaaaatttgagtttatatgcttaattttattagatgtaagtaaaaaaaaacactcattttggcttgaattattccatctattgagagaaatgaaaaaaaaaaattaagtttgattgaaaaaatttgaaaaaaacatatttttgatataatgtaaaaaaaatatttttaatattttttaa

SEQ ID NO: 398393 - DNA, 552 bp, Cannabis indica
gatttaagtaggttgtgatgcatgtttattgatttaaccaagtttgagttttgaactcaaagcttggagctttaatggtggattttaattctgggcgtgtagggttgttttgttgctttagaaatgttcattggtggtctaattagtaggtctggaaagtttggttgagtttggaaacgtttttgttggggtttgatttttgtaggttttctaggtaaaaccggctaaccagttttacactgcctgtaaaaccagttacctaaattttgcagcagggtgtgaaaaccagtttttctcagcttgttgttgcgtgctagtttcaggttttcaggcaatttattccctgctagtttggggtatctttgtattaagttccagtaggctagagcggttttaaaacctttctcccggttgtgatttagcgtgtcacttatctgtgttgtgattgttacggtttaggagcctgtaattggccgagcagatcgttccactcaggttgaccggcacacctgaattcggaattgaggtaagattagtataacaatatgcata

SEQ ID NO: 398394 - DNA, 1043 bp, Cannabis indica
gcaaagaatgatcaatgggatttaggatcaagacctgattatgcatccttgtggatgatgaggttgaggtactagatgtactacctttgcaatccacggttgctgtaaagagacaagcaaaacctggattgtattgtagatctccttttgtcaacgagtttgattcttctgaacaaaaagttcaaaataagaaaaagaatgagccatctagtgaattagactttgaccctaagtagttgtttccttttgttaaagagattgggatgaacactggtgccgaagattgcgaggaataccttaagtggatcgaaggtgcttggttgttgaagaagaagtatgtgttttattgttctgtccttgtttttttaatagttgatgaaatatattttctaactgtttttttttcattttggatttttttcttgtaatttcaggaacaatgaaaaaacagctggcgacattgatcctccctttgattcaagcatagctcaaatcgatgacaagtcttggtttgtgattttacagacttgtggcaaagaattgttcgatttggtacgtaactggttattttttattctgtctatttttattttgtttagtttctttgctttttcaatttttaactggttattgtttttatttatggtgtgcagcatctgaatatggcaatctactatcttaggaagagcatcttattcgatgcgaatgttaataagagagtgatgaccacatggccatattttgatagtgtatgctgattttatcaaggcaaaacgtaatccgagtgtcatcaggtacgataatatggtcaccgattacattctagggcaatataacttttgtttccagccttggattggtgttgacgatattgtcggtccgtgtcatgtcggtcttcgacaactttggatttttcttcactttagcattttaaggaggaagatcatcgtattcaattcaatgatgaatacaaagacaaatcaaaagaagatcttgcctgatctccttgcgtactgtgagttactgccatacttccttgattt

SEQ ID NO: 398395 - DNA, 925 bp, Cannabis indica
tctttttttttaattattttcctcacattattcgaggatcatcaatgcattagtatatatttttaattgttgtcgagtgaatttcgcaacaccaaattatattattttattaatatgaaagagaattttaggagtaatgacaagtgcgagtattcaacctagaatggcgagtactcgactgggaatgggaaaacgatcaacaaaactggaaaatatcagtaagacagagaattatagtggttcagtcagattgtgatctgcttagtccactgtagcaagggattcgtaggtgccatttcatggtggatcacctctttatatacaaagcaggtgtccaatcggttacacaaggatcacattcattgttaatccattatttacatattgaattgcaataattaaactaagcaacgttaacattaataaatgaatgacagttactcagttcatcaacgtatgcgtcttccgtatctgcgagttgactgctcatattccgatgtacaactcgcagggttatcattatgtttaggatgtctgcgtcattagatagtcgcttcttgtagacatcgtgtgttgagctgatagaacctagacatgcgggtctatattgcattataaaggctgcagggttcttaagatcaactcgtatttacagagaatcgttctcctggtttatacaaggacatgctgaggatgatcgcatatattcgatatatgcgatctattctcttgtctcggatgcgattagacttcggtcatgtttgccacccctcgctggttatatcttaagcgaggtttaaaacttcgaggagtccctcagggacatctcagctttctatggaaaatctgagtatacgtgtccttttagtaggggtctggtctcgagtttcaaggtgagagaaatctcactataacacatgcccct

SEQ ID NO: 398396 - DNA, 512 bp, Cannabis indica
gtcaccctcccattagatcaatgggagttgtagtttttattctgagtgaggtttctttgttagaattctttatcactcataaaatatacaataacaaaatttaatttcatagataaatatattacatattaatatgtgtataggcatagatctaaagaatacatttgttaatttaaagagaagaactcaaatagcggaaacgtaccttaatccatcttttagagatgatcattttagtgatttgggtaatgaactttcaaaaatacaagacttagggttctctagttttctctcttgatgggagaagatgagaatagaattgactcttgtttcttggggaccaatataacctaataagttattaattttagtatttctaatttagccccacaataaaatagaaatatctcttaagatatctacacatttattccatgaaactttaacatgcacccaatgacctataattactaaaatgatcactttatttgggtcaaacttcaaataacaat

SEQ ID NO: 398397 - DNA, 1127 bp, Cannabis indica
tagataggagtacatcaatgtatccatttaaaaagggagtattataaaattttccaatgttatttttttggaattgaaatctaaaaaaaaaaaatctaaaataatttctaaaaaaaaaaaaaaaaaaaaaaaaaaaaaaaggaaaaagagtataagtaactggttacttaaattgcttttttattttttatttttacacatattgtacaagactcataaatttgtaaattttttaaaaaattaaaaaaaaaaaaaaaaaaaaaaaaaaaatgtccattgtgttctatgtgaaacctaagaatcattacttggtctttgatggatgtgtactattatcaaattataagagttattaatgtgttgtgcttttaggttagtatatatgtgcttatgtattgtgttttaagtttattgtgttgtgcttaaatttattttttcatgtcaatttatatatacaactctaccattaaatactaaatgagattgtcaatgtatataaaatcttggaagcaatgaaaatataaaccacgtatattccattctttgatttattaattaatgttctgttcaaagaatcttcagttcagtcaaatggaagatgtgaagaaactattcttttttaggcaaaggtttttttgagcagtatataattatattaatttggtgagtacactgcttgctggatatggatttattattttaatttactttttaatcatttaaccaaacgttattttacattttcaatgtgatcttaaattgtggggagaatgacagtatcttcattcctccaaaataaaatgttactaatattataaaagttgaccattgaccacgtcacatacacatacacttggtaaattaacagatcataaagaaaagagaaaaacaaatcatatccatgaattaagccatacccaattcaattacatccaaagaaattcatatagacccaaaaagaattcttatttgatgttagtaaatttagcctatttagggtaggatgattcttggggaaataaaaaagagatttttttattttaacacttttaaatagttttttttgtatttttacgaaattatacatagaaattcctattgcaactagcgctgcaacttaaattgta

SEQ ID NO: 398398 - DNA, 736 bp, Cannabis indica
ccaatgtgtgataaagcaaagacagttattagtccggggattgctgagaaaatttaatgagctccaagataaagtgtttcatcaccatggaaaaaaacttgcaaacaggagaatgatttgttagaaaaattggggaaggaatttgtacaattaatttgtacatccaaactggcatagttgaatggaaaaatattgggaaaatttttggttcaatgtctctataattgtattagtatggtgggtaaaatattaaagtattgactgttgttgaatgaaaataaaattgtattagtatggtgggtaaaatattaaagtattaactgttgaatgaaaataaaattgtaagtatggtgggtaaaatattaaagtattgactagtattctatctttggctattacatgcttcagtttcaagagcccgaatcactctcgtattataaatcttgccgtgactttgcatgagaggtgcaggatcaggtgcaaaatctacgagcgaaccagtctttcatgccgatggttcattcaagacattatggtgcataaataagcaaacctggccttgaagttggaagaagatgctacaaatttagttaagaaaaaaatacaacaaaggacattgtggaaaactgcaactaagaaagaagaaataagaaacaatatcctttcttacctgctccataagattacgaacgactaattaaggctaggggaggtggtaaaccatgagctgaaatat

SEQ ID NO: 398399 - DNA, 857 bp, Cannabis indica
attcattggtactatggccaatgctgttatgatattcacatctcttgctgggatccctttgggaactatccctatataagggacgaggcttccggtaatgtgtattttgccttgtggcaaaatatacccgctcctgtgtgttcgtgaacattgtgtattgggtatattgaagggtatatcccctccgttgtcgtttatcctccatccggttactacctttcgacgacctcttgctccgggagctttaaggaggtcctgttaggcttgcggcgggggcagactgggacagagcttgagcactcatcccgaagggttgctcatgggtgtcccaaagtgtgatgatgcaagagccaaggctaggctttggttatatccttgtgtagcgaagaattgtatgtcgctcatttgaggagtggtcggaggcatggctcccgagagctgaactccggatgcatatcctgacactccggtcggatagtaccccccgtaggccactatatgggcttcttccaaattgatgtacttttggaccctacttcttgaagtcttggagattggctgctccctcctgttgtaattcgttctagaatggggtccccgtacgtatcccagctttgagaagggcaagttgttcttcgtcatccaccttcttggtctttgaagcttcttctttgaatctttttatgaagttcttcaaaagtttctgtgggcaattattttatgttagtcagggcgctgacttcgagattaatctttctcgctgcaacaaactttctccagaagctgacttgtagtttgttccagcagtccactgatcctggttctaactttttgaaccattcctcagcggaaccact

SEQ ID NO: 398400 - DNA, 576 bp, Cannabis indica
gataagtattgtcccattgaaacctgtgagctgggagccgctaggcgacagattcctgtccgtgagacctatggctgtgaaggcttctttgaacaataagttcacggaattcccattgtcgaccaaatattcttgccacaattttattggcgatgggagtctctatgacaagagcgtcatggtgagggaaactcaccgatttggcgtcttcttctgtgaaggtaataggctggtccatgagtcggggcctttgtgctggaagttgagtgacttctcacacttcatcgtgttttatggctccagcataacgctttagctcttttctggtggttcctccaatatggggcccaccggagatcatgaccactctcccattgggtcttggtgggagcccagggacctactgagggatggcccctccagaaggtaaaatgggtgctggtactctgggtataccccctagtgccccttgaggtaacaggcctcctactagagttgggttgagatggggtagccggttcttaatccattcatataaatgacccaatctgattaagttctcaatctcgtccttca

SEQ ID NO: 398401 - DNA, 489 bp, Cannabis indica
caagtgatagtgtattctcctctcactcaaatagttggggtgagtttggacaataaggagggtattggtgactccaagccttaagtgagggatcccaatgccattggtaacaaaaatctgccatgtcagtcaacaaattcatcatatcatggcttctccttaacaaaggctctatagttacctctgctccataatctacttaactttttgtttcatcatcaagtcttttataaaagaatagggtaaaacatccacttgagaaattgggataacatctctctccgagtactttaaatctcccccaagcagaatagaatggctcattgtattgttggagaaaattcacaaggtactgatcttgatatatcatttggatttaccttgcaagtcaaacacattaagtaaaacatttgtaaaataaaataaaaagaaaccaaattagaatagaattcaactatattgatattaactaaaataatccccgacaac

SEQ ID NO: 398402 - DNA, 649 bp, Cannabis indica
ttgccgcaattatccctattttaaaatagagaagaaatagtaaaaaattaataaaaaaattcaagtggaaaaaaaatgaaactctaaattgatgatgccacataaaaaagtataattatcagtcacaaagtaaaaaaataaatttcaaaatttaaaaaaaaagtttatgaagagtttaattaatttgataaaaaaaaaactcttatcaagaacatgttcgatgttgtaatagtcttcaaggaacctgaaattaccaaaaaaagtattggataaaatgtatttacctcatgatctaaatcctatacaataacaatctaaaataaaaaaaaaatgtgtgttatgtgtattttctttttagaaaaaaaaaaagtattaaaaataaggggaattactctatatattattttttttaacttttttttctttttaaatttacggtttggatttctaaggtggttgcaacgctagttacaataaagttgcaataagagtttctatgtaaaattcggtaaaaatgcaaaacaaaattgtttttatgtgtaaaaatgaataagtccctaaaaataattatatagagtgattaaaaaataatggagattagagaatatattatcagaatgagaaaaaaattaagttaatattaaaattt

SEQ ID NO: 398403 - DNA, 662 bp, Cannabis indica
caagtatcgaaaataatattcaaacagttacttaccaagcgtatagaaaaatcaattacgcttgcaacaaaatattgaaatcttatttttaacattgtaagctattctaaattttctaaaaatttatgttattctaaacaactacaaaatacacaatatattaaaaaggaaaaattagactaaaaaactttccaaaatgtataccaaaatgacttgttattagtaggtatataaagagttgtgcataaattgatccaatctaataagaattgaccgatccaaatataactgaccgccaaatattggatatccaattgtgatttgattggatgctatttttaaatatctaattggatcggatcagatggtggatggagtgtccaaaaatccaatacatccaacttctaatcgaattaattaatattttcatttagtttgaatgagtaattagattttaaattattatatgtaacatctatatgtatatataaaaatcaatattaaaattatactctttttttcgtggattggatggattcattctaatccaatacatagaagacttaaaatattggatggatctgatccgatctaaaaaatattaggtccgaaatattagataaaatcaaattaagccaataaatatatatatgaaatatatc

SEQ ID NO: 398404 - DNA, 1038 bp, Cannabis indica
tatatatttatatagatatagttgtttcatagaattatgaagatgatcacaagataagattgaacaagaataggaagaattaaacatatggacattgacaattgagacacagtggagaattaatagagtgaaaaagaatataaaaaagaaagaaaactctataatatatattcttcgtattgattcattttggaccacggtttactttgttgtaacatataatatagggtaaatatgtgtttttgtaaaagtagttaattaaactctctctttttaaaatgataaaatagattgtattttttaaaattgtacagataggatcttaaattaaatttttgtcaaaataaaacttaatattgatctgatctaaagatgttatgataaaactggttacattttctgtatctgttcctgtttgtgtttgaaattatcttaaagttggttagattaaaaaataaaaattactgaaaattgagctcaaggtcctatttttaccattttagaaattatagagtctattttgtcatttaataaaataaagagtccaattagtaaattttacaaatacaaggtccaaaataatatttaccattataataaatagaaaaatttctagatatatatacacaagaattttacaatagggaatttaaaaaagacttgaattttttcttggtctttaatcagctacattagaatttgagtaatttacgatataaatacttaagtttaacttccagttgcaaataaatacttaagtttaatttttgacagtaataatacctaagttatataattttggaacttttataggtacctgacagttaagtgttaagtaaattaccatgcgtcaattattgattggtccaagtcattaaatttttaaaaaattaatttaaatatactaataagaaaataacacgtggataatgacttaatatttaatggtgagctatctacagagttctaaaaatataggtgccgtttggtaacacttttgttttctaattttttaatcacaaaatgaaagtaaatttt

SEQ ID NO: 398405 - DNA, 514 bp, Cannabis indica
ccttcacattacttatgtctgtgtcattatttaccttctctataggtaccgtgcaataacaagtgcatactatcgaggagctgtcggtgcattgctcgtctacgatgttaccaggcatgttacatttgagaacgttgagagatggttgaaggagctccgtgatcatactgatgccaatattgtggttatgcttgttgggaacaaggcagacttgaggcacttgcgcgccatttctacagaggatgccacagcatttgcggaaagagagaataccttcttcatggaaacctctgccttagagtccttgaatgttgagaactccttcactgaggtgctcactcagatttatcgtgtggttagcaagaaagctctcgacattggagatgatccagcagccttgcccaagggtcaaaccattagtgttggcaaagatgatgtttctgctgtgaaaaaggttggatgttgctctgcatagtttgtggaatgaaaagtcctggtgtcatgatcagtactt

SEQ ID NO: 398406 - DNA, 771 bp, Cannabis indica
tagaaagagtaagtcagacaggtacacagatgtgttagagctaattcatactgatatttgtgggccttttgtttcacctgatatgggtggatataaatactttatcaccttcattgataatttttccgggtatggccatgttgagctcattcgtaaaaaaaaatctaaatctttagatgcttttaagattttcaagacgaatgttgagcttcaaaagggaaagaagattaaagctgtctattccgatagaggtggagagtattatgggcgttatgatgaaactggaaggaatcccggaccttttgccaaatacttgcaggaatatgatattgatgcaagatagactatgccagggacaccccaataaaatggaattgctgaaagaaagaatcacacacttcttgacatggtacgttgtatgttgattcattctagcttaccataattcttatggggtgaggcattaaggacagatgtttatatcttgaatcaagtgcctagcaagtctatcccaaagacaccatacgagttgtggtcaaacaagaaaccgagtttgcatcaatttcatgtttgggggtgtaaagctgaagtaaggccatataacccacaatctaaaaagcttgatctgaagactatgagtggttattttgtaggctatactattggtttgagaggttctaggttcttgctgggttttatgccctaaataaaactcatttcaatataatcaaattcgcttattaatatagatcagaaataacatttaatgtt

SEQ ID NO: 398407 - DNA, 560 bp, Cannabis indica
tctgttatgaagtcatggactcatagcctcttgacctcatatttgagcgcttgggcgtgctccttgtctagaaattgccttttttgctgaacagactagatgcttggattgatgttaagtttgtgggtcatcacagaggggtcaattcagaccatgaccatgcaaaaaggtccacgttttcccttagaaattttattagtgttgatttaatttttggtgctaaacctttcccaatctttaggaaaagtgggattgacctccacttcttccaattcttctataggcccgaaacttcctgtaggatccctaaagcgaggatctatgttgtgtccccactttaggccggacttcattgccctttgctgggcgtgtcttctgggcccttggcgggcatcttctctttcttggctttggaaagagccaagttgtaacaataacaggaaaattattggtctcccctcacacatgccaccccatgcctcgttggaaatttgaggcatatgaggtagatggaggttaccgccttcaggtcattgagggtcggtcggcctatcgatggc

SEQ ID NO: 398408 - DNA, 1008 bp, Cannabis indica
atttacttaacacttaacatccgcgtacttacaaaacttctagaattataacttaagtattatcactgccaaaaattaaacttaagtatttatttacaactgagagttaaacttatatatttctgccgcaaattactcttgttgttttcattttttttttgttattgaaaaaaataaatatatttaaaaaaaaaacacatgtctaattttaaaaatgaaaaaaaaatatatatattagaatgtgtcatagaaatcatattatttaatcataagaatatgttagcaggtgcaatttacgacatttgactaaactgaaatttgtgtataaataaaaaaaagtatatgatctgacttgtaaagatagtagcattaaaaagagcttcaaaagtaggtttaatcttctacatgaagttgtctagcatagataaaattgttcttaaaaatataaaagagttgtaagtttctattttgaagggaaatcccttgtgggtaattggctcggtttgattaataaaaattatctttctacataaaaaaaaaaaattaatcaagtaaattaatttaaaagataattatggtaaaactatatatctaaacaaattagtagcaaaaatacttaagtaatcagttttattatatatagttaactattagtataaaaaaaattgatagcaaaatttgtaagtaaaattattttttaaaaataaataactatataaaaataattcaaattaactttaaataataataataataatttaattaaaaattaataatttttttaattaataatattattttattcttttaaaataaatatataagggtgcactcttaatgggtattacccatgaatgggtaaaattagaaaattttgagtttttatgcttaatttttttatctaattaaaaaaatcaatcatttttatattatatgagctgagattgttccatcggtaaaaaaaaagttttttaagcaagaaaaataagaaaagaaaaagttagagtt

SEQ ID NO: 398409 - DNA, 574 bp, Cannabis indica
ttaactgtttgccaaatataagaaataaacttataaccttaactctcatgaaattatagtcatatttatgttaataagatttttatttaaaatctcaaaatattcttaagggtctgtttggaaaaccacaatataattgaatttgtatgtaattggaggtaattatacaatttgacatgtttgtctcaccatgaaattacactgtaactgtgtaattggaagtaattgaggaattccaattacactttccaattctcatgcccccatgagaattgaatgtaattacactgtgtaattactaaaaactttctatattaaacattagctattaaaaaatattattttcctatgtaattactaactattttgccaaacaagatattaggaattcattcatatataattaccacctcatatccaaacacactttgcattttaaaatatagtgtaattactaagctgtgtaattactaccctaataattaccctacttagtaattacacagttacttccaaacacaccctaagttcattttgacaaattataattattttttgtagcctttgtaactaa

SEQ ID NO: 398410 - DNA, 461 bp, Cannabis indica
agattgcaaattgggttgttgcccgactagacagacttccgaattgacaggtttgtcctataaaagggacacctggtgcaatatggagagttagaataatgtggttagggctagtaactgttggggagaatggaatctaaattgttcccataaccgaggtgaaagccattggagggctattggcgggagtgatgattatctgccacaggctccgttggatttggagcaaaggttcacggagatggaagttataattcaacaacatgaagaggaaattcagaggttgaaacaacaaagatctcatgtagtacattttaccttatataccaaaagttttcaatctagtattaccagcggatcagagtatggctagtaaccaagtggaaccattacaagggggaaattggatgcatttgcatttatggtggaggtggtaggggctcctgttggaaattatttta

SEQ ID NO: 398411 - DNA, 501 bp, Cannabis indica
ttttttccacatttaatccttttatttcctaatgcttactttggactgtggtgacactaggaatgaggatggggaggacaaagaagctattctaattgtccccataggtttaaacataatatgatagttgctttggcactttaaattgtccaatgtcacataatgtgttactttataattggtttggcttctttttaggtggttgtgcacttttttttagactactctcctactaagagtatcttcaattgtttcaaaaaaagaaaaaaaagagtatcttcaatggaatgttaaaatagttgtgtattgctatattttagcacattcaaagaaaagttattactctaatggtattttaaaaaagagtaatttgtggtaaaacccgttcaactatcaatttacttgcaaaaaaccatccaacttcatattttggtgggaaaattttccaaagtactgtttcgtttacatttttaaggtgtcgtctgtccaatctcattaagt

SEQ ID NO: 398412 - DNA, 500 bp, Cannabis indica
atacattccacttttagacaacactaccttatctgactcaattaccatacgaaatccatgtttactcaaaagtgaaccagatacaagattcttacggatttctggtacatacagcacgttgttgagagtcagttcctttccagaagtcattttcaggatcactttaccttgacccattatctcagacgtggcagagtttcccataaagagtttctctccattattcacttgttcaagagatttgaacatactcttgtctgagcatatatggcgagtagaaccagtgtcaatcaaccattctcttggattagacttcactaggtttacttctgagaccattgccgatagatgtatatcatcatctttagacatgtcttttaccatattggcttcacgattgttattcttttttggcagtctacagtctacagacttgtgacccaacttattacagttaaagcacttaccaaggaatttggactgcttcttggtgataccac

SEQ ID NO: 398413 - DNA, 838 bp, Cannabis indica
aataaactagagctgcaatagtacatataccattctcctaaatttagttattcccatcaagaaattcacttgcttgtaaagtcacaacagtaatcttccaattaagcaactccatgattttcttaaacaaacattactaatataatagtcagagaaatatggccaaaaactatacaaagattatcgaaacaaataccaaactaaaaaagtttagatttggtttaaagacgatcaagtgttgctaacgagagaattaattgatgctttggaattgaaatccccaaacttcattgttccatttaaatgaaggaatttttgggctcaatcaagtacagccttgcttgattgagtattttggtgttaggaaagtctgaatatacaccaagcttttgtactcatttttcaccttcactatgctttttcaataccaacaactatctgttggagctttgtaatcccaccaagtagtattgatggtttgagaataaatttgtattggtttagatttggaataggtagatatgtggttaatggtttgttgtgataatctagtgaagtagtaatgttgatgagtagttgttgatttagtatatgaaatgagtttggcttagaagagagggttgtttgagaaagtagtaaacttttattgatagtttggaactttgatttttttggtgttggttgttttgtgttggttacaacttgaaacccttgaaggggtatttatagttgctcaccttacactttatggctagaattattccttctagatccttcttttactagaaggaattatatccaaacaaatctaaatgtttctagaatacaacataactag

SEQ ID NO: 398414 - DNA, 675 bp, Cannabis indica
tctttctctctttcttatttttctctcttctctgaaattttaaatataatttacgatcacgtcgttattcggatgagcttaaaaaatactattgcgacctacttttcaacgtgaacatttcaagatgtgggaaacatatatttgctatttcgagaaaaaaaaataatttggttactaatatagtgattagttagtgttttataatttttttttcaaaatcttagttaacattcattttagaattttgttaattaaattatgttatattatacgataactaattagtttttaaaataacaaataaaaaatatataaaataatcggtatataaaaatggtagcttgttatattacatgacagcttattagtattgaaaatattttttaaggttacctagatatattttaaattataatctaccatcatataacttaaaaataactatttagttactaagatgtatatacactacaaaaaagattacttttagtgataatattttagtcacaacataattttttttgtgactaaatgtaacttttagtcacaacaaaatgttacttctgactaaaaatagtattcaaatacaagttgtcactaatttagttttagtcacaacaagtattatgactgaaaacacatttagtcacagcaaattgtgatttttgtgactaa

SEQ ID NO: 398415 - DNA, 787 bp, Cannabis indica
acaagttaccctaatttctttaccattaatatctaacactcccccttaagatagagcattgatgttaatcatgcccagcttgttacaaagataatcaacatgcaccccattcaaagctgttgcaaaagtatctcctaattattctccatactttacatatcccgtggagaacagatcttgttgaattttctcacaaacaaaatgacaatcaatctcagtatgcttagttcgctcatggaacacgagatttgaggcaatatgaagagcagtttgattatcacacaacaattttactgaaatagaagtcttaaactcaaattcagttaaaagctgaaaaatccatattacctcacacacagacagtgccatagctctatattctaattccgcactagatttagacataacaggagaaaaagtataacaatagtccactccataggtttgagcataacccttggcaacaagacgggtctttaagcgagcaattgttccatcatgattgaatttaaccctaaacacccatttgcaccctatgacctattttactgaaggtaaattaaccaagacccaagtaccatttgcaactaaaacattcaactcttctatcattgcagcaagccaaccaggatgagatattgcttcacgaacagttttaggaatagtcatagaatcaagagaagcaataaaagagcaagaagaagaggaaaaatgattataagaaacaaaagaagaaaaggaaaagtacattggcgtttacctttacgtagtgcaatgggaagatcat

SEQ ID NO: 398416 - DNA, 671 bp, Cannabis indica
ttttttgggattaggagggaatgccacatttataaccactaaacataaataatgctaagaagtataccaatacaaggcaattattcatagctttttagatgatcaatacttatagtactatcataaaaaggtgtgttgtcatttcactagctttactcacttagaatgtaagttgtgtctaatctggttggtcaatgtggttgcttatagttgtgcttgtttaagatgcagatgaaatttaagagaagagattatgagtgaggagccatataaatttgaatatcttttaacagatgattcaatatgttcatatcttttttacaacatagtacaaaacttctaagcaatttgagtaagagaaaaaataatatcgatagcacaaaatttttgactacaaacgaaatgcataaatctcttaagcttttttaggaatgaactagccttagattgattgactgaagaaaaaaagaaaacccctcattgctctattttacaagggtgaaatcattgtgatttaaataagcatgttattgacaaatgatctaaaccattgcaatattgtaaatttaggagtaagagaataatatttttttgaaaatgcccaactcaaaagtattgcctgacaaacatgacaatccaccccaattttagaatattaatacagataaaaa

SEQ ID NO: 398417 - DNA, 604 bp, Cannabis indica
cttctagtgaaggacattctcctgaccttatacctagtcataggatgatggctcgtacaaagaaaaccacgcgtctggctgacgccattgatcctcaagtggctcggcttgccactctgcccagcaccaaacaggattcaaccgtcccgatggaggaggatcatgacggggacgctgaggtccaggaggttgaggtgttggaagatgtgcgtcccggcagtccctccgaggcggagggagaggaagaggttgaacccccaaactacggggggtacaatgaggttggggagccagtcgatgctgacggagatgtcctagtcgagggcatggactacgtcagtgaggagcttgcagcgacggttccttataaaaggcagggtgccttaggtgccagatgggtaagtcctccacccaagaatacggaggcgcgcttttgaactcttgaccagggcgggtacctaggcgagctggactgctacattcctacccacaataatcgcgccacaaatcctgacaaggggatgtacacctggtcgggagcccacggtcagtaaggagcattgatgcccttgcataagtacttcaaggatgtggcggacttctt

SEQ ID NO: 398418 - DNA, 664 bp, Cannabis indica
gaggctcttggtttgggcactattaagggtattcgattgagtagaagtggaccggttttatcccatgttttctttgcggatgaccttatcctggtgggtagagccaatctgaatgaggcaaaaggtctatgggattgtctcgaaaagttctgctcttggtctggacaacaagtgaataagcttaaaacgtcaatctttttcagtaagaatactcccaatggtgtaagaagaggtattaaggaggccctgggggttaattctccggagggtgtcatcaaatacttgggacttcctctgttcagatcaagacagaaggatgctgacttcaactttatactggataatctcacttctaaattgcagggatggaaggcaaagacgttatccaaggcgggtcgtgctacactcataaaatctgtgggtctgtctttgcccacctatactatgcaaactaccaaactctctaatcgtcttgtcaacagaatagatggtttggtgagggacttttggtggggttttgagaaaggtaatcgtggtcttcatctcagagcgtgggacaaactttgccttcctaaatctcggggtggcttggggtttcgaaaatctaaagaaatgaatcaggctttcctggcaaaatgggggtggaaactcttaaatggatgtc

SEQ ID NO: 398419 - DNA, 1160 bp, Cannabis indica
ttatttatttaaaaagaaaaaataaaacattactatatttatattaatataacatttatctagtttaatatttaattaaatatattttagttcatttactttttataatttatatcattatctatttaacaaaagaagaaaaagaaaattgaatacctcctacagattatttacggtatcaatcaaacatataactatttttataattttgtaattagcacatagataacaatgtatattaatataaaataagttaaatatttaagttttaaataagaaattattttaatacctaagatttttaagaaaaataattacattatcattaatcctcaaaataattaaaaaaaattaagttttaaatacaattttggaaagagcatataatatagataaatttttacaactttgttattattttttatttaatatatgttttttaaaaaaaaataaaaatagttcatcagtgacttcaaaacatttatacaagaaaaatataagtcgagtcgtacagtagggaagcaatttaggtcacaatatgaaagtttgacatgaactcgactcgatattttatgggttcgacacgacgacacgaaaattttgctacttatgtttgtgttttatcaattttttaagctacgggtcgtgttcgtgcctaccatcaaaattaaattttaaaattcaacataacacacacatgacatgatgacattaaaatcaacaatttagcttacaactcgccaacacgacatgcgattttgtgagtttgacatgacacgaatttattcaagtcgtgttcgtttctgtgttttataaatttgtcgtgtcacgtgtcgtgctcgtgtcagcaactttttagtaaatttaagacctcagcacaatacgaacacgacacaccaaaactaattgccaccccaactgtaaagcatgatgagcacaagaaagttcaatcccaatccaaatagcacatttaacattatttatcaatacatgattggctacagtatgtgctacttaattagcatccctacaaataaaatttaaaccattgcacaatcatatgtaatattaatttattttaatatgaattaaaaaaaatattaattaatttattttgagtaatttgcggcgtaaattcctaagtttaactctttattgca

SEQ ID NO: 398420 - DNA, 1495 bp, Cannabis indica
ctcccctaccaaagcctgatgtaagaggagtacgagccccaccaataacccgagtctctcaagactgcagggtgcactgtactgcgccctcggctcgcaaggccttacccaccatatcagcataggtggtgttgtcatcagtagtgatcattaaatcatgtcttatcttcgagttgaacccgtccaggtgtttctctttcttgctaaaattagttggcactttttcccgaggtaattgtagtaacatcatgagttagggataccatgtcccaccatactcggtcgtcttcttgaaactagattgtggcacaggccgctctgtcattgccggtaacgcccatgaaattcagaattctgataataaccgttagccaatgcttggctttcataacatccggacctcccaaaaacacaggacgtgtctgcttgcggaactttccttacagtggttccattcggttcactgcaccgactcgtcctgcctacatagaaggggcaagagctacctacatttctggagcagggattgcaggagtaccctattgtctcaaacgtctgatctcctcatcttgctcattaattcccgttgcatttctgcaaacctatttcccatgcagcctgtggcgggttaacatctcctcaatcgcgtaccctgcctctaggacctctacctcgaccacaaacatttaggggaatctaaactccttgatcgccactgaatccgaccaagttaccctaactcctagtgttttgcctggcgtccatactactagaacagcccgcgtaaccaagagctagtctggtcagatcgcgatcaagaataacttgctaacatgcttcctaacaggctcttcttaaatcatactacaaaaataagctactaaagcaataaaagattactgaaccgtgaaacgaattgatcgttgatgatgattgtacatgtcgtgacgatctttggaagacaacctggcgactctgataccaaattgtaacaccctagctaatttaggcgtgttaacgtgattttaaacttaactgtgcagctcgttgctaatcaacgagtttattgaaaattgtaattaattaaagttttacttaattaattaaaacataaaatatcatacatataaaaatccgggatcctgtttacaaaagtatttatgaaagttaagtgtacatatacaaaatcttatcgcctagagactatccaaaataagccctgatgtcccaaagatcgtacgctctaggcctaactgccccaacatgtacaatcttcatctgctcgctctcacggctgctcagctttagccttgcccttacctacacatgaaaatagcaactgtaagtcaacagactcagtaagaaaagcataacataaaacataataataacccagactataatcaggcgcccatacacccaaccataatcctaactgagtcaagaacgttctcgacaaagtatgactaactgcgaatccagcctatactcaata

SEQ ID NO: 398421 - DNA, 664 bp, Cannabis indica
tatgacagatttaggcctataatgctacaaattcatgcccttcgggctaaaaaaaaggccacatatcaaaggctggtcaacatgatgttcatagatctcatcaaccgcaacatggaggtgtatgtggacgacgtgcttgtcaagtccaaaaagactagggggcacgtggaggacctaaacgaatacttcaaaatccttcacagctacaacatgaagctcaaccccctcaaattatctttcgatgtaggattaggaaaattccttggattcatagtcaacgccagggaaataaaagcaaacctaaacaagatccaagcccttttggacatgaagtcgcccataactgtcaacgaagtaaaaagcaggtttttgagcccggtgattgggtatggttacacatgaggaaagaacggttcccagcccaaagatattccaaatttcttccttgaggagatggaccatttcaactgcttgaaaggataattgacaattgttgtgaaaattatatatgcaagtatacgcagtcaaacaagtaataaagtgataagtaatatcgtctccacagggatcgcaaacaaagtttgatgtaaaatgaactaattacaacttaaagtaagaggaaataatatgcaaatggttgggtaataattcaaaattaaaaatg

SEQ ID NO: 398422 - DNA, 654 bp, Cannabis indica
attgtcatgtcaatgccgtgtgtaataaatttgaaaaaattaatttaatttttttaatttagttttatataattttcttaattattaatcaacttttaatttaatgattttttaaaaatacataattttatttttttaatattaaattatacacgtggcactgatgtgacaattgattaaacatttatgtcatcatcttatttgccacgtgtgataaaagttgacagattgcgcaatttataatattgtgaatagtatagggatcatttgtaacggactaaaaaattgagggggtacaataatacatatgtcatagttcgaagaataaaaatcttaaatagcctaatatataatattgagaaaacttcatgtcttcctgtctacaattgctaagcttgaactaagataaataattttaacaattttatcattcttgtgtcaagttattttttggcttttttacaagaccttgaggcccctacagtattgtcatcgtagtaaagtttaagcactaagttcgagatagattagtgtggtttctttatgcttgagactcaaaaatatcggtatcttgattgaggaaagaagacgaaatgaagctacttctctaatagctctattgctaatttttttttttctttcttgtaaatgcat

SEQ ID NO: 398423 - DNA, 799 bp, Cannabis indica
tctcgcaagttacgaccttactttcagacgcacccaataaaagtattaactaatcaacccttgagacaacttttatcaaaactagatgcttctggaagattgataaaatgatcaatcaaacaggggcagtttgacataacatatcaccctcgaacatccatcaagggccaagccttggtagacttcttaatagaaggaataactctgaaagaaaatccgcctgttcatcgagacgcagacacttgcaagttatacgtggatggtgcatccaacgagaagggctcgggtataggggtaatattaatttcaccagaagattttaagtttcattatgctatgagatttcaattcgatgcgttaaacaacaaggctgagtatgaagccttgatcgccggcttgaggatagttgaggcgttgaaagtcaaaaatctcatctgccacagtgactcataactgattttaaatcaggttctcggagaataccaggccaagggcttcaagatggctaagtatctagagaatgttcgaaagaacttggaaagattcgattactttaaaatcgagcaaattccaagagaacaaaactctaacgctgatgccttggcaaaactggccccgcagaatgacttggatgaattgaacttggttccagtggagatgctaagcgagccaagtatatgcgaaaaggaagacatagagatgatagacagttcacctacatggatgaaccctataatcaactatctacttgatgggcaactttcgactgacaaaaatgaggcgcgaaaactcttgtatt

SEQ ID NO: 398424 - DNA, 530 bp, Cannabis indica
agcatataacatataaaatattatcgccttgtatttaggcacccatacacctatttacaaggcttaacagatgtacaacctctgtaccacatggactagatattcatcctgtaataatgtgggtaggggagaccattagaccaagtgaagtgatttccaatgcacgccaagtcaaacccacctgagacgctacaaaagtcttgcaagtctctgcaatctgtcagataaccaccatatttatcatcttgactaagcatcatgttgagatcacctaaaaggacccataggaaattcaaccctgagacctccaaagacaattatttttccaaaatcaaccctatcactcctatcagctagaccatacacaaagaacctagactaatgcaaactatttagagtattatgaaccatcacacaaacaaagaagacgagattacctgtacattcacacccaccttcaaagaaagatagatgccacctgtaaagccaacaactccaaccactaaagtgaccataaaccccaaactaca

SEQ ID NO: 398425 - DNA, 674 bp, Cannabis indica
tggtatctcaagtttgatatgatggtcactcaaaatgtgttcagggagaatgtggtggatcaatgtatatacatgaaggttagtgggagcagtttcattttcttggtactgcatattgatgacatcctgcttgcatccaataattctgatctgttgactgagacaaaacaactcttgtttgaccatttttgacatgaaagaccctagcgatgctttttatgtgcttgggattcaaatctttcgagatagggccaatcatttttgacaaaacttacattgatcggattttgaaaagattcaacatgcattcatgttcttctgggaaggcaccgatagtgaaaggtgacaagttctcaaaggcccaatgtccacaaaatgataaagagagagatgaaatgaaagttcttccttatgcgtcactggttagtagcctaatgtatgcttaagtatgcacacgccctgatattgcttttgttgttggcgtgttaggtaggtacttgagtgatcccggacttagccattggaaagcgactaagaaggtcatgcggtatcttcagggtaccaaggatcatatgttgacctattggcgagctgacactctggatatagttggatttagtgacggcgattatgcaggatgcgtggacgataaaaggtccacttcaggctacatt

SEQ ID NO: 398426 - DNA, 924 bp, Cannabis indica
agagcaagcggttctgtggggaccaaggaagaggtggacaacagggttattcttaccctgagtacccacgttgtaaggaacatcattcgggagagtgcatccagaagacatgatttcagtgtagcatggttgggcatttcaagaaggattgccctcaagcaaagaaagaagaacaaaaaccagaggcaaaactcgtacctactcgggtgtttgctatcagtcaagctgatgctgtagccagtccttccgtggtgacaggtcagcttcttgttaataactcctattttactctattatttctctggggctacacattcgtatgtggcaacacgggtaattaatcaattgggtaggccttgtgactttattgaaaaagggtttggaaccctactgcctagcggggaattggttatctccaaaagaaaaattaggtctatcccagttagggtcgaagatagggagttgagtgctgaccttgtagagctagaattagtagaatttgatatcagacttgggatggatttcttgtccaagtattcagccaacatttattataagcagataatggtaactttttcagccggagggcgaagatccatttgtctatgttggatctgttcaggggtctcagatcatgattattttagtcttaagggctagagttttactacacagtggatgtgtaggatttttagcggttgtgattgactccaacagacctgaaacatttgggcctgaagtagtcagggttattaaagaatttctcaaagtatttcgtgaggagttttcaagattaccgccacaatgagaaatatattttgtgattgatttggcacctgaagtagaacctatttcaaaagcaccatataggatggctccagcggaactcaaggagctaaaaatacaacttcaggggatgcttga

SEQ ID NO: 398427 - DNA, 1069 bp, Cannabis indica
gcctttacttgtttagtattgtaagtaattgattaagcatgttaggaagtatagtagtttataattatttattttagtgcgttgccttaaaatccataaagagcggtattaagtttttgtgatcgctgtctaacctgcctgacttgtgggttcgttggctaagtcctattaattggacgcccagcgaaatacaaggattcagggtaatagggtcgagaccgaaggcgatcaaggaaatcaaattccctagaatccctgtgggtgcggtagaggccgtggaaggttttagggtggtcgacatgaaaaacccacctcaagctcctctagtttaggagcagagatttaaggaaatgcaagatcgtagtcgccaacaagacaagaaattctattgaggcagcaggatcctcctgcagtgcctccaccacaggttcaggttgctttaattcctgtggtgccagcaaaacaacttgttgctggcaaccgtatggaaccactgtacgaaaggttttgcaagcaagcaccccctatttttctgggaggtccgtatgtaatgaaggctaagtagtggctcacggtgataaagagaattctgaatttcatggggtcattggaaatgatagggtgacctgtgctacttttcagttctaggaagacaagcttgtgtggtgggaattagtgtccctcacccgagatgtcactgttatgacctgagaagaattctgagatttgttccatgacaagtagtacaatgaggcagtccgcagtactaagtggaaagaatttaccgagctggtgcagagtgagggtatgtcagtaacagagtacgcaacaaaatttgatcgtctggccaagttggcttcgggtattatgcctacggacttcagcaagaaagagaaatatctagcaggtctagatgcaaaaattagacacgaattggtgattactacgaatgaagtgacatcatatgcagaaatggttgataaggctttgcaagccgaaggtgcgataaaatttcttctagagccccgagtgactccaagttttggtgggacccctactcttcctactc

SEQ ID NO: 398428 - DNA, 620 bp, Cannabis indica
ttacacttatgggattgagcttggtgaaccaaacaatacatttcctcaactaattattcgtaatgatcttcgattttgtatcgcgaagggccatggagaggtgtaagtttcagtggaccagctaattttgtaaaagttgcttggcaaatgtctgattacatatttgtggaaaatgatgatgaaatttacttcacttacaatactcaaattaagtcattgatctcaagaatttttcttagccaagcaattgattacatgaaacggacagaagcacaagaagtttgggaatcttattacaaaattccacttgaccaatgtgacaattatggaacatgtaaagctaatgctaaatgtatcatggttgataacaaaccagtatgtcaatgtttagaaggttatgaaccgaaaaaacgaaagaatttgtttgaaggatgtgtgaggaacagtgttgtgaattgtcaagatccagagaaagatgtgttccatttaacttccgagttgaaagtacccgaaactaaatatgcttgggctaataaaagtatgaaccttggtgaatgcaatgctaaatgcttaagtaactgctcttgtactgcttatggttacaattccaatttggatgg

SEQ ID NO: 398429 - DNA, 1012 bp, Cannabis indica
gaatcactgcagatttcattgtgctcagctttcatctctcgggctaactttaggccagcgattaaagcttcatactcggctttgttattagatgctttgaatccaaacttgacaacagcgtgcaagtgttgccccccaggcgggacaagggcaattcctgcacaagatagctgatttgtagccgacccgtctacgtgtagttttcaagtcagcttatcttcactgttatttggcggaggtgtgtgtatcggctcggggttgctttttggtacgctttcttctttgcctgtgcattctctgctaaggcctggcctttgattgctattaggggttggaaagtaatttcgtactgacccaactccaccacccacttgagtagccgtccaggggcgtccagcttttgtaatattttgtgtaatggttggtctgtgtacacccgaacaggatgagcttgaaaatagggccttaactttcttgttgctggaataaggcattaagcgagtttctctatcaatgggtatcggccttcggcctcaatgagccttttactgatgtaatagacaaggtgttgtacgttgttttcttctctgattagcatggcgctcacagcgtgcttcgtgatagataagtatattccaaactcttctcggtccagaggtttggagagaacggtaagttttacgagttgtgtttttagctcttggaaagatttttcacattcctctgtccacttgaactgcttgtttcctagtaggatattgaagaaagggacacacttgtctgttgattttgagacaaatctactgagggcagcgatccgaccaatcaaacgttgcacttccttggttttagttggtgacttcatatccaggagggcttgaatcttctctagattggcttcaattcctcaaacgacttcatatgcatgctcaaggtaaagcaatcagcaatccgcgcagaacgaccaacacttagcgaattcagcttttgcatcgtgagtcatcaaggaaat

SEQ ID NO: 398430 - DNA, 598 bp, Cannabis indica
aatttcaagctttagggatggcgtgaacgacttctcatctttgtctaaggcttttaataagatattggttaactaattgtaatagtaaaagttagtatgtaatcacattttgctgtactaattttcatataatttattttgccatagagatgtaacaatcatgtgtatatatatataattttttgaaaattcttctgttagtttaatttttattaatgcagtacaaagattattttgttaaatttctcagaattataacacttttaagacaaagtccaaataatatccatttttccttttcatatatcacaatataaaggtctttatatttaagataacatataaaaatatatataaaaaatatctataataattttgttggaagcctattaataattttattaatagtaacatttataatataagtgttgcaaaatgtttatttttttaaaaaaataaaaattacattaggcaacactttgtaagtgttgctatagaattctattttttagcaacagtctaggagacaacacttttacaagtgttgccttttaagattctttagttaaaaaaaagtgttacaaaaggtactttttct

SEQ ID NO: 398431 - DNA, 1125 bp, Cannabis indica
aaaaaaagacttcttttttatttttcacaaaatgtattattagtgttatttatcatgagctactctatttttctttttttctttattcacaagcgttcattgtagttatagtgaactttttcggtaataaaatttgatgcttatagcatgttaaaaatttaaatctgatgaatatcagagctaatgtattataaagaattatgattattaaattagctagtaagaatttcataattatgataactagtgatattgtatttgtatgtccttaatttgatattttctgtcatttgttaactaaaatagattgattaacagagttggttggaatgaatcatgtgatgtgaagaatttcttctttaatttttattaaattatggcacagatcaagtagttcataagctgtatgagttgttaagttgacttgcacttggtactttgatctattctccaattatattttatttcacgtttgctcattatctcgaaatgtatacaaaattcttacttgagctgtctcacattaggggtgactacattcctaacataacataaaacgtatttgactagattgatttttgcatcgaaaacttttgttaaacattgttgacatttgtttcaagacccaaagatcacaaaaaacttgagtacatatcttaggttcgctctcccccatatttaggggtgttgaccaaatcgctcaaaccgcctgcactacactgcaaaaaacaatgcagtttgaaattctttgcggtacagtcacggtttgaatttttccaaaaccgcggggtacggtgtggttttgaaatattaatatgcggttcaaaccgcaccacaccgcatattataaaaataccaatttttatatttttttggtccaatatgtgaaagtccaacccaagcctactaattattgtattgttaaaacttcaaactttttttttatatatttattttcaagttatatggtatttttaataagtgttgctcaagctttgttgtatgtgatagtttaattatttagtgatagtccaaaccgcataaaccacactgcaccattttttgcggtgcgatttttgcagttttttagtttcgcggtgcgagtgcagtttagattaaaaaaaa

SEQ ID NO: 398432 - DNA, 777 bp, Cannabis indica
cattcccctcataaatagttaatatgtttcgcgaatggtcataatccttctttttactaacaattttaagaagagaaatgctaaaatatattagtggtgtctagcaccctcctacatgtcaatattgttattgatacaattaagtatcagtcccatataacttaatgtaataattttagaattatttcataattacacaaaaacaacaaaaaaaattataaaaatacggttgtacaaaattttaaatattttttttaatgatttttatgattttatttacagataatacagtctttttatgttgtaatcttgttaatttattgttgattttttgtttttaatatgttattttctgttgttgttttgatgttatttttctgttacttttatgtagtttttttgttgtttatatagtattttatgtaattatactaataatttttagaaaatatcactaactaattgcaagaaaatatgtttagaaggtgttattattagtgcttaataataatattcttttaagaaatattagcattaaaagataggaatttttgttattttcgcttctttatctccttttgtaaaaatcaataaatggagtaactcatctaagaaaattttaaaataatcatgagaaatatgaattgttttcaaaaatgtgaatgtgtggtagaaaaggtaaaatagaagtatatgataagatgtatgaggttttattttaaaaataagaggaataagggattttttctattttaggttaatattactttaaataaa

SEQ ID NO: 398433 - DNA, 809 bp, Cannabis indica
aaaacttggtcatgtctctcttggtcacgtcttttttcatgggtgagggcttcttgtacggaggtaatgattgagtagccatgtaaatggtttttatatcttctgttaggacagaaaaagcagtaaacttggtaggactctccctgggagtctgtttggttttgccagtgaactttccctttttcccatttttttgcctattgttgctgttggaccgtttgccacctgagcttaaactgctagggtactaggggagctggacggatgttccaatagagggaacttttggctggctaggtttttgctcaacttctactcgctgaatggcttcttcaagcttaataaaaccatctgcgcgatcaaggaagtcactcatagaatctattggtccattctttctgatgtccttccaaagttctccaagaacttcaatgcccccagtatcgcagacaattttccgtcttcggtcacccttgcaaccttagttgcctctgtcactcagagaggttctcctggtctttgcttcactttgaccaggtcttctaagtgcaacgagagttggtgagaagaggaaaattgtgcacagaatttcgaggagaaagccttccatgagtggaaccttctgggctccaacttgaaataccattgctgggcggcctctgagagagtggcaggaaaaactctttaacatacatctcctcatgctccttgcaggtccatttgcatttctaaatacttgagatgggataagggatcttccttcccagtatacatcttccaagttggcatcttgaacttgtgaggtaact

SEQ ID NO: 398434 - DNA, 883 bp, Cannabis indica
aggcataggcaataacccaatcgtcttgcatcagtacgcaccccggaccctgtctggatgcatcacaatacaccacgaatttctccttatcagaaggtagggctaacactagagctgtaattaatctctgcttcagctcttggaagctagcctcacacttgtctgaccacacaaaacgctgattcttttcagtaagctcggttaagggtgttgaaattttagaaaacccttccacaaactgacgataatatcctgccagacccaagaagcttctaatttctgtcactattttcggtcttggccaatccctggcggattctatctttcctggatccaccttgatcccatccttgctaataatgtgcccaaggaaggacacctgagatagccaaagttcgtacttcttgaatttggcgtataacttatgttctcgaagtcgttgcagaaccatcaagagatgttactcatgctcctcttctgattgagaatatacaaggatgttgtcgataaacacaataacgaagatattaaggaaatccttgaataccctattcatcagatccatgaaagctacatgagcattggttattccaaacgacataactagtaattcataatgtccatacctagtacgaaaagcagtctttgggatgtcctcctctcagattctcaactgatgatagtccgatcggagatcaatctttgaaaaaactttcttcccctgaagttgatcaaaaagatcgtcgatcctaggtaaaggatatttattcttgattgttagcttgtttagtttctggtagttaatgcacatccgtaaagatccatctttctcttgacaaacagtaccggactccccagggtgacacactaggccgagaaaacc

SEQ ID NO: 398435 - DNA, 535 bp, Cannabis indica
tgcttcccaaaggaggccaaaaatttatgttgatcctaagcgcagagatgttacatttcaggcagcgggaacatgtttttgtacgggtttcaccagtaaagggtattaaacgcttcaggaagaggggtaagttaagtcctaagttaattgggccattttagatactcggtaagttcggacatgtagcgtatcggctagccttaccaccagtactattgactgtccataatgtattttatattttaatattgaggaaatatgtttcagacctgagtcatgtcttgagttacgatgcccttgaattacagtcagacttatcctatgaagaacagccagttcagatccttgatagaaaggagagagttcttcgaaacaagaccatcgctttggtcaaagtgctctggaggaaaagcaaggtggaggaagccacctgggaattagagtctggcatgaggactcaatatccagagctattcaggttagatttcgaggacaaaatccttgtaacggggggataattgtaatgaccacattt

SEQ ID NO: 398436 - DNA, 505 bp, Cannabis indica
ggttttggtgagcctttctcatcaaacatgcagcaagcagttacacaacctacaaataaccatttagaatattatcagttccctatgggggaacatgagcaagccaaaaaagaaaaaatattttataattgaagctgttacataaaactttcccagttaagacttcaacagtcaaaactgaggttgaaaagttcctatttgtacatatgtttacacaaggacttgggggtaaatgttatcctaatttttttccgcgtgacgtggcatgtaaacaaactaaaacacaataggggcattgaaaatacaggtgcaacaacagctatttatatgttacatgtttgttaggcatctattttagaaccttaaaataacttataacctccacttggtaatatgaataaacttacaacaatagaattttctttatatgagtcatgtattaccgattcctatccctgattttctacataataagattgtagtaacacaactattaggcaacaaa

SEQ ID NO: 398437 - DNA, 1354 bp, Cannabis indica
taatttaaatatatttggattatgttttatgtttgtttatgtaatgttatagtatggtactttttgttttgttttatttgttttatttggtgactgtatatggaggttttcaaggtcacttttggagttacttaaatgagataagttttttatttttctttgcttattttatgattattttctatagttagtttacttcatgttacaagatattttgtaagaactcattctttgttttgttatttttgtaggaaaactttcaattattcaagcaaagaacacttattttgatggaagggctagattggtctttcttgtttgttggagctttctattcatttcaagagtctgattgtttagttttgatctctgctttttctaagcgtttcacttgatgtaatgatttggacgctttcttagttgatttggctagtttactttccagttttcttgaggcattcctagttcatgtctccgttcatgaattagttgcccatgcacttagggtggattgtgaaagagcttggattgatacttttttaatcattttttattgatgtattaaactcaattattattaataagagtttaatttcaaaaaaaaaaaaaagaaaaagaaaagaggggctccacttggacacgggttttgcttgggtccggcacactaaaatttcagctatcagagcttgggtcgacaaccgaagggtggtgggtgctgatcgaagatggaatgaactattgaaacactactacaaaattggactttagtggcgatttttaaggggttttggcgttagtttaggcgaaattcactaccgacgctgttccagataacgctgtagggttcataacaaccgacgccaaagggtacctatggcatcgattttttcataacaaccgatgccaaagggtacctatggagtcggttattatgaaaaaactgacgccataggtaccctttggcatcggttgatatgaaaaaaccgacgccatagggtcttggtgttttccagcgttaaaatttcgtcttttagcataatttatatatatttttttattattaatataattaaattaagtataaattatatctaataagcataaataaaaattaaattgaaaagttaaataaatatacatttacattaatttaagtgtttatatattaactatctttttattaatattttatatttgacattatgtgtttgtatttttgtagtacattagtatattttttataatttttttaagttatgttttgtgtgataattagtttgttaactaataaatgttgtgtaatatattttaatttttatgtaaatttataatttatatatttaaatttttcaag

SEQ ID NO: 398438 - DNA, 735 bp, Cannabis indica
atttttcttcttcttatacattgtttttgttgcaatgttcagttataatgcctcagtcggccttcataagcttggttagtatttttagattttcattttttctattctaagtttaaatttgaattagattcaagatgttaactattttaagtttttttttttttgcagtatttctacatatagactatccaatgttgttcgagcttcgaaatgactcttctgagagagtctctcattgcggggtattagagtttacatcagaagaaggcattatttgtatgccttgttgggtatggatggttatttttttcgtgttacatttaacgacttttgttacatactaatttagaattttttttttaaattagatgatggaaaatatgaaattaaaagagggagatttagtgtgtttaaagaatgtttctcttcgaagagcaaagtacataaaattacaaccacacagcactgactttttggacatttcaaacccaaaagcaatgtgagtctccaatccatccttattatgaataatatatgttaattggaaaccttgtgttattaattgtatacaaatttttgctctatgaactacagtttagagaccacattgagaaattttacatgtttatcaactggagatactatcatggtagcttataacaacaaaaaatattacataaatatcattgaaacaaagccatctcatgctgtgagtattattgaaacggattgtga

SEQ ID NO: 398439 - DNA, 520 bp, Cannabis indica
attgaagtagttttgtagtattaaagttatagtttgtacatactggaaatatttatggaatagatttctttttcataatattttctacttcttttttttatgttttgtttatacagattctctattctctctcatttcttttgtttgattagagattacatttttcagtttttacaggtcttatgaaaattaggtgattgatttactcatttgagaagtgttaaaaactgcttttgttaaggatttttaatgcagaatttgaaggattgtgtttttcaatttgtcttgaatttcaaactcttagcttatgttaaaagttttgcccttttagttggtttagcaaaaattttagttagggttgattttactggcttttaaacattccttccccactggttacttgcttccttcccactggtttacttgcttctttttgttttgtaaatggtttaagttatgatctgttatgttttttttttcttaataaatgattaatggaacatggatttttggctaggcg

SEQ ID NO: 398440 - DNA, 874 bp, Cannabis indica
ttatagaggtttggctcccttgtacgtgggtaataacctactcccctattagttgtattaatactgagataatatcatgcagatcactaaggaagacaaagtgaattctagctacaactctcaaagtatttacagagaatatctttcagcacagttctcttagatgcgtgagtatggttttaggtctaggtctcttccccttgtgaattcattcactatttataggaggacgttcatacatttagcttcgttaaaggagtaattaaagagtaaatattcctatattttagggtgtagttacgacctgttccagctattttattcttaaatagattggctagattcgagtttcttggattcaagttgagatatttgtggaagctagttaaagaagaaatcaaggttcgtgtagccttgtctggtactcctggcattatttcttctacccagcatgttgatcactgatgagaacactaaggctaaagatacgagtaaagatccagttggtccggtgacgagggcgcgagccaagaaattcaaagaagaactcaacaacttagtcaacaaaattttaaaataagaggagactgtggtcaacactgaaggagagcaaaaatttgtatttctcatcaaagtagactcaatttagtcccaaattaagctgatcacgtttttcaaggtaataggcagctttcctttttaattttgtttcctttattttgtctttgttttagttggaaagttgtctttcttttagtttcttttttttcttggttgtaagttggctatataaagccttgtaaacactttgaaaaatcagaatattttggaataaaattatgagaggttttcttcttgagttcttgagagaact

SEQ ID NO: 398441 - DNA, 618 bp, Cannabis indica
aaatctatatagcaactcatataaaaactaactgagcaactatcggagcaacccaagccataaatttgaaaataaaaaataaaaaataatatataaaataattttcttctttatttttatcgctatagaatttatattttttctctaataaaataatttttttaataaaatttaaatttataaaaaaaaatgcccctcctaacatttgtggctggccaccactgatagccatatataaatatatgtatataacatcatatagaagaatgaatgttcattaaaaaaaaaaatagacttgtttttgtctttatatgtatgttgtttgtggtaggagtgatatggtgtataccacatgaccaagttacctcctccttaatatttttgtggtgtcaaatgctaattaggtgaatttacaacataatgctatataactaagggataattgcggcaaaagtccccaaaaacttgaggttgatgccgattagtcctcaacctcaaaaattggcggtgaaaatacctaaggtcccaatttttgtttgtccgttggtcctttttctaacggatctgttaaacccaaataaagtgtcacgtgtcaattttttattggtccaaataata

SEQ ID NO: 398442 - DNA, 904 bp, Cannabis indica
aatgtcactgaaaactattactattgacatttatttttgtcccgtccaaagcctatgtagctcagtcaaatcgtacaattaattaagatttattataaaataatataaaataatatagaaaaaataagaagaaaagaagaagaagatgaagagggaaagagaaactgaatgagaattttttagttatttattttaatggggtgaacccctatttatacaaaactataactaaaataatgggaaactaaattaatgtaataaagaaaaatacaaccaagcattaataatgataattaatttggtgatttggacatccataaataatatttcataacactctcccttggatgtccataaaaattttcgcattaaaaaccttgctggaaaacttggtcaaagaaaaaatagtacagtgtaaacaaactccccctcatttatgcattcgtggatatcttctaatcgacgaattttaatcttgtatgtcgtcttctcaaatattgatgttggtaataactttgtaaataagtctgcaagattgacactatattgaatatgttagacactccttaagatcatgagttaagaagaatttggtgaaaatacctttagctctatcttctttattatagctttagttgagcaatatatttcacgttatctttatagagaatcgctaatgttgttactgcgttacatagtgcaatctatatgtttttcgaatatggtatgtcaatgatctcactcccacacattctctacttgcttcataaagtgcaagtatgttaacatgatttaaagttgcctcgttaaaaactttatcagaaaaacccagtgggacaaaaccttaagcaaaagaaaaagagtgcaatatatatttcatattcataattatttgcaagttgcc

SEQ ID NO: 398443 - DNA, 628 bp, Cannabis indica
agcagtatgtgagaagacagagctagggacacaaccagctttgtcagcttgataacccaaataaccagggattacaacctattcttgttgaaagagaggaaatcctggttattttgggagggccgcatattgcaggggaaagaaataatgctcggatgaaatacgtgcaggagataaaaaactagcagttggtctttgccccagaaccttccaagaaggtgaaaaccaaggaaccccccattacgttcacaaaggaagacaagaagaacgtgagataccctcccatcgatccgctggtcataaccattcatcttgccaataagaggatcaagagagtaataatagacaatgggagcttggtaaatatcatttataaggagactcaaaagaaaatggggctcaaaaaggccaagttaaggcattgtatggtgaacctttgcgaattcatcggggatcgcatcgctagcctttgcataaacaagctcgcactaactgtaggcgaggcacctttaactgctactattatgcaagacttcttggttgtcgacctaccttcggcttacaacatactgttgggttgtccaacactgataggactaggggcagtcagtgttggaaatattttacc

SEQ ID NO: 398444 - DNA, 732 bp, Cannabis indica
aactgtgagtttgtgaggtaggaatgtaggtccaatggggggtccgatgggtccgatatagggtctgatgggggggtctgatgggtccgattgtgtaaatgaggttgatataaatggaaggtattttagagatatcataaaagttgtatcctacaaatattagttattatgtgtttaggggaaaaattttaaccaaatgtatgtaagcataaaaaatcaaattttctatttgtatttgttggaaccatttatttttttgttcattcttaatttattttcggcctttcgcccctttctctatttctaatatcctacaaatattagttattatgtgtttccgtgtcctgtatttgtatgctttttcgtatatttacttttttattatatttttttttcttatcatccaaatcacaaaacacaacatacatcatataacagtaaaaaaataaaataaaataaaacacccactcaacaaacatagaaccggaggaattttccgcccataagtcaactccttggctaaaaaaagtatacagagttagagattgagccgctacaagcaatacgatttgcataaggtcgagttacctcaaaaaattttgataaaacaatttgagacaaaattgagctttactagctaaacaaaacaacttaaacaaccttaagaaaagaaaaaaaaaaaaaaaacttaataaaaaaaccaccacacaatagatacatatagaaaaaaga

SEQ ID NO: 398445 - DNA, 531 bp, Cannabis indica
cttcttcttcttcttttctatttctctctcgaattgtaaaccctagctgcaatcttttctttctatctccccgtcactcccttcctctctttgctctcttgcttgacggcgttgtaagaccacaaactgttgttgccggtgtcgatggtcctagggatcttgaaaccttgttctttgattccaaaacccaagaacctgacggccccctctctcctccttgcaatctttccctctctccttctcttccattttcccagtgcaatgacaactatatagccgtccacgatcatgggtggtccaacaggaccatgggatcatgttccctaggtcccaaaactaaaaatcctaattttttgagagcgagagagaagagctttaatggtggcctaggtcgcgcgagaatgagagagaggagagggtctgagagcgagagagaagagaggaagggaggcggctgcactgtccactggccttcagcctccaccgagagggaaaaacaaagaaagaggggggaggcggctgatggaagag

SEQ ID NO: 398446 - DNA, 945 bp, Cannabis indica
tcatccatcttgaatccatagaaccatattgctttagataaatttgattaggtagagtcttttatgtttgaactacttctccagaatgaaagacaacaaataaagacactaaacaaattattataaaaatgatagcttccatatattttgttttgtttcattaatcctcttatatatcttaattgtgtatgccttgttaaatggtgacgtcaatgcaaagttgggctactgtacagggtttaaaaaataaagggtctaatatatttttttttaaacactttttttttaattttttttatgaacccaacttttcaaagggctgacaagttatcgttggtcactcccatccaattcctatagcccattttcaattctattactgtgtttaatcaaaaaaaaaaaaacatgatcgattgctatttattatttatttttaagcctttcatattcttttttttaatcatttttttttgaaattatattgaaatcaataataattttaataaaatagtttgagttttttggtgtcttgtgaaaaatataatcgtatgataatatttaaaaacattatttataaattataattttttttatttgttagggtcgggcccaagttttgaaactagaacaggactccaaaatgtttaagacaacctgtgtcaatccttgattatcggtttaactttagttggggaatataatttatgttgaaacaatgtgcaatatttacgtcttaaattatcggttgagaattttattcaattggcttttatgttgtacttctatcacttctaacttgttattattttattgtattaattatttcagatgcctcggccaccatactaatgggagtcttctacgacaattgatgatttgaatgtagtgtctcttagctactttcaaaaaaatatgtaagtttgggtgtggttttgatttggttgt

SEQ ID NO: 398447 - DNA, 695 bp, Cannabis indica
ttcctcactccttaacagtctacctacccaaatctattcaccagcaacacatccagcgatcggcggcgacgacccacacagtcggcgaccggcggcggcaacccacacattcggcgaccgacgactcaaatggaccctaaatatgagatctctaccaacaaaaccccaaagactcgaatagattccatggccgttggagatctaaatctgcaccgtaattggagctcaaccgcttggtcccgaactcgtacatattctgaggtgagcttcatctttcttttcgaattgattttgtagattccatgctcattttgtactcttcatcccctagttgtgttgtttgaatggcagatttttttttctttcttcttaaagaaatgaaagatctatatatgggtattgctttaatttttgtgcctaaaaaattacaatatcagtttggtgaatggcatatctttttctttctttcgttttaaaaaatagaagatctatatggatattattttataatttttgtgagagtcaagatctatatgagtgtttggtaatttttgtgagagtcaagatgagcttccatgttgagaagaaacaatctccacttgtcttatgttggcagcagaaggaactaatcttattctcaactattttttattttaagtttatcatatttttttatatgatggaaactgatttta

SEQ ID NO: 398448 - DNA, 979 bp, Cannabis indica
gaaatggttatacaaagcactgaaatgacttcactctatttggaatattgatattatgtctcttatgtaatcaactctacttaaaacttttatcttgttaattttcgtttatttctcgttgttgttaattttactgtccataatgtggctagagtgggtcgtttcgcccagaacatctcgtaggttttgtggacgccctcctcgatacctgatgctatcctttgtaatgaccgtgaggtcttaattttcctatctatactaacacttttaaaatttttttaaaaaaaaaagaaaaagaaaagaaaaaagaaaaaaaaaaaaagaaaagctaaaagttttatcttttagctattataaagacaatgatgagagtgctattagtttattggatagttattggaattttattcttaaaaagaaaataaatgaaagactatattctaggaatgagaattgttttttcccttctcaagccttaaccgaacataaaagaatttgtagtttaactctcatttatttatttaaaataataataataatttgtttaaggaaaacaataagatttttcttataaaagcaaaatagtaatgggtgcttctacaatgcacttttaaaatggatgtattgatgcattctctacttattttggcatttagaaaaaaaaaaaaatagtctattttttctttcaaattcgtccacgttttaattatctaagatatcttataaaattttgagaaattcagaataataatatagaaagtaatcttcaaccgtttatttcacacgagtataaaataaaataatcatgcgtgcaacacaatgtttgatctctattttcggtgtgttaaatttttttaaatttcttaaaattttgtaggatgtcttaaataactatgacgtacattatcatgataaaaaatttgactaaaaaattaggagaatcactccatataccgctttttaactttttttttttaaa

SEQ ID NO: 398449 - DNA, 863 bp, Cannabis indica
cttcataactcacaatatgggacgggtctaaggcatacttctgaagcattgaaacatggaacacatcatgtacaggtgcgagcgcgaggggcatagccaacctgtacctacttgccctatcctctcaaggatctcgaaaggtcaaatgaacctcgggttaggttttcctttcttaccaaagcacttgatgcccttcataggcaatacccggagaaatagaatatatctaatctagaaatcaatatctcgctgctttggatcagcataactcttatgtctgctctgagttgcgagcattcatgctctgattttatcaacttcctcacttcttctctgaacagcctcaacgcctaagaactttctttcacctacttcatcccagtgaataggtgatctacactttcttccatataaaatttcataaggggccatcccaattgttgcttgaaagctgttgttgtacgagagctcgatcatgagaaggtactttgcccatgatccttcaaagtcaagcacacatgctcgaaggatgtcttttaagatctgaatagtcctcttagactgcccattcgtctgaggatgaaatgcggtgctgcactttaactgagtacccatagctcgatccagactctccaagaatcttgatgtaaactttggatccctattcgaaacaacagactttggaacaccatgaagatgaataatttctctaacatataactcagcacgatgatcaatggagaagtttgtccgaataggtaagaagtgcgctgactttgtaaacctgtcaaatatgacccacacagagtcgtactctcccgtggttgttacgaaaattataaacaatacgcaagtgcacgtaa

SEQ ID NO: 398450 - DNA, 530 bp, Cannabis indica
ttatagttgtttaatcctttctttgttaaaaaggtttggtcaaggtgttataacgattggacccctctctcgtcaaaaaggtttggtcagggagttataacggttcgactccactttcttcaaagaggtttagtcgagaacctttaaaaattgaaatgacgggtttgcattatacaatgtattttcagatgaattccagttaattatacataagtgcccgtcaagtaatttttaaagaacgaaactttgtaattacttaatataaatgattctctttattcataactgaagtttaaagttgacatcagtaatgcgagttacatcatttatttattggtagtagggttgcaaatgttctacgttttagtagttatttattagcaagccatcaagtcgagccaatttataaactccgactccaactactgcttcaatgacatatggaccctcccaattcgggttgaacactcctgcagatgcatctctcgtatttgcaaagctcgtcttagcaccaagtccccaacattgaa

SEQ ID NO: 398451 - DNA, 718 bp, Cannabis indica
aataacaataataaatattaaaagcgagcgttcataaaacataaataaatataaaaccgataattcataaaacttaaataaaaatactaaaagaaatttgtagtagcgtcgtcatcatcatcattagcatctctcaaaatttgtggttgaggaacatttgacatctgtggatagtatggcgaaatctgcaaactcgtcatcatttgagaagtctattgcccatgtggtgtctttatatgcgatctctgctgcccatattgtttcccttgtggtgtcgacatcatctaaaaagtctgtgacatctgtgacatttgttgtgttggcctcatttgtggcatccgaggctgtgagacttgagacgtctgaggcgactgcatcattatctgcatcattatttgtgggctatttggtgacaacgactgtgacataatctatatgaatgtctgcatctgaaattattgaaatttgttgaggatgttgtaacagttgctgaaatgaaagaggagtctgctgcgactgttgatgctgaaaacccattgactgagaagattgaccagatccatatctaggcatttaagagcgagacagtcgtggacgtgttggtctgcagggccagtcgtcattccatgaagcagtcagaatgatatacctctgtaagggaaggcccaatggaggcttgaagcgggaacattacaaatgatattagagtcttgaccca

SEQ ID NO: 398452 - DNA, 1296 bp, Cannabis indica
ccaaagcactataacaaacgaaagaaagaaagaaagagtagggaccaaagtttatagaaaaagttcctatttaactttcaggtgttagtattgtttgataatctgctcacctcacatttgtttttttgagattgattaattatttcaatttatttatttatttatttattttttagttttatgtacataacaacaaagtgtattcctatttttaatttttttactaataggaaaaaatttatgtacatatataaaatttcagactgtaccaaccaaaatgttggtttgatctgatgagctattacgtcttctctcactccaatttttgttgtttttgatgatagatgacaaagtaactcaaatcatctgtttgattaggtttaatcaatttcaattctattgtgaatccatatctgttttttattttttcaaattctagtaacagggtaccccatttttgtagttatgctatatttgtttacaatgacagaaaattatcttcaaaatacattttgttttttttttttcaaaaaaaaattaatatagttttatctgattaaattaaatagttaaaaactattaattatacaattcataattgtttaaaataataatttcacaaattactattttgcccttaaaaatttatttctcatagaaatttattctcactcaaatttatttattaaataaaatcttttccttatgtatagaggtgatttgtggactataaacctatattttgaagctccaataacacttgattattattgatttcatcaatagaataatttagtttattaatttcattattactccactatgtatatgtatgaaataacactttttaataatatggaattatatttacaaaattcttacttgtagtccattgacataatcaacataagtagttcaccttttaattattagttcataattagagtttgtcaatattatcgttttacccttctaattatctctttactccttatgtcctattaatttaatgtgaacagttaatctataacttattatagatttggatctaactgttagcactataagaattaacactataagaaaactaatattcgattcgttaggaaaatttaggttcaactattgtataacatgttcccaaccactcatattatcaaatagtaagaatcatcttctctgaaaaattttaacgagtgaatcaacaaattcaatgaatacaaacaggagttcattgttgtgatatgaataactctttcatggtaaacgacatgttaatgaaagatgtttattaca

SEQ ID NO: 398453 - DNA, 504 bp, Cannabis indica
caaaccaggatccgaacccagacaaggacccaaactgagaccctgacccaaattcgggacccaaaacttgaaactgaacaagaactgccagaacaggacccggaccaaaaccgagaaccgaactcggacctagccccagacccaaaccgaaaccaaaactcaggcccaaacacgttcgtatacccagaccgtgaccgagacctggacccgaacccagagatggagctagatttgggacccgatcccagacccagactcggacctagatagggattcgcatacgaacttggagtcaaacccaaactagacctagaccgagtttgaaacttgagacctagattcagaccgagacccttacccagacccagacctagacccgcaccgaggacctgaactcggaccgaacctgaaccctaacccagaccaggatctggaactggacccaaacccagacctagactcggaccaggattcagaccccgacctagacccagacccaaaccc

SEQ ID NO: 398454 - DNA, 566 bp, Cannabis indica
ctaatctcaaccacatatagtcgtcaagctcaacttttctcagttgagcaattttttaaaatttgattaataattataaatttaattagctccaacctttttatataatttatccaataacatctcaaatgtagtactcgaatcatcgataattatagatataacttctttattttttttgcgaccacttatatgacccatgttcatccttccactccccatcgtactgaacatgatagattactattcaagtcattcctgtataaaaaatagatggttgatattaaaaaatagttaaaatatattgatgttaaaattataattaacaagttcaattttcaactaaattcaattaagttttatgaatgtgtccatcaaagagtttattaacaattgagtattaacactatattgacaatgtttggtcgagctagttgagctcttttagaattatcatatctattgaatgcgaatcttttagcaaacatcgatgaaaaaagtttaacaattaaaaatataaattaggattaaatctagatgagctctaccgtaacgtttgtcatctc

SEQ ID NO: 398455 - DNA, 637 bp, Cannabis indica
gagtatttgctcgaggaggcattattgaatgaggttcagtagtggaccctctgccttgagcaaatggtggtcgataaggtgcaattcttgacccaaaggttaggttcgctgtcattttggtggaaagatccatcacagagttatggcgctcaagacgagtctcaagcgacatgagaagagcttggacctcttcaagagagagggtttcacttcgagaagtaatgctggagaccacggggtcaaactccggtccgagtccattgagaatgtgaagaattaaatcaagatcagtgagagaatggccagcaatgtctaaagaatcacagatggatttgattttatcaatgtagtcagagatgctgagattacctttaagagagttggtgagttgtgctttgagttgaagtaatctagctttggactgacttgagaatttctgttcaagagatttccaaacagcataagatgtattgtaactggaaagagtgccaagaatcccttcagtcaatgaagagcaaagccaagatagcagtagttggtcttttcgatgccattgaagataggcagagtttgtggtgccattgaggagagtttggggaggagcaacattgctgaacaagatctcgtcgagatcgtg

SEQ ID NO: 398456 - DNA, 528 bp, Cannabis indica
cttattattaccaataatcaatatcaaaactcaaaaatagatccaaaccaagagtccaatccagcaaacttacatatatgcagctttttttaaaaaaatcaaattaatatgagtgtatgggagtttatcacttaattaggtggaattcgtcggagataataaaattgaataaataattttcatttcattttttctttttgtggtggttgcatttgcatattaaagtatttaatgtcattttaatagaatgattttaatttaaattttacaatttctttttatttattttatattcaatttctattattattcacatttcttattcatgttcctgtattttcattcaatttttattttgaaataacactatcttaaagtttgggtttgaagtatgataggagtttgggccgtgactagcgagatcggggccgagaaacccaaacacttgcgaccagtgacggatccacaatttttgatttgtgggggcttaattgttataaaaatatttattatttactttacattaaa

SEQ ID NO: 398457 - DNA, 683 bp, Cannabis indica
tatttgtgtttataataatgtttctttgcatgaccgtctcttatataagcgagttaggcccgcgcttaaggtctacctagcttaagggttaaaaaaagataattacatacatttttacatttaaagaaattttcttttacatttttacagttttttataaaaacaacaagaaaactacataaaagtaacattaaaataacatctaaataacatcaaaacaacaacaaaaaaaataacatacatataacaaaaatcaacaacaaaatagcaagagtacaacataaaagaccgtattttctttaaataaaataaaaaaaatcgtaaaaatgtataaaattccgtgaaactatatttttataattttttggttgtttttgtgtatttgtgaaataatccctaaaaaaaatcatcttttaaaaattcacatatttttttattgattttgaaaatactgtttttttttttttctaaataacggcccaatattttttttttcttatgatctactaaagatcagggtcaatcctgattatttggtaccttaaggtgcatttgcttggtggtaatggaaataaatagaatggaacaaaatcaaatttcattcaattcttttatttggttgcattttaaaatattagaatgtcaatagaataatttttctatcattttggtagaatgactat

SEQ ID NO: 398458 - DNA, 1532 bp, Cannabis indica
ttcaatttcattcaattttactaattttgtggttatcagacttagatatctaccatatcacagttagagtttccttactgaaattggacaaaagttcttaaatctaacaatctcaatagttcaggatgaatttttaaagactttaaaagtttagagggcgtgatttgttacatgtcaaagtttggggggcaaaaatcctaattagcctttttttttaagtggagagtgacccactaagttatagcgagcaagggaaggggtcacttccgttccaaaaccaagtgtaatctaacccaatggacatctgcactaggttgtgtgccgctgtattccttagtctgttagtgtgggataaggaaacagttgggaaggaagagaacacttctttaagagactccacaagagctccatattttgtgaggatgacttcttgtgcttggacatcccgaatgaggttcaagaagtctatctcaacctggtgtataatgagttggcagtctttacaccaatttagagcttgaagtgatgcccaagcctctgctattattggggccatcaaacaaatgttgctttttgccatggctactattacttgaccggatgagtttcagagcaaagctcctacacctatcctttcatttctagaagatacagctccatctatattgagtttatattattgtccttctgtggggcctaccagacacgaattttgtttgaggtttggtctaaggtacttggacagttcttctactggggactactgatagatactggtgaaatctttagcttcttgataaattgtgagaggtgttaacgctgacttttgttaactaaaataaaatagcctttacgtaataaattatctacagaaatatatataagtaataaatgatcaaataacaccagatattttacgtgatttcgtagttaaaatctatatattccacgagtccttattattagggatatttattgagtacagattacaatctcagaattagaataataatattttctctctcaattttgtcatcccttttcctctagaatctgcccctatttataggaatataggttgacagttattctttttgagtttgatccaaagtatatcagttcatgaaacgtggataattcccacgttccatttaatcacatgtggattaatgtctaataactactcaactactttttactcttatcctttagacgattattactgagttggaaggttgtatcttgcttgatttgagttattctccttgtccttcttaataagaaaaaaatgctaagtgttgggaagtatttcccctcgtcatattcttttattggcatttaacaatgcgaggtgatcttctcgcttggtgtaatgcaaggcaattatgttgtcacattcattctgctcaagtcaatgaatatccccttcttgtctgtatattctgaggcatgcatataactcgtctatctcagcttaatagttattatccttgtctcatttttgactatatagtcaatgagttttgaatatt

SEQ ID NO: 398459 - DNA, 1071 bp, Cannabis indica
aactcgggagagtatttacctcgggtatgaatagaaggtcactttcaataagccaaagcccatgaaacacgcgacacgtaaaagggacccaaccagacgatgtgaataccatggagatattgggcatacaatgaaagaatgtcgtcagttgaaagatgagatagaaggtctcatagcgcgaggacacttccagcaatatgtaaagaggcaggataatgtccgtgaccaacccgatctacctagtaacccaagcgaccagggaccataaccttcccatgtaggaggaaaggataccctgtctatctcgggagtataacatattgcaaagaaataacgatgacagcccagaagaaggatactataggaggttgcccaacattgattggacaacgggcaattaatctggtcaagcaattacgtaaaattattgcaaagtaatcaaatactggctcgtgatggctgttgtatagagctgcgacacaaaaaagccggtcgtcaaccagtggcagttaggacaaacaactgaaatcaagatcaattcacctacagtcatggagatatggtagggattgactctaaatatcgaaacccttgtaggaatatgttagggattgaccctggatatcaaaacccattttatcaaaaccagatgcttctggaagattgataaaataagcaatcgaactggcagagttcttatgagattaaatcgataacaaattaatgattgcaaaccgcatcactgatgtagtattttgaactttagtcgtgtataaagtaatcatttcttttaacaagtaattataaagcatgaccttttaaaattacttgaggggtatatatgtatgattaacccgaatttatctggaaatacatgatataatgcaagcccacaactttaaaaataaaaaaatttaaatttttttaaaaggttctcgaccaaacatttttggcgagaaaggggtcgaactgttataacttcctgaccaaacctttttgacgagagagggctcgaattgttataacttcctgatcaaacctttctggcgagaaatggatcaaacaattata

SEQ ID NO: 398460 - DNA, 855 bp, Cannabis indica
ctgcaacagtcaacctcagactatttagaattgaaaccatcaaaggaactaatataataggtagcaagtaccccctaataaaaatgattcatgtttgttcatgtgttacaactgtaacaggccaggtcatatggcgtgaaagtgtaagaacaagcctagttctgcagcacaggctaacttgattggaaaagatgtcatttataactatggttttagagatcaacctcattggtggatttgaagggtggtgggtagatactaacgcttctcgtcgtgtctgctataataatactatgtttaaaacatatgttactactactgaggattagaaaagtgttgttgggtgactcccacaccactatagttttcagtactagacatatggaattgaacttcacctctggaagaactgtgattctaaaagctgtgatgtacactccagagatgaggaagaatctagtctcgggctaccttcttaaaaaggcgggatttacacagactatatgactgatttgtttactttaataaaaaataagatatttttagggcagggatatgcaactaagggaatgtttaagatgaatgttcaagttaataaagtcaatgcttgtgcttatatgttgtgttcttttaatgcttggcatgctagactttgtcacgtaaatatacgcattatcaagagcattagtttaggcctaattcctatattatccttaaatgactttgaaaaatgaattttgtagccaagccaagattaataaaacaccacatcaatctgtgatagaaaaggaaattgagcctatagatttaatccattctgatatttgtgaatttgatggaactttgactagaaat

SEQ ID NO: 398461 - DNA, 712 bp, Cannabis indica
ggggtatataggtcttttgttagtggaatttgtccttttttgagaatgttattagctgaaaataacattaatttaaataaaggagggtttattcttttgaagaatatcatagaaatttatcatttcacctattctccttctttctcatttttgaagcatcagaaacccagcctagggttagatttggttgctgatttttggggtttctagcagtgttggtgaagctttgatccaaggtagtgttccctagctcttcccttttgattttagttgaaacttaagttagacaaattcttgaattttgtaattggggggctgtgttggagtttattgtttgaatagaagttctgaagcttaattaaggcttattgagttgttttatgttgtttttgtgaattgaagtgaggttttgtcaaggtttgagtttgagaactcaaaccttgacctctaatggtgtttttgaatttggtgtgaattattgagttctgttgcttggttttgattcattatggtgtgagcaggtgttctggaaagttttggaaagtttgggcttgatttaaattaaagggatcgaatttttgttcccagctcagaaccggtcgaccggttctgggaagcctctagcaaccggtcgaccggttggtacccaggaactggggttccagttgggaaccagtctgccagttggggctttttcccgagccctagtttt

SEQ ID NO: 398462 - DNA, 767 bp, Cannabis indica
gaagaacatgaatatgggaggaattgtaataccagctgctgccattcaaaaggcagaattctcttgtatttattgtggtgatggacacacttttgaaaattgcctatcaaatccagcttcagtttgctatgtgggtaaccagaattttaaccgcaacaacaatccatactcaaactcctacaatccagcttggaagcatcatccgaatttgtcatggggagatcaaggagcaagttcaagtggagcacaagcacaaggaaaacaatcatttccatagggattttctcaacaaccaagacctcaacaaccacaccaacctcaaagatctcaaatgagttccctgaagagattaatgagagactatatggccaagaatgatgttgtaattcagagccaggcagcttctcttcagaatcttgaaattcaattggggcagttggctaatgatttgacgaatagacaacaaggcactttgcctagtgacactaaaaacccaagaagagatggcaatgagcattgcaaaatggtaaccttgagaagtggaaaaattttggagtcaaatgtggcagaaacaaagggcaataaggagccctcttcaatctaaaaagagggggaaacgaagaaaagactagcaagtttagctgctaaaattcccctgtagttatagcatccgatcagcattctgttgtagaaaagcctttgcaaaagccacctccaccatttcctaaacgattcaagaagtagggagtgttaggttttatgcccta

SEQ ID NO: 398463 - DNA, 1434 bp, Cannabis indica
atatatgtttgcttgcgttttcattacaattttaacaattatgttttgatcaaatgcaaaatactttaggcctttccattgctcatatttttctctgacaatatttaagtagttaggaatctactatatgcgcgagcagttgttatctgctatgcttttgatttgcgagcagttaccaattcttcctctcataaacagttataaatctattttaagcaaacttgaatatacttttaatgatttatcactttgtacatttttgattgcttatatgaataattaggtcatctattcatatactaggtttcaatattttttcaaggcaccttggtgtctcgtttaatactttcatatacaatgcaagccattagtattcagctccacatgtagtttataagttatatctcatttggaacttttgattttcctttctcgttagaaaggttctttaatcgaaagtcattcttaattttttgatcttcctttctcgtcaaaaaggtttgatcaacaagaactttaaaaaaatttgaaaaattttaaagtggtggatttgcaatatatcatgtatttccagataattctagttaatcaacacatatgcccctcaagtaattttaaagagtaacactttgtaattacctgaaatgtgattaactttattaatactaaagttcaaaatattacattagaactaagagttacaacatcaatttactggtagtagggtcgcagatgttccacattccagtagttctttattagcgagccactcagccgagccaatttttaaacccggttcctactatcacttcaataacataaggaccctcccagtttgggtttaatactcctgcagatgtgtctctgtatttgtaaatactcgccttaccaccaagtctccaacattgaatagcctctttttcacccttttgttgaagtatcttgttactcgatgttggtatgctgcattagtaatctgcgactcagtgcggtttttatcaagtagatcataggacaattttaaaaattcttggttttcttcttgattataaaactctcgtctgtgagtcaagatatttacttatataggcaacattgcctccgagccaaatgctagcgggaatggagtatgtcccattgctatcttctcagcgttctatgagcccaaactacttgaggtagctcgtcaacccatctacccttggcagcgtctaatttcttcttgatagtatccttcaaggtcttcttaacagcttccacttgtccattcgcttgaggcctggatactgacgagaagctcttaattatcttatttctttcacagaactcagtgaataattcaccaccgaattgagtcccgttgttcgtgtaagattttatgccctaaataaaactccatttcaatgtaatctattttattcaacgtcaataaag

SEQ ID NO: 398464 - DNA, 557 bp, Cannabis indica
gaggttcgactatagacaatagggtagaagatcaatttttctgaaggcaaaattctatttgaattttcattcacataactctctatttaagtgtgagccatcactatctatttataggtaactactaggtttaggttacgaattactaggcattaaaataatgaaaatattaattggaaaaagccttataagtggccggccatagagtaatgggccccacttggtattttttcaattttgacaattttcacttctatttctttaaaacgccaattttccaattctaaccatttaaacgccaaaacttattatttaataactaagataaattattaaataatattgtcatttaatatatttattaattagacataataaagtcttccaattaataaataaaacttagaatctcttttcttcacaatttagcccttgcttagtgaaaattcataactagacatagtctaattttagaattataattgattacttaaaatcaattatttgagtcttataagcagtatggtctcaacaagaatggggaccatgggcctata

SEQ ID NO: 398465 - DNA, 989 bp, Cannabis indica
agtctccttggagctgctcttagcctcttgagatctagtttgtaagccgataaaagtatggggacttgggttccgagaaggcacaaaatggaacaaggcaatcttaacaaagtatctttgagcaataacttcaaaacaagatgtgctgtgggttaagttggtaaattgcatctacttaagaggtcaagacatttagtctcatgagcttaaactttatgtgagttggtactgaagaaagctcgtgagactaagggagactttctccaaagacaagattctagaggctcgtttcttatataaatttaaggtgagcaagatgtatgagcaattattcaagagtgaccatcgtatcatgtttgaaaaggttatttgtgtaataacattgtaaatctgaatgtatatattttttaatttgaatttagccctaattaattcatgagaaattcaacaatagaatcaaagattagtagaattgtactgaagttcatagaatcaattttgtaatgatatgatcttccaattttacagtgaaatctttctctgtaacatttgtcttttgatagtggggtttcaagagaataaaaagatgtgatactgtaaattggagactataacttattatattaccaacggacaaaataattagtaatatttattgactatttctatttggcccctcatcaaattagatattatccttatggtattcacatattaaaatcatgacaatcatgctcttaagtcataaactttattctaaaatagaccaacataaatttgactcatttatttgattgacccaacacacattttatatattgtgaccccaataaatttactaacagcttacagtaccccatgaggtagtcaccttgtgattggtttatcaatttttttcataatagcttttaaaattaaagttatgtgagagtcaataattaattgcatcaatatcgatatgacactttataatagtgttaaacaacccc

SEQ ID NO: 398466 - DNA, 591 bp, Cannabis indica
aatggtatttcaagttggctcttcaaaagtttagctcatggaaaacgttctctttagaattccatgcagaattctcctcctcacgccagctcccattacatttgggagattttgtcgaggttaagcaacgaccaagcgattactccgggcatacatcagtagattcatgacggaagcgaccaaagtttcgcgggtaaccgaggatggaaagttatccgcgatactgtggagcagggaagtcctcggtgaactttggaacgatataaggaagaacgggccggtagactcaatgagtgatttacttgactgagcggaaggcttcatcatgctcgaagaagccattcaacgagcggaaggtgaacaaaagccgggcaagtcaaaggctccttccactaggacatccgcccaacttcgtaactattcaaataattcaagctcaagtggcaagcgttcaagcaacaaccacaagcaaggaagcgggaagaaaggaaacttcactgataaatccggacagactccccgggagaatcatgccaaatacaatgcattcactgttttgactgaagatatagaaagtgtatatatggaaac

SEQ ID NO: 398467 - DNA, 408 bp, Cannabis indica
tgcaccattccatttgggcatttaaagagcaacctttactgttctgggagtgcatgaagcaaaaaatgcttttggctttcgaatacctgcctttaaccgagtgagcattgggtgagaatttgttgctggtgtagtatttgtaggccgactgttatctgcattggaaacattagtaatgacaagcaaagtagtgatagtaacaggtgatgttgttgtgagaggaggtaaatgggaaagagaataagtaaatcttattctctagcattggccgactgtttctgtagcagagcagaataagtaaatcttagctacctataaataatatttcagtaaactaatataattactgaaatgagatctcaatcatttaattctattaagccaagctcgaaggaaattatcgtttta

SEQ ID NO: 398468 - DNA, 947 bp, Cannabis indica
taattgattttaggtttgaaattccaactcaaacgtgtaaccaaattaagatgaaagttatcttaaccataaataaataataattgttattattttaagataaaattagaaggataagagtattatcttaaataaagggtttatttaagaataaactaattaaaagggtttaagatatattttaaataaaaggtttatttaaaatttattaattaaaattattttaattaactttaaggcttacgaagatcttacaaaattacaaaatgcccttgcagcgatggagattagttctgtaatttattttctaatttcaaaggttgtaatattagaagagaagagttgttcgaaagccagttcttcgatctacaattcagaagtctaatgaagagaagcaaggcggattgggtgaaattaaggatacaagatcagttggaggattgaacccgattgcagaagtggctaattcaccagaaatggatcaaatggagaaagagattatctaaaatcaagtttgaaagtggatcgtacacctctgaaaggttttgattgggccaaagaagtatatattaagttaggtaaggagtaggaattgtttcacgaatcgaaaaagaatcattggaactcttttttgaaggggaactcgtttttaagggactcgatgctaaatacactaaaccgttgatgaaaaatggagtcaagatagctcgtattgatccagatgaggttgttaaacaagcgaaaaattggaggttggctataatttgtatggtccttggagcaattcatccaatggcagtattcgagggattcatcaaacacatctgtggacatttaggtattgttcaagtggttagaattacgatgggcttagttctgctcaagttcagtgatgaagctgttggaatttattttaccaggatcttagatctactcacaagtatgtt

SEQ ID NO: 398469 - DNA, 685 bp, Cannabis indica
gggtcgctctttgaagctttcatgattgtttgctttgtccacaccctcattgtacgcttgagcggagatttaagttcagttgtatgcttggcaacgattacaaaaaactcaacaatggtagttccattagcaaacaaggttggacgagctttgggcatagtatcaacaacactgcgctagaccctgtacgtcgaagaagcagccaaataatgcctccaacctttctttaactcccatatgaagcgtctgtacccttctccacgtatttggtttaggtaccagtgatgttgcacctcgggcttcgaggatagcatgtgttcactacttatttcctagtcttcaaaactagaatttgagatattgtcactggatgaagacgaacttgcacggagtcgaggatgatctttgtataagagttggagtaagtcttggttgatatggtgtttgcctccccagaaattaccagggttcatctacaaaagaagggagacaagaaagtgagatttggacagaggaaaagatgaaaaaatagattttatatgcctgctaggccagattaagggcaaaaagaaagggtttcattcaaaaatagaattcctaaatccaaaagttcaaaactttgagaggtacttggaaatctttagaatctcatgaatgagtggaaatgaatgattttaggtcaaaa

SEQ ID NO: 398470 - DNA, 1198 bp, Cannabis indica
ttttttctggttgcttagttttggttttgtctttttcttgttgcttacaatttatttatttagttgttcaaattttttgtttatgattttttagttatttccactttgaggtccattctaagagctcagagaagtttgaagactttgacataccccaaaaaaatcctcctaaggtttctattttttctattttttatagtacatttctgtttttgtttcttgttttgtttgtattttgtattttagctttttagtcttttgttgttttcctcatgttgtttgtttgaactgctgcaggaatgggattacatatatgaccagaagaatctgtttcttgcgaaagctgtctccactgcttcataccaggttatagataatattaagacttgccttcctcctaaccagtttgaactgtttttaaaaacctgttttgggcatttcattaagcttcttgagttcaaagttcaaccgcaagtttttcatggattgttgttgcgggaggttcagcagcctaatgatgctgatttgtggattatgattcgtggtgttaggattaggtttagccttgaggagtttgcattgataactggtttagattgtgaatgtgattgtagtgtgttagattttaagcaagacattaatagtctttgtgtaaaatattggccaacttcatcctctattattaaagaatctgttaggaaatgttttaccacaaagaggtgggatgattctgatgaggatgctgttaagttggcaattttgtattttgtagaatggttttctgcttagtggtactaagcataaaaatgttcataggtccattttagatgttgtagatagtgggaggtatgatgaattttcttggggacggagttcttttgaattgactatttcgtcgttgaagggtaagcttgacagttgggttgaaagtgttagaaaggcgaagagtttaggaaagaggctgagtgttttttacactttgattggttgtcctcatatacttcaagtttgggtttatgagtgttgtaagtacatgaaaggtaagtattaccaaaagaaaaattcttgtatcccaaggattattcaatggacttgtactagtcagccgactttcaaaattttgaagactactatttttgatgtctccaaagataaggtatttctgtttgttgttttttggttttttattagttgtttt

SEQ ID NO: 398471 - DNA, 918 bp, Cannabis indica
acggtggagcatcgaaggggacgtagaccgagggggcttgggcaaagacaagggtccttcattcgttgtcccagggcaaagacaagggtccttcatttgtttgtcttcgtcgttccagtgggagacgaagggatggaaagatctctttttctttttttgaaatcagaagtcgtagagagagaatgagaaacgggtgagggtttgggagatgaagggggatgctagggttatgataaaggaatctttgactatttgtattattttaatggaaaaaaaaactcaacacatttaattattttatttcaaataaaataaagaaaaattattacttatttatcagatttaaaaaaatatttaaaatatttttcttgggcaatgtgtacttattttattattttaaataaaaatttaaagttatgatatagtgacatgctgggcaagtagggacacgtttaccaagtcacactcggtgggtcactatagatcaatatttttttaagaaaaaaattaatataaattatgagaattcttctttagtgacacgcataacgcgttggcaaacagatttgctcacacgtgtggcacgtctctataggccatgtttttttttttatttttattaaattataaattttgggttttagtatttagtggcactccatatttttagtgacacacatttcgagtgatcaacaccgaatatttagagtctaatagtgtgtgtcactaaaacctactcctaattttttagtgacccacactttaatgtgtgtcactaaaagcctaatttgtagtagtgaatgttataaccttgccgtggccaaggctaaaaaagaagtatcctctagccagagcacagacaagggaaaaaacctttctaagtagggaactttccaaggcgggaatgaagatgtggat

SEQ ID NO: 398472 - DNA, 629 bp, Cannabis indica
actctttcctcagactacaagccgctaacgacgtcgaggaaagaagggagtgcgccttgtcccgaatgcagaactactgttctgtggtggcaaagcaatacaataagaaagttagacccaagaacttcctcccgggagaactagttctaagaaaagtttttctgaataccgaagaaggccgagcggggaagttatccatcaactaggaaggaccgtaccgagtgataagcccgacggggaacggagcgtacagactgtccaccatggacggagccgagatcacaagaagctggaatgcaaggtacctcaaaaaattctatgtataaactaaaaggtagggactctaaattccactataactgtcgccgtactttctcttttaaataatgaaaaaggggcttcgaaaaaatatcaatcaagtcaaaaatgaaaagcaaagaccttttacggaaggcaatacaaagacctttcacgaaaggcataattaagacctttttataaaaggcattcgacacaagaatacgcaaaccatagaaaccacaagggaacaatcaacaagtacaacatacgaaatagaactctgtatgaagtttaaacgcatggataagcaagtacacgccaaaaaaaaa

SEQ ID NO: 398473 - DNA, 660 bp, Cannabis indica
tctaaattctagcagtggtttttcttttgtttcatttttatacattggaattatttcaaaaggaaatgagtttctcatcattttaaagtacttgattgtgtaacatgtaataagattacaaatgaatatatgagttttaaaaattatggaggagagtgatcccacccttgatttatgtctgtttatgttgtgttgtaatatgaaaagagagacatctctcttaatttgtgtgattgttgctctaacatgaaaggacaactaggcttttaaatgtgaaattgtagattgattgttggtgatggctggtgatggttgtgctacttctttggagtggttttacttgaagtgtttagaatgattgttgtacatgaacgacaaagatttggtatcttaaatgaaacagttactagttaagaatcctttttttaggcaaattactccattgtatttggtttttataagtatgacaaaagtaaatttaacaattagactaagtacatatagtgaaaggatattatataggaagagatgcttgttgggttttgtgccctaaataaaatccattacaatctgattagttatcaatttaagagatttgaagcgatttatgttaacatgtatttttcatgcttatggcttaatatatatatatttaatata

SEQ ID NO: 398474 - DNA, 941 bp, Cannabis indica
tgttagattcagcttgattgaatagttccgtatcactttcttctttttcgccatggaagagaagagctaataaagagtgttgtaggactcgaacttatactattgtgtaatgcatgtgtcatacacaatacctaactagttgtcaatatttgttaaaaatttagggatgcaacatgaggattttgaagtcacccatcctactctcgcccaagcacgcttaattgcggagttctaatcgaatccgatgcattatactattgtttctattccaacaattgacatataaatactgttttgattttcatttaactgttgcaatttgtttgtaccttaatggcgaaggtttatatctctcttatattaaatatagctatttaataaaaattattggtttaatgattttttttatttataattaattgctaaaattactagttaaatcaatcacttaattattatgattttttttttatttactaaaaattaattattataattcatttatttttataactttgtttatttacccatattattatttagacaataaaaataaaaataaaaattaatatatttttataaatatttttaataaaatattaaatgtttatcaataataatcattatattttacattttggttattgattcacaattttgtaaataatacactaaatataatataaacttatttttatgttaaatttattacaaatttgacatcttggaaatggtactagatcctccaacatctcgtaccatatatatactcgtcgaccctggtataggcagactaggcacgcacctaaagcccacttattttagaggctcaaattaaaaaaattccttttaaaaaaatatatacatattttttttaataatttttaaaaatactatttatctttatagtaaaagctcaaaaaaaaaaaaaaaactaaaaa

SEQ ID NO: 398475 - DNA, 1060 bp, Cannabis indica
ccttttagtatgacttcctaacaggttattaggatgagcctctattctcttatgttgtgcttacttttaatcctctaagaactccctaacctagctagccatacattttatcctttacaagccttcttttcccaaaaataaatgcattccaaattccccaaagtaatccaaggcattcttcaaataaatctgcagtaagaactttgaactttgaactttgtgttttgtaaaaattatcgattggactcactgttttgttatatgacaaaatggatcctatatttttaaaaatggtaaaaataagatcccgatgagctcaattttcaacaattttatttttttttaataaaatcaactttaagacaatttctagcacgaacaaatacaaaaaatttaactagttttgtcataatatctctatattagattattattaagttttatattttgattaaaaatcagttcaggatcttatttgtacatgtaacaccctactagtttaggcctgttatcgtgattttatactaattgtccagctcgttgctaatcaacgggtttattaaaaatcgtgattaattaaaactttgttgaaatacttataaataccaaaataacatatatatatataactgtgatcacgtgtacaaagtatttacaattgttacaaagtatgtaatacaaaagttgtcgcctagcgactatacaaaatatgtccatctgtcccaaagaccgtatgctccaagcctaaccgtcccaacatgtataatcttcatccgctcgctctcactactgcttaacctttgccttggccttacctacacatgcaaacaatgagtcgacagactcagtaaggaaagcataattaataacataactataacccggattataattaggcggccatacaccaaaccataaccctatccccgtgtccaacacggtaccgagtctagaacgttcatacgacagtactatcgaccataatatcagcctatagtcggtactctagtcatactctagttgtaccgatgtaatagcgtcgatctcgtacttgagccaa

SEQ ID NO: 398476 - DNA, 916 bp, Cannabis indica
taccatatatagtttaggaaaaatataataagtgtagctattttagtttggtatttgatgacttagtaatcaatggcaaccatatgttctatatggattaacttcaatgttgaacagaacaccacttccttggccctctcctttcttgttgaacagaacaccacttttctccgctggaggattattttctataatatgtatatatatttctttcactagatgtagaaaaagtttaaggacatgcaactcaaattataattcaaggataaaaaattgtatgtattatttcttttcatttgttgttttcttggtttgttagaaagaaaattaaaccgaccctttgttttctagtgaaaaacataggaattataattataggattaaaataaattgaaaaagtggtgagtgtatgtctatatgacattaagtataaattgacatatgctacaaatatttaatatttatctatctatgagatttgagaggaagaattatgttcagataaatgatattctatagcaacaactttaaccccagatgaggaactaaggcaattatgttcttggttgattgaatttgcacctttatgtactgacttaaattccctagtggaagaactactgatgttatcaaattagatatcatgttcctggacagacttctctctctcaggcaatgtagtagtatcatttggtatgctatgatattgtgatgatgtgcaacaattttacaaacttttcttggagaaggctcatatggcggttgttgctctaaatcttttcctaatgaatcaagataaaagagatcaagaccaaggtttaagctcaccttgctagctgatttgttaaaacttacagacttggatctgcctccgttttatatacactgaaaatttttcttttttgcttattttgat

SEQ ID NO: 398477 - DNA, 766 bp, Cannabis indica
ggcagtatgcaagcatctagaatgtgtatatgttatatgatgccatactttaaatgctatttgattacgtgaatatctatatggggtaaataaacgagttaaggtttaaggcaataagtgcgtaagtgtgctattggtgcttaactcgctggagttgttgattacaagggtactagtaatggaccctccgcaatcatctagaccaaaggcaagcaagtagagcctggggctgcccaaaccgatccaccggcaccgcctccacctccgtagaatccgggggataatgctagggttggtaatgctaatcctcctgttgattcgcagtagatgtttcaagaaatgagaagtgtcatacttcgtcaagaagaaaagttgcgacgattaaggcaaccggcaccgactgcccctgttgatcaagtgttaccaccagcacttgtgccagtggtgggtaaccaggggtttgttatgctgcatagagactcggtgtttaagcggttcgtgaagctggaacctccgacttttctgggaggtattgacataataaaggccgagcagtggatgagcacaatcacccgtatcctcgataatatggaggtgacaggaactgaaagagtgaaatgtgcagccttcatgttacaagataatgcccgcctctggtgggatatcgtgggccaaaccagggatgtcaatgtaatgacctgggaggaatttaagaatctatttgaagaaaatttttacaatattgctgtgagaacttcacacatgg

SEQ ID NO: 398478 - DNA, 990 bp, Cannabis indica
ggtaaatgtaatggtaatagtaataataatgtaatgtaataagaataggaataggaattgattattatatttagtttcttgttagaataagtgataaattcacaaaattattttcactttaattttattcttatttttaaaaaaaaaaatatataaaatatttgagttattttacttttattttatttaatatttgtaatgtaattcttatgacatagcttctccaatgttataaagattctattacataatgtaatcaccattacatgattagcaaatattataatagtaattttgatatagttaatctctattacatcaaactaaacgtgatattacatatgttgttaatcattttgtacttttttattagtagataatggtagagaaaattacatggtcttacatttaaacaatatgacagacgatacactttattttagaagcgaatatgtattacactgttcatatttaaacgtaattaataaaaataaaatatatgattaacctataaattttgacggaggttatgtgccttaacacatctccacatacctagtatatatacaattttatgtgttcttcatatttttagtttggttcaaagaatggttgagatttatggttagtgcttttattattattattattattattattattattattattattattattattattttaactccaagaattaatttccattataaaatttatcaagaaattagtgagtcgtgttaggatagaatatagatacctcaagaaatccacatgtgattcttaaggcaaacacactcattatgatttttttattttatatggtttggtactttaagtattcttctaaaagaaccttaaattttatgttgtcgtttctcctctttcaaaaagaaaataaagttgcttcaaaaagaaaaagaaaataatgttagaagcttaaatagtttcaaattgtagatatattgtgtttgtaatattttttaa

SEQ ID NO: 398479 - DNA, 974 bp, Cannabis indica
aatagtcaactccttccttctgctgaaaatcctttgactactaatcgggctttatatctcttagagccatcatgctctttctttacccggtacacccatttgttgtgaagtgccttcttacccataggtaattcaactacttcccatgtctggttggaaattaaagacttcatctcatctttcatggaaagctcccacttgcttgcatcactagtctgacatgcttcatcataacatttaggctctccttcatcagtcaacaacaaatagttcatatatctcttgttaggcacatgaggccgagaagaccttctcaatacaagagctggggtaggaggtaatgttgcgtcagactgttgcataccgctttgtccaacaagttcctcttgctgaggacttgtctcaatcgactctgtcatagaactatctgggtcataatctccatctataaatattggcccactacattctaagtctttagcgtcaattttgtgtttgtccttgtaaatcactttttcgttgaaaatcacatctctactacgaatgacctttttattttcatcattcaaaatacggtagccaaactcatccccaccatagccaatggtagtgcatttcttacatttagaatcaagcttattcctaccttgatcactaatatgcacataagctacacaaccaaaaacttttagatgtgataggtttatctcttttccactccatacctcctctggtattttgtactctagtgaacttgacgggcctcgattaatcaagtaagctgctgcattgactacttcagcccagaactgctttggtaaacctgaatgtaaacacatgcttctggctctttctgtcaacgttcagttcatacgctcagcaacaccattgtgttgaggtgtgccaggcacggttctctccattctgataatgtgctcatagcaaaacttcttgaatgtgttctcttcatattc

SEQ ID NO: 398480 - DNA, 547 bp, Cannabis indica
atatatatatatatatatagaaccagacacgtagggtccagtaatggggtcaattgcaccactagactagtagacttattggaaaacaaaaataaataatatttagtatatattcttaaacctaaattagtatatcttttaattatttaacagaaacaaatatataagtataaaaaagaattgtattatttaaatttggggttttttttttcagccaaaaaattaaattttattaaatcaaatcagctactaagatagtttccagaccaacagggacagaaccctagcgagaaacacagctaggaatagaaccagaagaacgagctaaaaagttagtcgcctgattcccgaaccgtttaacaaattaattaattgatataggaaataaaagagaggattgcataagagcaacacaatccgaaatcaaaagccccaccggagacaaaaactgcttcttctgttgcacggcttgcaccggcagcagcgagtccgactccacaaccacaccagcaggcacacccccctcaacccaccttcccttcaccca

SEQ ID NO: 398481 - DNA, 1508 bp, Cannabis indica
ccttctattcccatatttgtgagaaggctctggctaatcatttggttgttcatttttaaggggaccctcagttcccccaggttattcttcctgagcgttctaagggttctcctgagctgtcttctgcctcttggttcgtgagtcgtgaggtttgccttgtggtcttctcactccaggattagattgattttgtgtattattctcatgtgctgccctggccacggctgcctcacgttccaactcagcattccgtcgatttgcctcctccagggagcgtctgagttggtggttttccaactcgatgagtggtacttaccttgtaggatcctaggcaccatcctcaccagtctgcctaggttgggcacaaccaacgttaatttcaggttcttcataccctgttcctggattctgggtcctccttgaacgtgtggtccgtgtactttggccacccttaggttgggtcgtcctggaacgagtggtccgtgtagatcgtgagttgggaggcctccaggagcctattggctcttttttaggacagtgagtggtttcttcatgaggagcatcaacattttctcccttgtcagcctaaatcaggagggttttttctgagcttttttcacaaaggctctcaatgaaagcacaaaactgttaacgcagattttcgttaactatattaaagcctaaatcgtgatggatttgcacagaaaataatatcagtaaggaaaaaataaagaacatgaagctttttaacgttgttttgcagttaaaattctgcatagtccacaagtctatcttattatatatttctgatacaattctagggctttttctcttaaggatttttttcgtccctttttcagtgtaacctgctcctatttatagttacataggagggcagttaattacaaatcagactgatatcttacaacaataatcccctaaaattgtgggatttgattacgtctcacgtaaaataaaatgcgattattatttgaaaattacacaactgtgattggtctgcttttactgggtcaatgcatacgtgtatttaataagttgtaaagtgcatcgttctgggacatctcgctgggaacatagcaacaataaccctggtagcgagctagagcttttcccatgtctttgtgaggttgataatgtaaatctcgtcgtttctgtgcttgaagacataacactccatctaacaatcacagttcttagtgacaaggtgaacttcagtagtcaacatcatttgaatgtcagcttctatctgagagagctgactcgacggagcattggtgaaagatgtctggagttgattagtgtaggtaccatgagtatgtttccttatagcaagatggatgcctcgatactcattgttcaagttcatccaactgttatgcttagtttgtataatgtacattatacgctaagtgttctaacagttaaaagcccccctaactttcttcatacatagcgaggttggttcctcgctttgtattaatgatgtc

SEQ ID NO: 398482 - DNA, 628 bp, Cannabis indica
tcacgtgggctcgagtgtggttttccaattcaaggctgaataggatttttagcatgtgcgttttctatctttttagtccctcattgcctatataaggagtgaacttctgttgatttcgggaagtaattcggaaggaaataaacagcagaatatagagcacgaatttcagagatcaactgcaatactggaggcattcttcagaggatttttagcattcttttcttctctattttcttctcttttcttaagttaatatgtgtgatttttcttctatgaacatgagtagctaaacacttaattaggatttagatggatattgttgacattattttatagttttaatatgaattttatcttccctcaatttctatgtattctatttcattcgtacttaattacttttaattgcctggccatcaattaattactttatgattttgatgcgagatctgagaagtgagtgtcaattatgttatagtaaaatagaactgaattttgatatatgacaagagtacctgtatgctttagatagcttataaggattatgtgtttaatgcctgttgcatgtttaatttatcacgagagtagaaaatttgcatgtaattgagatttatatatctgagaagac

SEQ ID NO: 398483 - DNA, 507 bp, Cannabis indica
tctctctctctctctctctctctctctctctctctctctctcacttcatccctctttgctgcccagagattcgacgacgacgacggtgactcgctcgctgcccagcgatttgacgacgacagcatcttctcccctactcgctgacgacgacgggcatctcctccctaagtcaccgacggcatcttcaccagcgacggaagctacacagctcctccctccccaacgacgacacatcttctccctcacaaacgacaacaactcaggtttttaactttctcttatttttcatttttcatagttaaacttaataataattctttctaagcttgaagcacctgatttcaaagataaggggacaaaaagaagaaatattaattggtttaattttatgaaatacatctgtgatttttaactttgatctatgtgctctctcttgaaatgaatttatataataatttgtgattttgtgtttaaatgcagacattattcttcaaagtttacctttgg

SEQ ID NO: 398484 - DNA, 517 bp, Cannabis indica
ttatttgggtataatttatttgctattcagtgtaattatttgagttgaatataagaattaaaaattagttgtttgtgaatcaagaatttgttgttgtgaattaagattttgtctgctaaattttatgattgtttaattttttaatttttatttatattattttttttatataaatttatttatattattattgttattagataataattaatatataataaactagcgtattttttaatctatataatatttttgtcaacaattataaatagtcattgaaagtaattttttttcgctgttataaactgtcatttaaagtaatttttaccaacagttataaatcgtcttttaatgttttgcacttttatgacactagccaacgattttagaaaccgataagaaatatatagtattgttaatacaaattttggttaactatatttaagcctaaatcgtgatggatttgcacagaaaataaaagcagtaaagaaaaataagaagaacacaagggtttttt

SEQ ID NO: 398485 - DNA, 560 bp, Cannabis indica
acttgtctccaagtttatgtctagaaaacgacaacacgatgttgaaagaaatagaaatgagattgacaaggatttggctgatgatactgaagatttttttgggtcagcgttttgatatcatgaagtggtggacgggacaatcgaataagtatccagtattatctttgattgctcaagatgttttggccattggggttgttcatgtgagagaggttgggttcagtatatcgtacctactactaatggcccctaactctcacacaaggctcaaaagagagaaatctaaccttaaataaatgattgacattcattgaataagcccaatactaattgggcctaaataaaactatcataggtgatattttattctcgcaacctagtctatttaaatatctagaaataaatgggcttcctatatgcatctaagcccaaaagcaaacatataggctcacacaggtcaaattgatttggatgggccctatcattttctaggtttacacagatgaaagaaatacaaaatgtacctagttacaaattatttataagatccattgacaatt

SEQ ID NO: 398486 - DNA, 748 bp, Cannabis indica
attggtggtggccttgctggattcatctatgagaatttctttattgtcagaactcatgttcgtattcccaatgatgaagaagctatctagtttggaatttttttaagtaattattatttattataatttaagttttaaccttcttaattgttcttatgtacttaaacaagagtattgttagtagtagcagcaacacgagttgtgaaataaagataatttgcaagaattgtcgttgtattgtaatgtatcaacttgtaatatacctttgccatctttgaaagagtaatggtatttgcatacacaatatgtatcataagtttacaaaaggtgaagtggtcatgttatatattactttacacaaagtgaagtagacatatctttattctaagttcatctaccaataaagagtaatttgcggcagtcaagtttttgcaactaacctctaattctaaaattttggtggtaaaatctcttaaactcaagttctgttagcacttagccatttccatccatttttggctattaactgccatgatggaatgtctacgtgtacacactgtacacatgacacaattttattggtccacgtagataaatattaaaaaaaataaaaaaattaaattatttaaaaaaaaattaaaaaactttaaaaaaaattactttttactttaaaaattaaaaaaaaacttaaaaaataaaatttttaaaaaaacctaaataccctacttcttctcttctctctctctct

SEQ ID NO: 398487 - DNA, 613 bp, Cannabis indica
ttgatatcttatcgacatcataactaattacatcactactcattaattttgaaaataaacttaaaagttatttaaatgtatatgaaagaataaaatattctaatatcacctaaaaataactaactcattattaaaatgtatacagataagtaacaatttttattaattaacaaataaatatttttaaaattcaaaatacctatataatatacgagtgacaaaatatatattacattgttttatttgaatattactataaagtatactaaataaaattattttatatatataattacttgttatattatctgaagtatactaataggtttattgacgtatatcattatgtttagttatagtttattttgtagtgaaaaaaaactgttgttccaacaaatataaactagtagatttaatttattgacatatataatggtaggctatatgaaatgaaatgaatccaatatacaaaaagaataaagtttcaatatgccaatatatactaatagatttattagcatgtacaatagtataggttatacgaaaaggttactatgtaaacaaagaataaaaatttgtttcaatatgccaatcagtttattttgcatgtatg

SEQ ID NO: 398488 - DNA, 1041 bp, Cannabis indica
gggccaattataatttagtacatatcaaagttcgagaggcataatttagtagatattaaaatctggggagcatggtttagtatataaacaatcaactgaaaatagtaaaattgaaataaaattagataaaagtccttaaatccaacaatctcaatagttcaggaaacatttttaacgaccttaaaagttaaaagggcatgatttaataatgttaaaagttcaaaaagtctaaaaaaaaaaaaaaaactaacccatcactccatatttaataaaacattaaaaataattaatcccaaacaatttctttacattaattctacatacatatacttttagttcgtactgttaaggccctcaaaattgattacaattattggtagttttgttttgtatatatacaataaacgacattaattattagtttcctgagccaagtgatatgaaagatcagaaaagggcatctatatatataataatattctatatataaatacgtaaatgaaatttaactgatcatgaagtcagtactttcttctcctgtaaaaaatatggcatagtagaataaagtttggcagtaaatcacatggaaagagatggagatatatatatatatatatatagttattagatgaatcagatgaacatatcatatattataattaggatacgtcaccttcaaaactcaaaactatgaccattttcctaacacttgttttgtattctttctctccacagtactcttctcccatctctttggcttctttcctcttggaaatgtgtgctctagaatatctctctctctctcaccacccatcattttcatacagtacatttatactatagtttcaatatatataaatatgtatatatatactcctttcaataaccccaattataatatatcatcaccatctcacttgatctagctacagtattctacaccttaaatttctcaaacttaatacaaatcaacagagaattattagtccttatatatatatattcttggccatgcatgctagctagctaactatatagata

SEQ ID NO: 398489 - DNA, 652 bp, Cannabis indica
ccaatcagggggaagaagagtttaaagtttacgccaacaagcgactccatatgcctgggcaaatttagacccagcttcccctgctgcgactgacagggtctcgatggcctggcttgaagaagcaatagcgggggtcgcctcgagacgaggatcattcgcatcgggaacaaccagaggaggaacttgcttttggatctcgttgttcgaaaacttgagattgataggctcgactagtgatttcttcttatgggtagcggttttcctttgcctcttgggaggaaccactttggcagcagtagggactccagggttggatgtccttttcttccctttacgggatgtcttcataacccatgtttgcgaaataagatgaggtgttacaatcattataaaggtcttctaaaatgggaggagtataattttccacctaagggatttaccaaaatcactagaaggtgagctatcactagatgaaggggtagaaggaccgtaatatttgctaaaatccctacagtctgtaattttgaatatatcgaaaggcttgattggttctaaatcccagcttgcatctatgtgactttccctatctaccatagtaccgtattgctcggctataccataaaatgactcatgacagttaacctggacgtgg

SEQ ID NO: 398490 - DNA, 1137 bp, Cannabis indica
ttatgcctgtactctctcgatcagtattgcgacgagttccgtcccccctcgcgttgatcgactatgggttcttgtatgtcccgagctgacacttgtctcgtcacgtcccgaccttttcccttgggtatgggttgttgtatgccccctgttggggtttgtacgtgccccttccctgttggttcgagaaggacgttggcgatgtctcggtggcaacccacctgtcccaagttgagtcccaggatttccctcgttctcacgggggatttcctgttccctagtcctgggccgccttctgttctaatttctatgagaaggctccagttggtcatttagttgttcattctcatggggaccctcaatttcccaagttgttctcctgagcgttctgaggattctcctaagccgtctcctacctcttggttcgcgaactgcgaggtctgcctcgtggtctcctcactctaggatcaggtcggttttgtgcgttattttcctgtgccgtggctacctcccgttctaactcagcatttcgtcagtttgcctcctccaggcggcgcttgagatgacaattctccaactcgataatcggtacgtatctcgtgggatcataggcaccatcctccatgggttgagcaccaccaacacttatgttgggttcttcattccctgtttgtgggttctggccaccttcactctggttccttcttgaacgtgtggaccatgtattttggccaccctcatgttgggtcattcttaaacgcgtggaccgtgtagatcgtgaattgggaggcctccgtgagcccattggctcttttccaggacggtgagtagtctcttcaggatgagtatcaacattttctccgttatcagccatggagaaagatttgtcttttggttaggagggttttttctgagcttttttcatgtaggttctcaatgaaagcaccaaactgttcacgcagattttcgttaacgataataaagcctattttgtgattaatttgcacacaaattatagaaaatgaaagaagaaaataaaacacaaagggtctgttcggtaatgcttttaaaattgaatttttgtttttttaattaaaaaagtgaaaacaaaactgaaaagtgcgttcggtaggaagattt

SEQ ID NO: 398491 - DNA, 1333 bp, Cannabis indica
ctacaaataaggttttagaggtaaccaaattgtatctcaaatcatgtaatttaaaaataaatattttttatgtaaaagtaactaattagtatcttatcaacatcataagtaacaaaaaagttacttttaaaaatccaagaaactaataaaaaaaagaatttgtgatttaattttttttcaagcatattattttagaattaaggtattttttaatgatatgacaaggtattattatagttgagatttattaaggtatttttgtaaatagtttatattttaattatattattaaaacatttcctaatattaattagtttttttttaatcaaaatcattgaactatattgtgcatgaaaagaaaatttcgtaatgtttatacaataaactaaatgttactaaaaatatatcttaataatattaagatactatttaaccttatttgtaaacaatttggtaaagtttatttttgattgtgttcaatgagcaataatgatttgtgcatgatcacattccaaaaataagcatttgagcactctttgagaatatattttaagtggagttattaagtagtggtgtttgagatatttattgtctcaaattaagcttcattataatttataaggtcatctcccgttgtaaaagttaagctatgttatcatttatattcttaaaaaaaaccacacccttgaacaaaaaaaaaaaaaaaaaaggtaagggatcgtttggctttacaacttaaaaactgttttcagttttaaaaaacaaaaaacggtttttaaaaactaatagagtcgtttggcaaaaaattttaaaaacagttttttaaaagctgagttttaaaaaactaaaaaacagaaaacatcaagatgttattttgtctaacatattatattttacatttttgtttacatacttgtatcttagatccgaaccaaacctgaacccaaacccaaatgggttcgtgtcatggtatagtattaaaatattaattttttaataagaaaaaatttaaaaatagttttaaaaatttgtgccaaacaacattaaatttttaaaaagaatcattacataagacaccattttttgtaaaatatttacatttttacgttcaaagaatatttttttacatttttacggttttaaaaaaaaaataacatgaaaaacaacataaaatcaacaagaaaactacataacagtaccatcaaaataacaacaaaaaataacatacagataactaaaaatcaacaacaaattaacaagattacaacataaaaagaccgtattttttgtaaataaaatcaaaaaaaatcataaaaatgtttaaaaattccgt

SEQ ID NO: 398492 - DNA, 864 bp, Cannabis indica
tgaacaggccggatgcttggatcaatattgagtgcatgggttattatggaagggtccatctcgatcatatctccatgtgaccatgcgaacatgtcagggtgtgcccttagaaattttgtcaaggcggacttgatttctagggccaaacctttaccgattttcaatcttcttattgggtgagagggatcaacttccacctcttccaactcttctataggtccaaagcttcctgtaggatccccaaagccagaatctatgtttgtgtccccgccttcggctagacttcattgccccttgcatgactcatattctggacttttggcaggtatcttctcctttttggccttggataaggacaggttgtaatagtcatgggcagactgttggtctcccctcacatatgtaactcagtgccttgttgggaatttaagacacaagtggtaaatagacgtcaccgccttcaggtcgttgaagccagttggccaatcatagagttgaaagccgagggaacgtcgatcacgatgaactgcgccatcagtgttcatgtggttagattttctccaactatgagcggtaatctgatatacccgacaggtgcgatgccttggccaaaaaagccatacatcacttggttgcaaggcattaggtcagtgagttagagctctatcttttcatatgtttatttaaaaagaatgttggatgaggctccgttgtccaccatacctctagcgacggtcatattctcaatttgcataatggcctagggatcattatgtgagaaattgaccagtgctacatctattggaatatattttacgatgacctagatttactaacaagtatgtttttaaacatcctaaatat

SEQ ID NO: 398493 - DNA, 1029 bp, Cannabis indica
cttagacactttcataccatggcgagtcaaattggcataggacggcaagaattttaagcttgccatcaaacaaagtttttaatcttttgcgggaggttaagactctaaagaagccttcaccaacgagaagtcccagaggagatcgaaacatgtctccaacccatgctcgaaatgaaatagtgctccaataacctctcttcaccaaataaaaacaattgtctaagaaatactagataagcctatcttgcctattaaacaaggtacaagggataaacaagattgctcttgtcatatctacaaaaattaattataattaattaaaatatattaaatgaaatataaagcaatatgggtattaggagaataattgagtcagattataatcttcttaagctaatatgaggaaatagacttattctatgaaatgagaaaattagacgtaatttattaattacagaaattttattgtactatgtgggtaaaatacatgtttgaaataaaatattttcaggtccgacaacaataaaactcgattgactggccagagatgtcacaacagtattaatgggtattattgtggtatcgggaggttatttttgatattggggattttagaattaagtgagttatttatcaatgactaatttacccctagagattattttagtgtaacggtgtgttggagggcaaaatgataaatttgccaagttttggttaagtagattaacataaattaagttattattattctttaattttattattagtatgatatttgttttaattgaatagataaatactagggatgtgcataaatcgatccaatccaatgacaaccgaccgatccaatcacaaccgaccgccaaacattggatatccaattgtgatcggataagattgaatgttatttttgaatatccaattggatcgggtcggatgttggatggagtgtctaaaaatccaatacatccaacatccaattaaactaattcgtatttttatttagtttggatgagtaattagatttta

SEQ ID NO: 398494 - DNA, 793 bp, Cannabis indica
cctgggttgctaatcccgtactaatacttaagttgaacaaaaaattgtgagtatgtattgaattcaccgacctcaataaggcgtgccccaaggactgctttccacttcgaagaatagatcaacttgtggatgcaacagcaagacacgagacattaagcttcatggacgcctattcgaggtacaatcaaatcaagatgcatccacggaccaagaacatacaagtttccaaatagatatgggcatgtactgttataaagtcatgccatttggtctcaagaatattggagctacataccaaagattggtaaatagaatgttcaaggaccagatcggacaaaacatggaagtgtacgtggatgacatgctcgtcaaatctaagaagactaggggcatatagatgacctggacgaatgcttcaaagtcctcaagaaatacaacatgaaactcaatcccctaaagtgctcctttggagccaactcgggtatgtttctgggctttatcgttaatgcccaaggaattaaagccaattcatagaaagttcaagccctcctggatatgaagtcaccaacaaaaaccaaggaagttcaaagtttgactggtcagattgaccgcactcagcaaatttgtttcaaaatcaacagacaagtgtgttccattcttcaacatcctgcgaggaaataagcaatttgaatggacggagaagtgcaaaaaagcctttcaagagctaaaaatgcaactcgcaaaaaccttgtgtactctcaaaacctctagacggagaagaattaggaatata

SEQ ID NO: 398495 - DNA, 858 bp, Cannabis indica
atacctgagaaattgttcacacatgcttggtcagttgaggtagatgcatctgtgggctgcaattgctgtgccaacatagaaatcagttgttgacactgagcttgtgtgagctgagaattggaaatgtcaggtgttgatgaggaaacttgagaggcctgaaggttattctttgatgtattgccagcatcagattttttgatgttggaatctgatggttttcgagagccataaccgggaggaaacccaattaaaaaatagcatttgtctttgtaatggccaggcttttgacaattggtacaatggggtcttggccttttatttttagaggctgcatttactgcaggagcagcttctggtgcaatagaggaactcgaggcagcccatggggggtagcatgcgatggccaatggatctttgtctttcttggttgattaccatagaaaagactttgttcaagggagggaatggatcaagaagaaggatttgatcacgtacagcttgatatgaatcgtttaaacccttcaagaactgaagtacttgatcatgattttgatgatccaagtgctgaacagcagcagcacatgtgcatggaatcctgggcctcaattggttgatttcatcccacatggttgtgagtttggtgaaatatgcactaacagaatcatctccttgattgagatatgttagtgtttcattcaactcaaagattcgtggaccatttccttggttaaactgattttttaacacggtccacattttagctgcagtatcaaaatacatgatattgcttttgatttcaagggaaaccgaatgtaatatccatgacatactaagctgattacatcgaatccaagaatc

SEQ ID NO: 398496 - DNA, 552 bp, Cannabis indica
accaacaagcctagctatgtgaggtgaattaaatgagagtataaattattagataggattgataaatatatgttacatatttataggaatagctcatacaattatgaaatattatattattttgtatttttacaaaatagcattgctattggccacacttaggcttgttcgcggttgggttgtccgatttttgactattttttcaaatttattttcacatgcagttttctttggactatcaccaataattaaactatccaaaataccataaggtttgaaaataaatatataaaaaaaaaattaactttcaataatacaagaattagtgggctttgggttggacataattcacatatactgaacctaaataaatataaaaattagtatttttataatgtgcggtgcggtgcggtttgaacagcatattaacaattcaaaaatatgcaaactataccgcactgcgcagtttagaaaaaattcaaatcggaatttcaaatcgcattttttttttgcggttgcgagcggtttcagcggtttgatgaacacccctag

SEQ ID NO: 398497 - DNA, 716 bp, Cannabis indica
gtatgtactctaatcactatcactcttatatttatttccgcattgaataaaattttttagcctaatttttttcataatcgtgtacgctgtagttatttaaaactacttgtaaattttttagaaaattcttaaatagtttaaaatgctgaaaaattaggttcaaaaaattatttatcacgcatttgagaaaaaacagttatgcatgcaaatttgaagcttatatttcgacattgtaaattattcagaattttttaaaaatttacttgtggttctaaataactataacgtacacgattataagaaaatagattaaaaaactcttatgtatatcaaaatggatagaaggataccaaaacatctctttgagatttaatacaaacttaccaataatgatatatatttaaatattattaaatataatataataataatataaaaagtaaaaataaagagtgatagtgattagagtacatacaaaatataatgtatatttggtgcagctatgtgccaaagttagaatggaaaatgttatatgatgtttggagctgctctaactatacaccatatcatttgggacaagaatttttgcatctaaaaatatttaaatgctataaatatttatcaaaaaaatgctatacatattattttagggaaaaaaacagaaaaatacaaaaaggaaaaaaaaaaatcacaaaaatactatgggtcggcccatt

SEQ ID NO: 398498 - DNA, 757 bp, Cannabis indica
cacgccaacaacaacaacaatattagggcgtgtgcatacataaggctaccaaccaatgacacataagaaacaactttcatttcatctctctctttatcattttgtggacattgggcctttgagaacttgttagctttcactatcggcgccttcttagaagaacatgaatgcatgttgaatcttttcaagattcgatcaatgtaagttttttgagacaaacgaagaataccaaatgccctatcttgaaggatttgaatccctagcgcataagaagtatttccaaggtctttcatgtcaaaatggtcaaacaaaagttgttttgtctcagccaataggtcagaattattatatgcaagaaggatgtcatcaacacacagtaccaagaaaatgaaactgctcccactgaccttcatgtatatgcattgatccaccatattctcccactgacaatcatattaaacttgagataccactgccttgatgcttgtttaagcccatatatctacttcttgagtttgcaaaccatgtgttctttgccagacttcttaaaacctacaggttgagtcatgtacacatcctccaataggtcaccattcaagaaggcagtcctcacatccgtttgttttgagttctagatcaaaattgacaactatagccacaatgattcgcaacgaatctttggtggaaacaggaaaaaagtttactttgaaatcaatgccctctttctaactatagcctttagccacaagtcgagcct

SEQ ID NO: 398499 - DNA, 671 bp, Cannabis indica
gtagcaagtcggagcttcaccccagtgcttttattgaaactacgattcttatgttgtgttatacatattccactttggatgtttgcccaaaactctttatatatagattttaaaatattaaaaagagataatgcccaaattagaaataattaaactcattttataatgagtctataaataggtagggtccgcaagaaataatagggttcttgtattatctccgtccccatcacaaaaaatacataataaacaaatattgtattcttaaaagatcataaccttatgtgaaatctccatcaatggtttcacgttagtgcttccgctcatcttatattcatctttctcttctttaatttagcaaaagttctataatgagtctataaatagggagtgctccccaagaaaaactaagattcatgtattctctccttccccatcacagaaaatacataagcaaaatattgtattcttagaagatcataaccttatgtgaaatctccatcaatggcttcatgttagtgcttcctctcatgttgtattcattttttttctttaatttagcaaaggttctataatgagtctatagataggcagtggtctccaacaaatactagggttgttgtattctctcattccccatcacaaaaaattcataaaaaattattaagatc

SEQ ID NO: 398500 - DNA, 409 bp, Cannabis indica
gaagtggacttcaatagttttgaagaggcaattcagtaggaaatcagagcagtcaacttagtatgaattttggagatcgaagccaatactggaggcattttcagagggtttttagcattctcttcttctctattttcttctcttttctaagattaataagtgtgaatttgctacaatgaacatgaacagctaatagttaattagggtttagatggagattatttgacattgatttatggttctaatatgatttaattttccctcaatttctatgtattttatttcattcgtactttattacttaattgtttgaccatcaattaattgttttatgatttcgatgcgagatctgagaagtgagtgtcaattatgctatagagaaatataactgaatttcgatataggacga

SEQ ID NO: 398501 - DNA, 521 bp, Cannabis indica
catatttttatataataccaaacttaacaataatactataatggagtatcttaatttatgattggatactagaagtcaacatcatatttttattattatactaaatatgtatataccttttagtatataaataaatttatataatgcattcaaaattattatttcttaactacttcttggtatatatttcacccaaatctttatatactttttgtatctagtatataaatttaataattacttgttggtatattattatattagtatataaatcaattatatactatctacttgttggtgtttaattttttctaaaataactacttgttagtatgtatttcaccaaatttagtatatgaacaaaataagtaataattacgtatatatatataaatatatccataataaattgtatacattttaaattatttggttaaaataaaaatactttttctaatatatgctaataaaaattagttggagattttattacaatagaagataaatcaagatatgtacaa

SEQ ID NO: 398502 - DNA, 596 bp, Cannabis indica
atgcatgtattttttttttttttcagattccatcattctactgaatcgttttagcaatttgtcttactttttttttttattaaaatttttctactttcttaggccttgtaagtagggtttatttctaatgttctgatgaagttaaaaaatagtacacataaaacatggcaggtaaaatatatgagactggatcaactggaattagcagtatgaaagggcacagcaacaggaggagcaagtgcttaaatgactttatttcgttgtacgggaaaatgccgcttgtatcaacacatgttaaagctgtagatgccaggcaagaatggttctggtaatttgatctgtttaacttaactaaaacttagcacgctttttgtagtcttagcactatgaaatgtctaaattcgttttagatgaggttcttactgttaccaccagaagtagaatcagattaaacatttagctttgagaagaatggaaaacttttttttttttttttcaattggaaaagtagagagggaaggagtaggaatggcaaatggggcgggtctgccccgccccgcttctgacccgccccgccccgacaagctattgccccg

SEQ ID NO: 398503 - DNA, 503 bp, Cannabis indica
ccatcattaagaatgtgaagaacggttttggtcacaagctcaccaacaatttcccaatagtttgtgtaaaacatgacagacataccatcaatgcctggactgccatccgattgcatagataagagtgcatcataaacttcagtggcagtgtaaggacgggtaagtaacagattcatgtcatctgatatgaggctgggtacagttgacattatttgttgagttgcatccaaatcaacaccatcagtagtgaataaagagtggaaatacgtctgaaccacttgagcaataccatcaagggaggtatgttctattccatagtcatcaatgagcattcggattgaattattagacttgcggcttgaagctttttgatgaaaaaatctagtattggaatcctccgattgtaaccaagatatgtgagatcgttgcttccagtattcttcctcttgggacaacaagtcatcaagaatagcctcactagattttagttcttcaaaatgatt

SEQ ID NO: 398504 - DNA, 1924 bp, Cannabis indica
ttatggctcattgttgtttccatgttctctagttgtcggctctctgctttggtccctctggatgattggatcaagattaaatgtgacgttaaagtggggaatgggggcaagtatgtgtcgcggcgttggctaaagacacttgggaacggtttgatgggttgctaccaagaggctcagcttctcttatttccttattggcgaagatgcgacttgtcttgtagccttggagacggcagcttccgtgaagcatcattttgtgttgatagagagtgattttgagacagttatcgaaatagtgaagtgtttgaagtatcggaaactatacgtattaatgtgatagattctaatttatttttagatttgtaatttttctttaatttatttttagattttttatattttgtgactcataatataaccaattaagtatttactgagaacttaactggtatagctgagctatcaacaatgtccaagaacattttatgtgatctaattctctttttatatacactcattaaaaaaaaaaaaaaaaaaaaaaaaagaactttcttttgttggtttattttcaaaaattgaaaatgaaacctttcatttcctctcattttttaaaaagaaaggctagtcaataaagaagagtaactttgggttctcccttcatttcgaaaaaaggcattgttattgtttttctctagatgattcattttcaaacagcatagtggaaaagccattgattaggggaaacatcctacttttgagcacgtgcaatagacaggggccttaaatttgttgcaggagaagactgcaagtgagggtcccatgcaagaaattagctaaaggaagcagtatcagtttcacacaccaatcccaattcactcaaattactaatactattatacaaatttgtaacactggctttcacatatagcctaactggtttcgaaattaagaagaataatgctacataaatttatcgatttatggtgtaagtaatttttacaaattatacttatttttatttgttttactatattattacacaaaaaatgatataattactaattagagacaattgaggcgttgagaatattctttctaattcttctgtgtaattataaaatattattattttaaaaaattaattattataatattatattttatttaataattaagtctcttagagaataaaaattcaaatataattactattttaaaatagaatataattatttttaaaataaaataaaataaaataaaacacttctattacttagtaattgacatattaatttctaaacatactattttttattttctatatattcaattcgttctacaaagtgcggtatccgcattcatataaattggattaataaatttaaaattcatgtgtacaaattgaatattgcttcacatgctaaactaatggataatctaatctaatctacgtttatttatatttattttaaaaattatacatatattattaatattttaaagtaattaaacaaaactaatacatagtacatatattttttaaaacttaatatatgaaatatatatatatatatatatataaaaaatataatctaaaactataaccaatctttcctttttatatacaaattatttttattttctttggttatttttgtttatttagtattgttggagaatttaaaagcaatattttatatttaagtaattttggcgatgtaaaaaaaaaaaaattattattttcttttaatagtaaataaaataacgggtttttttttattttttacacttcaaaattagttttttttttttttttttgtcatttatatggaattctacacagaaacccctattgcaactagcactggaacctaaattgcaacaaaaaatcgtatagaaacacttattgcaactagcgctgcaa

SEQ ID NO: 398505 - DNA, 508 bp, Cannabis indica
aaaactcaaattaaataaataaaactcaaatccctcatctacctttctctccccccagccacccgcaccgctgcctcccatcactgacgatcaaaacgaaggccaccactatcccgcctctttctgtcaaagctcggcctgagaagaaggagagattaagggaacctagcccagatccgactgatcctagtctagatctgaccagactcaatccagatctaagtacttccttcccagatccaacagccacctgcaagaagaagaagaagaaaaaatacagcgagacgggctgggcgagaagaagaagaagaagaacagaaaaagagatgaagaagatgaagaagaagaaaaatagaaaataatgaagaagatgaagaagaagaaaaatagatgaagaagatgaagtggtggtttcggtggatgttggtggtggtggatgccgattatatgaagaatatgaagaagaagaaaaatagaaaataatgaagaaaaaaaattgttggaatga

SEQ ID NO: 398506 - DNA, 563 bp, Cannabis indica
cattcccagaagttcaaacatcctacccagaaatcgtaaaccgtgctatataaacaaacagtaaagcaagtatacgagatatgaagaacttacttgaagtttgaaggttgggggttggtgttgatcgccggtaaaactaagactggcagcgacgaaggaataatagtaggaaatcaatggtgtttaaagcttcttttctctctgaaaaactctaagaaaatttggtgaaatgcaaaaagtaaccaaatgaagtgagaaggctggcttttattggccagaacaggtgtgaaacagctgtgatcaaccaccatcgtacggtcaggatggcaatcgattcaaattctacaaatccaacggttagattaaacactcatccaggcagtagaaaacgtttgagtacccgtctgacacccatttaatgcgccgtgtcaataaatggacaagaaacgaatcgtcgcctgcaaaaagcaaataactgtagtaatgatggtcattaatgtgtcaccacgcgcccaaggcacgtgccaggaagctgaagaggcaactggaggcatctaagcaag

SEQ ID NO: 398507 - DNA, 531 bp, Cannabis indica
gccaccatgcctatgtcaaaactacgactgccatcgaacaaagccgcatccacattaatgcagtccacacaagctctaaataaagtcagtaaaattaagtgcaatgagtatctccaccatgtactaacatttattctatttatagagacatattccataatctttggtgccctaatatagataaattcttattaataacaccatttcttattgccaggttaaatatgcatatatttatgagtgacattattttttaaattaatgtagtaaagacctttaaatatttttataaatcaagtttctaaaggaacatggagaatggaggtctttgataattttaagacaaaactactactatattgcttgttccttaaatttctaaatgtgagaactcatcttgtttgtggataagatttactcacagttactgatttctttaggtttatttgtaaaccttgcaagaagttatgaatgtggaataacaatctaaaataatccactatctgttaataatcacattaactatattag

SEQ ID NO: 398508 - DNA, 570 bp, Cannabis indica
cattcaaataaaatattgtcttcatcctttccttctcattcgtctcgttatacaaaaattgtccaaacaactccattactttttaaaaatcgcaataaagtatcaaaacaatctattacaaaagacttgttacgattctctttcacatttaagcattggattaaagttataacctcatcaagaaacaacaacaatgttgaaaatattgaacattttgaatactttgaaaagtagacgtcatgttgaaaatatttaaagaaatgaatcttatcagaattgagaaagattggttgaaaaaggaagagagactaataacgtagttaaatgatcaacgaaaacggtagagaaatggttaaataaggagtcatttgtaattactattatcatatataaataacaaatcatctctactttcatttgagtaggtacgtatataaacattaattatggttgtaacctgaatttattcgacactttagtaactttttaatactaatatgttatttttttccttccaaatattatggtttttaaaatatttttatgtaatgaattcctaaattggtgtaa

SEQ ID NO: 398509 - DNA, 579 bp, Cannabis indica
catgataaaagccttcaggtcctacttaggttgaacaccagctagtgttggttgcacaccgagtggtgacggttgtatattgcctacaggcggcgctgaagacgaggaatgttgtccagcttaactctccttttgtctcatgttagtttgatgagataattgtgttgagagtggggctacttcttcatccctctcggccaataatctttgtagttcgtgaatcttctcttcattactgattgccccagttactaacactggcatatttttatcattgccaatggttagtgcttcaaactgagtaatgagatcagtagacacctccccactatgttcaataaagggagtgtcttctaaagagtgtttagatgtgcaacacctctcttcctgaactttttgaacaaaggggttcactgattcctgaacgggaattgtacgcatggcacaggctcttgatcgagttacagggcccgtgtaggaggtaggcttaacagttgaagtgacttattagttggtatccctggaggaacatcctgtcaccatgttctttttggaatgagttagggcttgctttgggaa

SEQ ID NO: 398510 - DNA, 648 bp, Cannabis indica
ttttttttttttgaaatttttgattccgaaatacaaactttttggagtaactgagtggaagagtgaccacttaatttgcttggaaggttattcaaggcacgaaatccacctaagggcatcttccatggtgtactttcactgcaatggaatggaatggaccaccgacttcaacttcataatgattattttttttggtttaaaaaagaaatgcttggtcaattttaaagatgataagctggatatataaatgtaaattttttatttccatacattttttcaaggtttgatttattttattattattatggttagtatttttttaaaataatattatattttaattaggagaatttttaaaaatcctttgattttttatttacaattttacgactaaattttttttatttataaaagtatttttttttaaagttttaaaattataaaacaccttttcagaaaaaagttaaaaaaataactaaaaaacaacgaaaaattaatctcatgacaactataaattagctataaagaatttataaaataacaaaaaacatcatcccaactataacacaactataaataaattataaaataacaacaacaacaacaacaaaataatttattatttttactaaaaatatatttttgtaa

SEQ ID NO: 398511 - DNA, 766 bp, Cannabis indica
tgagttgtgataatattttttaattaaaacaaataataaattaaataataatgtgtgagatcataattattgagatttttacccccataaaaaaaatttaaattggagatgctctaaggagctccttatatttttaatagtactatttttttatacaattatcttaaattaatttttaccggacaaattcaaattataatagagtgtcattggtaatgccatcataatatagaattatttaacattctactttgagtgtaaacattaaaggcattatccatatgaacaaagaaatacagtatgaatatatttattcactcgaggtccatttttcactattatgtcacattattgtattattggtaatatgaacaggtaatctttttgggtacataatgggtgggttacacgaaaagtttgatttttagcttcattaatgtcacattaattatgatatctcattggaaacttaattggtgtgttacgtctatatcttgggattgttacttaattactttataagtaatgagtaagatttttcttcattaatatcgacacaatcgattggttttctcaatgtgtttctcacattatatttaagtgaaacaactttcctctcgtgtacgtaacaagtgtacaatgggagaaaataacattagatcaaagattgaagaagtaattcggacgagatccctctcagtgaaaaaagaaaaatacttaagtggagagttgtatgttctaatggatcaaatacaaatacggctta

SEQ ID NO: 398512 - DNA, 593 bp, Cannabis indica
tagaagttgcacgaggagtagctatctgctgataggtgatcaaacacagccagatttaagaacattcaattccttcctccgttctctctcacctttttcttttactttctcccaaaatttaaccttcaagtaatgtttaaaattgcgtttttattgcgcgcctcaatttgaggcggaaacttttagctttgaggcgtccgccatggtagtcgtgggagaggcgtacgccttagccgcctgaggcggtaggaaaatggttgaggcgtaaatttcagtgaggcgcacgcctcaatttcaaaactaaagattagggttttctaagcccaaattcattctgttatgttttaaaaagcccactaaagcttttaacttaaaaacaagaggcccactaaagctttaacttaaataaggtccacgttacccttactcaaccttagacacaccattagagaagaaaacaaaaaaaaaatagcactaaagcttcctcctctgcttccaactaattcttctttttcttagctaaagcttcatcatgccattattgctgaaactttttctaggatagtgaaatatgaaattcttggataaaaaaa

SEQ ID NO: 398513 - DNA, 522 bp, Cannabis indica
caagaaagctatccgaggggaggtaccagctagaggacaagtgagatgaatgatccaggggaatgggtgcaggaggtccagaggtcgtctgggatcgacccaaaaacgacctaagtgggaaaatagaagtctttggcatggttccccaccgagtggaaggcatcctaaacttataaagacactcatcaaatcctatgggcctacattgggtatactctcggaccgaggggacatggtgaattactaaaggagacttaccggaacctgaagtactggcatctgaagcaccagtgttaggaaccgggaccaaaggcttgggcctggagggcctcctatccgcgccagcttccaggcgaagggtcctcccagcagcagcctgggccttgatgtaggccagctcctgttccctcctgaagaggtacttctgatgccactcctctgtcgaagtgattatgtccaaaatacgtggaccaaccggggctgtgacacgtggattgaagaagcaagactttgagatgattc

SEQ ID NO: 398514 - DNA, 580 bp, Cannabis indica
cttctacttttccaagtaagccaaaaaaaaaaagaaaaaaaaaaaaaaaaaaaaaaaacttaaaagacttggctgttgccttgtttgaattggtgccactgccacctcctccacacacaaaaaaaaaaaaaaaattgctgccattatttctttagtttgagtatcaagattagtgtattagtagtaaggtgtagtgttagttagctagttagttagaggttgttgtaagttgttagagttggttaaacacttttactctgtattatatactctgtaacaaatcatttcccagctaatgaattcagttcgttcatctctcttttcctaaatctgatattgagttgagtgtactttggaatagtagaatttagaagggaaatttgaattcctatacttacattacctaaaaatttgtctcctaaatgcaaagttattaaaattggtaatatatgaccattttaccaattttcctaaactacccctctcatttgtaatcagcctctctcttcctctctcttcgtctctctcagccgatttcccacaccaaacccacacccccaaaaaccaaaaaacccacaca

SEQ ID NO: 398515 - DNA, 687 bp, Cannabis indica
ctataaatagaaccctaatttgataaatcagaagacgacttttacactgctaattatttttctccgtgttgttcttgctcatgtgttgagaactcaacaagaacaaaggctatacactttatcctaatagctcatactattccttgtgtgtgatggattaatttggaagacccttgtgtgagtccaatttgtatattcctcatcagctggatttaaagatacagcttacaagaagtttcaaggataccttaataggcttcaagaggtatactgtaaatttattacttttataattattttgatttaatgtacacacatctggatatctattgagctatggtacagtgataattagataatataaaactcttctgctacatacctaatttagtaccataataattggtatcaaaagcagttccataaatgtgtatacattaaatgttgtgtgagttttatgcatttatatatatgtgatatgtatgtgaatggatggttatattattatgaatgtatgagaggtaatgaattgttaattagatgttacaattgggtgtaggttttgttgttattattttttagaaaataatgtaagccaatatggggcatataaatttttatgtaatttatttattttatgtaaaaattacacattgtaatgttcagcatgtgagctcagtttctaat

SEQ ID NO: 398516 - DNA, 1781 bp, Cannabis indica
aaatgggtcaaattttacattgggatacgaactagacataccatggacatattagaggtataaaaattagatttggagaaaattcatttttgagcacccggagcactcagtgctcgggcacgcagcacccaggttgacaatttgccagcctaggcaactttcaagtataagatcgacgatctgacttttgtatcatcttcgtcttcatcaaaaatatggaaataagtactttcggggaagaaacaacacttctgaagtgccagaagcaaggcctagcgcccaggttgacaattggccaatctgggtaacttctaagtatgagatcgacgatctgacttttgtatcatctttgtcttcatcaaaaatgagaaaataggtactttcggggaagaaccaacacttcttgagtgcaagatgcaaggcccagcgcccacgttgacacctagggctagcctagggcccaagttggaattttgtcaatctaggcggatttgatgatgttttccaagaagtctttcgagcatcttctctgttttcaacaaagattaagattcaactatttttggagaccaaacgaaacttctgaaaggccatgaaggggacccaccaccttggttgacacctggcactaggcctagcgcccaagtttacatattgtgaacctaggtttttttccaatcaagttctcaaaaaagtgttctggacattttttccgtcatcaaaaatactgaagattcaagcaaacttagggagaaaaccaaaaacctgaggccctagaagcacaacccaacgcctaggttgacagtcaacttgctgcgctggtttcaatcattcaaatgcaaaatttgatccgagcattcaatctaaaatggtaaaaatggggtaggagacctcttcctaaactgaaagaaccttagaagtatcaaaatgacaatccaggagctcgaaaatgaagtacacatcacccaggttgaaaagtaggctggtgcgctaggttctgcttatccgattttgattctgcctcgatcgttcgtctagttttttacaataattaagatctatgaagtcagagaagccaatttcacaacttcacatttctcatttccaacttgggaaaaccattcgaaaatgaagagtttcaagtctcttattttcgcgaaacagcaacatctctgaacactagtgactagcttcgctagaacacatgaacagattaagtgatgtcaaaatatcacttaggcaccaaaaagtacatccctaggatgttttaccattcactcagcgtccaggttgacatcatatgtctatctgggggttgggatgtcaacctgggtattggatgtcaacctgagtgctgggcccagaataaccttcaataaaacggtcataactcactcaatattgatttaattgacgcgattcaacttgcgtttcgaagctaattcaatgctctatcaagtcattcctcagagttcaatcgcaattctgaagttctcaatctcaaatttcactcccaagggagttacaaaaatacgctcctggttacccagagtgggtcccgcgcgacccgagctcagaaaaataactatcaacctcataagttaattttcaccattagatcatcatctacggtcaaaatttgcaaatatatattttaaattttttattttattttttaaggacctccttcacctttaaaaggagagctcccttatctcattgtttatattcagaaaaatacccacaaggccatagcatctctctctagtttctctctctct

SEQ ID NO: 398517 - DNA, 641 bp, Cannabis indica
gaacaaaaaatggattaattaatttgaggagattagaataaattagtaatttatttaaataataatttttaattcaagaatattattaaaaaataaatttatgaataatctaaattattaaccattaatatacacttatcaatttattattattagattaaatatctatgactctatatgtctaccataaagacaaaactaataaaagttgatgtaaaaatattacaaaattactttttgcgtcaaatatagcttaacttttatatctcccattagatatggtctaatgtgttcaccccaattctaaccaaactatgtatacttgttgtttataatacaaatcattttacattaataaaagtttaatgagtaccttttaatttttttttttttttttttttttttttttttatttttgggtccctaaaaaatatagaccctaagcactagtctagcccgcttatagctagggtcaacacttggttaaactataatcaaacttttatatctatattattgttattatttatagcctgcctaacgtaataatatcattatttaatatcatttggtttacaatatgtcaaataataataaggctaattagtaatttttcctcccgaactttgacatataccgaa

SEQ ID NO: 398518 - DNA, 616 bp, Cannabis indica
atgcaaaaaataagaaacaaaacatacaaaaaataatataaaaccaacaaaataacattaacaatataaaaattatccacccatccgaccgtagtacatttaatcgtagaacatacttcactacagatgaagaactaagatattcaaactccactaaataaagaattttaaagttttagtcattatacttttctctaataaagctagctaattttacgttttttaattaacaccaagaactcgatacctaaaaaataataggaatattaatattaattaagttctaaattttacaactactataaacttatatctattctatataaagtgtgcctatataacagaattcttggtttatgaaaaattcatgggtaactttttatttatattaaaaataaaatagtttattattaaaaataaaatagtccatgagaaattcatgggtcactttttatttatttataataaaataaatcccataaaatccaaaataaactctattatcaatgttcatttaatttgaaaactctatcttaattttatttcagattgaatttattggatattaaaattaaaacttttatatatgttcttcactgaaatcttgtattatatt

SEQ ID NO: 398519 - DNA, 676 bp, Cannabis indica
attaagtttatttttaaaatttagaatacttatataataaaaatatgactgactaaatgtatattaaatagttttatttgaatattactataaagtatactaaataactaattaacaatttaaatatttataaattttactaataaattatgtgagtttttttctattattattttattgtaacttattagtttatttataaattttgttagtttatttgttatgtgagttttttttttttttcgtttattgtaacttattataacaaatgttgttacaaaagaaaaatataaaagtaacgtaaaaatatattttttaaaaaatttaatataatttaaaaataaatatattggtttcaaagtaacaaaaatgtatataaaacaattagtacatacaagtggtagcttattataatatatgacagctcaataatttcaaaaataaactttaaaattaccgaaatatattttaaataatatacaataatataacttaaaaataactatttgattttaagatgtttacaaataaattttaaaggtaatcaaattgtatctaaaattatatgatataaaaataatttttttatgtaaaagtaactaattaatttttttatcgccactataagtaaccaaattgttacttttgaaatgcagaaaaattcaaaaaaaaaaaa

SEQ ID NO: 398520 - DNA, 507 bp, Cannabis indica
ataccactgtaggaaattattacagttttctccctacacaactcacacacacaggttattattcaaggtcaattttgacctttcttatctgaattaatttgtacatatatgacacgtattctcttactttgtttctcttataattgactttactaatattttcctttgtctgaacagagcttcgaaggacaaatagaaattagggcaaaatcaatgttgttgcccctgatttcgcccaatatacgtggaccaaccggacagggacacgtggatcagataatttataaatatttgctaagtctttgtatgccactaggaaacatcctggacataggtcccggaggaggcacccggagtgcaaggtgctcccggaagctcgcatagcataaagcctctccgtgaggtgtcaggcttctcctgagccatcaagtcgcatttaatgctgcatgggaggaagcgtgttgggactgcaacacgcaataaagtctgacggcacaacctccaacc

SEQ ID NO: 398521 - DNA, 790 bp, Cannabis indica
ctatgtacttaataaacaagtaatgtatataataaccggaataaaaatatatggatgatataattaataaatattgttacctccctaatcaattcactacttttaattggggaggttacactaatcaattcactacattttataataaataatgtagattaggtaagtcaaatatgttggccatgaaatttatttgataaaaattacttagtttgcaaaggttgtgggcggagaagctttgtaatgacacaaagaacaagcgcaatggttggagaagatttcataatcctattagaagtttttaattacatgcttttgttttaaatgctctctctgtttttttcagcgctattgattcaagttcaatagcaaaaaatgtttactctaattcgatgatcttatattaagatttaagaatacaatcatgttgtttaccaagaaaaaaatatgtaataaaattatgttagagtagtaattaagataaatattatgtgtactctaacacttatcttattgtttaactaattcactatatatgtttattgattagtgtgatataattttttagaaagttttgacaaaaacaaaacattaatacctataactaatataggaaagaatatagttagaattaatttttaaatatatgttatgtataatctttataatatatgtaatttgcgatagcattatgacactactaaatttttctcaaactaccaaaatatttctacatatatgctcaaaaccgctcgaagagcggttttgtttcctagtatataaataaagg

SEQ ID NO: 398522 - DNA, 649 bp, Cannabis indica
tctgctcagcccacaacccaactaggttccgtttggaatcgggctggaacttgggaggagaagaatcttaatagcgggcaacccaaagaataaaggagttggttatgacagttgattctttagaattgtcagttggaaaagcacagatcttaaatttatcaaaatgtgatggtaatgcctttttggtcactgttcggaataagaaacgtgttggctatactactatgagtagggctgttcaaaaaaatatgcaaaccacccaatccgaataaatcgcccaaactaaactgaataaactgacaaaaaaacacaacccgaatagcgttacaaaaaaattcaaaccgtccaatgaatatattaggcgggttgaatattattctaacctgcccaaataacacgaataaaccgatttatatatttttcactaaaatatcaataatataatatataaattactcttaatagttaaactattttacatttaaagtttatattttatagtgtttgatttgaagtttagaatttagaattaataattttgcttgtatttaaatattgaatttaaaattttaaatttacatatgagttgttataaaataatataaaataatataaagtagatgagaagaaagaagaagaagatgaagag

SEQ ID NO: 398523 - DNA, 792 bp, Cannabis indica
gaagagagagagagagagaggatcaacgtaagaaaagagaaagaaaagaaaaggctcagcttaagagagagagagaaagggagtaaagaaataaaataataaaaaagtaaagagaaataataaaaaagtacaaataaaaaaattataatatagaatatacaaatgtaaaaaaaataaagtatcacagtataaatataaagtttgaaaaagaatataatattttgtgtaaaatttttaagaaaatatgaacacaagcagaatattatgaattgacacgacatcataaaaaaaaatacaaactaaacatgacaaaacacggcgcgatacgtaagatactatttgataataataataataataataataataataataataataataatttgagtatttattagtaaatatttaaattttataattttaatgatttctttatatgattttttataaaatactgttgaaaaattatataaaaataatgaaaattttaaaaaatacatataatttagcaattatttcattaatggtaaaaataaaatataaaaaagtatagcacaaatttgagcttgtataaaaaaaattactcgaataaagcacgatacaaaaatattaagataacttttttaaaatattagcatgatacgatacaactcacattttttataacacgatactgaatcatttatatttttatgatataatacgatacgatacgacacatatttacagtagtagctgctactaagaaacgattttgattatttaagtgtcacaaataattaaagcttt

SEQ ID NO: 398524 - DNA, 465 bp, Cannabis indica
cagagagagtcgattggaagcaaaagaagcctggagaattgcaaacagatgaatatgaaagaggtataggaagaataatataattataataacaaagccaatgtaccatgaaaattatagtccaagctccttgaaagcatctctttagaactcccaagattgagaaaatcccaattcaggggaaagaagagtttgaagtttgtgccagcaagcaactccatatgcttgagcaaattcagacccgacctctcctgttgcggccgataaggtgtccatggccttgcttgaagaagtagtagtgggggttgcctcgggacgaggagcattggcgtcagaaacgacttgaggaggaacttgttcctggatctcgttgtcatagacctcgagatcgatgggctcggccagtgattttgtaacagcctaaataattaggcacgctacccaagttacttatgaaaccctaat

SEQ ID NO: 398525 - DNA, 1399 bp, Cannabis indica
tacatttatgtaaaatgccctttcaaaatagactcaagatacacccatgttaattggagttaagttcctattttttcaagttgatttatagttgcatcatcatttcattatgcttttattcaatattgcaggaatttcttttgacagagaaaaaaaaagaaaacacttcgacaaaatggttagtttgtttaatatttttgaatatgttttataatagttgcattttagttttttgatagttgcataacagtattcaaacaaaaaaaatgaaaaatacagggttcagaattggaaatacaagacttgaacagaagaaaggcaatacaagtaagtttcttttctatttaataaagatcattttaattttgttttaaaaattagtataaaaaatgttcagaaacattactcacaaaagcaataatagattcaaaataataatttcatattcacaggaaaaagaagacattccattcctagtcttttgcaatagacaatttgatgatcgaatgaattatgaaaattatgaaactagtgaacaatacatctcaatcgattgtaaatgttatacccaaaatttggctgccatctcagtggaggacacgtgtcaagataaaggaaaaatggatcgatgcaatcgctttttatggaataactcattaattacgtaagcatcagagtatatttgtaacctacttactgtaaggtcttaggcaaggaatcaatatacaaactggtgcttagtatattagcaagaaatcatatgtggctgaatgcgaatagcaaggcatcaagggcaatacacataggaagacgaaagcgacacatatcaattgtgaaagcccttagtgtatattgtacaaactaagtataacagtctaatcggctcgataccaagtaagcgaggtgcccgtctcgctatgggaaatcttcctgtaacttcattcagttaacgtcagtgaggcttagaaccctggcaagtcagaagctaacattcaaatgagcttcgaagaactctttgtaaataagaaccgcgatgtcacaagacatgcatcgtcgacctcaaaaggaaaaatggacccagctcgctattgaaaccactggaaccaagcttctatcgagacatctccagatacaataattaaagacgtgtttaatacacgatcattttgacccagtaaaagcgggaaaattacagctatatgattttcaaatcataaccgcaattacactacgtgatatgtaatcaaaccccgtgattttaggggataataattgtaaacaaattacggtcaactttgtaattaactgctcacaatataattataaatagtggcaaacaagattgaaaaagggactgaaaaataatcagaaatctgaataagattgactcgtggattat

SEQ ID NO: 398526 - DNA, 805 bp, Cannabis indica
ttgaaaaaaaagaaagttatacacatatatttttatgggtgactattcaatggtacaattttattgtaaccatcatggttagatctcaaacctttgcccgatactttgaaatatgcatttttaggagagtctaacaccttttctgttatcattgcatctgatttagatgaaacacaagaagtaaagttgttagacatccttagaaagcataaagaggccataggtcggaccataggagacattaagagcattagcccaactgtgtgcatgcatagaattcacttagaagaacatgttaagacctcccgagaaagccaaagaagattaaatccaaacatgaaaggggtagtaagagaagagtaattaaaataatagatgtaggggtcatttaccctatttctgacagtccatgggttagtccaattcaggttgtttcaaaaaagtctgcgattactattattaaaaatgaaaaaaatgagttaatccgtactagagtccaaactagatggagagtgtgtatagactatagaaagttgaatagtgtcactaggaaagaccatttcccattacctttcattgaccaaatgcttgaaaagttagctggccatgcttattattactttcttgatgggtatgcgggatataactgaatcttcattgccctcgaagatcaagaaaagactatctttacttgtattgcgaggaaacaagaaattcgagtggacagaagaatgtgaagaggcctttcagaacattaaaaggcatctagcgacgcctccagttttggcaaaaccaataactagag

SEQ ID NO: 398527 - DNA, 2594 bp, Cannabis indica
cttgataaaagtatttaaacctattgaacggatatataatttaaatattcatacaaggaatcaaaaatgtataaaagtgataaaatcattaaacgtatattcaagtttgctcaagatagattataactgtcattgcatggcagagttgataactattcaaaaatcaaatgtttggtagaaaactaactacttaaataggaaagttacaagcaatggaaagacagaaaagaactttacatttgaactaaatatagttgtttacattgtgaataaaaatgcaagcacacacaattatattaagttcgaatgaaaaagtacaaggcatttaagataagataaaatccaagttggtttacaaacttgtctttacaaaaatgccactaggggcaaacctttaagccatattcctaaacaaagaatacaaggttattcatggggggttgatgaactcgagaaagaccgtctacacatatctcaggaaagattgtctacgcgtaaaaggtcttgacctctgcatagacctcattctccgcattagaagatcccatttcctatagccgagacctcattcccagcctcttgaaatttatcaacaccagagtttggctggtttaaaggttttcttgtgcaagcttgggtcttgggccatttgggttctttagtagaatccatgacctcgccaactaggattaccttcttcctggattccttgtcagcctgaggaggatctctgaacttgctctcaaaatctatgccaattcttgtagagacaaagataaaagatcaacgaagaaacagtaaaatatatatatataatagtccaggacagaccactgttcgcgaaggatgatgcttaccctcaaaaatctcttgtgaggatcgcccatagtgatcaactgtatctccttgaattggatcaattggaagatctttagtttttgaatccttcatttccaatttaaactgtggtttgaagtttttgggaacaaacagagaggaaaaatggttggtatattctggtgttacgaggatggagggataagtttccgaacttgaatgagacatcttagcaagataaggaccttcaaatttctagatgaaactcatcaaaaaccaagagcgtatggaacatggaaagcccaagccaccattttatactcagaatccagtaacaggaaggccaaaggttgggaaatcaaacggttgggagtgaggcagaagatgaaaagacaattcatttatatcaataatgacactcgaaattggggaactgccaaaatcagaggacgcattttatcaaaagggattatgacaaaaataccctttgtaatcattaaaaagcactttttattaaatagaattttttaaggggaaattgttataccaaaatttggttaccatttcaattaaggacacgtgtccagttaagaggaagatggatcgatgaatgtaacagtaatcacatttaatggaataactcattagatgcagaagtgacagagtatattggtaatttgctgactataaagtcctatgcaagataaagatatacaaactgttgcctcctatattaacgagaaaccatacgacgttggatgcgcaaagcaaggcataatgactgtgaaaacacttagcgtataatttacaaactaagtataacagtcgggagaacccaaacgactaatggcgaggcgcctatctcactacaggaaggcatgctcctattactttcaccaatcatctttagacgtctttcaataagacttatagtcttgacaagtcagaagctgacattcaaatgatggctgctggagtactccttttgttatcaagaactgggattgtcaaaatgaagtggtatgccttcaagagaagaaacaacgaggtgtacattatcaacctcggaaagataggggaaaagctccagctcgctatcaaggtcattggtattgagttcctgtcgagacatcccagaacgctatgatttaaaatgtttttaaatacacgatcgttttgacccagtaaaagcgggtaaatcacagctgtgtgatattcaaataataactgcatttacattacatgatatgtaatcaaaccccacgatttcaggggataatcgttgtaaagattacactcagccttgtaattaactacctactatatgattattaatataggtaggatatactaaaaaagggacaaaaaaatcataagaaagaggccttaaagaaaaacaatcagaaatgtaataagattgactcgtggactatgcagaattttaattggaaaaccacgtaaaaatccttggtgttcatacttttctttcctttattgtctttatttttctgtgcaagtttattattcaggctcaaattttggttaatgaaaattatcgttaacaatgccaataccaattatatttatatgtttatcatgtttgtatgtgtttgtgttttacaaaatctatggtatattattctctgcatagagataataccacataaacacttagaattgaaattcaatgtttatgaataattgttaattcttaagaaattattaagatttttttttaattaaaaagatcttttgat

SEQ ID NO: 398528 - DNA, 928 bp, Cannabis indica
tagtgttccaatgaatttacatgttgctgcaaatttaagatcgctacaaaaatatcgtctacagaagcaaagtctccagtaagttcaaaaaggataagatctcaggtaagaagatttgttccaatctgtcatttttggggtattaaggggcatattcaacctaaatgtttcaccatgcaaaatttgtacaaaacaaattattttggtaatttgaaatattttcaaaagaaacgtagtgctttgaaacaaaaatgtattgaaaaagaaaaatgtctagctggtttttctgataaaagtgctgcttctcaaatgtggtattttgacagtggttgttttagacatatgacaggttacaaggattttttagtgaatatcaaccgaatacaatgtggtgaggtcatgtttggtaatggtttaacagaaaatgtcattggtatgggaactctcaattttgaaggattaccaaggttgaaaagtgtaatgcttagtaagggactaaaagctaatttacttagcattagtcagatttgtgatcaatggtataccgtcaatttgacaatgatcattgttttgttcttaacagtgatatacaatgcattttacaagggtttagatctgttgataattgctatactctcacatctattcttacttgtcattctgcatgtgaaaataccagtgttgtgaagggggttcactacttggtgtgtttcagagatcagattagcaaggttaattacaaagggttgcgacaaatgactagagggagtctaaatttgtttaagtcaattgctttggtaatctttgatactttactaattgatttaattctctgggcgtggccccgtggactagtagtgtatgaaagaacactgataccacgtacaattctcgtgtgtcaagtgatttaattttctgcaattatttt

SEQ ID NO: 398529 - DNA, 508 bp, Cannabis indica
caaagtccttggccttttgctatgtggggaattgatctaatcgaacaattgcctaaaggtacagagggagtacaatatgcagtggttgtagtggattattttactaaacggatagaagtcgagccattggcaataattacatctaagaaagtgctagactttgtggtgaaaaacaaaatatgtcggtttggactgccgtataagatagtctcagacaatggcacacagtttgacagccaattgttcaccgatttctgtgtgaaccatggaatcataaaaagtttctctgcagtggcacacccccaagcaaatggtcaagtcgaagcagtcaataagacacttaaagatactttgaaaaaacaacttgaagatgctaaggggaactggtcgaaggaactactagaagtactatggtcatatcgcacaactgaaaaaatagcaaccggacaaactccattcgctatggcctatggttatgaagttattgttgtaatatattttaccagga

SEQ ID NO: 398530 - DNA, 836 bp, Cannabis indica
gagagagagagagtaggagtgaagaaattaatccctattttctctaactttgttatcttatatctcaggttagttttgtttttaatttaactatatatccgatatatagtgacccttttaatactttatctaaaacaaaaaaaaaaatatcaattttaatttgaattagaatccaaattcaaatataaatatctaatgactgaataacaaatatcagtaagatcttttattttaattattatctttctaattaaacaatgaatcaatagtttatttaattaataattaaaagataattaacttaatttaatttaaattattttaaccaataaaataattaaaccaaatcaatcatgggcctttatatgtcaccctacacgtgtgtgccgtattttaaggtccaaaattaatttcttgatttttctataaataaaatttattatttattttaccaatgaataataattgattaattctcattaatatcttatttaacaaggattaaaataaatattattttctctaaaattttatatttctctttttaatattatttaagaataatgttatatttatctagttaatatagtttcatctaataaaactaaatagttaaataccattaaatatacaattcataattgtaataattaatagaaacaataatttcacaaattactattttcccctagaatttatttcccgtagaaattaattctcactcaaaattcattcatcaaataaaatcttcccatgtacaatgttgtatagaggtgactcgaggaccatgggcctatatttcaaagcttcaataaatacttgattattatcgatct

SEQ ID NO: 398531 - DNA, 1113 bp, Cannabis indica
ttggcctttccaggatgataaaggacgtcacaatcataatccttaccaacttgagccatcgcctttgtctcatgttcaaatctttttgtgtgaagaaatacttcaaacttttatgatcggtgcatatttcacatttctcacgatataggtaatgtcgccaaatctttaacgcaaataccattgctgcaagttccaatcaggagtagggtatctctattcatactctctcaatttccaagaagcataggttactacttttccaacttgcattaaacctagacctagtcttgaggcatcacaatatacaacttttccttatttgaaggaagagtcagaactcgagcagtaatcaaccgttgctttaactcctaaaaaattttctcacactgattagtccaatttaaccttaagttcttccttgttaattctgttaaaggtgtcgcaatctttgagaaaccttcaacaaatcgatgataatatccagctaagcctagaaagcttctgactttagtagtcgacttaggtgttggccaatcccaaacaatagtcaatcttagtgggatccaccataattccatccttgtctatcatgtggccaagaaaagagacacaagataacccaaatttacactttttgaacttggcatacaacttatgatcccgcaattgttgaagtactaatatgagatgttgtttatgctcttatctgattcagaatacaaccaaatattaataaaaactatcacatgcttatccaaaaaatccttgaacaccttattcattagatttataaatactactggagcattagtgagtccaaaagacatcaccagaaactcataatgtccatacctagtacgaaaaagagaaaccctcctcttaaatcctcaatttatggtaaccagaataaaggtcaatcttaaaaaagaccgtcttaccctttaattggtagatcaggtcatcaattatgggtaaaagatatttgttcttgatagtgagcttgttcaattctttgtagtcgatacatatccgtaatgatccatctttcttctttacaaataacactagagcaccccgtggtgagaaatgttggaattgttgggttttgtgccc

SEQ ID NO: 398532 - DNA, 1163 bp, Cannabis indica
aagcttatagccttataaatagttatctattcttactgggcaaagggtcgaaagaataatctaagagagtattctcatagacaccattgtaaaagctttaagagaagaatcactgcattctttgttcttaagtcaatacaaatgaaggggagtaggctattactgaactgctcgaggccgaacctctttaaaaactctatgtcctttatttattttacgatattacacgtttattatatcacttatcgcttagaattaagactcattgtcgttggctaatagtgaggtcaacattttggtactttcattgagagtaagggtcagaaactggctctttacttcaaatttattcataaacacaatggtggtaccgactcgtagaggtgtggtcgatccaacaaatccactggcagtggatcccgcactgtagaatccagaaaaatgcaagggttccactagccacaaatcctgaacaactgccaaccataggttaaggtgtgacgactcctttgagtgaaatcgcacctagtgtgcaagagactggaaataccagttcagcagccaatcagggtattcccaatactagagtttcgccagcaataaatgttcaaacaaccgtggaagatgacaccgagatctagaacctccgtgcagctcttggactcatgcaaggtcatagtaataccttgcatcatgaccaggagaagctccgtgctgcggtgaaccttgcatttgaagagcgaaggcatctgttcgctgaatggagggataaagaggtggaaacgttgagggctcaacatgcagccattgacgaccgaacaagacaggccaccgtgctaatataaagagcctaccaggctaccaatcagtaacctacaaccattatcctgctcggtgagtcagataaagatcgagctgggaacacctctcatactctaaatggtcagcgtccaatccccagtcacaagttatacctgtgggcccagtggtaggcggccagaccttatctagtaattcgtcaggagaggttatacctaataactccacccaggttaatggttctggccaggtgatcggtcaaaccaaccagtcactgagacaaccgtgagtatttatatttagtagattgggaacagctcatgatctcagagacgatctgaaca

SEQ ID NO: 398533 - DNA, 815 bp, Cannabis indica
ctcaaaatatcaaagtgagttaagttatcgaagatacaaaatcgtttaacactcttggaactacgcttgacttgattcctacgaaaagatacgtaggcaacttagttgctaagactaagtgcagtcgccggtaccgtaaaatggtataaaatacaaatctcaaaattctataaaaggtcattcacctaagaatttttctaaattttcaaatagcaaagaattcccgaaagtggtcatctaccggaattcttatattcaaatttaaaaatatcatattctaaactacaagtggcttaatcattcacaaagaaggtatgtaagtagctcggttaattaaattgactgagttcagctgcaattccaaatttaccccaaattttcataaattatttcaaatcatttaatatcatcgtaattggaatcaaagggtatttctttaaacaaaaggattgtaattaagagattatttttataatcttggatgagtaaaacttaaattaataaactcttatgctatatatttgacataggtaaaattgtattttgtatttatttttaatattctaaatgtaaaaattttgcttaattcaaattagatatttacctaattgaattaattaacccaaaaagacaaaatccatagggacaggatatatgctaggtgccttcccttattttttctgaatgatattatactactctttatccttacccttgaaagtatttcatgttggattttgtgccttaaataaaactcattttaatataatcagatttacttataataaaagatcagaaatcattttatgttgcat

SEQ ID NO: 398534 - DNA, 984 bp, Cannabis indica
ttccttagactctcctttatgttcattttaagcttttaactgagttcaagcatgttttcttgtgatagggttttgtagttgctgttggtgtatgatattgttttttggagtttatttatggtgtattttgttgaattaagctagttttgatggctgttgtaaggtttgagcaagctttgagttttagaactcaagcttggctctttaatggtgaatttttattttgagcgtgttatggtgttctgttgcttgggttatgtttattggggtattttaagcaagcctggaaggtttggtgaggtttggattcaatttggatggggttttgaattgtttgggttacctggtgtaaaaccagttaaccggttttacaggccttgtaaaataggttaaccggatcagcagctgggttcccaaaatttttgtgttgtcgattcatgttagtttcaaagctttggttgggtaattccttgttagtttagggtattgccatgttaactttcagtaggaaaacttttggttgaaaacctaagtccccggttgtgatttagcgtgtcacttacctgtgttatgaacgatgtgatttaggggcctgtaattcgccgagcagttgttccacgcaggttggctgacacacctgaattcagaaacaaggtaagattagtataatgttatgcatatgtgtttacatgtttagcgtacatgttatttatgcttgttagagtacattgatagcagtatcagtacacatagagttgtgctggatactgatagatgtatgtatggctcaaatactaatcgatgctatcacatcaatatggctagagtacgactagcatattgagtataagatgatattatggtcgatacgattgtcatatgaacgttctcgactcagtatcgtgtgggacatggggatagggttatggttgggtgtatgggcgcctgtttataatccggattattattatgttattatttatg

SEQ ID NO: 398535 - DNA, 842 bp, Cannabis indica
aacgaatgttaagaacaaggtaggttatatgttatactatagaagtttgaagttgttacacatttaactactaataggaccgtcttaaagtatatgggacctaaggcgaaattaaattttgggtcccctatatatataatttacctattataaaaatgatagttctagtgcttagtgtaatgctaaaatttttaaaaactcttaagagttccaaggttcaatccctcataactacacattaaatatttttttaaaaagttaaaaagtagagattgggaattgatccaatgatctcttagtttaaagagagacattttatgagtacaccaaacaatttttgttatactttcttcttatttaatattttatctatatattaacatttttttttacaatttcggggccctgagcgttcgtgggcccaaggcgcacgcctagcccgcctaccctcagggtcggccctgctactagtactatcattccaagaaaaaagagcattaggaacgcctctaaaaccctctatttgtacccctaaagttgcctctcactacaaaaaacctttactttgagtgataattttttagtcacaacataattttttgtaactaaatgtggcttttagtcacaacaaaacgttacttgggaccaaaacatagtatttagatacaagtagccacttatttatttttggtcacaacatgtatgtgctaaaaatacaattagtcaaaacaagaaatttttgcgactaatacttttagttacggaccttttaggcacaacataagaatgatgatttataattagtcacaacttttttactttttgttaacgcagattttcgt

SEQ ID NO: 398536 - DNA, 771 bp, Cannabis indica
acattactttctaaaacagccactttaatcagtctacacgcagaaacattacattaaaatatgaaattcaaaagaaaaagaaccctcatacattatatttcttacctcccacgctaatcatcactgaacatatccccttacataataaaacccttcaaagtcctcactctagatctcacaatctcaaaccccattttcttaactcaaaaatttctcattacaaaaaataaacacatttagccatgttcaaaacaaaactaacaatcttgctctggctttctgcgtttgttatcgctctattttccatgatcatttctctccataaaatccctcttttcccaaccatcactacttctaacattagtcctgggaacagtttagagcattctatttacgatagaatcttcaagcaaagtgacagtgagaacttgttttctcaccttattacaagcatggtgtctactagtagtattggtggtcatcatcaccaccaccaaaataggaggaaacccaattgtgaccaaagcaagtgggaatcaagtttaataaacaagtacaatgtagtactcgttttgacagttgggttggatggctgcgccaatttcagcagtgtccaaaaggcagttgatgctgtccccgagaggagttcttctaagaccctcctcataattgattctggtacctacaggttagaatatatctcttctatataaagtgtgtctatataactaaattcttgatttatgagaaattcatgggtgtgacttttta

SEQ ID NO: 398537 - DNA, 1040 bp, Cannabis indica
gggccgcttcctataaaatttcagacaaatttttcgagtgttcactatactgggatagacatgcacaactattaaagcacgtgcttttggactacaccttagaaaagttgtgtaaggtacatcgttagagatagagttcaaggcgagtcactctagtatattctaagtagtattcactacgcaaaggtttaaaccgatagatacctttgtctatgctcaatcttattacttagactactgctcgagaaaatattttttgaaaatttcaagtgggggattgttggatctttagtaaaattttacaaaatctttgtatgagaagtgaagtgtgtgagtatattgagtcccacgtgggatagaaatacttcattagaagtgtatataatgtgcaaatttgaacacgggttggggccctaagaggtacccacactactataaaaatgggttttcccaacgtttttaaatagtcgtttaaagtattcgtgtcggtttctataaccgtcgcctatacgaccgtcgtaaaacgggcataataggcgacggttcaaaactgccgctaatgtgggtttcccgacggtttaaaacagtcgcctataactgggtataggcgacagtttataaccgtaccctacactataggcgacggtttaagaccgtcgcctatagtatagggcacggtttaaaaccgtcgcctatacaagtttaaaactgtcgcctataccctgttataggcgacggttttaaaccgtcgggaatgtaaaaaaaaagtaaaaaaatagagatttttctgccattaactatattttcccccattttttcctccattagctttataattttacctaaattaaaataaaacaactaattaattttgttacaataacaactaactttaaaacacattaaatttatacaataacaaaataaatgtatataataaataaaaaagtatataaataaataaatatatttataccgagcttggagagagagaaagagagagagggagatggacatgaggtggtggtagtccgacgtat

SEQ ID NO: 398538 - DNA, 516 bp, Cannabis indica
aacaacgctttcctaaatggagatctccatgaggaggtttatatgcaacttcctaaaggcctaactctaccaactgaatttgcaaacagtcctgacattgtatgcaaattaaacaaatcaatctatgggctcaaacaatcatctcgacagtggtacaagaaactttcagatgcattaattgaagaaggcttcaaccaatcacaagccgattataccttgttcaccaaaggttctgaggacaattttattgctctcctagtttacgtcgatgacatcatcattactggaccaaacttggacttactcactcagctacaaacatctctacacaacaagttctctctcaaagcacttggaactctaaagtactttcttggttttgaaatagcacgtgcaccagaaggtttagttctttctcaaagaaaatacaccatacaactactcgaagacaccggctatattggcagcaagccaacaaagacacctatggatcctcggatcaaacttgatgatcaa

SEQ ID NO: 398539 - DNA, 1630 bp, Cannabis indica
agagagagagagagatggtacaagagagagaatggctttcttccttttttccaaatttcattcttttgaataaatgagataaaaacttgttttattatatatttcagccaattactaattaaaaattagattattacattaacacaaagtccactaaaggacaaactacaaatggctaaaagacccgacattcccaatgtctaactatattgtcttgctatactaaaaatactaagatgtgattctaatagccatacaccgcattccaatgttgtcggacacaaaatatgcagaatcatgaaatttttatatgtgacacaaaaatgcattccgaattcaaataaatcatcataaataattaattcaatactaataaatgattttcataattaaaccctaattatctgctaatttccaaattaaaactaggcggtctttacataaatccaacaaactctagcaattgtgtgatctacccccaatcaacacacaaccaacaccagttgaccgtggagtcacgggcggccagaccctgtccaatgtaggtctggctagccaaggaggcatcatgggcggccagaccctaccctttacaagtctggccagctatggaggagtactgggcagccagaccttgaccaatgcaggtctagctggccaagcacagcagccaggtataggcttggctagcctaggccaactcttatacttgggaatggtcgaacatggtatacagggtctaattgatcttcaccatacactctcccaaggtatggccagtcaacctttatctcttcagaatctgcagcctccccaaggagggttagcgtaacgccctaatccataggaacgtcacgtgtgtgattttataaaactagtttaatactaatatattaattaatcattaaaaattgtgagggtaataaaaacttgactaaaataaaacactaaaaatagacattataacggctgtaaaaaggagttctagggatccctattataaaatatttatccaaaagacgatatacaacaacaatttaaaatacagcagacacaactagtcaaaaacaactcttggaaactcaacacgcaggcaagtggggtcagtatgtacattactggagaagaccgtcatctcatggctgctctaactttgtattgcccttacctgcaccacaaagcaccggtgagtcacatagactcagcaagaaaagtgataaagaatgatacattaaatagctaattatatatttcattatcacaaaatgattaaactataacattcaatagtaggtaatataaccagtcatatgcatagaaatagatatgctcatatatttgcaatgtctaatcagtcaagcccatgtcataatgcaacatcatatataatatcattgcaccacctaatcaggtgagcccgtgccacaacttgacactaatatatcgcatcgtctaatcaaacgatccagtacctacgcccgatacgtcgccaggaaaaaaacctaacaatggtttcaatctatgccataaccaggcaatttcatatcactgacaatcgtacctacgcccgatacattgccaggaatattgcatcacctaatcaggtgagcccatatattatgtccatagt

SEQ ID NO: 398540 - DNA, 574 bp, Cannabis indica
ctccctaaaataattggaacttctatatcttcctcgtaatcaagaataatgaaatcggccagaaaaatgaacttatcaacttgtaccaaaatatcttcaatttttccatctagatgagtcatggaacgattcgctaattgcagagtgatggtggtcggcctcgcttctccaattcccaacttcttgaaaatagacatgggcatatgagattaatactagctcccaaatcacaaagagctcttccaacatctcgacccccaatagaaattgaaattgtaaagctgcccagatctttcaatttaggtggaattttactcttcaacatagaactacagccctctatcaaagcaacaatttcaactcgccaagcctctttttctttatcaaaatgtccttcaaaaactttacatagattggcatttgctccaaagcttccactaatggtatgttgatgtggagctgctttagaacaactagaaatctcttgagttgaccatcgtcttgctacttcttgaatcgttgacgaaatggtggaggtggcttttgcaaaggcttttctgtagcagaatgctga

SEQ ID NO: 398541 - DNA, 906 bp, Cannabis indica
gcctgaaaccgttacgcaaatagcaatggcgcgaagggagtaaccgatttttccatgaataacaactgccttggtgtggagaacttggtacatgaagctgagctcatactcaaccaatctaaaagcttgaatagcactcttttgcagaaaataacttctacttgactctctatctttggagctgagaaggaagccaacaacaagtcccttgaaagtttcatagtgggcatatgctactttgagtagtttcagctcttgtaaattttgtgaagattgttcttcattattgtctgaaatgtgttgagtatggccataattgcttacaccaccagacatggttgattccgatgccatcatttctgttatggtacgtttgacatggacagttctcattgttgagtagacttgttctgcttcttggtaatcaggaccaggatttggatctggtgaattggtctctccaaagtggtccaagcttgcaagacgcaaagcccaagttctctctccaaacttgatgactcctacaatgaaaactaagatattaggccacaacagcctgttttttgttcctctcttgtagagagtaaaaacagctgagagaacttgcaaaatgaggccaaagaggtgtctgatccacaactcattgtcctccaaagacagagaagtaatggtatcagggccaccaagatgcatcaaaagaaaagatgcccacaatgagtaatgatcgccttggttgttttcggtgtcgtcgcctttgccaaggctcttgatgatttgtccaataattgtagcagcaatccagtctgctaacaagtaaaatgcccagacagaccttgctatgaggttgcttcttgaccattttctgataggtgccaatgataagagtgaagtttgtactgagaggct

SEQ ID NO: 398542 - DNA, 736 bp, Cannabis indica
aaacttttcattagctttttaaacttcaaatcattttttttacggtcaaaccaaccaaattactctgctgttaacaaaactactatctggtccatctgaccccattaatcacctatgtggacatataatgcagctaccaagttactattttcaatgccatgtcaactaaaataaaaatacgaaaaataaatattaagttgaatgaaaaataattaaaacaaaagaaatcaaaaactaaatatttaaaaaattgaaacatattttgatcaaagatccatagttgaagttgaagagagaagaagacgaacgaagacaaaaatggcaatgaaacctgcgaaatgttgttcttgaccctcaacacttgcaaatttgagggcctcttggacaaatgcgaacctggttgaagatttattcgtcgcccatactataaggtgtttcccctaattttttctcccttttatttggtattctttcgtcataactggatcggttgttgtaggaagatggtggctatgatttttcgatgtggtatgacccacccatgtgtaaatggtccatggtgttgggaatattttaccaggatctagatttactaatgttaaattaacatcctaagtatgaatatctctaaaataataaaattaaacacataagggtttaggaaaatcttacattggttgcagcggaatataatgattccttccgctcaaatctctaacccctgttcctttctgtc

SEQ ID NO: 398543 - DNA, 570 bp, Cannabis indica
taacagtagctaaagtgacttgggacaacccatttactaacttgatgtaaataatttattgtcaaaaaaataatattttatttttactcttatttatttgaaattaagtcattttttaggggtagatgtgtcaattgattttaggctaattaggatttttgccccttgaacttttaaggccattgaaaatgccccctgaactattgagattgttggatttaaggacttttgtctaattttattcaattttactatttcaatgattgtttatgtactaactcatgttccccagactttgatatctaccaaatcatacccttcgaactttgacatgcactaaattatgccccctgaactttcgtccatgttagactttttttactaaaattaaaaaaaagtccttaaatctaacaatctcaatagttcagggggcattttcaatgaccttaaaagttcaggggacatgatttggtacatgtcaaagttcaggggcaaaaatcctaattagccttgattttattggtgagttgtattttataactaactagggaatagattcgcgcttcgcgc

SEQ ID NO: 398544 - DNA, 541 bp, Cannabis indica
aaaaaaaaaactaataggcaactattttcagtgacaatagttgcaaataacatttcaatctgaacgactatttttatctgtcaaatcaactattaaacaactattttgaagcataaaatcgttaataagaataaattcaacatttcttaaaaattatattactggaaaacaacttataaacaactgtttacagattaaaaccctctagcttttaattatatgcatttatatttttttgatgcaatctgttgttgattttttgttcaaatttaccaaatttccttatcatttcaatagaaacttttgttttctatttatgtttatttttcctttttaggctataaatgtaaatggtttcctttttttagtttgttatagaaaaaatcccttaaaattaattaaattcatttcgtattattctctataggattgatgaacaataaatacatgtcttgtgtattaaataacattagtcatgtttattgttattcttatattttgatgtttcaatacaatttttttaacattctttttggatatt

SEQ ID NO: 398545 - DNA, 908 bp, Cannabis indica
attaataaataaataatttcaaaattaataaataaaattaaataattaattttaaaattaaacatataaattttgaaaaattaggttttaacaaacctaaatatctattcaaaaattatgctaataagttttcaaaatttatgtaattttaataaaaaagaataaaattaaatatccaataaaataaaatgataaattaatatcatttatctgttttttatattttaatttaaataaaataataaaattttgaaagttaacaaaatatctagttagatttttaaaatttttagattaaaataatcttattttaaatttcaaataaggtcattttataaaattaattaaataataaaaaatataaaatatctgaccttaaatttaaaattaagataaaataatcaaaatttaaaaataagatagcaaattaagcaaaataatagattttatctattttcaggttcaaaaactactaatatctaaaattaataaaaaaattaattaatttatttaatcctgataattagatttgaaatttgaaaaataaagatctaaatacaaaattacacaagaaaatcgaaatgaattccatgaaaaatacatgaaaaaaaatgaaaaaaaatggaaattttttttgatttggtacagatggttgcgcgcatgggaaggaggccctgaccgagtaaatgcgacacaggaggctgcatgcagcctctccgcgcgtgcatggcccctgttcagacaaaaaattgccctaacgggagaggaatctcggacagattcctgtcctaagccgcatgcacccgtgtgacacagggtatccggcacgtatgaggtgtcaccacccctaagatttttccaattttcaaaaaaatcataactaattcaaataaaatcaaaatttagtt

SEQ ID NO: 398546 - DNA, 642 bp, Cannabis indica
ggatctcgggattatgaagggaaagtgaaaaaaatggatgaaaacgctttccacaaatttgatgactatttttaatattttctttttcttttacatattaatcgttctaaatttcataaaattatattatacttttaatctaaaatgagaaaatgaaatcctttggaattcatcttcttttctcttaaaattcaagatccaaacaaggcctacaggaaacaattttaaactagaatcgacatcttaaaagccgtatcatcatacaaatcaagaacatgcagcaacaggaaaccaaacattgcaggagccattcctcaatccatacattctcacctagacaaataaactaattttagtataaatatatagatatgtgtatatattctttcatgtgcacccaataaactaattcccaattgaatcaacacgacatctagtaatcctgatttctacaagtactgttaactgaacaaaaccgtggcctgacaagtgaccagaccacccaacctaatcctcatgatgttgcttctatgatgatagaattatacaaaacaaagcataattgaaaacagtagtagtaattagtaaacaatggcaagttagtaaacaatggcaaggcttacattggtttgagaaagctcg

SEQ ID NO: 398547 - DNA, 506 bp, Cannabis indica
ctccatgctgcaattttaactgaaaatacaggtaataactaataagttgatttcctttcttataccaaacagatttataattacatactaagtaattttttttaaaaaaaaaacaaaatgttcaggcctaacaagaaagatttaggagagcatattagatctgaccaaacaagcagataaggatggtttcattcctctgcattatgctgtgatgcccacttcgagttactcggataataatttggagattgtgaagatgttgttgttagaaaatgatgaaagcagtgcctacttcaaagataaaaatggcaccacaactcttcaaattgcagcttccaacaggtttggaggttatgaattagtgaaggaaattctttcgaaatgtccagatagctatgaagttgttgatgagaaaggcaaaaatttgctacactatgctgtgaggagacaatctccttccacattaaaactcatattagatccttcttcactactcaataattacc

SEQ ID NO: 398548 - DNA, 667 bp, Cannabis indica
gtattgatcaatatttggaccaagaaagtaatgatggtgatagctctgattatgtttttgatgagtggattttcttttctcaagtgttgagtgatgggattcaagaaatatggagtgaacatgatcaaaaattatggtaactttgttcttctttagttaattaataaatttcaatatcattgtaatgtttctgtgaagatttatcaataatagaaagaaagattaaagaatttattattattattattcaattatttaattattttacgtttcaaataaaattgaaatgaagataagtataatttttattaaacagcgtttgctcaattatttaaacttaagatattaaaaaaaaatctattaacacacaataaaggttgttgaattttatatttaaattaaatcaaaattactaatttagaaattcaaatagttcaaaattttaatcaaataaaaatcatatcacttagttgagtattattaggatactcataaatatcttaacatcaaatattaaaataaagatatatttataaatttatttaaattttaaataaaaataaaacaaaaaatataaatccactccaaaattattaaaaaaagtagtcattaattattcttagtcactcaagctcctataaatataacgaaattaaataccaacctt

SEQ ID NO: 398549 - DNA, 514 bp, Cannabis indica
ataacaaaaaaaaaaaaaattgtgtgtttgtcccaccacattgttcataaatgagtaatttgtgagatttatattataattgtagctacaaaaacataatcccataaggttttggtaattaaatcaatgctatacgagtatgattgaaatttataaaaaagaattcatattagttaaaaaaaagttttatttgtattatattataaggtatacatgatgaaacaaagggtcgatggcactaagaaagtagcccagagatttgtatacataattattaaattaacaaaaatgaaatgattctatgaagtaattatataagatcgatctaattaatacaagggggaggttgttcatgacctgtagcagttccatgtgcattagaacaagatgaagtagcacccccaggaaaattcagatttatgttttttaaacttaactcaacacaaggtttacttgggctgcatttcaattccactgcaacttttccctttgatgtcccataaatattattgaa

SEQ ID NO: 398550 - DNA, 715 bp, Cannabis indica
ttttttttttaaaaaagataaaaacatacacagagttattatttttattattatatttttgaaaaaaaaaaaattcaaaagcattatatatattgattatattgattgatattttatgtatgtatataaactaaatttataattatatttgatttaagttttaatatttttttgaaatttatttattttctaactttttctttaaatattttatatttttataaaaaaaattattaaaataatagtaagatatcaatttgtaaatttatgtgtttttatagaaaaattattaaaataatagtaaaatatcaatttgtaaatttatgtttttcttatagaaaagttattaaaataatagtaaaatataaatttgtagatttatactttaataaaatattaaaattgagagaattaaggagagatgagaaaaatagttttggaataattttggaatgacatgtcaccgcctcatacttctcctatatatattgatgatttataggctgacgatttagtcacacaaatagtaatttgcgtgcccagtcactcactaaaatagcttatatataatattaattaaataattttttgccatatgttatttatttttatttttttgaaaatgaaaaagttcatttagcacccaggaaaatatggggcagcagggggtgcaccctccccttgaaagtgtttagcaccctggctagatctccta

SEQ ID NO: 398551 - DNA, 616 bp, Cannabis indica
gttaactcagacaacgacattgcgatcttggagaatccttctataaaacgtcgatagtagcttgctaaacctaagaaacttcgtatctcagtaactgttttcggtctaggccaattccttactgcttcaatcttccccgggtctaccataatcgtgtctttcccgacaatatgtcccaaaaaagacacttgtgacagccaaaactcacactttttaaattttgcataaagtttatggtctccgagccattgcagaaccatacaaagtgttgctcatgttctgcttctgatcgagagtacacaagaatatcattgataaacacaattacaaagttatcgaggaaatccttgaataccctatttatgagatccataaaggtcgctgaagcattcattaattcgaacgacataaccagaaactcataatggccatacctagttcggaaagctgtcttcagaatgtcttcttcctggattctcaattgatgatacccagacattaactcaatcttggaaaacactgtcttaccctgaagttgataaaatagatcctcaattcttggtaaatgatacttgtttttaattgttaacttattcagctctcgatagtcaataca

SEQ ID NO: 398552 - DNA, 277 bp, Cannabis indica
agacatgcaccacaacactttttgggggataaattttatattctccttactcttatttattttatggtgggatatagaacaagttgggtaattatccatgtctacatgcaatctgtcagacatgcatggatcttttcatactttaattgtaacgccctaagaattaggcacgcaacgacaactgatatagaaagcctaatcctactaatctgggattactagaatgataagtgcaggtaaatttaaattttaataacaacggaatgaaaatataact

SEQ ID NO: 398553 - DNA, 1482 bp, Cannabis indica
agatttaaattacatgatttagatatctagtttaatgtttaatagattggtaccattgtttattatttttaatatattagaggtatcgatataattgttataaaacaaaattatcaatatattccattttataaatacattaagttctttttcatagatttaaattacatgatttagaaatagagtttaatgtttaatatatttgtaccattgtttattatttttaatatattagaggtatcaatataattgttataaaacaaaatgtgtcaacataattggtaaaataattaattcatatttctcaatattatactgtacttacactttatgatccaaatttagattcaagttaagaattaatgcctttatcttactacatcaatgaagctatcaccatttcgaggtatttttattatttttggtatcaacataaatggcgtaaaacacaaagtgtcaacaaaattgtaaaattggttaattttaatttctcaataatgtacttcacatattgttatggtaaaaataattccaaaaagcttatagtaaatggtaaaagataacattagtaataataatcaccatatagtaataataattggttccaccaaattttaaaaactaccacaactctaactaataatcaccatatagtaaatgctaatcaccaatattagtgcaattccaaatcacctaacagtagtatgatgcaaattgttccaacaagcttatgcaatatataacatacctaaatataacttatgaactaaaacctaacttttgtaacagttgtatgaaatatagctacaatagtgtttgtgaaccatgaatgttactacttgttacttgatgccagccttttagaatgacgggttttgggagacttgctcttcccagtccacatgttctcggacctagccttctctgtgctgaatcgggggtctcgaggagacctagatggactaagtactggttttgttgtggatgctgatggaagagctttggtcatttcaaattgattcttactccctccataaccgcagctttagccttgttactctcgtgggtcacaattttcccaacacactccagtctggcttcaataggatcaaactgacaatacatttgggatccaattcaataaataacacatgacgatgaaatgcataaaaacaaatcaacacaacatagattaatgcttcaatttagttataaacacatacttaaatacatgaaaactaaactaatgaaaataacattaaattacctcttccattgtttcattaccctcaaccatccattacaaaaatcctacaatcgtgcccattttttgctatgggtagtcactgccagaagaaataattcagaattagccaaatttgaggtttgctggcttcacagaggcgaacaataggtccaaagtgttcagctgcaaaaaaaaaaaaccattatagctgagatggttgcaattacaataataga

SEQ ID NO: 398554 - DNA, 501 bp, Cannabis indica
gttgcaccttgatttctcataaactagttacacctaaaaaagataggattctaaaacaaacaaaattagtactataattgaaaagaaaaaccaaattagaacaaaatttaatgtttaataatattaactatcaatcctcgacaacgacgccagaaatttgttgtgatattttgcacacgcaagtgcacctatcgtttacaagtaatagactcaccaagagtgaggtcgatcccacgaggattgtagttaagtatgttaaaattaaacttttacttctatttggttaaataaaaataaagaataggttaaaactataagataataaaaacagtgaaaggagaaacaatttaaggaaattaatagttaataaaaattagggcttcgatttcaattgtatttattgaatatggcttaatatgattatcttcctattatcaatttctatgcaatagcaggtttactaaagtaatttatagtcttctcagatatataaatctcaat

SEQ ID NO: 398555 - DNA, 571 bp, Cannabis indica
acatttctcaacatgggcagacggttttattcttaatagcccacaaggattgatatgaatgtccaagttatatgagcatggcaggatgtcgagaagagtcattggtggacatcttacgagcacgatcatgtgatcaactcgcatgcaccgaccaagagatgtgagttgccaattccaacagtaattgacatttactcctaacttgcaggtcacgaagcaatacctatttttgtgggatgaatttgtacctttagagaataaaggcaattaacctagatttgcctgatttccttattgtaattatgaaaacatactaatttcctattttatttcttatagataagggaaataatttctatgtaattagcccctataaatagtattctcatctcactagttaggaacacgaaatcaatcagagagaatactcaagacaatactacaaaagtgtgtttttgcgtcgattaaatttaccgttctacccttcaatgtattttatccttgaaacacttaactacttataaatgatatttcagtaaactaacataattactgaaatgagatctcaatc

SEQ ID NO: 398556 - DNA, 634 bp, Cannabis indica
ttgccaagacttaataaggcactgtgggaggaaaaatgctaggccgaattgtatgattaaactagatctgcagaaggcctacgatacaatggagtggagctttttagaagaaatgttacaggcttttcagttccctgattcattcataaagctagtaatgacttgcataacgactcctaggttctctcttctctttaatggatctttacatggattctttgaagcaaagagaggacttagacagggagatcctatgtcacctctacttttcgtactgggaatggagtatcttagcaggatcatgaagaaaataggtgatacagaaggcttccagtttcatgaaagatgtggggctttaagactaaatcatttgagctttgcggatgatgtattgttattttgtaggggtgacttcaaaagtgtctacctattgctaaggggcctcaaattattttctatgacctcggggttacagcctaataagaagaagactacaatttattgtagtggcatgcatgagagtgaaacaaaaagactggttgatgcctcgagatttccaaaaagtaccttgcctttcaagtatctcggagtacccatatgtgctaaaaaactttcatcagctgaatgctctatc

SEQ ID NO: 398557 - DNA, 554 bp, Cannabis indica
gtccaaacaaatcatggttcaactgagcaacaaatagcagactccttaacaaaatcaatctccaattctaggttctttattcttcgagacaaatttggtgtggtttgctcaactaccttaagtttgaaggggattgttaagagaacctaagctacagttagacagttagagttctgttttacttggtttaagtctgttgtaactatatttttgttagttttcattacctgcacgtgagcttactgtatgaaaaaagttttgtcttctccatttaatctaatgaaacagttcttctttcttgccttagcttcatcgttcttatctttctttaagcattgacaagggcagtactagttttaataatattaattcaccatattaataagtggatttttcatttaaaagtttacaaaaatatgattactttttaaaaaatatatatttatgggaaaaattaaaatataaatttaaaaaatatagaacttaggaatgtgcatatggttttattttaaaataaattgacaataagaaaatagtccattcattttatatat

SEQ ID NO: 398558 - DNA, 956 bp, Cannabis indica
cccgtgtactacgtcagcaagggtatgataaaggccgagatacggtatccattgatcgaaaaattagttttctgtcacatgatggcttcaagaaagttaagaccctacttccaagctcaccccattaaggtgctaacaaaccatctgcttcggcaagtcctactgaagccggaagcgtcagggagactcctcaaatgggccatggaattaagccaatttgacatacactacgtaccacgcatttccttaaaaggacaagccctagctgacttcataacagagtgcaatgaagcagaggctagtgcaagcatgaccgtaccacaagccccgacgtggaaagtattcgtcaacggagcgtcaaacgaaaacgaatttggagccgggataactatgatatctccgaacgggcttcgactccaggcggccctgcgttttgaatttctggcttctaataatgaagctaaatatgaagccctgattgtaaaattgaaattggcaaaagccgtgggagccacgagagtagaagtattcagcgatttgcaatcggtggtaaaccaagtctcgggacaatatcaaactcgtggagaaaaaatggctttgtatgtagttggcatcagacagcgagtttgagaaactggggatggtgcccattgagcacctcacagaaccaagcattagagttaaagatacggtggctacgatcgagccggagccaaactggatggaccccatcgtcaaatacataaccaaaggcgagttgccttaagaaagggcgctgtctagaaagatacagtatcaagcgcatcgatatgtgatgatggataatattctctaccgaagaggactcaacatgccgtacttaaggtgtgtatcagaccctgaagctagacagattatgctagaggtccatgaggggttctgcggagatcatattggaggtccgagtctctcaaaga

SEQ ID NO: 398559 - DNA, 890 bp, Cannabis indica
acccatcaacgggtattacttatcactttcacatattcaaggacttaattgccaaaaattaaatctcaagaaccaaagtgagaaaccacaactaacttaagggttaatagtgctaaaatctcttaaatttggatgtgtagtactgttactgtagtgactcacaacatctaggtcgaatttgtatatacaaatatgtatataattaagtctcattgtacgtactttgaagacttgacattacccgaagacaaaaaataacaagagcctactgctagctaggggctaattcacttaaataccattcttccattttactttctatctcgtttatcaataaaatcaccaaaacttaaaataaacaagaccctcttcttgactgagaaatcaatttacatagaaaacatatcaaagaatggatcccaaggaagaaatgtgttattaattgagaaggaatatacataattaatacatgcaatacatgcagcagcccgtaattcgtataatttaatggtgagaatgttaaatagtatagtattataatttttatgaaaatactaagtaaatagatacacacttctatataaaataaagactaattaagatttttgccttttaaattttaatatgtattaaatcatgcccctgaacttttctgaccgttaaaaatttcctctaaactattgagattgttagatttaaagatttttgtctaatttcattcaattttactatttcaataattgtttatgtattaaattatgctcctcagattttgatatttattaaattatgttcgaactttgacatatactaaatcatgctccgtcaacttttatcttttttactacaattagaaaaaatcctaaatccaataatctcaataattcaag

SEQ ID NO: 398560 - DNA, 749 bp, Cannabis indica
acagaaatgcacaactaattatagtaagattcataatttcatataactctattgacaactacaataaagcataaaaattaaaaaaaaaaaaaaaaaaaaaatagtagtttcttaataagggtatacttgttaataaaaatatcacccctatacctctttaataggataatttatatttttactctttaaattttaacatgtatcaaatcatgtctcttgaatttttcaggtcgttaaaaattcttttcgaactattaagattgttagatttaaagacttttatctaattttacaaaagaaagtgtgacgtggatgaaaatttaaggggcacaataaaattcaaggacatgattttataaatatcaaaattcgagggacatgatttagtatatggacaattaccgtgttagcaaaattgaatgaaactagacaaaaattcttaaatttaacaatctcaatagttagagaaaatttttaacgacctctcaatagttagagaaaatttaatgagcacaataaaattcaaggacatgattttataaatatcaaaattcgagggacacgatttagtatatggacaattactgtgttagcaaaattgaatgaaactagacaaaaattcttaaatctaacaatcttaatagttagagaaaatttttaacgacccgtaaaattcacgagtatattttattacatatcaaagttcggaataaaaaatatttttttaaaatattaagatatattaagca

SEQ ID NO: 398561 - DNA, 652 bp, Cannabis indica
ctcctattgcaactagcggatcaacctaaattgcaaccaaaaatattatatcaacccacatatatagaaaccaccggagaaactattttagaaacccaaaccgcgtaaaattataatgaaaaaaatagttacaaaatagtatatgaggttattttcctaaaaattataggttatatattctttttttttttagataaataggttatatattcttagaaaattacgaaaaaataaaataaaaaatatttaatattaacacaaaaataatttttttttttttgaaaaaaaaaaagtcaattaaagtacctttaatagtggagaatattcctaaaaaattaaacttatgggggccaatttgtaaaaataagttagagtaccaattttccaaaaatgaattaatagcaaaaaaatcatttagagactactttatcaacacataatttttttaaaaaaaacacacacacagacacaaataataaaaaaattaacaaaattacagtctgtatggagttttcaatatttttaccgttttttagatttttatttacataaaatacagtttttttgtgttaattttatgctgtactcttgtttattttttgtttgatttatttattatttgtatattatttttttatgttattttaatatt

SEQ ID NO: 398562 - DNA, 651 bp, Cannabis indica
acccgatatagcattccccgttagtaaattgagtcagcttcttcaggctcctacttcagatcattatagtgcttgcaagagaacactaaggaatttagcagggagattggacactggtttagtcttcacaccagcttccaaaatggagttgtagactgatgcttattgggcaaggtgtcatgatgataagaagtccacatctggatactgtattttccttggaggtaacttggtcagttggtgctcctagaaacaaacattggttgcccgatcaagcactgaatctgaatatagggcccttgctctggccacctttgaactggtttggattcaatctctgttcattgagctcagcataccaattcttcagtgtccaatcttgtggtgtgataatttgggagctgattctttggcttccaatccaatatttcatgcaagaaccaagcatattgacatagatctttattttgttcgagataaagttctttccaaccaactggatgtaagatatctggactctatgaatcaaatagctgatatatttacttgtatcttcattccacttcctcaaagacaagttagcacgtggtctagaccagtacaacttgaggggatgatagagtaacagaaatagactgttacaaagattag

SEQ ID NO: 398563 - DNA, 555 bp, Cannabis indica
ataaaaatacagcaaaagatttttaggtaaattattaattgggacttatgaacataggactcatgggagactcaacattcataaatcaaatcaaaattagtgggtgtaaggttctttggaacggaaaccaataaagtataaaaaagggatgtgcatcaatggtgattgaagtcttggtgtcgactgagtatggttcactcaatgaaaaagacgaaggaataagtacggtgttcttgggctccgtcaaatagctctcaagagaaggttcagaggagagttcaaaaagaagatccaaaaaagggtccttattttagcctcttacgtctccttatataggtcgtagggtttgttagtgatctcccacatgtcgggatgtctcactaacaaatctcgtatatcatctatttcaatgaataaaaaattacaagaaaataaatatctactaacatatacttgtttctaggccaaaatcccacaaacattgggaaattaattattttaggttgaagattgaccaattaaaaataaggtgacaagggatgtcacctctcggct

SEQ ID NO: 398564 - DNA, 812 bp, Cannabis indica
tctgtgagtctatatgttcacttatgtaggcagcattacttccgagccaaatgcaagtgagaaaggagtgtgtcccatcaccatcttctcggtaattctgtgagcctagagtacttgaggtagctcgtcgacccacctgcctttggcagcgtctaacttcttctttatagtatcctttaaggttttgttaatagcttctacttgtctattcgcctgaggtctggatactgaaggaaagctcttgataattttgttcgtcttggagaactcgctgaacaagtcgccatcaaattgggttctattagcagatactatctttatgggaattccaaacctacagacattgttcttgacgacaaagtcgaggactttcttgaaggttatggaaacgagaggcgcgacctcattccatttttttgaagaagtcaactgctacaactgcatatttagctcctcaaccaatggataatgcaccaattaggtcaattccccttatagcaaatgggtaggacgaggtcatcattcttagttccgttggtggcatgcgaggtatatgtgattacctctaacacttatcaaatttcctgacgaactcatgggtgtccttattgatcgtttgcctgtaatatcattctctaatgatctttttagatagactttggcaacctgcatgatccccacaaaagtctttatgaatttctctgacgatttcgtttgcttctgtagggagaacacaccgaagtagaggcatcgaataaccctttctatatagtttgccttcaattattttgtagtgaggcactgaatacaat

SEQ ID NO: 398565 - DNA, 938 bp, Cannabis indica
tactacgcaaaaagtgacagtcatttttatagtatacacatacccccacttatagaaaaaaaacatcttcctatccatataatgaagtgaaagaatagaaaaagtgatttacaaaatatatctatatatataggtgagtagctgattttatgttttatgtagctttgtaatttattacgtcaatttgttaaaatcttgtggttattttaatgtcaacttgcacacaggtgactagtgttcatgtcaacccgagcactggtcagatattatcttagatactacgggaactatgagcttataaaatctaagatcttagaataaaaatttcacaattttttttttaacttattaattctgagttcctcataatgtacgctcatccgcataagatccacaagttgtcaagaaactatcaaaaaatgcttcaaataataaacaacataaacgatatgataaaaattttggggcatgatgaaattcgacaaacacgcttctttatggatagtataaaagtcttgggcccaaatattatgtctgttcttttgtttaaacattactaggatttagttggcatgagattttaggatgcagttgtggattatttttaggctagatcgatacataagggactcaatgcaacgcatgtaatccttattcttaataaggtgcctaatttgaaaaaaagtgccccaattcagatttctttttctttacaatgtggtcaagatttatttcgaaaattattgcaaatagaattagaccgattttctccaactgatttgtcttactaaggcagtactctggacaaaacatttaagataacaatgtgttagtctgaaaaatctgttagactatatatatagtgtatgtaatatagcatatacaatgatatgaaatgcggaaaataaactgtaatcatatctataatatatgcaatg

SEQ ID NO: 398566 - DNA, 975 bp, Cannabis indica
actaaggctaaagaaacaagtaaagttctagttggcccggtgacgagggcgcgagccaagaaattcaaagaagaactcaacaacttagtcaacagaattttaaaacaagaggagaccgtggtcaacactgaaggagagcaaaaatttgtgtttctcatcaaagtagactcaatttagtcccaaattaagctgatcacattttccaaggcaattggcagctttcctttttaattttgtttcctttattttgtctttgttttatttggaaagttgtctttcttttagtttccttttttcttggttgtaagttggctatataaagccttgtaaacactttgaaaaatcaaaatattttggaataaaattttgagaggttttcttcttgagttcttgagagaactatttgaacttatcaaggagtattccttgtggcgttcaacccgacttatcaaacagatttccaccaccatttgtggcgtcttccttcataccaaggttcatgcttaactaagcattgggtcgcggttccacatccaaatttcgagaattcttagaggctaccataattggtatcaggtttcatcacaactattggtgtggttcgtatcaatatcacttaattaacctgggaggacaacttcgcggagtacgggctctacccaaaggatttcattccccagcatgtgcaggagaagaagaggaaatacagtgctggagaaagaactcatttaactcaatcgtgaagctaagttgaagggaggtgcgggagccaagcagtatgctcaagagcgtcttgagcaggaagatgacgttgaggaagagccagagactccggtcaaaaggaagaagaaacttctaaccgagcacaggcctatcaaacatacaattcagattagggagcctaattacttgctcggtcgttcactcttacggtaggaaaggggaaagccgtcctggaggagcaagaagactcgt

SEQ ID NO: 398567 - DNA, 802 bp, Cannabis indica
tttttattgtcttcaccgagtttcagtacattttatttaatttcttaaaatatagtataaagtaattgttgtcttagagagaaagagagagattaagagacaatagaagagagagaaaaggaaaaggaaaatgaaaattgggcataaccttcaattaagagagaaaaataaagtttgatattttatattgattaatattatattgatagcaaagttggtaactaaaattattttgaaaaataaatacctatataaaaaaattaaactaattttttaaaaaataataataatataaattaaaaataataattttcttttataaattattaatattattttattttttaaaataaatataacattaaataatattttaatgtaaaaagttttaattgtatacaagcagtcttatcgtaagagtatacaccttatatcataataaccatacaatctaaaatcaatggttagaaaatgtaccctaccggtagagaacttttgctaggtcctcccatagtacatatatatagggtaagactatggtaggacctagcaaaagttccctaccggtagagtaacttttttgaccattgtattttagatcatgtggttattatgatgtaaggtgtatactcttacgataggactgcttgtatacgataaactttatacatattataataatatttatataatatttattttttaaaaaaataatattaataattaaaaaatttattaatttttattttgaattattttttttaaaagttactttgaattatttttatattggtatttattt

SEQ ID NO: 398568 - DNA, 819 bp, Cannabis indica
acccagatcacgttatcttgagacgattgcagcaagtggcattgtgtgacatcatcgacaacaagggaatgctgtttggaatgatgtatactcttctttaatctaattaaccttatatattaaattctagtaaaattattataagacactaatactgaacaaactaatgcaggcacatctcggagagcataaacgatttcagaaaatttttcaagttttacgaccctaagcttctcccagtgaatggtatcaacgatgaagagaagagtcagtcttttgagaatgcggcaaaatgattggctgcttggttatcgtcgatgaataacaaccaccaaatattctttattccctggaatatcgggtaaacactatttatttctatattataacatgaaattatttttatacaatcttacttatatcccaatataattttttagtgcacattggatgctaggggtcggtgcgttaggaaaaattatccatttagaccctatacgtggcaacaaagttccctaataaattacttaaatgttagaaaggtaataatttaatgactatttaagtaataaattatttaattaactaatgaattgaaatgttaatataatttttcaaacagagcattctaatatatagggggcatcaaatatgtatcttaggccgtggccaggaatttcactagcacttgtccaagacaacctaaaatctaagaatgtaatttttatattttgaaatacacgtgcaaaccccaaccgttatatgcacgatcaaaaagctataagttttaattattaattatagtatttattataacaa

SEQ ID NO: 398569 - DNA, 777 bp, Cannabis indica
ctattgttataagaaaactcgattagaggaagatacttatttcaagaaccttcaaaatccattacacaagctcttagcatatcctcaagtatctttataatcctctcagactaaccatcagtttgaggatgaaaagctgtattgaacttcaacttagtaccattgcctattgtaagctttcccagaacatagacgtaactttggatctcaatctgaaactatcgacttcagggcaccatgaagttaaactatctccttgatgtataaataagcatattgatccactgtatacattgttcgcactagtagaaagtgtgcaggcttcgtgtattgatccacaaaactcaaatagaatcatagtacccctaccgtccttggcaaacccaccataaaatctatcatgatgtcttcccatttccactcgggaatcttcaagggttgaagtaaacctgctgacctctgatgttctactttgatttgctgacaggttaagcatcttgacacatattcaacaatatgactcttcatacccgaccaccaatatagagctttcatatcatgatacattttggttgttcccgggtgtaaggagtacggtgtagtatgcgactcgataagaatctcctgtctgataattttatctgttggtacacaaaccctgctcttgtatcgcaataacccatcacacaaaagtgaaaagtcttttgccgatccggcctctaacttctctttgtgcccctacaactcagaatcactctgtgttgggttttgtgccct

SEQ ID NO: 398570 - DNA, 1196 bp, Cannabis indica
atttggtgatcaactcccctcttaggaaacagtctttttgggagttcttccagcatcacatctttgaattcatttaacacctactcaattacaagtggagttgactcctccacttttacattgtacacggtgggatcaatgacaaatgttggcctcttcttctttaggcccctcttcagttgtagggctgatagtagctagacttctgggggtgtctcactttagcgggaaccatggaaggattctctcccatgatcagtagattccctgttgctggaattggaatggctcccttctcagctagaaactctattcccgataccacatcaaagtcatccatgcgaacagctacaaggtcaagtttcccctcccatccatcaatcttgacattcactttcctagccactccaatcgtggccatggccttcgaattgactgctttcatgcgacccgcatctttctccagttttaggcccaccctcttggcttcgattttgaaaatgaagttgtgtgttgcgccaatgtaaatcaacacgctcttggcctgcttaccatttaaagtggcctccacaaacataaatcccttcccaagggctttctttcctccggtgccatgcttcttaagagtagccatcaatcgaatagcgctcatgtgcgtgcagtcttcatcttcatcatcttccccacacccttgctcctcttgagcaatggatgcctttatggcactcaacttggactgatgggggcaagcagccgccctatgtgagccttgacaaagcaaacacttaaggggcttcttccccgttgcaacatcacttttagaggaggagctagattcaggagtcctcttgtcccctcccccacttttactcagccattgctttcctgacttcttacttgtagcattgttggtgctggtttggagatccgtcttcttcgactacaaattcttagaggtgtaatcagtcagccactcggctacagcttgagcagtggagagatctgacacccactgcctttgcagctcttgtttagcccacgacttgagtccttcaaggaagtagaaaagtctgtcgacttcattcatgtctttgatgtcgagcatcaatctagagaacttctctacatagtctcggactgtcccaacttgctttaactctctcaattggcgtcgagccaagtaggcgacattctct

SEQ ID NO: 398571 - DNA, 1990 bp, Cannabis indica
ggaagtgcaaagtttgactactcgtatcgccgcactcagcagaatttgtttcaaaatcaacagataagtgtgtcccattcttcaatatcctacgacgaacaagcagtttgagtggacggaggaacttgaaaagctttccaagagctaaaagcacaacttgcaaaacctcccgtactctcaaaacctctggacggagaagaacttggaatatacttaactgtcacagaacatgccgttagtgtcgtgctaatcagagaagagaacagcatacaacacccagtctattacatcagtaaaagactcattgaggccgaaggccgatacccattgatagggaagctcgcttactgccttattctagcaacaagaaagttaaggccttattttcaagctcattttgtttgggtgtacactgaccaaccattacaccaaatactgcaaaagccaaatgcccctggacggctactcaagtgggtgatggacttgagccaatacgaaatagcagactttgtggtagaatgcctaggcatgaaagaaagcatactagaaagcaaccccgagccgatacaaacacctcagccaagtaataatgaagataagctaatctggaaactacatgtagatggatcagctttagatcagctatctggtgcaggaattgcccttgtcacacttggggggcaacacctgcacgctgcagtcaagtttggatttaaagcatctaataacgaggctgagtatgaagccctaattgttggactaaaactagaccaggagatgaaagccgaacacattgaaatctacagtgattcacagctggtggtaaatcatgtatctagaaaatacgaggctccgagagaaaagatgatagcatatttgagaaaaatacgtgatctgctcgctcaattcaaaagctacggcgtcagacaaattccaagggaagaaaacacaattgcaaacgcgttagcttgattggcaagcagcaatgaaagtgacaaggcaaacttggttcctatttagttcctcaaatagcctagcatcactggcacggaagaaattgaaatgattgatacttccccaaactggatgacactaatagcagcctacctcgactctgggaaactcctagataatcggaatgaagctcgaaaaatgagaaggaaagctacacggtatatcatagtagagggaattatgcatagaagagaattctcaatgccattactcagatgtgttactcaagaagaagctgcacgactcctatcttaagtgcacgacagattctggggaaatcatgccgccgggtaaagtttatctaaaaaaattctaaggaaaggttacttctggccaacgatgattgaagattcaaaagcctatgttaagaaatatgacaaatgccagagattttcaaagatacctcgagctccacctgacaagttgagtcagatgcaaagccgtggccctttgccatttggggaattgacctgatcggacaattagccaaaggcaaaggaggagtgcagtatgcagtggtagcggttgattacttcaccaagtggacggaagtcgaaccactcgcaaccattacatcaaagaaagttcaagactttattgtgaagaacataatctttcggttcgagctgccgtacaagatagtttcaaacaatggtaagcagttcgccagccaatccttcactgacttttttgcgagccatggtatcatcaaaagtttctccgcagtggcacatcctcaagcaaatggtcaagttgaagcagtcaacaagaccttgaaggatacattgaagaagaaactcaaagatgccaaaggaaattggctagaagagcttcttgaagttctatggtcatgtcggacaactgagaaaacgacaaccagacagacaccattcgctatggcgtacggatatgaagctatgctgcctgtagaactcgagccaccatcccacaaaagattgatgtacaaccaagatac

SEQ ID NO: 398572 - DNA, 1020 bp, Cannabis indica
acccgagttaaaaacacttgaactcgacgtggaccgaaactcagttcccaccttcccaaacagatctctcacaaaacaaaagaaagacaaaccccataagtttccttattcagttttcttcgaattttgagactttttaccaggtaaatattattggatcaaaagcactagtctgtgggacagggggatcaggtcatgattgatttagtcattgttgatttgtataaatatgtatgtatgcttattatgatttgattttgaaatggttgcagatggagttatggggtgtgcgccgtgtgagctgttgttggggtttaatgattttgggtttgttggtttttgtttgtcaaatgaaagggtcggagggtataagatttgtaattggcaaggaagaatgtttctctcataaggttgagtatgagggtgatactctccatttttcttttgttgtcattaaatccgatacaccctggagctatggtgacgaaggtgttgatcttgtggttcgttccctataactttcacttctagttaccctttcttgaattatatataataggcatttaaattctttggaattctatgcttaaattcagtgcctcttgtatttctatctcgatttgtagcattaggttcctcatatttgtgttattatgttgaatttctgtttgaagcttggataatgtctgtacttttttttcctttctgtatctgattaagtaatatggtgtttggttataacaaagaacaatagtaatcttcaagaaaattaagacctcaggaaaataaaggaacagtgttatattgtagattgtgtgtgagaatgtaacatcttttctagaagatttgactagttatttgttgcgtattggaagtttgagtagattgaaatctataatgcaaaaaaagaaaaaacaaaaaaaaaaaatagtaggagctactgggaggatggtatgctttctttaatgaaaatacattttagattgtgtttggtagaatggagaagtggactcaagagga

SEQ ID NO: 398573 - DNA, 438 bp, Cannabis indica
cattaatgaattaattaaaataaaaagactataatatattatattttaattagaaaaaaaaagtaatatatttattcctagtgctgatcacctaatggtggctgctaagagtaagacttacagcagtatgaaacaatggtggaagctcataagatagaatggccttgactctcgcctaaacgagacaacgcttgattctcatcttgatcgaataaaaggttgctagaatatttgtcattttagatgagctgacaactctattcaatggatggtatctttgactctcacctaaacgggacactagtatcagtctgttggaaaccttggaagttatttaggattgtatgttttagtattttcacttgtcattcctacttgctaagtgctaataatttttgaatatgattttgtgttaaaccttacttgatttctatttat

SEQ ID NO: 398574 - DNA, 647 bp, Cannabis indica
ctctctctctctctctccctccttactaacacactcactccctcacttttgttattacgtttctctctctctcttctctcctctctctctctctctattgcctactgtttcaaacatggtcattgtccgagtttatataggcgcatgaaacgtaagctttgtatgaaattactaaaagggccttctgtttacagacccaattcagctattttcagttttaaaccgaatcaatggatgccaactgtcgtaatcgctgtgccctttgcgggaaataaagtatggacacgtggcgttgttatatacaaattgataatatatttttataaaataaaatatataaaaaaaaaaaaagaaaatatatcatatatcttttttaatttagtggaattattttatattttaaatatttttttgtaataatatgtataaaaaaaaagtaaatagtattttattttttctattcgttcttattttattcattttttaatattattttattttattttaaatacttttatatacattaatatttatgtataaaaaaatatttttaaaaaactaaatagtattcatatgcattcatatctttatatattaaaagtgcctatctaactgcatttcttggtttaacattcttggtttaacag

SEQ ID NO: 398575 - DNA, 437 bp, Cannabis indica
gagctatcactagatgaaggggtcaaaagaccataatattcgctaaaatccctacagcctataattttgaatatatcaaaaggctcgattggttctaaatcccaactcacacctatgtgacctgccctatcttccatagtaccgtattgctcggctataccataaaatgaatcatgacagttaatctggacgtggaatctaggataccaactgtcaaacttatgagcaatgcggtccacgagaatggaattccaagtataaaaattaagacaggagtcttggaaggtaactaatgtattacgctcagccctaagtacagtaggtgaccagccacattgattacctcaggatgctccttcaccagattcccaaggagcagtgctttgaaggtattgtgcttggggcaagatatcccaggcttgatcctcgagtggaac

SEQ ID NO: 398576 - DNA, 733 bp, Cannabis indica
aagtggaggagagtgcattgccttcacttgcctatttgcgtattgagaaatgcaggggattgaggagagttccaaatggagtaagaaacattgttacactcaatgagttggtcatatcttatatgcctaagaaattcaaagaaaggatggagcaaggaggagacgatttccacaaagtcaaccacgtaccctcacgtgtattcatggaatgtgataaaggtacatatctaatcatatctatcttttgttattaattctattctttttatttttctatcattatttatctacactaaaattccccaagttaatatggttattttgctcttttatcattttgtttaatataaaacaaattacttttttgtattaaatatttgaatctattttcacactattaattttattatttatttatttttctcttatttattattgtgtaattaaaattttcaataatgaaatataaattcatcccttaaaaatacatcccttatttgcttatgcattttttgtattggcattactatgaatgcagattgatagaatctcatatcaagatttggaggatgtgtttgccattgccaatcaccattcaccagtgtctgtttgttcaataattaataattggaatgtaatgtgtaatattcgaattgtgctgttgtgttttaattcttaaattagtgtctctttctgtaattgacaagagctcatgtgcagagtgttatctttt

SEQ ID NO: 398577 - DNA, 543 bp, Cannabis indica
tgtcggattagggggagtgatactggatgcaacaggggtagtttggttggcatgatcatcaggggtgttagatgagttttcggataatgtggcgaagttactttccattcgtctgggcttgactctagcgcatcaatttagttttagtatctccattactaatagtgattttactgtgacatttggttggattaataagcttcacattaattttaattttcaatctattattagatatttattctttattagctaatgttcgtagaggtgttcgcggtgcgggtggtgcaatttttgaccatttttccaaaccaacccgcacatgcagtttttccaatttctcagaccgcacctgcacaacgaaattaaaaaaactgcaaaaactgcactgtaaaaaattgtgcggggtggtgcggtttctgcggtttggactatcaccaataattaaactattacaaatacaacaaagtttaagtaaaacttgtcaaaaatattatgaaaaaaattaagtttcaataatacaataattagtgggctttgggt

SEQ ID NO: 398578 - DNA, 945 bp, Cannabis indica
tattataattatgatctcacacattgttatttaatatatattctaatttttagctacaataattttttatactaaaaaaataaatagcatcaatgctataacataacatccatacaaattttaaaatggcattagtttctctccattaatataacatttcaaatattttgttacataatatgtccacctcattaagaattttctaaagttttaccattagagatgctcttaaattcaaattaaggacacatgtgatgacgcattgttctatcgattcgaggttgtattttgcgttctgagctcccaagcattttaaattttaatatttattgatcaaaacattattaagcgcttatgtttaaggtaaattactccatatactgttttttaacgtttttttttttctaaatttacggtttgagtttctaaagtggtttctccggtagtttctatgtgggttgctatatgattttttattgcaatttaggttgcagcgctagttgcaataggagtttttatgtataatttcgttaaaatgcaaaaaattaaatatatatatatatattttgaagtgtaaaattgaaaacacccctatgtttaattatattcaattttattaatatgacaattatttacgtattaaatcgtttttcatgtacttttttttttattcacgtcatgcttacttttattaataaaattttttaaaattctataatctcaataatttgtaagaattttaatagctttaaaaatttagggataaaaattttaattaaaagatataatatcaaaattttcgaaagtgcttagataatgattataactacagtatacaatactagaatatctccaatagatgcaaataactaatgcaaatgaaaaataaagctcattttgtcaaaattttactttaatgatatgtcaaattgtgatacaaatatc

SEQ ID NO: 398579 - DNA, 1093 bp, Cannabis indica
ctattgatgtatgcccggagaggttctcctggttgttgcttaacttcgaccaaaatctcccaaaatgcaatggatgttggcgtgaggaggagaattgtgcacggaatttcgaagagaaggttttccatgaactaaactttccaggagccaacttgaaataccattgctgagcggcttttgatagagtagcagggaagattctgcagcatacatctcctcgtaccccttgcaaatccatttgcatttcgaagtacttaagatgggaaaggggatcttctctcccagtgtacatcttccacgtcggcattttgaacttgtggggcaacggtaggagattgatctctggtgagaaaggagttccacgtgctcagtccagctcaagatcattgtttctttgtccatccatgccatgaacatatttttcaattcgtctagctgtgcctgtacggctgggctaacctgctcggtattctggtcaatttgaattacgtcagcatctttctgagcgggaatttgagtacgggttccgggctacatgattgtcacgacattctgtttgtctactcccctccttctatttagatcattccttaggtcatgggttgcccccaacctttcgaacacagaagtttctggctgccttagcgattgattcgcttggttgacgggtggaatggcaccattgatctggttggaaccatcaggtatgacttctcgtgatgaattactagacaatgtctgctcgcctaccgctaggcccacgagtggaactcgtgaccggggattgggcggctgaccattcgtagtctgggaagtattcatcgttggatcttcgtccgcctcacctaggtggatgacgttcggtggttgctgacctacagtttggtaggctttttgtattagcacggtggcttgccgactatgattttcaatctctgcatggtgagcccttaatgcctccatctctctatccctccatttggtgaacatacgcctttgttcgtcgaacacgagatttagtgtagtgcggagctcgtcctgatcatgatgtagggtgttattgttgagttttatgccctaaataaaactcttt

SEQ ID NO: 398580 - DNA, 535 bp, Cannabis indica
tatatatatataaatatttatggtagtgacagtttgctttggattatggtagtgataaaatgagaactcaaaagcattgtcataaggaaactgtaatcatgtgctatatagttaccccttatgctgtggcgggcccaaaaagtctgcaaactccaaaaatattttgaacacctaaattaaagagcataagacatttatttttttttggtaaaaaaaaatatatttttacacttaaagatttttttttttttataattttacaatttttttttttaatgaaaataacataaaaacaacaagaaaattacataaaagtaatataaaaataatatttaattttagtatataatattatagagagcataatattatagataacataatataaaagtaatatgaatttattatagatagcatgatattatagataacataatattaattttggtatataaattataaatgttggattttgtaataaattagaggtatggacattaattatgaattgagaatactttattttattttattt

SEQ ID NO: 398581 - DNA, 1256 bp, Cannabis indica
ttgattcactcattaaagtttcatgaaccatcgcaaatccatctaatctagcatgctattgttattctggatgtattgttaatgttgttaaattctaagttaaggatcaagatgacagtcgtaacacccaaaatagtggtattttggtgcctagagaaggtggtaaatttttttatggcatactcaaacaagtgtacgagtttgcttacatgaggatgtgtgttatttttttaggtgcaaagtggtgggacacaaacgataatagaacagaaaatgatggtttattcactagtgtctgtgtcgcccgtgaatggtaccaaagttaaccattcatacttgcatcccaaaaaaaatttgatatattacattctcgacctaaagaatggagttgattggaagcttgtcaatgtttacaccccccgcaatgtccgggatctctcaaatgaggatgaggatgagaccacgactatacaagaaagaaactcttcgggaatctaattagtcgttcaactttcataactggacgatgtcaaatatgtctgtgatgatgtcgacctaattgaagtgaccaccagagaccgtgagcagcctaaccgttaagattcaaatggtttcattgtttatagttaaattctatttttaataattaccaagtgaaattatcaaacaatttaaataatgaaaaactgtagtaaaattgcttgaatagaatttatctctattctatcagacacaaaatctgacagaatacaaatatattgcagaaagtaaaatgcaaaaaattaaaatgacacaaaacattttatacgtggtatcaacaactctttcaaattgctcttagtctgcagggccacgcccagagaaagaaatttattagatgaatcacaagtgtttacaaaaccaaattgacttatacaaataaagactccctctttgaatttgttgcaactattgtaaccaattcttctaatcaaatttctgaagtgccgagaccttgaactcccttcaattcgtagcacttgcacacttcatcccaaagagtgtctcacgtgcaatcttcctcccgaagagtgtctacttgcaattttcttcccgaagagtgactaacttgcaatcttcctcccgaagagtgactaacttgtaatcttcctcccgaagagtgactaacttgcaatcttcctcccgaagagtgactcacatgcactttttcctcccaaaaaggtgactcacgaacaagacttctcccaaagcttgat

SEQ ID NO: 398582 - DNA, 697 bp, Cannabis indica
ttcattaatttggggggaatatataaaaattaaacttgtctattttaataatttcactaaacaataaaaatatattttaactttttttctgaaaaaaaaaaataaatttgaggtgtactcatacagtcatacctattttttagtcttgggtagtttgggtgcaaatataacttctatttttctatattaattcttttgactttttttttttctaaaaaaatttccataatttttttcttttaaaaaaatatatatcttatttttataagggttgtgggactttttgtaaagacaaatttgcaaggttggatgttccaaaatgataaaaataagacaatgagttcaatttttaataattttatttttttaatataaccaactttaagataatttctaacacgaacagatacagaaaatgcaaccagttttgtcataaaatttttagaacagattattattaagttttattttgataaaaaattaattcacagtcttatttgtacaattttaaaaatatagggtttattttatcatttaacaaaataaatagtctaattaataacttttacaaaatacaaggtctaaaataatatttacgtaaacctataaggtttttgttattgtaaacatatacctttaaaaaactataaaaacgaacttttcaaaaaaaaaaacgaaaaaaaaaaaaaaccgtaaa

SEQ ID NO: 398583 - DNA, 584 bp, Cannabis indica
cactttaaaatctaattccttcctttcattctattgtgtttaatattcttttccatttttagataacaagataacaaccaaatataaattattatttttaaaagatacaagacaaaaaatatatatttccacttttccaactaattaatttcaacatcttttatatagtgacaccctaaaaaaaagtgtttaatctaaaaataaaaaactacctaacattagaagaagaaaaaataaacatactcagctgccattgtttttttttcttattctttttctttgggatggtgagatcaatgcataattattaactcattaggtcagttcagtataataaaatatacatttctgaccatatatctatataggattctcttccataacatatacttccaagtattggtaacacatcaagtaatagtctctttcacaaaatatataatattatatatatataatttttaagttattctccattgatagtttatcattcaaaaaaaaatgtgggttatcttttggatttaattaaaaaaaaatacaacaaacaaatctcatatgtgtacatctttacatatatagatata

SEQ ID NO: 398584 - DNA, 793 bp, Cannabis indica
tataaattataagttagagaaataatatttatggctataaaatatcattttacttaaaaaaaattataaataatattataaatatttaaataacctaaatatttcttagaaatttgaaaaacgcttaatttaaaaattttgacatataaattaaaataattatcatttcttttattattttattcttaaaataataatttcctaacaatatttattctaaaattagtttattttgttattttaattttattaaattataagatcaaaaatcgatattgaaaatatctaattgattatctttatatcatgtatcctattagatatttaatttaatttgataaaataattcaaataaaacctaaatattttaaaattagtttaaatttgaaatttgaaaagacattttaggttgttttaacaaccctaaattttcaaaataagttggttattgaaatgataatttaattatataagtaataaatatcttaatttcacatattgttacatgggtattgtttgtttatttaaattgtttattcaaaaaaatttttttcaacaaacctattatttatttaatctaaattgctatgattaacttgtttacagatttaatgatctgattttaatcatagtcgaattgtcaatagatcatataaataatttgtaacaggtaaattttgtagtttctttaatctgtgataaatctcgaaacatgatggggcccgtcaaaatcaatttgacttgtgtgagcctatatatttgcttttggacttagatgcatataggaagtcca

SEQ ID NO: 398585 - DNA, 667 bp, Cannabis indica
caagagatttttacgtggttcagttgttaaatatccttagtccatgaatcaattaggctctatggccgatgattgtttatacaaatataaaaagatggaccttttctcctatttttcaagctcctcttgaagaaaagaatacttagtaggaatattctggagttggtaattgggttacaagaatgtattttctaaggagtcagtcttcggcttcaaggtgaagggccaaagaagggaaaaagaaaaaaagcattcccccattgtgcttcttttggggtatttataggccgactccatcacatgggccaccttggatggatcttcatggggatgaaccccctgttgggattttatgccttaaataaaacccatatcaatataatctgatttgttatcaatagaagattagaagtcatttatgtttacatgtagtttcatgtttatggtttaatgtatataatttctgttaaatccagaacatatagttattcacaattacagtgaggtcaacacactggaaggtaattgtgattatatgcttcaaaagataatgtcccatgattcatcagtgcactggatttacactgatgtgatagtcaccgataaaacatacttacacattggataagtgttatgttcttttcagaatattggcaaagtatgctag

SEQ ID NO: 398586 - DNA, 585 bp, Cannabis indica
ttttgtaactttgtttatgatacgtcaatatgatcttgttaaaaaaattaaaaagaaatataagtacacatgacgtatgcatatttctattttattcgtaagttaatccttttatatataattcaagtgaaaatgaattaattcacataaaaaatgatattaacattaatattgatattgatttaaacttataagtttaatgttgaatatatttttatttattcttaagaatgaaatagatgtagtcataactcactacaagaaatgtcacttttaccagtacaatttgctactgtgctggtaaaagtaacttttaccagcgcatttcgcaaactgctctggcaaagagataaaagttttaccagcgtacatttgcagtggctaaaatctaacttttactatcacatttacacgctgggaaaagtcttttttgccagcgcttttcattttatgctggcaaaagttctaataccaacattgatttgtcaacccccttttgccaacacatcatgggtaaattctcttttaccagcgcaataccaacttttgccagcaacaaaaatgtgctgacaaaagtgacatttc

SEQ ID NO: 398587 - DNA, 739 bp, Cannabis indica
caaaatatcactcaagaatcttataccaatacaatgggtaagttgtgtcttaagcattttgttagactttatgaagtttgctttcattatatgtgtcgtatttgttggaactggtattttttggtctgaaatgtttgagatctggcagatctggttttcagtcgaaatttgggtttttccagttgttatcgatgatatatcgatggaatatcgatggtttgtcgatattttgccagggaaggccagtgatgaccattatcgacatgttgtcgacagtttgtcgatagcatgtcgatgaaaagcacctaaacctattatttggaagttgtcgacatattgtcaatagtatgtcgacattatgtcgatgcaattgaaaaaactataaataaaacacagaataacattaaaataacataaacataacataaagttcatttaaataacataaaataagagttcataaaaaaaaacaaacaaacattaaataaaactcaccacaagccataaaataacaaaattattaaaattctttggcttttggttgagacttgcaatacttgcataaagttccaggcttcaccggtttaccattaaagatgtctaatttgcaacgacggcatccttcggggaaccctggtggtggagccagccatacaccagttttgctaaattgtgcttcaagttgtatcaaccttaactcgttccgattttgttctttttcaaaagctctatcggcgtc

SEQ ID NO: 398588 - DNA, 938 bp, Cannabis indica
tgtattacatacttgtgagtaaattacacatatataggggtagaagaaaatataagaagggcactgttatatatgaaatggtataaggattagttagtaaattgttagtattaattattataaataggcaaagtaattatacaaatggatcgaaaaaaaaaaaagaacttcagttcaatattggagattgatactgtcttaaagagtgtatttagagatctttatgctgtctcgaagaagacctgtttacctaacattggtactttcattcagaggacaaatctccaaatgtaactcttcgagacagtaccaatcttcaataaaccgaaattctattttctcaatccattcataatccatttgcacaataactttacatatttatagtattttttttatatataaaagcaaacttattgaaaaccaaaacgaggcctaaaaaccaaagttggcagtggcaacaaagggtgccacttcccttgcagaaaacaacttgaaacagtcatttgcagcagcccaagctgctaaattatgagcacatgtctttgaactacaggtgatccaacacaaccggctcaccggaatctcacgaaggtgactgagggtagcatcaaactgtcaattggcggtgtccatgtattgacctcacgtgacgctatcaatacaatgattcacaataataacgggtttataagttaatcctcggaacttaactgagataaatgagataggcgaacagcgtaaaagaatgagttaagtggaaagggtagatgacgaattctttaaaaatttgcaactcattaactcacatactcgtaagtatgttgaaagactaagagaaataagcaaagtgcgacttatctcaaaattcctaaagactagctcaagaattgtcgtaaaagacagtagcaagaataaacatcttaactagcatctcg

SEQ ID NO: 398589 - DNA, 516 bp, Cannabis indica
atccatttgcactccataatcttttcgttctttggttttgacataaacacccaagtactattctttcagactgatcccatctcctcatccatggtatggagccatttagacttgtttccatttgaaaaattgccttttcgtagcttccagactcttcaattttagtttgttgtacacccgctagtgcaaatgcaattaggtttgcctcaacaaacctttttagatggtgaatctctcttttggttctatcacgtgccaactaataaccttccatacctacctttttggatcatatcaaaacatctatttggtctctgctatcttccagctctccactagctttcgtctatgcatcatcttccagttccaaaatagcttccgactacgaactctcttctaaatgttttgttctatattctatttccatgtgtgtagtgttcttatttcaagactttcacacaaaggcacactacctttcctgattgtcaagtgaggatattctaattcattgaaaat

SEQ ID NO: 398590 - DNA, 1009 bp, Cannabis indica
aaatgtgttattttatctgtgcagagatgtcttagaagacgattcaagccttgaagaagagagtaggagacagctcgggcttgtctcctccggccaagaggtctaagggtagtgaaactccgtctaaggaaaaggcaccagttgacgaggtcattgacttttccaaggagcaacccactgtggatcctccagctcagaaggtctcaaaatccaagagttccagaggagggagctcggacggatctgaacaggttagggccccttcaacaaccgtggtgctgtgcacggaggccaagagaggcaaagatatgcttcaacactacctgacccggtcacttcctgaagtgagcgatcagctttccggagcggacaacgagttatccttagagctggtcttgggaagagttttgaaggaagttactcgagtaaatcttttttttatttccttctcttttgagtggctcagactttaacacatttgctgtgcaggccaagttgaaaatggcttatgcttactctccagcaaaatcagctgctgtcaagaaccttgccaccaccaacacgatgcagagggatatggacttggccaagaaggaaactgaggatatggacttgaattttctactttttataaatatgtatataaattatgtaatatatagattatattataataaaaatatatacgaaaaaactcttttaatcaggttggtcgggttagttcgggttgattgggcgggttgatattatttttgttggccgagattttcggcaaccaatataataatatataagaaagttgtaagaagtttaatgcacgagatttttacgtggttggggcattaatgagccttagtccacgagtctttgttatttatgagagtatttattacagagaatgttcttggtgacttttctctttggttcttatgaaacccagaattctcgacccctacctaaatgtagtttgggggtatttatagtgtttttagtggggtgatccctagaa

SEQ ID NO: 398591 - DNA, 628 bp, Cannabis indica
tatatatatatatattagtaataatatgtatttttttattattgtatgtatatatatatatgttttggtgaatagtatatgtatattttattatacaatatattatttttttatataatatttaagttctatttattattgtacttttattaacatgacatataattttattagcatgctatatatttttatttgttgttattatatatatatatatttctattgtaaggtatacattttttgttatatgatatataaatttgattgtatagtatatcattttatcttagagcatgcatgcttagtttttattttattatatataagaatattgtggcaaaactacccaaactttatattttttaatacttaaccacaaaacctgatttttaggggggcaaaattaggggtgtacaaaaattttcgtaaaccgcccaacccgaataacccgctcaaaccaaaccgacaaaaccgataaaaaatacaaatcgacataactcgacaaaattctaaaccgcccaatcagttaattgggcaggttaaaaattgacccaaaccgcccaacccgatttttactttttttttttttttttttatttttatagatattatataatatataatatat

SEQ ID NO: 398592 - DNA, 772 bp, Cannabis indica
atttagatttaatttagttgtagtttggagtaaaaaaaaagcaatttgtgacatagtttgaaaaaaataaataaaaaaaaagagtaaaaaataatgtccaaaagctatgaagaattgatattcttgagagataaaaggccacaaagaggcccaaactacctcagcagccaagcacaaaagaagaccaacacatcctccctctatcacatggcgcacgtagaagcagcctgcatcatcagatcccatgatatcagcccttgctcctcccttcttcccacgcacgtgtggcactcactgtccctaccagccatacgtttaggggtgttcatccaatctaattcgtacattttgctcatagtgtactcgatccgcactaagtgcggatttcattttttagatccaatccaatccgcacaatagctcaaatctaatctaattcaatccgtaaaagtactgattgaatcagttattttaaaggggttttttcagttatatacgaaaattgtaaaatatttatagaaatagtgtttgtcaaattaatacattgtatggaggtatttttaccaaatcacaacataaagcccattgatattattagggaaaacaaaatagaaaaagaagctgactgagatggacatttgatttctttttttcaaagtccatcttaaggaagggtgcttgcaaactggtggcagatgggagggatacacgaatttgggaggaaccttggatccctcacatgaagaatttcctccctaagcccattgggtct

SEQ ID NO: 398593 - DNA, 456 bp, Cannabis indica
gaaatcaaaatcattgtattgcataaactcaaatttacaacttaacaaccattacgacctttataaactatacaacttgtagattctgtaaaattaattttgttgtaaatttacaattgctcaaactattctaagtctttttattttatttttctaggaaaaattgataaaattctaactttcacctcatctcgaatgcagagcattacatgggtaacgataggggtgttcacggattggtttcgtcccgatttttatagtttttgaaccaaaccagtataaagattttttgaatattaaaaaccataccagaccaataaatttctctaaccaaaccaaaccattaagaacggtttggtttggttcgaaaccacgatttaagtagaatttataattattcatattttttaagtaattgtactacttttcttaagtttttaattttatttttcaaaa

SEQ ID NO: 398594 - DNA, 553 bp, Cannabis indica
atagttaataattagtacttatggacataatagaagaaaaataaataaaaagataaaaggtatattattactcattaaaagaataacaaattaaaataaatatttttatgaagttaaatatgatatattttatatttgaaaatattttatttagatttaattttgttgttgtttggagtaaaaaaatagcatttgtgacatgtttgaaaaaataaaataaaaaaagagtaaaaataatgtccaaaagctatgaagaattgatatttcttgagagataaaaggccacaaagaggcccaaactacctcagcagccagcacaaaagaagaccaacacatcctccctctatcacatggcgcacgtagaagcagcctgcatcatcagatcccatgatatcagcccttgtctcctcccttcttcccacgcacgtgtggcactcactgtccctaccagccatacgtgggtattcatccaatcaaatccgtactattttgctcatagtgtatccgatccgcactaagtgcggatttcatattttagatccaatccaatccg

SEQ ID NO: 398595 - DNA, 1182 bp, Cannabis indica
cggccaagaagtccaagggtggttagacggccccgtccagatagaaggcaccagttgaagtagtcattaatctctctaaggaacaaactgctgtggaccctcctgtctcaaaaatgactaagccaaggattttcgaggatgtagctcggacaggccagagaaaacgaggggcgcatccgagctgatcaaggcaataatgctcactcactatgtgtctcagtcggtccctgaggtgaaagagcagctggctggggcagacaatgacctttctctggagctggtgatgggaggagttatgaaggagatttccaaggtaagtcatttttgatagtttctttttgtccttcttcacttaatttggattttaatattctttctctgtacagaccggtctgaagatggcttatgcttatcttcttgctgctgagaagaaagtggccgaactgaccaaagatctacaagccaccgatcaacttgaagccgccattgcaatccttatctaaggaagtgaccagccttcaagaagaaagggaggttcttcggagtgttttccgcaggttggaagaagagaagaagaccaaggaggaggagcttagagctgaggttaagaagtataagtcagaggtcgggcagcatcgatccgaagtggagagactcagagggaaaatgaatgccttagagacaactggtctcaagatatgacttttggaaggccaatccccaggcaaattttgaattatacttggacgattccaaagacatgtttactgcactgctcaggcggcctacggggaatttgaggcgaccactcccaactctccaattaaccaatgtgttgaagtgcgccccgctcaaacaaatgatcctccagctctagctgactcagccgacccgtacaaagagcctaggacttcagccgtttgaatgctttctttttctatctctttttttttttatctattcggccataaggcctttttttaagacaaagtgaacgaccaagctgtctttaaacttggaacttatttttcattttcagaaaactagctgacagggcagcctttaatctcgggtttgcatgcttttgttatctttaatgaatttcatcctctgtttataatcatcatgcaattctgtttgttttattttttaccaaatactttgtacaggtataggtgttgg

SEQ ID NO: 398596 - DNA, 1101 bp, Cannabis indica
aaatacccctcagttattttaaagtttagttttatttgaagggtaaattagtcattttgttaaatgggaattttgacttttaattttattggctgattgtatattttagaaaaaagaaagaaggaagaaaagaaaacccttaccatatattacttagaaaccaagtaaccatcaaaacacaacctcctctccttctctctctcgttcaagcttgaagcagcccaccctaggggattttcttcaacaagctttcttttttcaagcagaatttaattccaaatcaacctagaggttaattgaggtaggtttcctactttttggattgagaacactagtttttgagttggttttgaggtaggtttttgcttttctgttgctgtaggaatcaaactaagtttggggtgtatttagggtaggtttttgagtatgttgggaatggttttaagtggtctttgtgactgcttgaattgagtttggtttgatgaagccaaagttgagttttcttcactttagtgtgtgatttttagtaaatgattgagttgttatgttttgaagcttggaatatattgtattattgttagtatactgttttggaaggtttgaacaggtttggaggagacttggttcagttttggagccaaaaacccgagtttccattttttgcagcaggggaaaccagttaaccagtttcacaggcatagtgaaaccggtcgaccagttttggcagcagtgggggaaaaccctagttttggcttcagaatcggtttcgctcggggtgtttttcagagcttagaataggttattttagtaatgtttaagctattttaaactagtggagagttagaaatttgtctgattatggagctacggtttggttggaatatggataagttgtttatcaaaattctttgtagtgacataggacccgggatcgcttagcttgttttccactcaggtaggcccgtactcttgagttctaaactaaggtaagaaaattggtaagcatcaaatgtggttaattgttaacggttgaatgattatatcttgattattattaagattctgattaaaagtatgttgagcctacgttatgacctaggg

SEQ ID NO: 398597 - DNA, 706 bp, Cannabis indica
ctagcccgtctatgctcagggccagccctgctcagttatatgattaactagggaattaagccgcgctttcacgtagtgttgtccaatttttataatttttatatatatatcatatttatattaaatgatataatttaaaaaataatattttaacgtgtatattataaacaaattaatagtgttgaaactaaaaatataatttgctatttaaaaatatataaaaaaaaatgaagattttgtgacaaatattattgttataattatttaaaaaaataaaatttattttataattagtttttcgaattttttatttcataaatttatattctaataaatagttgcaaatatttttactaaatgagtaaaaatattataaatcatgatcgtttgttattttctaattatttttaaatttaaatgaaataatttttaaattcctattctatcaccttaattttcttattgattcatttaattattataagatattattattaattactaaaaaaaaatttgattatatattcattaatttaatcataattagatctattatatcattatttatactttagtagttgtatataatttttttagtaagtatatcaaacgtcacttagaaaagaaatttataaaaaatatgtaaaagagaaaaaataataaagaaaaaagaatcctaaaataataggatgctgcatttaaaaaa

SEQ ID NO: 398598 - DNA, 508 bp, Cannabis indica
cggttttcgtgccatttttatggcttgcctttaattgtttagggtagttttgtaatgcagtcaacggacaagagaagtgatctattttgtgctcttggattctacatcaacgacctttcagttttgacagatagtatttcaagtctttatatttatgaattgatttatattgtaatatggattattttattatctttatttcattttagctattttttcattaaaatatgtagtaatagagttttatttattgttgttttgtaggtcaattttgtggagggcctacgactataaagactttatcgggtaagtttaattaaggattgtcatttctaatacctgttgttgcttggtgttgtttgttttttcagctatcaacaaaggaaggatggttatatgagttgtgggtgctgtttgaggatgttatagctttattgtctaaatttccgggggcagttttgtcccatgtggcttgcgataagtaattctgcagctcatggtttggcaa

SEQ ID NO: 398599 - DNA, 459 bp, Cannabis indica
ccgcacatattagaaacaagtaaggcgagagagggtccccttggcggtatacccacaattaggttgaaatttaggccacaaaattcaccatttgtgagaactgagaaggaaaccattgtgatgcaattcatgactttgtttacccactgctgttcataccccaaacaaatcatcatcgcttcaatgaaccgccaacccactctatcatacgcttttgacatatccagtttgagagccatctttttcccattcccaaatctacctttttcaatgcagtggagactttcaaaacccaagatagcattgtcctgaattagccgacctcgtataaatgcactttggttttcagatatgaatttttttagattgtccttcattcggttggtcaaggcactttgcaattattttattagctgacattgcaaaaggcttataggccgaaaatcagcaacttgtttt

SEQ ID NO: 398600 - DNA, 506 bp, Cannabis indica
tcacactataaataggtggattttcattatcataaactcaaatgttttaaagaaactctcagtaatagcaacagttgaaaagtacattcaaaatcccagctaactagatcattaggacaccacaaaaactgtgaaaatatgtccattgctatctaatttgtctctaaacaatctgcccatgaagaactgttgtgtttttgcctaggcgctctagttttcaaatcagttgttgatagggatatgaatgtgagctgaaatttgtatgccttaatagatttttgggttgtttaggttgcaagctctttgatttttttgctcttttggaacaccttgaactcctaagatggctagttttattctttattttggtgcaggcttcacctgacattggttgtcactgcagtagtaggttaatggatgatgtatgttatagcctttttctttatttatttgagtttctttcattattttgagtatgcattattagtagctaccactttgttgtt

SEQ ID NO: 398601 - DNA, 648 bp, Cannabis indica
ttttttgtacaggaccatagtctgggttgtcatgtatattgtctctaggtcatcaattaggacagaaaaggcagtgaacttggaggcattttctctagcggtctgttaggctttacctgtgagctttcccttcttcccgttgccttgcctgccattgttattggacctttttccactcggagttgagctactaaggtattgtgggctctgagcaagtgctcctgtcgatgggacatgtggttggcccaacttaggctcgacgtttgctcacagaatagcctcttcgagcttgataaacccatttgctctgtctagaaactccgccatagaccccacaggacgacatcttttaatgtccttccacagttctccgagtacctcgatgccccccagtatggcggccaggctcccctcttcagttaagcttgcgacttatgtaggctctgtatgatctgagggctctcctggtcttttgtatcctagtatggcagcaagcattccatgaattaaatctccttagtggtagcttgaaataccactgttgtgcagcttctgtaagtgtggcagggaataccatacaccgcacatcaccccgtactccttgcaaatccatttgcatctcaaaatatttaagatgtgacaagggat

SEQ ID NO: 398602 - DNA, 511 bp, Cannabis indica
aatctatttatagttgttactagagataaaaattagacggttaatgtacggagaatgcaattctcgctcccatctctactacctatttatgtccccctccctgctaaatccccatctaataactagcggatttgaggtaggagaataaccatcgtttatggaaaatccatcgagtgtctattaaggtaaatagaaaaaaaatatataataatttaaaataattgaaattttttaaaatttacatcaaaacacaacctcttctccttctctctctcgtgcaagcttgaaccagccaaccctaggggattttcttcagcaagctttctttttccaagcagaatttcatttccaaatcagcctagaagtgaattgaggtaggttttctactttttgggttgagaacactagtttttgagttggttttgaagtagggttttgcttttctattgctgtaggaatcaaactaagtttgaggtgtgttgagggtaggtttttgagtatgttgggagtg

SEQ ID NO: 398603 - DNA, 537 bp, Cannabis indica
aatttgctcttttcttgatttttgataaaataagggttatcaaatttgatttatcataataccatcagccaagattaatgaattaaaacacataattaagattaatataacccactaaaggacaaaatatcaatgggtgcccctccacactaaaataacataaaaggatactaaagggaattttgggaaattctaaattcccgaccaatcccgacattcccaatgtctaataaactttcccaatatactaacatgctaagttgtgattctactgagctaaacactgagttccatgttgctgggcactggaaatgcaaaattatgaaattttactatatgacataaaatgtatttcagaattcaaatataacaacataaataattatttaaatatctataaataattttcataattaaatcataattaactgctaatttccaaattaaactatgtggtctttgcaactatcccccccttaaaaggatttcatccccgaaagctaacctgaacaactctggatattgagctctcatatc

SEQ ID NO: 398604 - DNA, 741 bp, Cannabis indica
atagtggaaagtatgggaccagtaggtaaaatcataggtgagggtaatgaaacagtggaatgacctgtaggttgttgagaggagagagatgtagattgagaaaaggcagcagaataagcaaatggaaatatgttttcatcaaacaatacatctcttgaaatgtatacacggccatctttggataaacacttgtaacctttgtgggacaagctatatcctaagaagacacaaggggtagatctataattgagttttactttattatatggcctgagattgggataacatagacaaccaaatactcttagcatagtgtagtcaggtttgacattgaacaatagttctaaaggtgtgctaagattaagtttaggtgtgggcaatcggttgattaaaaatacagcagttctataggcttcatcccaatattttagaggtaaagaggcttgagctagaagagttaagccactttccactatatgcctatgcttacgttcagctaccccattttgttcatgtgtatgaggacaagacaccttgtgtaatataccatggtcagttaggagtttggtaaaggcttggtattcccctccccaatccgattggagctttttgattttatatccaagttgtaattcaacttgagctttgaaacttataaaggttggtaaggcctcacatttagttcttagcatataaatccaggtatgtctagaataggcatcaataaaactgatgtaatat

SEQ ID NO: 398605 - DNA, 653 bp, Cannabis indica
gatcacggagtgtctcaatattacgtggggcgccagagcgtgccctaaaaactgcgttgaggtgatcacgcagattaccccgatgtacctggtaatgtcctccctgttgcgtctgtacagagctggaccttgtatatctacttggagtacgaccatgcgatgacgaagaagctgattctgcgtcgttgtctcttgatggtcgactgcgaggattacgcctttcaaggtcttcatcaacttgcgtgctttggtttggataccttgcggattgatccctcgacgttggattgttcaggtccaaaccttcagggttggttctccgttccctgtgtacacggttagtatgacgtctagaagttgttacctgagggttatcggtgcgaatagcaggaactcgaggagggcgtcgggctcagttttgccatctacttcggcctgtagcgcgcgcagttgatcgtgaatcgcaatatattgattagtggtgagttggatgattccctcggataccactgccggagtgacagggggaaaatgcatggttgctggtggtctggatgtgtccccgacttgagggtcagtcgtttctgggaataggttgagaggtctgatattgcttctccctactccgctgttaatgacatccacaggtggca

SEQ ID NO: 398606 - DNA, 553 bp, Cannabis indica
atgttatctagggttcagacctaatatattttttattttcagaaaaaaaacaagatttagtaatgtaatgatatctctcttgaaattaatctgtttttagagatttttgtatcgttggaaagcatattcgatgatctaacatttttatcaagaaactattcaccaatttgatgttcttctatgtcgaaaattatcatctttctgctattgttgtaattcgttttctttatatttccagaaaaagtactttcacttaaaatacaataactctctcaattctcatctatttttaatgatctatatatggttttaaagctgattcgatatcccataagttttatacggaaatgttttgttaattcgaagccatactataccaaaaagttagttttcttcaatatcatgtgattcgtttcttatcttgttcctgcaaaactgttttggtaaaattttaatatctctttgaatataatttcaatttcaaagattttttgatcattggaaagggaatttaattacctaaaactttgatgaagatgttatcttctagttc

SEQ ID NO: 398607 - DNA, 506 bp, Cannabis indica
acaagttttgcatagtcggtgaaatcaaaatgttcatcttctgcaggagttttttgttgttgttttctagttgttgtatggttgactctgatgttaatgtcatagtattgaccaaaatagtatcatcttgaactgatccaattgttgatgcagatagtacgttgtttgtttgtttgttgctgggttgttacaaaaatgttgcacatctgcctgtgctgattgattgtgatatgatgtcatcatcatattgttgcacatcattgattggttatgtgccaaaaagatttgtgttttgtgttgctaattttgttcacagacaatgggtagcgtgtgaaatcagtttagttgcttaatagctttatgtagaacaacaaactaggggtgagtaaaaaatccaagaaattgacaaaaccgagtgatccgaccgttcgaacaccgaaaaaaccaacaccgaaaaacaaaaaattgaaaaaaccgccttcggttaaaactgtcttaacacggtc

SEQ ID NO: 398608 - DNA, 502 bp, Cannabis indica
aagcgattgaacttcttcaaacgcgagatcatcactatgcacggtgatgccggaggcgacaaagtcgtattcaggtccaagaccgttcaggagttataagatcagatcttgatcttgaatgggagagccagcgatagccaatgaatcagcaatagactgaactttgtcactgaagtcagagatagattgtcctcccttgcgaagcgtagaaaattggctttttagttgaaggagactagccttcgactggcttgagaacctctgttctaatgcacaccaaacagagtgagaggtagtgaaatttgcgactgaagccagcacaacttctgtcatggaagcacgcaaccaagataggagtaattgatcttgacgtttccattgatgaagcattggatttggttcgcctgataccagctgagcaggtggggaattcctgcaagaagtatttcatcaagatcgtgtccgatcacagtggggagaacctgtgatttccaagacaaaa

SEQ ID NO: 398609 - DNA, 589 bp, Cannabis indica
tatcatgtttatagaaacgttgaatatcatgtttaagaagagactaccattgatgagtccagtctttgcaaaatcagaattgtagaaagagttgatgacgaaaggtctaggcatgcatgcatgtgaactgcatacgtaatgttacttttttaggatgtcattttgccacagtatacacttggaaatttcaactccataattcattcaaacaatgctaaatgccaagagtacaccactcatttatctacgccttttgtttattttaacctttaatcttgtttgtttctttattaaatttaaggatgatagtacatttatatgatatttttgactttgtatcatccttaatttctttctttctttctttcaagtgatatatttaattataataatttttttaatggaaaatcaacattttattaaccattaaaatccgctactaaagtaggtaacaaatcaattgggacagactccaaattgaaggtgcaatcatgatagaataaagaagctctagcaaagttatgagccactttattagttgatcgcctaataaaaaagatagaaatattttgaagttctttaagtaatg

SEQ ID NO: 398610 - DNA, 663 bp, Cannabis indica
tgtgactaatatttttagctacaatgtaaaaattattatgtataattagtcacaatttttccatttttaatcataagttttattgtaactaaaagtaaaaaattttatcattgtgtcttttagtattatctcggtacatatatataagccaactgcaatccaataattcataatatcctttagttaaatatttacttttgcttattattaaaagtataataatttttttataattctataagctaaaaaaaagtttatagtagaagctaattcaaatagagtcaagtagtcactactacaaaaacattctttagaggcagtgtttaagatcttttagcgtcgattttggcgaaattcgctaccgatgctgattcgggcaacgctgtatggttgcaaacaaccgacgatgaatagtaccctatggcgtcggttaatacctaataaccgacgtcatagggttaataaaaaaccctaaatattgcccaactcccaaccgacgacatagggtataattaaattctatacctacgatttttactaaaaaaccgcctataaatgtcaatttcaaaccaaatgagtattttcgcaccctttagcttctctttttataaaagagataattacaaaggcactattttttgtaaaaaaatattacatttttac

SEQ ID NO: 398611 - DNA, 1331 bp, Cannabis indica
agaatactacacaaaggaaaaatggctagaaaattatgtaggaacaatgtacctaattggacaccaaagtgagtgggatgtaccacaaaacgtgaaagacataatagtcttgcctccagttgaaaaactaaaatcaggaagacctaaagagaggaggtgggaagctggctgagagaagaagcaacatatcaagtgcaacaaatgtggagatctggggcacaccaagagaacatgcagtagaagcatcaacaataaaagagaagaaaaacaaccgaagaacaatagaggaacaaccgcgaaaagctaaaaatataagagagcatatgtttgctttgggcctagatgcatatagggagcccatataattttttataattataatggactaggttgctataattaaattgtcacttttgatagattttatttaggtccaattagtattgggcttcttcaatgaataacagttatttaattaaggttaaatttctctcctttggaccttgtgtgagagttagggggccattagtagtcggtacgacatactgaacctaacattccctcacatgaataaccccaattgtgaaggcccatttgccttatttgaataactgtagtaggttaattacactaatataacctaataaaattgattagcaacataattaatttcaaaatacatgaaattaatttttaatcagattattttgaaattaatttaagaaaaacacacttagtttaatgaaatatattcaagataaactatgtaaattttttctgtatttaattaaataaagaagttataactaattagatttttttagatatttaattatttgaacttttaaagaaaatatatttaagttaaaaatcagttattcaaactactttttgatcaacttaaattagaatatttttaaattaataattaagtagaattttctacaaaaatagttattcagatattcttttaaaatattttttaagttaaattttagatcaacttaaatagagatattttcaaattaaggtaattagttcaagatacttaatttgttatttaattaaattttggaatattatttaagttaaaaaatttgttattttagaacaacttaaattagatatttttcaagaatttattttattatattttatatgtatttcaaaattattattttctatatatatattcaaaattttattctgaaaaattaaattaaagttgaaaattaattttagactaacttaaattaagtaattttcattattaaaatatatagattaaaataagtgattaattaaaaatacatttcaaataatgagcttta

SEQ ID NO: 398612 - DNA, 635 bp, Cannabis indica
cacagctgtgatttaaactgtttgtaaggaggtcaacgctgatgtggatttggacatgctaccaaatgtatttcgctgaggtgccttgcctagtacataagtgaatgacctagtttacttgcattccagcgatggcatgagcaccaatgtgctgagcgaacttaagaactgctctttcaccataaggccttgcagactggacaatcatgtctttcaagttattttacttagttattataatgtatattatacgctaaatgttctagtaaccaattcacctcgacaatgcttctttacatacagcgaggtagatgcctcgctatgcgttgtctatgtctcccttgggattatgccttctgatgcaaaatggtttctcgtcaatacgtgcatcaatagtttgtacatcctgatctcgattaagactatatagtcagcaagttataaatattctctattaattctgcattcaatgagatattctattttgtatttaatgatataattaccattatatttatttattcgtattctctgagactgacacgtgtcactttctgaagtacatccgaatttttggtataataattgccccttaaaaagtgttttttaaacgattaccgtgggtatttcggtca

SEQ ID NO: 398613 - DNA, 995 bp, Cannabis indica
agagttattgcattcccaaaggtcaaatctacagtgtaaactgtaaagtatattttcctctcccatcatagcaagaaagatgttataattatttattaatatatatatataaacagattacatatcccaagtatagtaaaatttagattttatttaaaatggaatttagaatttagaattttatttgatcagttcttgtttgtttcttcatatattattatatatcatatcccaatactaacattgtcaaggtaggggtctgagagcaacattattactctttcccagttgtttttttttgtattttttttctacggttcctgtttgatttgatttgtagttttgttcattctaagccttattcatatatataaaaatttcatcatattgtacagtagttctgtagactttagcatgggaagtagttgtgaagtcgccatcatttgttaccaaagaagtaatagcttgtagtcattgatgtcatagtcattagttaggcacgctttgcaggtataaagctagctcatcagagaaaaactttcagtgtgcggttatgtaaaaagatcttacaaacatacatgtgcctagctttacttagatctctacactaattaataatgtatattatttattaaaacccactttcatttggaaccaaaaaacaaaattattggcagcctttcatgttatgccttaaaaaattgttactatctaccatcctccatgccaatgcttcacttgaaaatctggaacagaacaattccactgtactcttttctttttatccgaaacattgaataatctgaggattcaatggaacttttaggcagcagttgggctataaaataatggctctttttattatatgcaggacctaccattgccttttactaatcctcttttcttttgttatgaatgatattgtgaatttgattttagttttgaacctttctcttaataatcgtaagaaatatgacctagctttgggggttcca

SEQ ID NO: 398614 - DNA, 581 bp, Cannabis indica
atacgcctgcagacatagtacacaggatggtggattttttcttcttcccggactaaggctgcgctgaccgcgttctcggagacagccaagtatagtaacaaatcctctccgtgaactggatttgatcgtggaggcttcgccatgtgttcctttagttttttgaatgcctcctcacattcgtctgtccactcaaattttggacacttcattaaaatattgaagaagggaatacacttgtctgttgatcgggaaataaatcggctcagggtagcaacttttctagtcaagctttgcacgtctttgtgcttcttgggagaaggcatgttcagtaaagcttgaattttttccgggttcgcctctattccccttttactgacaatgaatcccaaaaatttctctgatttgaccccgaaagtgcacttcttcgggttaagtttcatttcatacctccggaacacttcgaagcattccgtgaggtcatctgcatgacttccacacgcttttgatttgaccaacatgtcatccacgtaaacttccatattttatcccagaaggcctttgaagttgaccattctctgata

SEQ ID NO: 398615 - DNA, 645 bp, Cannabis indica
aactttttgatgtttggggaatcaactttatggggtcatttccaccatcttatggcaatctatacatcttgttagcagtggattatgtcactaaatgcgttgaagcagtagcaagtcccactaatgattcaaaagttgtaatgaagttcctccaaaagcaagttttcactcgctttggagcaccacgggcattaaaaagcgatgaaggtactcattttgtgaataaagttcttattgccttgttagctaaatacaatgttaaacacaagattgctactgcctatcatcctcaaaccaacgggcaagctgaactttctaatcgagagatcaagggtgtacttgaaaaagttgttaatcctagtcgcaaagaatggtctcaaaagctaggtgactctctttgggcttatcgaacaacatataaaaaaaacctttgggtatgtccccatatcgattggtgtatgggaaggcttgtcacttgccggtagagttgtaacacaaagccttttgggctataaagaagctgaattttgatctccatgctactggagaagctcgaatgttgcaattaaatgagcttgaagagatgaggtttttctcctacaaaaatgctaagttgtacaaggagaaaaccaagagatggcatga

SEQ ID NO: 398616 - DNA, 548 bp, Cannabis indica
aatgtcttaatttttctaatattaaaattgcagctatagccttgtcagaaaatttgataaaacctgtagttggtttagtagttatatggattgctagtaaataaataggaacatcatgtatatgaaacaaattgaaaagagagcacaagattcgacagagggaaatagattaattagcttagaaatctccactaatttgacatcttctttcaaaatgaaaattgactgaaatatgagatcatttagtcttgtacacgatcacacacttggattacataagtttatttgaaaaaggataagacttagaaactttttctgcatataaatctgacagtgttactctcaacaatggtgtatgaaactgtatataaatttagggtattttcacttaatagattgatagggaaaccctagatttgtatctagttattcgaaagtgtttcagatagacacttactaatttaccgcttggcagaaactttttcaagaattcaaagtttaaccccgtcgcgacgggggctttgccagtcgcgacggggacccttatg

SEQ ID NO: 398617 - DNA, 795 bp, Cannabis indica
ttcgttttgagtaacacaactaaaattcaatttcagtttaaatcattgaaaagtagtccatcgtcatgactgactttacaaaagctttccataatttgcaaattctagcactacaatttctctttcctatctattttggtatctaaaaaaaattttagtttatatttttctcatagttgtgtacgttgtagctatttaattcattatataaaattttaagatattcagaaaaatttaacacgccaaaaatagaattcaaatagtctacatgtgtgactatattttattttatatgtgtgtgaaatagactgtttgaacactgctttttatattgtaaattgttgactgaggttttcggcaaccgattaaatgatatataggaaagtctttaagaagtttaatgcatgagatttttacgtggttggggcattaatgagccttagtcaacgagtctttgttattaatgagagtatttattacagagaatgttcttggtgaatttttctcctattttatctctttgattcctctgaacccagaatcctcgacccctttctcagtgtgtttgtgaggtatttacagtgtttttctggggtgatccctaggaatgattcacttgtctttctgtgcaggcttcataggggcacatattcccagtagataaaaaataggaaatacatgacctataccataggtatcttaggagttaggtggatataatcttttatcccttctggattgatgtgatttctcataaagtagccgtcactagcctcattaatcatagcataatag

SEQ ID NO: 398618 - DNA, 801 bp, Cannabis indica
gataggatatcgcatgtgtgtcaataggatgtcgatatattggttaagtttattttttgtcttacattgtcgacaaattgtcgacagtatgtcaatacgttgtcgacaaattttgatttaccagttggtatgtccttttttcttgtaatgtcgacaacatgccgtcagtatgtcgatatgttattagcaatgttatgttgttgctttatgtttgatattatcaactgaatatcgatagcatgtcaatattatggcgacataattttataattgttgaatgtttgacaatgtcgacataatatcgacatgatatcgataggatgtcgatataattatgtaattggttacagttttataatgtcgacatgatgtcgaccatattttaattttttgacaataatattactttgttatttattttttcagatgactcccagactcataatttcagcatccgagcattttactggtcgcgttacttacagaggcaccagaacttttgcaaaaatcaagtctcggtttgaggagttcaatttgaataacacggcgaaggaaagccgtttcggcaacttttgaaatgtcgtacccctaacattctcctcggtgttatttcaccaactgatgttgcacaagatgaaggttgatgctcaggaggacttgaggatgcagttttacattagtcggaaggagctcagatttggagtgcttgagtttgcactcattacaggcctggacttctccacggggccaacagaagaggagaagcctacgcaggttgctcgctcagggtcagaccgattg

SEQ ID NO: 398619 - DNA, 540 bp, Cannabis indica
tgagctacgagtgagcgtccaaatggactaaaactcaagattgcaaacaaagatgtccaccacatgtagctgataggaccaaccgtaattctactgaaagaaatttgaacaatatatgaaatcgatctcctctgtcggattatctttacaactctaatgaacctagaccaccctgtaaccctgcaaagagaaagggacctacaatctgacatacgggaagataccaaaacctctactgtgaaagtaaagattatgagatttggagggtgagattaatgagctaatttggagggtgaagatcaatgagctactcaacactcagatgtacttccgagctgaataatgtgcttcacgtaggtacttttcttgagatcatgatagcaaacactacgaatgttctgtgacaaagaaaatgctcgagagacgactgtattgtcatacgggatgaatccctagagttgttatcatggccacatgaccaggaaataaccacaatgcctagtgttaacgtacatttttgttaactaaatttgagcctca

SEQ ID NO: 398620 - DNA, 1157 bp, Cannabis indica
ttttgccaattacacccaatacaacttctaatgatcccttattcccccaccccacaccaccaaaagcaggcacaaagacgatgatatcttcacaaaattcacagtagctgaaataagctcatgacatagtttaatatagcttgaatgacccattcgagaagacctttctcccctagacttaaaaaattaaatttccaatcaaaaagtttattccaaatcttatctaaaataaattgaaagaacattatatcgatgtgacgcattatgggtggttagcgtttccacaggcagacccacatagtagtgtaaatagatcgagtcggatctgatctagctatgatccgacctgatccagatcatgtaatgatctgccccgcctcgccctgctagatcagatacttagatcgactcagatccgacccgacttattcggatcgaatctcatctgactcattcttttttttaatgaatattaattttatatctaaacatttattttatatccattttaattttgtattagtattatttaatacaatactatgtttgggtcagggtctgaatcccaagtccggattcaagttcgagtcccgagtctaattcgggttagagtcacaggtccagtctcgggtctaggtctgggtcttaggtccacgtctaggtttggctctgcatctcgtgtcttggattcgagttcaagtctgtgtctgagtttgggtttcggtctgggtctcgggtttggtcccaggtctgggttcatatcctgatcctggtcccgggttcgagtttgggtcaagattctgagtctgaatcttggataagggttaacgggttcgagtttgggtcccgagtcccaatcttggtctggttttgggtccaggtttgggtcttaggtcccagggggtcccgatccgggtctaggtcagcgtccgtgagtcttgtactaatttttttttaatatattgaaatagatttgaatcctaaaaaatttaggtagggcgaagcgaatctaatctgaaattcaataagtatctgaatgtttcgaatcagtaagtgatctgtcaaattggagctccaacctgatccaactaaagggatctttttgatatgcctaaacccacatactgcccctaaaaataaaaaaaatgtatatatct

SEQ ID NO: 398621 - DNA, 716 bp, Cannabis indica
ttacaaggggtacgaggagatgtctgttgcaaaatcttcctcgctactctgtcggaggccgcacagtaatggtagttcaagttggctcttggaaagtttagttcatggaaaaccttctcttcggaattccatgcacaattctcttcctcacgccaactcccattgcatctaggagatttggtctaagtaaaacaacgaccaggcgagccactccgggcatacattagcaggttcatgacgaaagcaaccaaggtatcacgggtaaccgaggatggaaagtaatccgcggtactggggggcattgaagtccatggcaaattatggaaggatataaggaaaacggaccggtcgactcaatgagtgatttccttgaccgagccgaaggtttcatcaagctcgaagaagccattcagcgagcagagggtgagcaaaagccgaacaaaacgaaggctccctctactggaacgtccgcccagcttccccaatattccagcaattaaagtggcaagcgttcaggcaacaaccacaagcaaggaaacgggaagaaaggaaagttcaccgaaaaacccggacagactccccgtgatcgcgccaaacacactgcattcactatcttaactgaagatatagaaagtgtgtatatagcgactcaatcgctaattccgtacaagaagcccgggcccatgagaaagatactagcaaaagggacatgacaa

SEQ ID NO: 398622 - DNA, 1118 bp, Cannabis indica
ccaggcaacaagggataggcgactcgagcatcctcgctaaccaatataaagcaacagccaggcgagacacttaaagcatatttaagtcattttagcacagcagctacaagagttagaaatctggatgatagtacacaactcactacccttcaggcgaggatcactactgatctatctaccgctaagggagaattgtgagaccacttacagggtcgtccattgaagaataacactgagttcaacgagagggctcaggtgttcgtttgaaaagaagaagctcgaaaaaagatgaacttgttaaaaactggctcgggaggtaaacccagcaatgtttcaacaagtactgtctcaactagagttgacaactttagtgcctctggctcaaagaaaaaagacaattccaaggggtcgtcaaaggacaaaaagaaacaaaagaagcacgataagtacgtgctagtttatacgatttataccgagcttaatgaaacttaggaaaatatttacctcgcgcatgagcacaaagttaccttcagtaagcccgagcccatgaagcatgcgaggcataaaagagatcctactaggtattgtaagtaccataaggacattgggcacacaacagacgagtgtcatcagttgatagatgagatagaaagtcttattgcttgaggccacttcaagcagtatgtgaagagaaagggcaatggatataaccagcccaatcagcccaacaacccaaacaaccagggattacaacctcctcctgttgaaggagaggatatcctggttattttgggagggccgcatattgtaggagagagcaacaacgcccaaaagcagtatgtgaaggaaatgaaaaatgagtagttggtatttgctctagaaccttccaagaaggtaaaaactaaagaacctctgatcatattcatggaggaagatgaaaagaacgtgaggtgtcctcacgtcgatccattggtgattacactatccagctcgccaataaaaggataaaaagggtgttgacagataacgcgagttcaatgaacatctactgcattagtctcattcaattcattcattctccttttgaattcttccactgtagtacctctagcacaagc

SEQ ID NO: 398623 - DNA, 568 bp, Cannabis indica
atgatgtcgttaattttgtaactaatttgtcgaatccaaatgtctctatcttatctacaaagctattaatatgaatttcaatcgaattaaactccttacattaataaaatatactgttatttcaagaagtcaattcaatcaagaataaaatgatgctattattgatctgatccaattaaactaatacaaaataatacacattaataattagacactttaaaatatcaaataccataaaataaaccttgaatttttcaaaatggtaaaaataaaacctgaatttaatttttgaaaactttttttttaatataaccaatttgaagacaattactaataagaacagatacaaaaaatataaatagtttgtcatataacaaaacagtagatctaattggtaacttttagtccaaaatagtatttaccctattaatattaaatctcacacattctgatacgataaataatagggttgagatgcaaaatgaccctaaatttgaaaactgatttagtaaatgtccactttttttttaaaaaaaaaatggtcaaatctaataaattagctaataaa

SEQ ID NO: 398624 - DNA, 996 bp, Cannabis indica
tgtattaaataaagcattatgtatttatactataagtattgctattaggtattagtgatgtttaatactttttaaatatatcattctgcgattgactagtgatacttcttgaaaattataacttgtatgagacccgatatttaattaaactaatattaatattgacatataagaggatactaatcaccgatatcttgctagtgtatttctcttatactataagaaccacttacaataaatgaggatgacattaattaatgttaaaattatcttttcatagaaaaaagaaaaagtagttgatcatcaatggatcagagccatcctttgtcttactgtaatggtttattacaagctattaacacaataaaagaacttgctgtgtgcctcaattgatgggatattttgggacgggcacaattttcttatcatccacaacaaacttgcgattcaatctagaaataataatgatgttgggattcgcacctaatcatggtatacaatgtatatggaaatttgattttctgtgatcttttataattaaatttgttctttaaagtaatagttatagctactaaaaaaatgggtatacttttctctaaactttaaaatactcctcttatttttctcaactctctctctctcttcctcctttttctctcaaatcaaactcaaaattcacaaagcctccacgccgagccacctcttccaccgcacaaaacccacgccaatccacctcctccaccgcaccgctcgaccaccgtgaccactatgaaaaccgaccacaacgaaaccccacgccgatccacttcctccaccacgaacccatctcgaccgaaccaccgggcccgatgctcatgcgaatgggttggggaagacgaagacccgatggggtccgatgcttgtgttggattttctcattgggttcgatgacacctgatgctggtccgatggagcccgatagtgttgagtgatttttcaaaaaaaattgtgttgggt

SEQ ID NO: 398625 - DNA, 584 bp, Cannabis indica
tttgcacgaagggatcatgttctttttagagcttaaactcgggtatgggtaaacccggacccgtagaatttagaggtgtcaactaagcccactgatgggataaaatataatatatcttgactttgtgccaattgggtgaggcctaattcacaagataaaggtatctagtacgagtggggactgatcatgatgccacgtgtcgtgagctattgtgttggtactgagaatgtcagagaacatggcgttatacaaaaatatagttgccctttggtggtgcacacactccctcggtctgatgcaagggataaactcatgacatggtggggtcctatgtctggaggatgccacataggataatatctggaggtctcgaaatgtctcttcaattgtctgtatccagattatcccatgaaaacatctagatagattatgatcgacctttcaccttttgggccaaacatcattttctcaaaccgaaatggtccgaccttgtcatgtttgtaagctagatttacaacccagatccagagccatagcttgaatctgtaggtgggttgatgtaatgaccgctctagtaatgtgga

SEQ ID NO: 398626 - DNA, 634 bp, Cannabis indica
catcacacttcaatacattaccacacaaaccattaaccacactatccacctattccaaatctaaacatacaaatttattctcaaaacatcagttttaaaaaaaataataaaattattacatgagttttattttgtatttaattgtaaaaaaaaatttaaaataatataaatatatttttagctaggggtgttcatctgatccaatctacactattttgttcatagtgcatctgatccgcactaagtacggattttatattttgaatccaatctaatccgtatagtaactcaaatccaatccaatctgtaaaagtggggattgaatcggttattttggattgattactttttactattgaattatttagtattgtattagaaaaattttttttcacataactaaaaataaataaaacaaattattgtcattttatgtaacaaattaaaatatataaaacaaaaaaaaattagagagaaacaaaaaaaacaataacaaatttaaagcaagaaaaaaacaattatatatctattctatataaaatgtggctatataacagaatttttggttttgagaaattattgagtgaatttttaaaaaaaaaaaaaaataacaaattattagatgttgcagggt

SEQ ID NO: 398627 - DNA, 1694 bp, Cannabis indica
taacaacgaaccaatcaacaagaaaaaaacagagctacaaataaaaaaagcaacctaaccaaaaccgaaaacaaagaaccaagtccctacagtcatcaaccattcttgtgtctctactcaatgtagtctatcctaaaattggagttacccagatccttaggattgatgatgccagtggtaattcgtcgctttgggccaactttttcactattagttacatttttgggcaaactacaagtaaatattctttttattgtgtctttcactttgtacaatattctatcaatattatccaattgaatcatgccagagtttgccattcatgttgcaccaaatatagtataccaaaacacaaatagtagccgataataccttcttttaaatttactcatctcggtctttccaaaccacctgataatccgatgcaaggaatttgtgcaaattccctaatccaaccagtctttcacctgcttcaaacagttgataaaaaatgaacactaaaaattagtgatgaactgtttcagttgcccattacataatagacaagtaacattatcagtaatgccaaacttcagcaatctatctttaattttaattctaccaagcataatatgacataagatgaagctatgcttaggaatattgtgtctgctccaaacaatattactccatgtgactttatctggattagaggcaagcatttgatatcctttggtaatttgaaacctgttggatacaaactggtttatatctaccaatctcttagctttttctttgatcatgctttcttccaataccaactagcttgagttggagctttatacgttccaccagtcctcttctttcacatagacattatgaatctatttcacccataaattgtcttcctttttggcaattgcccaaatatatttgtgttggaatatattttatcaggacctagatttactaacaagtatgtttttaacatcttaaatatgaatttctaacaatgaaacttaaacacatatcaagtatgagaaaccttaaattggttgcagcggaattaaatgacttcttccactcagatctctaacctttgttcctctctatcacagagtataatcaagatttgagcccgacactccttcagttgtttggattcttcacagtcttacacactatgattgaggactaacttgctatgggtgggcatgcactcaatcactaaggctcaaaaatattttgtgaagaacattcttagatttcaaaattagaaagaaagaagaagaagaagaagtctcaaactctatacttgtctgacaagttgtaaactaggtttagagtcattagttggattataagactattcttttctttttatactaattcacttaggcttaggattgaattatatggaataaaaaatgataaaataatagcaaaaataaagagtaagtggtcggccatatgtgggccctgttgggttttatgccctcaataaaactcaatttcaatgcaatctctattatttaaatatcaataaagaaacaaaagtattttcatcacttattgtgtcatttggttcatgttatcatttatttgtttatttaatttataaattcatccaaatccttatcacatttatattcttgtttattctgtcgtcagcaccatggaaagtaatcaagattatgtgattaaatatatattcc

SEQ ID NO: 398628 - DNA, 1541 bp, Cannabis indica
agagagagagagagcaaggagagcaaaatgtgtttttcttctattttgatattttatgaaaatgagataaatacaatatgttttattcaactaaaattaacttaattaaaatttaaacagatttaatacatcccacaaaaagacaaaacactcaagagcaaaatgaccattttgcctctcccactctaaaaatcataaaaggtcaattagcggtacttttggaaattataaaatcccaactattcccgacattcctaatgtctaactatattgctccgctatactaaaatactaggatgtgattctaatagccaaacaccacgttttaatgttgctgggcacaaaacatgtaaaattatgaaatttctatatatgacatataaaatgcattctgaattaaaataaatcatcgtaagaaaataattcaaaattaataaataatttccataactaaatcctaattatttgctaatttccaaattaaagctaagcggtctttacaagtgaccagccacattgattacctcgagatgctccttcaccgaattcccgaggggcaatgctttggaggtattgtgcttgggccaagtgatcccaggcctagtctttgggtggaacaattatttgctgccaagaagagtacttgggaaccttgtaatcgtaagtgtattctttatcagtgaggagacccgccgatcacaagttagcttcgttcaaaaggaatttgcatgatcgaagactgtaagggagagtcagcaggcgcctgtgcccgctaaccatctcgggggtaggtataggtctcaccataagagttgtcagaacaaacaaaacattagtcaagctcttgaaaaaggaagattgatgtaaataagaagaggataatcacttacgaagtttgcgaaacgtggttgtgccaacggaggagagaccagacgtccagaagaagttatccttaaaagataccttatttggcaagtctacaataatttttggctcgctagaatgagtaccaagatagaagaagcccactgcagcgttcttcctcgatggaacgactttaactgagtaaagatactcaatctctacgggtgtgagacaaccccaattcataattttgtacaagactttcaaactagtgagaatcatgtaggagatgggattcagctggaatggggcaaccccaatgtaatttatataatcattgaagtagtctcgaagaaagaggatggcccgtgcacaaatatgctcaagactccaagcactcatactggttgaaccactagtactagtctcaccactggttcctgggttactgctggcaaagcgtgtagggggtagcaactgaattcaccctctcgtactgacctaacctggcatgatttcccaagtgcaattcaataggtctttagcatcttgccagtatagcctgagatagatcgcaccttcgattctatcaactcagcctcgaaggtgacactgggatcctgaggagttttagacgtatgtggcttgggaggtattatttcgaaatccaagtcacc

SEQ ID NO: 398629 - DNA, 737 bp, Cannabis indica
ggtaagcacatcaaaagaagacatatgtcgagctgaaaaaaatgaagaactcaaatacgctaatgaaaagtatacttagcatggaataactcattggaaatataattcgcaggttatatttataactcggctagctaaatagccttctgcgagacggaaatgtacgaactgctaacttatgtattgacgagaaaccatgtcggtgcacgcgttcatgacaatgcctcaacctcgctgtgtgaaagagaaaacgacaacactaaaatacttagcgtatattataagatattcaaacttagtatagatagtgtgacgagtcaagataacagacagtaaggcgtttatctcgctagaagatggtatgcatgcgaggaagatcatctcgacaccagaaagtatagttatcagagttaacacaatattagtctcaagaagccaaatgacaagcaactgctcgctatcaaagtgatcttggctctattctaggtgaggcatccctatgagataaggcttacagtatatttttgattacgcgttcatctcggtccaataaaagcgggatattcacatctgtgtaaaaacctcatttatttggcttgatttggaataagatcccacaattttagggataatggccgtaaacacattttggtcagctttgtaattaactgccattatacaattataaatagtggtagacaagatcacaggggcgggggacgaaaaaactcttatga

SEQ ID NO: 398630 - DNA, 1453 bp, Cannabis indica
gttttaggactgtttgtgatgctcatttggtaggtttgatagctatgaggtggaaaagcaccaagcttgagctttaatggcacttttgatttaagggcatggttttaatttctgttacgttgaaactgttatatggataatatatatgtgtcatatgaagtttggaatgaattggttaggtttggatttagtttggagagttcaaagttgaggaaaatcgtgttcctggcagttcagaaccggaattccggatgtaccaactggaattccgtttggttagttttcggaaaaatcgaatttcgtattttggcaattatttttcactcgggtgtctgttttggacgttctatataccgtttctaagcttgcaacgagctctatgctatggtgtatattttaaaaccaaaatataagtttcattttagtgaatttttaccttgaggtttggtaagaaaccctaggtgttcctttacagttattaagcagtgttttgggataatcacttattggtttattatcgttatgacatagggccgggataatcgatcgttctccaagcaggtcggccaacatacctaaaccagaacttgaggtaagaaaagttatttgcactgctaagcactgtttatggttaatgatatgattgttatggtctcgattatgatcgagatcccgatatatatttgttgtgactcgattttgattgagattaataatatgtattagttgtgactcgatagctctcgaggtaatgatgagaaacaattattgtcgtttgtgaattatttatgaatgggggaagaacacagttatcaccgttgttgtgaatgaattaagatacggttattactgttatgagtaattactcctgaaactggggataggtttcttacttatcgtttgctttaccaggcaacggtagtgacatacgcagctcgtggataacgagtggagaggattggtaacggtcattaccgttatgagtaattattcttgaaaccgcagataggtttcttacttatcgtttgctctaccaagcaacgatagtgacatacgcaactcgtggataacgagtggtgaggattggtaacggtcattaccgttatgaataattattcttgaaaccacggatatgtttcttacttatcgttttctgtatcgggcaacgatagtgacataagtagctcgtggttaaagagttgtaagggtactttataaagtgccagtattgtgtgataatgaagttctgaaatgacttaagcatgttattatgtgataagttgtaattggatacatctttgttataatgtgaatgaatggattttagattgcttaagaaattagtttcttttattgtagagtcttagtgactcacgaaatgtaagaattcgtgttcatagagatgtaagattagagtgctttaggaagcactgagattatgtagttatggtaa

SEQ ID NO: 398631 - DNA, 607 bp, Cannabis indica
gaagttccactatttaatttcaagtggggatcatcttattttatcaagattgaatttttttttccaagtttaaaactcactctctcaaattcattcacttatggtgatgaacttatgcggcttagtgtttagaattatataattatgctattttggttatagtgacaaaatacaagttttcaatttacatatagagaaatatccaaaaaacaatagatcttttagtaaagtttattattattatttttacatgaagatgcaacaaaaggatcgtgcctttggaggaaggcaaggaccctcgagctagtggtataactagtagagcaagtcaatataatgcattcacttatttgtattgtttatagctttatgtattgcctttgctgtacaaattcataattgtgtggttctctcctttgagttctaatttattttatttgtttgttgactagtaatggttagtactaatttttcaatccagtattgtattttatatcattagtaagtctccaaagaagactgtgttaaaacaactcagctcagtatcaattaatgaggacaattttaaagtcgtgaagctgttctattgcagcgtagcaagttaatt

SEQ ID NO: 398632 - DNA, 422 bp, Cannabis indica
tacgttagtggcacaatgagtcatggacttcattttactaaaccagattcctatgatcttactgccttctgtgatgctgattgggcatcagatccagatgacagaaaatcaacctctggttttgccatattttttgatccaaatttgattgcttggaagagcaagaagcaaaaaccatttcccgctctagtacagaggcaaagtataggagtgttgctaatgttacagctgaactcacttggctccattataatttttctgaacttaacatacagcttgctcagccccctactgtgtggtgtgataaccttggcactataatgcttacatagaacccagttctacatgctagaacaaagcatatagaattggatctgtattttgttagagagaaggtactgaatcgaatgatacaagtcaaa

SEQ ID NO: 398633 - DNA, 1105 bp, Cannabis indica
agcgaagccaacgaaggagatggccggagaagcgtcgccgcatgaagaagagaagggatagagagatcgggttaggcagaagaaaaagagagagggcttgaaatgtagggtttggaataatatgtgtatataacagggtttttttgggattttttttttctattcatctcaatagtctcagtttataaccgagaccaaagaatctttttagtgtcaattttaaaccgagacttatactcaatctatataaatatttttttaaaacaaaacaatttggtctcagctatacttttagtattggtctactaaccgacactaaaagtcattataggtgtcagttataaactgagaccaaagagttgaggtggtctttagtgtcagtttttaaaaaaaaacatcccccaaactgacactaaaagtctattttgtagtaatcacaggatttttattgaagaagatgaaaccaaaatttagtatcatcacgagattcaatagattcaaacctaattatgaaaattccataggccaacaatctcactttgtctaccttatccccacaaatcttcctagcaaaaccatctaaaatggataggggaggattagctcccaaaacatagcagacaatggaaggtgtccaataagaaacctcatcttatatgtcctgaaagcaaacctttaccattgacctctgtacgttctttcttaaatgagctagcaaggttcttcttaacgatatcaaacttaagtattgcaggaatagatttataattaccttccaacattctgtcctcacattgctgtgtagattgcaagaagtttccaatcttatcgcaaggctcctcctacatcgatggagtcacagtgactttgttctcaaaaatagctctttcagcatcttcaatacttttttcatcctcagaactgtatgggatcaaccactaacacttcatccatggatttcattttgtgcacatttgaagttaaatcaggcccttgattcttcatcttctttgtcgtaggtttcagccttccctgagtcttggaccttgtttttgccatagcaccaggtcacaagctgcaaggtgcaagagagagagagagagag

SEQ ID NO: 398634 - DNA, 740 bp, Cannabis indica
atatatatatatgaatatatgctagttttatatatttgcactactagcactagtttaaatgtgatttatagagtgttagtatagtgttgtttataaatgtggttacggtgttaccaacacgagtaccaggggtacatcgtgcatgtggtacaacacttagtagcttccgggagtacaattatggccctaccaacacgagtacaaggttggtactttagtgcatttcgtacagtggtcgtacttcctttaagaacgttcttatccatttggtgagcttaattattgagctcagggcggcttaatcataaagccggcatcacattatttttatttatatatcttgcatatcttgcatagctggaggaaaagtgagatagagctcggcagtgattgtacatatcgcggcagtgcaacctggagggtttcggtcttttactatttttgagtctgtattttgatgttgtatgctagcgagtcaaaaaaaacatattatatgtacatattagtaaaatgctttgtaattgtattttgatactcgggatcccgatccatatagttataaagatataatatattaaagttatcttttaagtctagtaaatttaaaattcgggcgttacacattatgttcataatagtctaaaacatagtactagtgtagcacctgttgggttttatgccctaaataaaactccatttcaatgtaatccattttatttaacatcaataaagaaacagaa

SEQ ID NO: 398635 - DNA, 831 bp, Cannabis indica
aaaggtccgtggagaaatatatcagatttgtatgacgagtttttgggtttggtacgttttaaaattggaagaggggatagaattcggttttgggaagacgtttggattgacgattatcctttggccactgcattccttgatttagcagtgatttcaaaggggaggaacactcctataaatgaaatgatagttgacgaggggttaccaggtagatgggtggagagttggaatttcaaattcagaaggcacttaatggatagagagttaccaagctttatttcattgatgcaaaaggtggaacatgtaaaagtgttaagtatctcggaagatagccgtatttggaaaccagatccatctggagttttcacttgtaaatcagccttttcctggctgacatcaaatccatcaactaggggtttggattggacaaaaaccctttggaaaagttgtgttccttcaaaggttaaagtgtttggttggcttgtggctttggacaaagtaaatgtccatgacaaggtgaaaaaaaggaagccttttctttacatttccccggggtggtgcgtttgctgcaaaggcagcggagaagatgttggtcacctgttcttggattgcaaatatattcgacgattatggagatatgtgttggcagagtttgaattgtcctgggttatgccaaggtctgttccacaattgatagcgtccaagctaaccggaggcaaacgtagattaaagctttggaaaacagtgattttagcaacaatctgggccgtatggttagaaagaaatgccagaatctttgaagggactactaaatcagaagcggatgtgtgg

SEQ ID NO: 398636 - DNA, 892 bp, Cannabis indica
gttctaccgaaggatctaggcaagtggagaataaactcaatgagttgctattaaaggaggaggtcttctggcaacagagggcaagggtccaatggttacaggctggtgaccagaataccaaatttttccacaagaaggcaaatgcacgaagaaagaataatacaattcgaggtaattatttttgtaaattaaatatagagaaaagtatagtttggataagttttaatataattgcaatttgatgtgtattacatgtgtttttaaatagggcaacacatagagtaaattgttaactagtgtgctttaaaaagtggcttagaataggttgaggaaaggggttttaactcaatccattaagttaaggttataaacttatattaatgcaaacatggtctgaatatagaatatgtttcttaagggtgtcgtaaataaactgaaatagatatgatggatggatacaagtttcccactgaggctatgcatatattgaggaaatgttgtataaagtattatgagttgttaggataaaagtattttatcaatcaaatgttaaagtttatcttggttattttttaggtttatttaatgaagatcatatatggtgtacgagtaacgaagccataggtgatatcacaaagaattactattctgccctctttacgtcgattatgcctacaaatgaaagcattgaggagttgttacaagctgtcgagcaagtggttacagatgacatgaatgaaacactgatgaagacctttacattggaagaagttcaacgagcagtttttagtatgcccgcggataaaagccctggtccagatggaatgagtgccttgttttatcaagaacattgggatattgtaggccctctagtttctaaagcagtgttaga

SEQ ID NO: 398637 - DNA, 1218 bp, Cannabis indica
tcctctaatatatgaattatcctattagattgtccatcagtctaaggatggaaagccgtactgaatttcaaattcgtatccatggcttgctggagacttttccaaaactttgaagtaaacttcagatttctatccgatataatggacttcagagccccatgtaacctcactatttctttaacatataagttcgcatattggttcactgtacatgttgtttttactagtagaaaatgtgaggacttggtaaatcaatccacaacaacccaaatagaataaaacaacctcgtggttctaggtaatccaaccacgaaatccatggtgaaatcctcccatttccattcaggaagagtcaaaggctgcaacaaccctacaggtctctggtgttcagccttaatctactgacaagtcaagcagtgagatacatattctaccatgtctttcttcatcccgtatcaccagtagaagggttttaaatcctgatacattttagtagtgcaaggatgcaatgaataaggagtggtatgggcttcctcgagaatctcattttaaatttctacactgttcgaaacaaaaactcgaattttgtataatagtattccattacctgacactgtgaagtctttaacttgaccaactaaaacctcttctcgaatctttaccaattctggatcagctagctgagcagctttaattttgtctaacaaattagattgtagtgtcaaattattaagtttgcccataagaaactctatacttgatctgaccatgtcatttgctagttggggttaaatcatgatcatgttagatacttgcccaggacccttcctgcttagagcatctaccaccacattggccttctcgggatagtaaaggatttcacaatagtaatccttgaccagctccaaccatcgcctctatctcatatttaatttttttctaagtaaagaaatatttaaggctcttgtgattggtgtaaatctcgcatttttccccatacaaataatgtcgccagatcttcaaggaaaaaaccactacaacaagctctaaattgtgagttgggtatcgctattcatattcctttaactgactgtaggcataagcaattacccgatcagcttgtatcaaaacacatcccaaactctatctagatgcatcacaataaaccaaaaacttctttttatctgatggtagtgctaatactagagctgtaatcaa

SEQ ID NO: 398638 - DNA, 592 bp, Cannabis indica
gtttcttttcgtctccttattaatggatccctcacagaaaaattctcttcgactaggggcattaggcagggagaccccctgtctccctacattttccttcttgtttctgaagctttattagctgctattataatgtaggagcatgataatcatttccaaggaattacgatatgccgctctgcacccctatctctcatgttctttttgctgatgatagtcttctcttttcgactaacactgctcaatcttgtcttgctattaaggctgctcttgattcttaccatcaagctactggtcagctggttaattttactaagtcctcagttcttttttcccctaatacttgtggttcggaggctgatttctttcgtaatactttgggtcttgacaataagcctttcatcagtaaatatttaggtgttcctcaatgttttggtaggtccaaaaagagcactttaatttctttttgcagaaagctagttctaagttgagcaattggactaaccgattattctctaaagctggtaaggaagtgcttcttaaagcgattatccaagctatcccctcatatgccttgttgttggaaattatt

SEQ ID NO: 398639 - DNA, 872 bp, Cannabis indica
atttaatatattatttattttaattataaatatgatcacactagttatttacctttaatttttttttaaaagagatagcatcaatgttatatagtggcatcaatataattttctataatagcatttatttatcgataatgatataatatccttatattttgcaaaataagcaatccacataagcaagcatcttttaaattttaactattggagatgctctaaaagaacaattaactaagagcatgcccaaatgatcaaagaagtcaatgatgtattcattgcttttaaaaaaaggatggcctatttagttagatcaatggttgttcataaaattgttaacacgtttcaaacctcgactaattcggatcaaatgaatttggtgatacaattttttagttcaatcacagttttagaattctcgttaatggttcaaatcaaactaatccatacaattcttttatacatacctaatatatatatatatatataaatatacatatatatgattgaatatttgatatttaaaaacaattttagatagaatatgtattgatattgatttaatattattaatttccataatatttttttttttacttttatttatatattatataaactttttcaaagtaaaaaaattaccaaaaaaaaatgagctattacttaagaaaaaattagacaaattacgaaatataaactatagttttgaaccaaattaatttattcttaagtggattggtttggtttagcttgaacgtttaaggaattatttcacaaatacacaaaaataataaaaaaaagttacaaaaatacggttgtacggaattttaaatatttttacgatttttattattattttatttacagaaaat

SEQ ID NO: 398640 - DNA, 474 bp, Cannabis indica
agaagaagaagaagaagatgggataaggtagaagaacaagaacaacaaacaaccccttcttcaccaaagtgctttctttctttcctttcaaaaatttaataaatactttttctaacacaaaataaaaaataaaaaaattattaattattatatcaaacaaacgaacaaaattaattaattaataagcataaatataaactaaactagacaaaagaaacaaattattttaccttatatacttttttttttaaatttacgttttgaattttgaaagtggtttcagagaggattctctacgattttttttgtgcaatttaagttgttacaatagaagtttccatgtaaaattatataaaaatacaaaaaaaaaaaagctaattagtaattttttcccctgaattttgatatgtaccaaatcgtgccccctaaacttttttgaccgttaaaaattctccccgaactattgagattgtt

SEQ ID NO: 398641 - DNA, 1011 bp, Cannabis indica
tgccaccgagttgatttcacatccgtgcagaatattgggtgacccgtcttgcccatcattatcgtggaacctcagcctcaaaaatcccacagtttcagccacatctaccatgtcaaactgttcttcctcctccataattcagaggcgctgttcttcccttgaatagtctgggacagcaaacatagcattgaaggcgtcaactgtagcgggaacctttttaccccgcaccttaacttccccatttctctgctcgggccaattgtcgagaaattcacatgccatggtgacattggcccgacccttaacatcaacaaaactgccccatttcattctttcaatttgggttcgaattgtctcaaacctcggttgacgcctcaaaggattttcaaggaattcaataccccggtcctcaatgtatggcctagccttaagcctcatgaaccggttttttgcagcctcactaacaaaccgagttcgatcaaaacccgtaggtggtgggtttgatgttgaaccaccttcctcattgtttcttgttcttttaggacccatattagcacaatgacaattattttcacaaaaaatcattctagaaaaaattgggcagcacttccccttaaatttctactttccccaaatttttaaatcaccagaacaatacagccaatagcaataataattcaaatctacaatataaacccaacaattccattatcaacaaaaaatttccaaaatattcaatatcttcaccaaaaatccctaaatgctcaaccaatttattaaatatgatagagagtgatacttacaaactcgaagaagccactactctacctccattgttgaatgttcttgaaagcttgaggttgaagatgaagaacaatggtattttcggatttggggtgaaattatattttagggtatgattttggatgaaaattgggagaatgtgaaaaatcttagattgacaacaacttgaaaaaaaaaactgacaatcattgtcaaatctagaaaaaa

SEQ ID NO: 398642 - DNA, 535 bp, Cannabis indica
gggaaaaaaattgcttttagtagggaaatttaacttttgtcggcgcacatatgcaccgaaaaatgtcccaaaaaaaaggtgggaaaattctcgcgtgagaaggtggtaggtgggaatacttttgccggcgcaaatgtgcgtcaccaaaagttttaccaaaaacacactgtttcaatttaagttaattttaaatactatgtcggcgcaacattttcttttaccggcgcaacaaaatgcgccgacaaaagtctatatataacaggggggacgaagcccccgttcaccatatcttcttcttcttcttcttcatttttcttcttcttttgaaatttttaccccacaaccaccgcaccaccaccatccaccaccgtcgaccaccaccgtacaccactgcaccaccaccactacttctcggattttaggtatttttttataatataaatatttgtattttttatataaatgtagatataatattgggtatatatgtgtacacgtatgtatatatataaattaaactttattttttttattt

SEQ ID NO: 398643 - DNA, 732 bp, Cannabis indica
cctgtgattacagaagagcaagcaaattttctgatgacagagttcactaacgaagaaattaaagcagctgtgtttagcatcccaggtgggaaaagtccgggaccagatggatttggaagttggtttttccaagataattgggagctatttggaaatgatgtatgtgatgctatttcctctttcttggaatcaggtaatcttttaaaagagattaattcaactatcattaccctaattcctaagattacatgtcctaataaagtgagtgattttcgacctatatcttgttgtaatgtgttatgtaaagttgctaccaaactgatttgtacaagactcaaaaatatcctccccaatttagtctctctaaatcaaggtggatttataaaaggtagatatatagcacataacatcatgatatgccaagatctcattaggaattatcgtaggaaagggtctaagcctaattgcatgatcaagcttgacctgcaaaaagcttatgacacaatggattgggacttcctggaagaaatgttgagtcatctgaaattcccggagaaatttataagactaatctccacatgtattagaactcctagattctccttgatgtttgatggtttatgcatggtttttttgaagcaagaaggggtttgagacagggcgatcctatgtccccgttactatttgttctggggatggagtatcttagtaggatcatgagcaaaattggga

SEQ ID NO: 398644 - DNA, 552 bp, Cannabis indica
tcagacaagagagagagtctagattcatctgtagaatcaaaaatcgttaatattctatttatatggattcattaagtttatggttagagttaaatgggctaattagaaagatctaatagcttagaatcctcctcatggtcgaacccatttaaggcccacgagttagaatttttccattcttttgtttccttaatgaaacaaaattatctttcttcaataatgttatttttttgctctagttatttaaatactaattctatctatttaataattatcaaataaaattactatttaaatatatttattaattagacccgttcaccttcaaaagtgatcaaccgataatggggccgtacagatctgatgctttccacgtttttgcacaaataagaatgaaaagcaataaacaacaagatttgttatagaggtttgacccccttgtgatagcgggtaatgacctactccctttttagttgtatttatatcgagggaaataccatccaggtcattatatgtggaatctgctatagcacccttaggattacaaggtat

SEQ ID NO: 398645 - DNA, 859 bp, Cannabis indica
taactcttttctttgtttccttgggcatgtacttcctccttctatctcctcaccatgagaactggtttctcatctctggatcttggtgcagaagccttcaaactagggtttatatcttctaactcttctctctgtatttctaatctgtgttctgtgtaatctatctttgttttgctttgatttcccgctttttatattagtgtagagtcggttgatcatagatctaggagttagttacaataacagttgtaactaactcctatttcttgatccactagaggcgaagccacctaggattgagtccaacttgttttgtttctgttgtaaaggctgatgtggatatttatgtgtataagggactggttataagtggaatttactcaacaacgttatataataatttctaataactagctaccacggcatatggttaataaaagtttgccattcttaatcataatcatattcaaaccatgcgaagaagatgactgaaacttaatttgatctcggataaattgcaggcagtggtggttagggatggcagagtagagagaaggggtggtggatcgacaaactagtgtgaggtcttgactcgggggaggagaacgatttggaaaactaagaggacgaagtcttcctgttctttgagggattgttttatttttaataatttgaaagataaaaaatattcggggtgtactaaacaatacccttttggtaaataaaatggggtgtgattataaaaaagaatatttaatggggtaaatttagtaatggggtgtatttataatttttatgggtatgaatataatctcccttaatatatttaagggtaatactattttccactttgtgtttt

SEQ ID NO: 398646 - DNA, 943 bp, Cannabis indica
tacccctataagtaattatatccacacacatatatataagtaagggcacatttttcaaacaacaaacaatgcataatttttcaggttttcatatttatcaaataatgccataaataaatcccgaatatttattttgggccctaaacccggtttggcctaatatacctagttgtgactataccgcgctggcttgtcagaaaacacctatagaaagatagcaataaacacactatataataatatagtctacaagcacgatatatattaaaaattacaagttttacccttcttgggtcaaaattatgaaaatgcccctggtacaccaatagggtcttaaaatgcaatttattagcatagtttcacttattaaattatataataatataattcgacattattacataattaaattagttagggttgctaatttgatttcataaaccttagggcattacaattatcccctccttatagaaattttgtctcgaaatttatatgaacaactctgaatatttctactgcatatccgtctcgagttccctggttgcttcttctactgtattgttcctccataacgctttgattagtgcaattgtcttgtttcacaagactttttctcttctatctaatacttgcacttcttgctcttcgtatgaaagatctggctgaagttccaatgcttcataactcagaatatgagatggatctgagagatacttccaaagcattgaaacatgaaacatattatgtccaggtgctagcgctggaggcatagccaacctgtacgctacttgcactattctctcaaggatttcaaagggtccaatgaaccttaggctaggctttcctttctttcaaaagcgtttaatacctttcataagagacatttgaagaaacaccatatcttcgatttgaaaatcaatatcccattgctctggatcta

SEQ ID NO: 398647 - DNA, 576 bp, Cannabis indica
tattgaacacccaccccattccaaagaacatatatcatatacattaaaacagaaacttgagattagtcattcctcccctccaagggaaggaaaaatttgagattgcagcctatttccttacctgtatgtataatggaagttttgtcacctttgacgtatattatgctataggtatttaatgagataattcaaatggtgttataattttaattctttcaaaaatatccaattgatgaaacaaataattaatgaaaaaagggaatacccttctccaggaatgggtatatcgacagaaagagaaacaatgaagtactgaaaataagccatagtattggtaaactgcatttaaaaataccatgaaagaaatttcgccatatcatctgcatattgattagccatgggggaggtgcaccatctggcataccaagagctttttttaattcatgtgatagcatacatggcttcatctctctcagttttacctgtatgtgaaaagagagcataaatacagtagaatctctatttaagaataacttgtaatttgttataaaaaaaatcaagttccgatttgggcca

SEQ ID NO: 398648 - DNA, 534 bp, Cannabis indica
taagaaaattatgctaaaacacaaaattgtgaagctgaaaaaaaaactaagaccttatggcatcagctttttcataataaccgacgccataggacccctatggagccatagaacccctatggtgtcgattattgtataataaccgacgctatagggtccttatgtcgtcagttttttcataataactgacgccatagggtccctatgccgtcgggtgttatttaccctacggagtcaccaagaacagcgccggtagcgaatttcatcaaaaccgacactaaaaacccttaaaaaccacctctaaagacccaattttgtagtagtgtattcttatatagaggtatacttttttcatatggagcttagaaaatgtataactataattgtaatttagggattagaactataattgtaatttagggattattcttatttataattggctcaaattgggacttattttttttttttttataacaaaattagagattatttttcaatagagtatttttagataaaagttctactgtatta

SEQ ID NO: 398649 - DNA, 588 bp, Cannabis indica
gtcaactcctgccaagactttgagaaggccttggaagacgggcaaaagatgtgactgagacaccaccaatcgaccaaaacttgctacattacgccaccaatcctcgaactgctaacaccactccatcgaagctacgagaatgcccgtggcgatgatggaaaggaaagagctaagaaccatatactggacaagattgttaagctgcaatgaacaaaatggtttgtggttagtgattgcaagactaagtaattatacataaaacctccatctatagatatattttacgaagttataattaaataaaataagtaaaagaataattaaaactccaaaaatggctggtggctactcgatcaacgtgttcttacatcgaatgtaaaagagtaacaatgacaataaaaactccttaatacctattatctaaaaaaatatttttactctttactgctgaataatatacagtaagcaccatattatacatacatgacatcttgattttacataaataaatatataaatataaaattattcttatataaaaatatacttttttaatacggaatttagaaaatgtataactaattataa

SEQ ID NO: 398650 - DNA, 574 bp, Cannabis indica
tgttgaaagaaatgattattttagtcacagctgaagttcaaaatattacatcagtgatgcgatttacaatcattaatctcataagaacttccccagttcaattgtttatttaagcatctggttttgatagaaggggttttgatgttcagggtcaatccctaacatattccctcaattgtttcaatatctagggtcaatccctgtcatatcccagggtagcagcttgatatggcaatcatagcgagccggtatttacttattttgcaatacttttatgtaattactttaccaaattaactgccccttgtcttcttgtgacgcgttccctctcgagataactgaggtgtcctttcatcctgcaaaggaaggttatgatccctagtcactccagttactgggcagatcagactgatcatgggcattgtcctgcccctttacatatcgttgaaagtgtccttgcactacgagaccttctatctcatctttcaactgacgacactcttctgtggtatgtccaatatctccatggtattcacaccgtttcgttgggtccctttgttgggttttgtgccct

SEQ ID NO: 398651 - DNA, 706 bp, Cannabis indica
ttttttaaaatatataaaaaaaacatcttttgtgtggatgcaatgcaagtcattttagagggctataatttaagaggattgttttgttgacccgttatatgatttctattttttttaagcaaattgttagagagtttacggtaaaaactaaatacttacaaaaaaaaaaaaaaaaattaacattctatattcattttaatttacttatttaatttttacttttacttttatattttttaaaatatacccactgtgatcgagattttcggcaaccaattaaatgagataatgatgagaactttaaaataattaatgcatgtgatttttacgtggttcgggcattaatgagccgtaatctacgagttttttttattaatgagagtttttatacaaagaatgtttttggtgagttttttctctctttctgcctgaacgatcactctttcctattttcctcaggggtatttatatagattggtagggatagttcaaaagagataaattgtctttgagtgacatgttgggttttgtgccctaaataaaacacatttcaatataatcagatttactaataaagatcagaaatcacattttatgttgcatggttcacattatttatttcataattataaattctattaggtccagaacatatgtatttattcatgattatagtgttgtcagcacagtagaatataatcatgat

SEQ ID NO: 398652 - DNA, 540 bp, Cannabis indica
gaaaagtttttccctaactctcgagaatttcaaacttctgagttatgactttcgtcaaatatttctattctttaatatgttaagtactcctagtcggcatatttgcctgtttattgttcgatatccctaccgaacactcatcttgttatcttttctagatgaaacccttgtgagttttggggaagcgaacactgaattgaccaggatttgcttcaactcttgtacgaggactaccctcatctttgttctagtctgacctcttcaagcgacagacgtcttaactcactcttcccgcccagccataggataatggctcgcactaaacagacaatgcgtaaagtcaacgcgtctgaccctcacgctgcccagcacgctaccctacctagcgccaaacatgatccacccgtccaggaggagggggatcatgaaggggacgctgaggtctaggagatagaggaacagggcgatgtccgccctggcagtgttggaaattattttcccaggagctagatttactaacaagtatgttggattaacaac

SEQ ID NO: 398653 - DNA, 930 bp, Cannabis indica
cttcggtaaaacctaatttttcaattcataataatgttgatttgatgttggatttgatttgagaaaaatttgaatgttgtttctgtaacagtctaactattaaaggcgtgttagcgtaatttttaacgtactgtgtagctcgttgctaatcaacgagattattgaaaatcgtgaataattaaaattttgcttaattatttaaaacttaattatttaaagtcttttcttgacttttttgttgaagtatcttgtaactaggtgttggtatgctgcgttggtgatttgcgactcggttttcatggttttcttcttgattataaaactctgttctgttagtcgatatattcacttcaacaggcagcattgcttccaagccaaatgctagcgagaaaggagtgtgtcccgtggttgtcttcttggtagttctgtgggcccagagtgcctgaggtagctcgtcaacccatctgcctttggcagcatctagcttcttcttgatagtattctttaaggtttgattaacagctttcacttgtccatttacctgaggcctgaatactgacgagaagcttttgataattttattcttctcacagaattcagtgaacaagtcgccatcaaattgggttccattatcggatactatcttcatgggaattccaaatccacagataatgttcttgacgataaagttaaggaccttcttgcaggttatcgaaacgaggggctcggcctccgtccatttactgaagaagtcgactgcgactaccgcatacttagctcctccttgcccagtgggtaatgccccaattaggtcaatcccccatataacaaatgggtagggcaaggtcatcatttaagtgttttttgtggtacgcgaggtatatgtgaaaacctctgacacttatcacatttcttgacaaactcgtgtgt

SEQ ID NO: 398654 - DNA, 812 bp, Cannabis indica
gaaaaaaaaaactgaaaagaaaaaaaattattttttaatttatattttttaattttttaagtgtaccaataaaattgtgccatgtgtataccgtatcaaagtagatgtacacatggacaatccagcatgacacttgacacctaaagtggatggaaacggtaaattgctaacagtttcctaattttaggggttttactgccaaaatttgagttttgagggttaaatgcaagtaaaataaaaatatttgaaattttgccgccatttacccttttaaaaaagcttttatatcaacatggaagcttttgtcatttcccaaaacatgacaaaaaatatgttttaataaaaggcagtataatatcgtataaaacttataaaaatatacagcaagaaagtaagaaatatcgccttacatatttttataataaatggaaaaaagtcaatatatagtgtaattttttctttatttaaggattggcatttttggtatttaattttcaaaaataccttctacaatcttaatcacgcatcacaaatattgtgtatatatgaaaattctaacgtgggaactagaaaggggacatcactttttactccaccagtaagtatgaaaattctaacgtaggaactaggagggggatatcatttttttctctaccagtagaacgtctctatttttagcatttagattataacttaatttttttagagatttttttctataataaactaaaaatgtaacaaaattacatttatgacctaagaaaaggaaaataaacaaaaataaaaactaaaagttgttatttacaaaaata

SEQ ID NO: 398655 - DNA, 630 bp, Cannabis indica
ttttatttgagggagccttttgttgtttgggctttcacaaccacttttccaatgtaacctaattataaagggagtatagactctttgagcagtcttgaccttttactggttacttatttgatgttaagggagatgtatagcctcttgggccgcgctcagtctttttcaaatttcatattaaaggttaagggagctgtttagcctcttggattgcgctctgactttttcagttttgtgatgctattgagggagcttataaagcggcgctcgacctcttgcattgcattcgtggcacttaaagtgcattttaaatgtaaaaaaataggtatttgttacgaaaattatgaacaatacgcaagtgcacgtaatcaagtagtaaactcacacaggtgaggtcgaaccacagggaattggactgaataccactagattaaatttatgattctacttggcaaactaataatttttatgattaaaacacaaaacaagagtatcaagaaactaaaagtaacagcgaaagattcaaccaagatgattatatagggaagagaatcatgttgatttatttacccaattgttaatgctaattactatcctttttctttatgtgaatgacagattaaacaaatt

SEQ ID NO: 398656 - DNA, 625 bp, Cannabis indica
attatatatgatatatattttatcctgtctggttatgagaagcttcagagaaccatctttctgcaacattgagtttataaaggacatatattattgaagagaaaaagaaatagtaaaaaaaagaagaaaaatgcatcatctctaatagcgtaaagcaaagagaattggtgattgggagagataaaatctcttattataaaacaagcaagagattatacatctgtcatcttctgtgtacattctcgaccacatcaaagaaaacattttatacatctgtgtgaagaattaaaattccaaacttatatataatgaaagtttgattgaagaaagtgtttcccttcaagaaaatcacactaatcttctgaatgtaacttcattttcagagataaagaaaccgagcctagaacaacaaagatataaagaacagaggaaaatgcaactcgactaaaaaatatcaacgaagataaaaattaacattttttttaccatttttctcactaactaaatagaaaataatcaagaaactatcaactcaccaagataatcaactgggattcttccgtttgacaatcggtcggtgggcgtcgtgtgtcgaaatctcggccataggcaaggtgatcgactc

SEQ ID NO: 398657 - DNA, 1165 bp, Cannabis indica
aaacccaacaatttcattcattcacgggctattctagatgctaaagtcgaggaaatgggtgaagactttgagttgcctactcatggaagcgaaggagatgatgaggaaagtgagagaaacttagtagagaatgctcccttagacgaaccattttcttgctgttatacccaaaatttagtgagcacattaaaggaagacacatgtcgagctaggaagaatgaagaactcaaacacgcaatcgtaagtacacttggcatggagcaactcgttagaaacacaatttgcagagtatgtttataactcggctggctgaacaatcttctacgagatagaaacatacaaactgctaatgtatgtatcgatgagaaaccatgtgagtgcaagtgttcatgacgaggcttcaaccttgtccgtggaagagaaatgataacgataaaaacacttagcgtatattacatggtatacaaactaagtataaacagtttggtgaatcaagatgacaaacagtgaggcgtctatctcgctggaagatggcatgcatgtgagaaagatcatctcgacaccagaaaatgtagttattagaattaaagcaatattaatctcgggaagtcatatgacgagccgtagctcgccatcaaagttaactcaattccattcctagcgaggcatccccatgagataaggcttaccgtatatctttaaatatgcattcatctcggcccaataaaagcgggatactcacagctgtgtggattctaaataaaaaccgcatttacttagcataatttgtaattaaatcccatgatttgagggaataatttttgtaaagatgacagtcaacttttgtaatttaccgcccactatgtaattataaaatgtggcagacaagatgaaaaaggggacggaaaactcatacgagggaggtcctgaaaaataatcagaaatctgaatatgattgacttgtggactatgcagaattttaactgcaaaaccacgtaaaaaaccatgtgtttatatttttattttctatagcttttatgttttttgtgtgaaatcactgctgtgaggttcaaattagttaatgaaaatctgcgttaacagttttgtactttcattgagagcctctgtgaaaaaactcagagaaagcctcctgacataaaagtaa

SEQ ID NO: 398658 - DNA, 873 bp, Cannabis indica
tgctactgagttacaaaatctttacaacgttgttggactcatgcaggatcacaacaatactctgcatcgtgatcaggacgaactctgcaatgcggtaaatctcgcgttcgaagaataaaggcgtatgtttaccaagtggagagatagagagatggaggcattaagggctcaccatgtagagattgaaaatcgtagttggcaagctaccgtgctgatacgaaaagcctaccaaattgtaggtcggtaaccaccgaatgtcattcccctgggtgagacgaacgaagatccagcgatgaatacttctcaaactacaaacggtcagccgcccaatcctctgtcacgagttcaactcgtgggcctagcggtagacgggtagaccttgtctagaaattcattaggagaagtcatacctgatggttccaaccagatcaatggtgccattacacccgtcaaccaagcgaatcaattgctgtggcagccaagcgcttctgtattggaaaggttgggggcgacccatgacctaaggaatgatctgaacagaaggaggggagtagacgatcagaatgttacgatgatcatgcagcccggagcccatgcttaaatccccgctcaaaaagatgctgacgtaattcaaattgactagaatgccgagcaagttagcccaaccgtacaggcgcagttagacaaactgaaaaatatgtttaacggcatggctggacaaagaaacaatgatctcgagctggaccgagcgcgcaaaactcctttctcacccgagatcaatctcctggctttgccccacaagtttaaaatgccaacgtggaaaatgtacacagggagagaagatcccctttcccatctcaagtacttcgaaat

SEQ ID NO: 398659 - DNA, 867 bp, Cannabis indica
ttctcgttgaatctaattgattccaaatcgctttaagactcagtgtcattgcccaaaagcgatatcaatattttggtacttttattgagaacaaaactcaagaatgcaattggattaattttgttcaattcaaatggttgtaacaactcaaagaagtcagactactgattctacagattccatggtgactgacccgaatgtccaaactcctacaaatttgagaaatcttcatgtaattaattcgagcagcacctctcatgggactggcgtgactccagacactcaaaatactggaaatacaaatacccatagtgttggagaaactggcccgaactctagagtgccaccaattgatgaacctcgggtgatagttgatgatgacactgaactgcaaaatttgagagaggcagtgtctcaaattcaaaatcacacgaacacccttcatcacgatcaggcagatacctgagcagccgtggatgaagcttttgcgcatgataaatccaacacgcaagtatacgtatcgttttaacaagtaatactcaggtaagtgagatcgttcccacgaggactgcagttaagtaccaatcaattaaattcttgtttctatttggtaatcgaataaataaactaagcaaaattaaataaaataaacaaataaaaggtttaacaatggatgtgaaattagggatatgatttcaattgctttgattacccaattattaacactaattaactattcttcttcctcctatgtgatgacagattataaattaacctaaactcttttcagatcataaaggtcctaaattgcatgccaactactgcatctctgagatagaacaacatacaatttgcattaagcaataa

SEQ ID NO: 398660 - DNA, 549 bp, Cannabis indica
aaaaatggtatcttgtgtaattaccccattactattggtataattaaatttagagaatattgttaaccaattacaaagtaacacacctagaaggtgttaaatacctaatgcccaatagcaatgctttctcataaaaaaataaattgaattatttaagaatgaaaaatactaaaagacattcatagtgcctaacacccttgtgaaatgaaatattgttattgatataattcaatatctaattctacttattttactttaataaaaattaagctaattagcaatttttcccacgaactttgacatataccaaagcatgcccctgaacttttttgggcgttaaaaattctattgaaattgttagatttaaggacttttgtttaatttcattcaattttactgtttcagtgattgtttatgtactaaatcatgctccctagactttgatatctaccaattcatgcccctcaaactttgatatgtattaaatcatgtcccctaaactttcatctatattagaatttttttattaaaattagacaaaaatcctta

SEQ ID NO: 398661 - DNA, 684 bp, Cannabis indica
gagagagagagagagaaaagagggggtcggttaagggaaaaacaaacccataaaatgttatctaatttttccaaaaattagattttgttgaatattagttaattagtcaaaaagaccaaaatgcccctaaggcccataaagagtcatatacatataacaagggtaattttgtcattccatactcacatataaatcatattttagtatttatatcataaatgccataaataaatctcgaaaatatattttgggcaccgaacccggttcggcacaaaatacccggttgtgactatgccgcgccgacttattagaaaacacctatagtcagatagatcaaacatactatataataatatagtccataagcacagtatatcataaaattacgattttacccttctcgagtcaaaatttcaaaaatgccacttacacaccaatggggtcttagaatgtaataaatcataacagtatcacatattaaatcatataataatatagtttctcattaatacataattaatctagttagaattgctaatctgattattaaacgttatggtaatactgttaacgcatattttcgttaaccaaatttgaccctcacgatgataatttaacacagaaaaaataaaagctatagaaaaataatatatggacacagggtttttttacatggttttgcag

SEQ ID NO: 398662 - DNA, 509 bp, Cannabis indica
gtgaacatttaggcattcatggagatgttctaatcgaaaaatttcaatcatatatgtcgtcttctcaaatattaatgttggtaataattttgtgaataagcttgcaagattcacaattaattgaatgtgttggacactaatatagccattttaagatcatgagctaagaagaatttggtgaaaatacctttggttctatcttcttcactatagctttagttcagcaatgcattttacgttatcatcataatcatcatgagaattattgatgttgatactgttttattaagtgtaatccgtatatttctccaatatgttatctcaatgatctcagtagttgttgtgaaaattgtgtacgcaagtatacgcaatcgtaacaagtaataaagtgataaattgagtatcgtctccacagggattgaaaattagaaattaatttataaaactaattactcacaaattggtttcaacaaaaataacataaagtgatgagaatatgtaaaaaatta

SEQ ID NO: 398663 - DNA, 588 bp, Cannabis indica
agagaaagagagagagagagtgtctgacacttagatagtttgatatttttaggttagaggaggcttaggcaacttaggttttcagctagaggttaaggcctttatataggaggcctataccctaggtttacaattcaaatcccttgaaataaggtagttagctagatatttacaaaagaccaaaatgcccttagattctagatagtattcatcttgtctgttgggcttttggggcccaattcgcagcccacttatgatgcatacgtgtaggagtgtcctatgggacctactgagtaatacttggccggccatgatgtttttcctagcctggccagccatggggccagccaccgtcacttgatccctgtttgagtgtcagggtcttaatgggtcggatgcttacttggccttcctcttagtgagttgtattaccacatggcacatgttctatccacgtatgcatgccatgtcttgaggactgataactctatgaaaatagagttatttatatctttttgggcattaaattagttttgttctcaagaatttttagtttattttagtgacttttatttggttttctttaat

SEQ ID NO: 398664 - DNA, 675 bp, Cannabis indica
tacgagttctaattcatgctctaattttttacattttttttacaattaacaaaaataattactaaactatacgtatttttttataactttaattatttatatatatttttttaacaatattaattttataaacaatcatataaaaaatcattataatttaaatattattattaataaatactcatatttttaactcacatattattattaataaatactcatatttttaactcaccctctaaaaaaattaatctatagttttaattttatatgtttataataattttaattgtagaattataatatattctatgttatatttgagtcttattgtagaattataaataattaacaaatatatttattattattatcaaattataagtataaggttttttaacgtgtacttaagtccaaaatttttatgtcatatcatgttaatttgtagcatcctgttgaccgaggttttcggcaaccaataaaatataataagattctagagctgtaagaaaattagagaaggatttttacgtggttggggcgttaatgagccttagtccacgagtctatcttatttatggatgtatttaatacagagaatgtatttggtgagtgtttcacccttataaatacagagaatgttcttggtgagtattaactcttcttgctcttatg

SEQ ID NO: 398665 - DNA, 588 bp, Cannabis indica
tgggcttttttagactggataagcgttcagactcttactgccctgttagccatatgaatcgtacccacgacttctgcaagtactagttcttctcttttagattccctacaaaaagggtgccttctcttcgcctaaaattccatcttccaggtaccattgccacccaactttaatcttgattgttctatagtttcttgtgtttttaatgacttgctaatgtatgactttttccagaacttcctccttgaagtaccaaagccgccatgataaaaaaaaaaaaagtctcaatatagggccttctctgaggagcagttgaaggttgagaacttggtgactactaaacttctctataggtctgatttggccacaaattttcaaaatattgaccatgttaaccttagagggtagcgccaagcttctaaggaggtgaaggaggccatttccaccgaactggtcatcgtcattactaaggaagctaaaaatgacaagctcctagagcctgactggctggcacgtcaccctaatcctttgtctgaagaagaggatatctgttaggctatttttagcctatgttttggatccaattta

SEQ ID NO: 398666 - DNA, 530 bp, Cannabis indica
tgggaaatgaggtcagttatcaatcagatgagggcctcgccttggcaaattttttcaatctcaagagacattttttcaagaactaaaaaaaattggtgagtgtgatttttacaaaatttgaaagataggaaaggataaaggggccaagccgacctcagagcaaaatgaaataacaaccccaatcaagaaaagaaagcttattgaaggctcctatgttgggttttatgccctaaataaaactccaattcaatgtaatccgtattattcaatatcaataaagaaacagaagtatttttcattcatttgtgtaatttttggttcacattatcaattaattgttaatttaatttataaattcatccaaacccttttcacatttatattcttgtttattgtgtcgtcatcacagtggaaagtaatcaagattatgtgaataaagattcctagatttatcagaacactaggttttactgatatgacaatctacaacatactttacttgcataaatgctatgttctttccagaacat

SEQ ID NO: 398667 - DNA, 1041 bp, Cannabis indica
agggtacctcacgttcttctcatattcctccaaaaatataattgaaggctcttaagtttttactttcttggaaggttctggggcaaacacagattgctcgctctttacttccttcacgtacctcttttaagtgctaatgctctctcttgcaatatgtggccctcccaagataaccaagatatcctctccttccacaggaggaggttgtaatccctggttgcttgggttgttgggcggattgggctggttatgtccattgccctgcctcttcacgtattgcttaaagtggcctcgcgcgatgagactctctatctcatccttcaactggcaaaactcgtatgttgtgtgtccaatgtctttgtggtacttgcagtacctgtttggatctcttttatgcctcgtgtgcctcatgggctaaggtttactgaatgcaaccttgtgctcatgcgcgagttagatattctctcgagttttattaagctcagtataaacagtgtaaactggcacgtacttgccgtgcttcttttgtttcttcttgtctttggatgaacccttagagtcatctttcctcttagagccagaggcccctgtgttattagcttaagtcgaaacagtacttgttgaaacagtgttgggtttactttccgaaccagtttttaacaagttcatctcttttcgagcttcttcctttcgaacaaacaccttagccctctcattgaactgggtgatgtttttcactggacgacctcgtaggtcatcccacagtttgtctccagcagtggagagatcaatagtgatccccaactgaagggcaatgagttgggtactctcatccagatttcttactctcgcagcagccgtgctaaagcgacttaagtatgccttaagtgtctcaccaggctgttgctttatgttggtgagtgaggatgttgggattatttttaccaggatctaaatttactaacaattatgtttcattaacatcctaatatgaattctaaaacaatgaaataaacacttataaagtttaagaaaacctta

SEQ ID NO: 398668 - DNA, 1503 bp, Cannabis indica
  modified_base (34)..(34): a, c, t, g, unknown or other
tataaatctgtaagtctatgtttgaagtttacgngttcaatatcgagtcaaacaagtatacttttatatatcgtacttttatgtcaaaccattgctttgctatctatacttacataatatatataggtaggtcttctatataaaatatatgcatgtaaccatttttttaatatcaatgaaaatgtacatgttgttattgtccatatatttattaagcggataaaacagaataaacaaaaatatgtaataagtaatattgtgttatcgttcatcagataaaaattaagcattattttgtttttatataaatcaaaagtagataaggatcagaaaaagcgagaatatattctcacaaatttcaagataatttccttatatgatataaggaaaacaaaaagagattgagattggaaagaaaagaaaatatgaaaagattcatggctaaatatctcaaagcaaacaagtttaattaggagggtgggaggagggaagcgatcttaatcactataagtagtaatatattcttattggtatattttaatattaaattttttttttaaaaaaaaactttttgttggtcggcccatttgtaaaagattgttttttttataacaaaaaatatttgaataaattataatgagtattataattaattttaaatattaaattatatttgaaaataaaataaaaaaaaatattgacatatataattaaatattatcccaatcaaattattataaaaaagatatctgatttgtaaggttagcaactaaataaaaatactaaagtaaaatattaaaagatattgaggaaaaaaagtaaagttctaaagttaattataaaatatttatatttctacaaacggataattttatcgtcgtcgttgttctgtctcggaacaacgtgatcacgacccaacactagaaggagcagggagtaaaagtggatccatagaaggcaagttgaaactaggaagaactcaagagagatacttaaattgatcttggaattgcttcaggtagagttgttgcatttcatgttactgcttcgattactaagtttcttgttgtgcctccaacacaagcctcatattgtttcatattaacagtctgtgagccaggagcagaagacatagtaagtgctcttttggccccaaatgcccttaattcttgagatgcccaaagccttgcagatgtcgagatcactcactaagtacttgcgtaataacaggcagatctcgtgggtactgtgtgggatctatatcatcctaagcagattgatatcatcactgggtgctggttgatttgcagccaattaaaccatttaatttctcctacaaaaatcaaataaattaaatagtcaatttgaatgcaaaacaaattgaaagaagtatcataaattaataaatatcaatatcactattacaaaaaccccctttagaggtagtttttaagccctttcagcgtcgatttttacgaaattcgctaccgacgctgatcaggg

SEQ ID NO: 398669 - DNA, 593 bp, Cannabis indica
gtaaaaataaaaaaacaccttaattatgtatagagtatagttgaattatttttatataatttttcaacaataatttacgcataattatataaaaaattaattaaaaatattaaaatttaaataatatttattagtaaatacaatttgtattattattattattataaaaaattaagaagaatttttaacaatgggctagtttatttatatttatgtgtcgtactttttaggattatagtgtacgtgtggtgttttaaagtctatttttttattattgtgtcatgctaatttattgtattgtatttttgtccttacccaaatttatatatatattttttttttgatgacaagtctataattttttgtaatagattgtgctctatgccttttgattcgagctcatgccggttttgtattgtgttaaaagcaaggttggtccttatggtgtgcaagttggactactgcacaagacccaaacaaaattaagggcacaatatgtaaagtctttttttggcaagttagttgacaaaataatttctccatttatggtaagattggtgtgcattcatattcgatttcttaccttataaatt

SEQ ID NO: 398670 - DNA, 1125 bp, Cannabis indica
atttcttgaaagtaaatcattaatttagctctgagaccagatgttggaatatgttttaccagaacttagatttactaacaagtatgtttttaacatcctatatatgaatttgtaaaacaatgaaacataatcgaaatctgagccagacactccttcagttgtttggatttttcacagtcttacacactatgattgaggactaacttgctatgggtgggcatgcactcaatcactaaggcccgaatttttatgtgataaacactcttggattttgaaattaggaagaagaataagaagtctcaaaactctctagttgtctgacagaatgaaaactaggtttagagtcattagttggattataagactattctttttttatactaattcacttagggttaggtttaaattatatggaataaaattgataaaataatagcaaaaataaggctatagtggcctatcatatgtgggccctacactaattatattttggttatttttctcaaccatttatctattattttacaaatgccatattttcaaattctaatcctataaataccaaaactatatatttcataattataattaattaccaaataaaattgtcatctatattatttattacttagactccacaaagtctcttaattaacaaataaatcctaaaatccctatattcttcacaatcaagtcataacttagtgaaaaattcaaaaataagacatagtctaatttagaattataattgattaattaaaatcaattaactgagttttacaagcagtattgtctcaacaagtatggggaccatgggcctatataaccgagcttccaataagcagatttagaatataccaagtaaattccctaacttattaattcttccctgcaccactatagatttggaattgcactctcaattatataaaacgctctatatgttctacgatatagatacactttgaattatccatttattataattttaataatcaatcatcctctatagatgatctacaatgagtagggacaaatttatcgttacccccttcaatgtattttatccttgaaacaattagctacctaaaaatgatattttattgaactaatataatcactgaa

SEQ ID NO: 398671 - DNA, 516 bp, Cannabis indica
aaaaatataacaaaaaataatcaaacaaaaaatcttattatcaatatttcaatgtttcacaatatttatacatatattttcagataaaaaaatctattactttacaatttttttttcgtatataacatatccaaattagtataataaaatccaaaataaatatgactacaataaaaccataaacactcaacaaccacgaaccaccatcgacaatcaccaagaaccgttgtcgacgccacaaacttagaagcaccgtgattaacgaactgccacaaacttccaacctccgtccacctaaaaaaagaaagaatgatagagatccagaatacacgaagaacaaatttatttttccaaaaaaaagaatggaatgatacttggatattttggaggatgtggagctcagatctgaactccgttggtcgtccgtcacgaggaaaaagttgcttggctgctggatgaagatatagaagtggggaggaaggagaaggagcgacggaagagagagaacatatgtga

SEQ ID NO: 398672 - DNA, 1131 bp, Cannabis indica
taaatatatgaaaattccatatttatatagagtgggaagtacaagagaataaagatgatacaatataaattaaacaaattgatagtataaagtaggactttaatatggaattaccaagtatgatttactaagcgatatactttagtgcgtgtaattttaattcggatcacatatgtggatagatatttagtaaaagtattctgtataatttaattatgtatgattggagatatgaattaatatcttttatcaatgtgtcgtttatcataaaagagttattcattaagttctttgattcactcgttaaagtttctcaaaaaagataattcttacaacttctattttgagaacttaataacataagtgactgggaacatactaatacaataatggaatccaagctttccgaaaggatcgaatattagttctcttatagtgtcaattctgagagtgctaacagttgaatccaattctataatgagattatagattaactgttcacattaaactaatggtacataaggaattcaagagataattagaagggtaaaaacggtaattttgactagctataattatgaactaataattagagaacaaactacaagtaagaattctatcaatataattttatattgtcaacgagtgccattaatagtggagtaataatagaattaataagattaattattttattgaagagttcagtaataattaagtgtttattggagtttcaaaatataggtttatggcccccaaatcacctcaatgcaacattgtacaagaaaaagtttgatttgaagaatgaattgagaaagaattaatttctatgagaaataattcttgaggacaaaatagtaattgtgtataaattattattttgtataattatatcaattatgaattaagtaattaaaacaaaatttcactatttagttttatttgataaaattgtattgattagttaaatataatattattattgaataatattatgatagaaatgtattattttagtctaaaataatatttaattaatcttagtaaaaaagattaatgagaattaatcaattattatttattgtaaaataaataataaattttagttaagacaaaattgagaaattaatt

SEQ ID NO: 398673 - DNA, 488 bp, Cannabis indica
tgacggtcatgagaatcagcaataacgctaagtgtctgcgctacccgcttactctaagcgggtccgcggaggagtggttcaagaaattggaactaggatacgtgggttgttggaataagttacagaccaacttccggagatagtttgtcgccgcaaggaaagtcaacctggaggtcagcgccttgactaacatcaagcagctacctacggagacgttaaacaattttataaagaggttccgggaagaagcctctaaaaccaagaaagtagatgatggacaacagcttgccctcctccaagcaagcatccatacagggactccattctggaacgaactacaacaagaaggagctgcaaaccttcaggacttccaaaagagtgtccaaaaatacattaaccttgaataggcacaaatagtggcctatggaggatattatcccaccaggacagcgggatatgtgcccggagcccagccctcgggcaatgtg

SEQ ID NO: 398674 - DNA, 661 bp, Cannabis indica
caaaaatatgtcaaaagagttcaaattctatacaaaataaccctcttatagctaaatatctacactttatttgttaacttttgctttatctctctttctctcccctcttttctcccatggatgatgatggcaatcacaatcactacttagatcttatctatttttctccttaatttttcttctctcccatcaatttaaccaatgttaagttaaccgtagatattaaaaaaaaaaaaaacagagaataattttttataatttagaacttaatccacaaaattgataattgaaaacttaaagccacataaaagttttactaaaacactaatcatacataaaaggatttggcattttttttttttgagattttatagatcttaaacattaaaatttgcagaaaatcgagtacaacttgatgcttctcaatgcaaactcgataaggtcttataaaaatcatgattttcataaaataataataataataataataaaaaccgatgaaacttgatgcttctcaatgcccaatgggcctgaacattatgagtataaaaaaggtaatcttacacaaatattaaaatggggttaatttttacaagaatacttccacacgattttttttttcaaaaatattatatttctataaaacaacagtaaaacacaa

SEQ ID NO: 398675 - DNA, 839 bp, Cannabis indica
gcagcaatgactacaagccaagctatatggctcaaaagaatacttgaagacatgggagaattacaagaagaagctacaaagatatattgcgatagcaaatcagctatagcaatggcaaaaaatccagtatttcatagtagaactaaacatataagcatcaagtaccatttcatcagggaagcagaagcaaacaaagaaatcgagctcaagcactgcaagactgaagagcaggtagcagacatattcacaaaggcactaccaagaggcaagttcgagctactacgaaacatgattggagttacagaaatgtgtaccaaggaggagtattagaaattgatacacatttctacaatactaaattaagtctagaattttctacacatttgtagaaaaacatactctaaacttttagataattgtagaataatttagaattttctagacatgtaaaaatacaatagaacataggcatttctagaaaactttagtctagaagtttctagttatgcatgcttaagaaatatgtagaaatgtatggataaaatccttgaactagaaagatctagagaaaataattctagcctcaaatgcttgaaggctagcaactataaatacccatcaagacttccaaattgtaaccaagcttgagtagccaaagcaagtcttttactactaacctactaccttgtctcctctcttactacacacataaaaattaaacacataactcttccttgtcccaccaatcatccaacttatcaacttatcaacatcatcacactacactacctaatatccatcccatacaaatataaaccaatacaaatttattctcaaac

SEQ ID NO: 398676 - DNA, 624 bp, Cannabis indica
ccaagccactagatgatccccacttgtagtctcactaccttcccagaaaaaatctctcatcatcttctccaatgctttagttactgacttaggtgctttaaataatgataggaaatataagggaagagaggataggactgactgaatgagagtcaacctaccccctttcgataaaaatgcacatttccatccatcgagtcttttggcacacttgtccagcactggttcccagaaactccatttcctaggcgaaccccccaagggcaatcctagatattgcaatggccaacttcctatttcacatccaatcctccttgcaagccttgaaacaatctcctcatccgtacatattcccaacaattgacttttgctcatattaatccttagtccagatatagcacaaaatgcttctactagcctcaacaacttgtgtaatgattgctcattatcgataaaaaataacgtatcatctgcaaattgaaggtgactaacttggactctctcctttcctaccaaaaatccagaaatattacctgagctaacagccttattcgtcattctccccagcacatctgccaccagggtaaatagaaagggcgaaagtgggtcaccttgtctgagtcc

SEQ ID NO: 398677 - DNA, 568 bp, Cannabis indica
ttttttctttttttttttttctggttcttagtcctgaaaattagattttaatgtaaaattgactaaaatataccaaaaataaaaatcaattatggagatatatataactatataaataaagtttttggtagggcaagtggaaaagttataatatatttttatgagggtgtttcattattatatattaaagatattataagttttcagaataatatatggtactgaaaatatatttcaaaattataattttcatgcttcatagcttattttggtatttttagtatatgaataggttacaatctaatttttttatgagtattttgtggtataaatatttaagtttatttttcggttacaaataaatattccagtttattttttgcggtaataatacataagttataattttgaaacgtttgtaagtatttagctattaagtgaagtaaattggtctaggtcatgatttttttaaaaaaaaaattaatttaaatatacccataaaaaatgacgcataatatatcatatttttaaatatatattttaaatttaaggttttttttttaaaaaa

SEQ ID NO: 398678 - DNA, 1286 bp, Cannabis indica
cttcgtagaaatgttctttggtagctattggactagttttgatgtttactagttgaatttgaggtgattttgagttagaaattgagtttggaactttttaaagcttagtctgaacattagtgatgttttttgtttaagagctcatttttaatttctgttacattaggattgtagtatatatggtatatatgcgctctgtgaagtttggatgatttggataagtttcgggggtgtttcagtaagtgcaaaatttggaattttcgtgttttaccgatttttgaaatttttaggagatcataaatcatatttttgtcatagctttttacttgggtgtgcgttttgacgttctatataccgttttgaatcttgtaataagcactacaatatggtgtaagttttagagccaaaatataagttttattttagtatatttataccgttgtgtttgatataaaactctagattgtcttacgcgagtgttaagtaggattttgggataaactcttattggtttaccattgttgtgacatagggccaagatcatcggggatatttcttcacttgggttggcctacatgcatgaatctggattaaaggtaagaaaagtatattgtactgcatagcatgttatatcgtaatacaattaatattgttgtgaattgattgatattgagattaagatatggttaatattattatataatgaaaagattgattgattaagcaataataatatgatgataccatgaatgtgagtaccgggtgtaggtacaggctcacctgattaggtgatgcaatatgtcgggcatcgtaccttattaggtatgggaggtatgggcgacagtgatatgagaatgccaggctatggcatagattgaaaatgttgttgggttttttcctagcggagtaccttattaggtatgggtggcagtgacatgtgagtacctggcattggtacgggctcatctgattaggtgatgcgatatattggtgccaggctatggcacgggctcacctgattaggtgatgcaattatgtgatatatgagtacatgtttttggcacaggctcacctgattaggtgatgtcattatgcaaaaaatgggtgccatgctatggcacgggcttgcccgattaggcaatgcaatacaggattattagactaaagcatcgacttgtctaattaggcaatatgatataatgaagatggttactttatgaggtgacatatatataatttatattattaaatgaatatgatttttattgttggtataatggttttgt

SEQ ID NO: 398679 - DNA, 554 bp, Cannabis indica
atacattgattattaaaattaaggttggcttttcacatttttatagggcttggcttttcacttctttttaggggttggcttttctattcattatgaactctatcatagtaatatcattcttttcaactcgtaaactttttaaaaagagtatttgctcttatattgtgctccgagatagttattgtccttttataagttttcttatactttttatacattctctcacagactcaattctcatacctcctatttctcccttcaatccaaaaactatccataaattttcttgctaactgtgaaaccactcactgataagatgaaggtatgatgagtcttactgtaacgcccgtattttatatttactaaactcgaaagataactttaatatattatatctttataaccatatgggtcgggatcccgagtatcaaaatacaatttaaaagtattttactaatatgtacatatatatattttttaaaaaacttgctaacatgcaacctcaaaatacagactccaaaatagtaatagaccgaaaccctccaggctgcact

SEQ ID NO: 398680 - DNA, 1378 bp, Cannabis indica
ccggttagaaaatgacacatgtcattttaggagtaataatacaaatatctatataatttttatctaaattaatttttatttttaaatatatataatactaattgtaaaattaataaagaatattatgttaagtaataggatattttgttaaagttaacgtatgaaatcaaataatatcgttaaaccaaaaattctgttacatagccacattttatatagaatagatacataatttaccataaatttaatttgaataatatgttcatttcaatcaacaaaatattattatcaatttatattggtataattagtgatgaaaatgtccctctgttaattttgtgtaaaaaacacagtacacaaaacaaattgagtaatcattgccgttaaatgaagaatttgtgtgtgttaattttcatttttctttattgatctatagtaattattttttatttattttttttaacaagcaattagtagttattgtttaattcttttgaagaatagttaaaatataaattttagggagatttttcaaattactcatttttatgctttatttacaattttactcattttttttgcagaataattttgatgaatataattacaccatatcatgttaacacttataattaacgcacaaataccacttgagaaatgatactaaatctacatttaattttatctgtattttaaattgaaattcttctatatatatatatacacataacgtttgagtacaaaattacagttattgagttgtaaagatcagctggaaagtgcagaaatcgcacatgaaaccgcagtaagtatactgaaaaagctagaagattgtacatggatggcaaaggcagtgctaaccctagctgttttcgcaaaggagtatggggatttcattgaatatcatcgaaacaaatacaatattaataatgatttggccacttctgatcaactcacagactcattggcttttctgaaagggtggaaaattgaattattagacaaacagaaaactgaaattcgagagctaaatgttctgatcgagaagacacttgaactgatgaatgccatgaatgagttggagaagttttctaagaataggaaggtttccatggatggagttaaagctgatctcattctccccgaagaagtggattactattgggttatcatggctgtcattgcttgtgtgaataaatttactactattctcacatcaagttaccagcagctgtaagtttttactataatattccttttattatttccatcccaatttataattatatgccatgcatatataagtatatttatacgtacaatcaggggcggacccacattgtagcgagggggggcagtcgccccccctgaaaaaaaa

SEQ ID NO: 398681 - DNA, 667 bp, Cannabis indica
gtacttactctaattaatggcaccattgcaataaaattttattaattaatctaatcactttatactatcacaacctaacttacaagcccaataaaaaaaaatacttgtcactttaaagaattacgccacttctagcattaaaaaaaaaatcaagacaaattctacataattactatttccacatcgagatatctagactaacataatagaagataataatcaaatattttggttattacaatctaccctccttaaaggaatttcgtcctcgaaatttacttacttgagaataactcggggtactgtttctgcatgtccgtctccaactcccatgtcgcttctctatcagaactatcactccacaggattttaactaagggtatagtcttatttcgtaagacttttattcccttttctatcacgcgcacagggcgtgccatataactcatgtcctgctgcaagttcaagttctcgtacttaagcacatgtgtcggatcaggtacatacttacgtaacatggaaatgtggaaaacattatgcgtttctgctaatgttggcggtagggccaaacggtaagctacctgaccaactctgtccagtatctcaaaaggacctataaatcttgggcttaactttccctttttccgaaacgcataatccccttcat

SEQ ID NO: 398682 - DNA, 920 bp, Cannabis indica
tgttaaactcatcaatctattcttcaacagatttatcttctatcatcttgaatgaatacatggcctatttcagatataatctattcaccaatgatttattcatatgcagactttcaagtttagaccgcacacctgtggttgtatctttttttgcaacctttgtcagaaccttatctccaagattcaaaatgatcgcactatgagcctttgcaagagtctctttcttgtctttttcagatatcgaatcaggtagagagacttttctcctaacagagcctcatacaacccttgatgaaacaacaatgccttcatcttcattctctataatccaaaagcattcgcactagtaaacttttcgacatcgtattcggcaacaactatgattacaaaccaaattctgataccagcttgttgtgcgaaacaaaacaattaatcacttacgatataatttacattaccaacaaagacgcaacctgatcaaaaaactaaataccaagagatttcaagaatttaagataacgaattaagcagtaaaacagaaaagaataacactaggtttaacgagttcgagccatgtgcaatgatatacatctctgttggaacagtaacagccatatctttattaatatcagtgtttacaaggttacaagaatctttacaaacttctcaaagattacaagaagaggtttctctctctagtttagaccctaccttacactatcacaattttcactcaagaaaaatcttgtttgattctcacccaagttacaaagatttacagtgttgggttttgtgccctaaataaaactcattacaatctgattagttatcaatcaaataaatttgaagtgatttatgtttgcatgaatttttcatgcttatggtttaatatatttaataatatatgcacaaaatcagtt

SEQ ID NO: 398683 - DNA, 871 bp, Cannabis indica
agagcatggtatagtattaattcgtaaatttccgtctcttatctaaaagatgatactatcctagccatacgtgaagactatgggcttatgtaaacaagtttaataagtagaactgaaatttatcgagtaaatttcttattttattaattcttgattctactatagattcgaaattatacactcctgattacatcaaatgctctattctgcaagaatagatacactattagttattcattgtttcaatctaaataattagtgatcctctataaatggtcttcattgagtagggactaaattaccattttacccttcaatgtattttatccttaaaatacttagttacatgtaaataacatttcgagaaactaacagaattaccaaaatgaggcctcactcatttaaactcgtttacccaagctctaaggaaccatcgattaacttttatgtacgtatagaagttatagtttctatatctatgactagcgttcccacttaattgtactaccatgttcttaagatgtaagtattgagccaaacgtactagtaggcttcgaatgaacaagtcaaagaacaagaataacacagtgaagcgagaacctaatcatctcaagattgggatcattgatcttagatcaacttttagatatttacttaaaaaagatattatgataagtttacaatatcttttcccctgtgaatatcgatccagtctgatgtattggctatacatctgatgctagtttactttactaatgtcctagaaaatacattcccctcactacaaacttttaacttttaataattacattcagcaataacatttttaaaaaaacgttatctaatagttattgggtcttattaattattg

SEQ ID NO: 398684 - DNA, 789 bp, Cannabis indica
cctagactcagagcaataagttctagcatcatgtgagctagtttttccacttttctactatagtcctcacatgcttccctaatcatgataaagttaagctcaaatttttatcttttatatcgattacagtaaggacaccaactttcgtctctattggtaggaactttttactttgaagatgtggagaaataataattcatttattttgatgacgatgtatatcttacaagagcattgctattaggcatcagtagtgattagcaccttcttgacatgtcgcgtaacgattagctagcgatacttcctaaaagctatattatattaaattatatgggacacgatacttaattggaccaatagcgatattgacacataggagggtgctagcatttctcatcttacaattatagcatacattccatcccaccgctgtttgaaaatatattaaattttacagtgttaaaaataatgtttgaccaattagttgcatacatgttagtttttaaatttttttatacgagtgtaactaacgattttgtactatacttttcacatcataaattattttaatttttttgaaaattagtaaaatgaatgatataattacaacatcatatgaaaaaaaattgaattaaaatttctctatataaagaaaacaaaaggtcccttctaataaggacaaaaaagattgctctatttatatatataattaaacgtagaattatacataaattttaataattttaaaaatttataagtctggtttttttataataaataaaagacact

SEQ ID NO: 398685 - DNA, 580 bp, Cannabis indica
taagaatttcatcatctacaaaattatttttcaatagaccatgcataagacatcaaacacgagcaatcattgtcaacagaattttattcaaaccatgcttactaaaattaaagaaagaaattcgtgattcactttctcatgcaaaaatagagtgctcatactttattgtaatcccttaattagtcttttttagcctctaataataatattgacttgtggacaaatgccatatttcttattttattttacttgaattatatttcttcggttcatatatttaaattttagtttttaaaaatctcggtaagcaataggcaaaccatgccatttataaaaatagaaacaaaaaccctaatagcaccttcaacttaaataccaataattcgtcaatgttgaagcatcaaagaagcatgaagaatgctaaatctccaatccaaatgaacacgtgacaaatcacacccatcaataactatcaaccaaatattttctaataaaaattggctaataacaatcctattattcaatgtcactaaaagaaatgttacttttaccagcacagttcgctactgcgttggtaaaa

SEQ ID NO: 398686 - DNA, 500 bp, Cannabis indica
atctaagaacatctctaaggagccttcaaacttgtgaatttggagtgatttattctccaacgaaatgacagatctaacatcatatcgtgtgtgctacagtgcacgatataggtcgccgtgtgtgctacagtgaacagtatatgccgtgcactgtagcacacatgtcatacactgcttctaattttttttttatatttaattaatatttatatatgtttatttatattattaattatatttatgaaattataatgcacctctttgaaagttttgcactgatgtaatcatacttattttggcattcgaagatttttttaatctatctttttacatggtcttgtacaatatagttatttaagattctataaaattttgaaaattcagaaaaatttaacacacagaaaacaaggttcaaactatctattgcacatgtcgcttttatttggaggagtgcattgtagaaacactttttaatttattgtgtgtaaatttaaatgtga

SEQ ID NO: 398687 - DNA, 529 bp, Cannabis indica
gaaaattccatcgtatcgatctctaagatcgctgccatggacctcgtctttctcaccggtcttcgacgacagtcccctctatttttgaatcgctgccttcgtcccatttttccagcctttgggtcttcccgctatagcaacagaagtaatctaaaaaattcccaaaaccctagcagagcactattcagtcacatgttgtgactcagtcttttttcttttttaaaattaacccccgacaaaatgtttagaaactttatgctataaaatatatatatattttgtctaaacaaactcaacaggtttaatttaattagtgtgtgaatttaggttaaatttatcttttaagttaggtttttctttagttgggaccaaagcctattctatattatatatatatatacaaaaataaaatccttttacttcgctgaataacagtcgcagattttttaacctctgtttacaaccgaagccaaagaaatttgcatcttttttccaccaaagcaaaacgtaaaagtgttggaaattattt

SEQ ID NO: 398688 - DNA, 536 bp, Cannabis indica
tacaaaacaacaacaacaacgatattctaacgctctgatgcttaggtgcgctacagtgatttttcaaataatatactaccttgctaatcaagggttttcttcgaaaattgtgtcaaatcaaaacttgaataaaattaataaactttataagcatacatatgtatatatattatataatcgagatcccgtgctaaaaacttttataaacattttgaatatattttttttttcaaacttgtcgcatagcgactacaaaatatatccccagctgtcccgagaccaaacactccagatttcttcgccttgacatgtaaaatcattacccgagctcggaactcactccaattcagcttcagcctttcttttacctacacagaaaagtagaatctatgagccaatagactcagtaagaatagcatacaacaaaatataaataatcgacctgtgtctaggcgcccatacactattcaaaaggcttaccaaatgatcaagaacgttcttaatggttggtgctattgaccatgatatcacccact

SEQ ID NO: 398689 - DNA, 965 bp, Cannabis indica
ccgaaaacctcggtcaacaggcctcatgccacttgtaggcagcatcccactcgcaagcaacatgccactcgcaggcagcatgccactcataggaagcatgccacttgcatgcagcagaccactcacatgcctcaagcctctcgcatgcattaggccactcgcatgtagcaagaatctcacatgcatcaagtcaattgcatgcagctagtcactaacatccctcaagccttttgcatgcatcatgccactcacatgcatccgtttcagtatgcccaattcctttatagtttttacacttggtagcaattcataatgcactaccaccacttcaatttctctatctttctcattgatgaaagatatgttgctcgagaaggcttgctccataatcacctcaatcattaccctaacataattcaagatctctcttcgtttggtgatctcatccactttaataggctttcctaattgtccaactatcttggaaattgacttccctccccagtatttgaaatgcaactgagagatttggatccaaatagggataaatttaatgtcttctgttgaagtcctcatttgtattctaagccttcattatcaatagcttcttatcaaataataaagaccctccagtcaaaactttatttatctgttcaataatcatgaatctcactatgaaaactcctatattatgaactccaatcttatccacacaattatcttttcacttccttttatagaaccccttaaatattggaggattatcccccatacatagcaaacaacagacgagttccaatactgcacttcatcttcaatgtccttgtcatcaatcttgactacctcatgccctgattttagactctaattcacctaattcaatggatcatgcatagcaatagcagaaataaatttcataggcaatgcagtatttgttgggttttatgccctaaataaaactcttt

SEQ ID NO: 398690 - DNA, 669 bp, Cannabis indica
ctataaatacccctgaagacgcaaaagcgaggggacttctccttttttcctcagcccttcaccttggaaccgaagactgattactgtagccccattattaactctagattatttctactaagcttccttttcttcaggaggaacacggcggataggagtaaaagtctatcatttttgtatttgtataaacaattaccggccaaaaaatctaataaaatggactcgtggactaagaatagttaacgcctgaatcacgtaaaaatctctcgtctgttatcgcattatttataccttctttatattcttaagctcttaaaatttttggtttccgaaaaactcagtaaatattttggtgctttcattgagagctgaagaaaaaaatatgcatggtagctaccggcgcacgcccgtctggaagaaggtccgtataaaaaaaagaaagaagacctcctaaccactcaccaaggtccagccaaaggtcaggaatgtgcagatctgatgtattgtctggacaaagaatcgatgttacaatctacccaaaaaaagtggcgaaagcaagtgcatgctgccctaagacacttgctgcattgatataaatgaattttgaaataataatactaagagcgccaatataaatgtgtcacgtatacaagagtacacataaacaat

SEQ ID NO: 398691 - DNA, 804 bp, Cannabis indica
acaaaataaatcccaacttcttattgcaatgttaagacctccaaaatctaaaaccaacttacattcgatcgagtacagaccatctacttttagttaagtaagatcatatatgctaaaatatcgtaagtgcattagtaaccctttaaaacgagttcaaccctaacataggttaagtagctcaattattaatttatcatttactatttaaccataggttaatcatgtaatctcataatatctcaatcaaccaagttgtcggggtaaggatactatatacataattggcaattcatgccaaacagaccttactctgttcatcgttactatacctcctacaccccacttgtatctgatttgctactagagactcacttcttataattatttagccaggactctttgactcgtacttcctaaactacctttaaaaataagtccatacttcacttaagcatcttcattccatatctgaatgcactcatgttatcaatatatacatccctttctctttccttataagttcctcacttccaattagataaactttagttattttccaaacaatggctattgtcttattccatcttagtatgtttttctaggatattgctccattactagcactctgggtcgagaaagtttcaaatatttgtctgaattcttagctattgacaactttaacttttggcaaatctaatgtcgttctttcttctaacactatatagcatagaaatgccacctctcttgaccaaaattaacacttttgtaagtttttttttctttatttgcttctattcacttaaa

SEQ ID NO: 398692 - DNA, 865 bp, Cannabis indica
tgttagaaaatctattgcttggcgttaggttttggttggtttttagcatgatttggttgagtttggaagctgaaattcgcgaaaatggttgctggtttctgggttttgaacctaggtgccacggcatggtatttagcatgccgcggcgcgcctcctttctggacctgggagttgatcccaggtgccgcggcatggcttttacatgccgcggcctgccctcgagtttttgggcagattcaagtgcaaactttgaaaatccataactttgtgatccgaactgggatttgggagttctatataccgttggaaagctccttctgagctctatgtgattatatgaattttaaatgccatgtgaatactttatgaatgtgaaatcaggggttaaccctatgtgtgaaaatctcaaaatttgtgactaggattaccggcacctagccaggagcacccgaggatttgaaattctctactattgcgggacatgaggtaagacagtagtatgcacgtagagttaagcgcagtggcgctcataatgtatgttgtgattgtgattaattaagaaccaggattagggttattaccctaaagtgaacggttatttggtctagggttattaccttagtagttaaaagatgttgaatattatgccatgttaaatatgttggaataaagagttatgcatctaaggcataattaagctagactcggtaaagtagtactttgaatttaattttaatgtggtctagggtcattaccctagaatattatgaaggtgagaaagcattaatatatggtaatattattaatccagtgaaaatataagttagggttattaccctaagatttatatgatgtggtaaatatt

SEQ ID NO: 398693 - DNA, 508 bp, Cannabis indica
gacttagtggatgaggaggaggcacttcctgaggaagctaaagaaggtcaagaagagcaatgggctcttcctgaggaagttgaagaaagtgaagaagagcaagaggttgctctgatccgcaagcgcaagggcaagatggtagccgaggaggtgcctaaacggcagcggagagtggacactccggcccctggccctgattctgggatcccttccgaggcggaggaatatacagtgcctcccaacatagtgctgactccggttcccggagatgaggcgaggcaggagctccggatagccaagcataactacgccatggacgagtactcccgggggcatgccgatgtggaggctttgaggagggttttgcgagatgaaatgcaaaatacccttaacgatcagaactaccagaacccgtgggatctaaacttggaccccctgtcggactggttcaatcgtttcctcgggcccaccttggctccttttgccgggagatgaccggcgagtttgt

SEQ ID NO: 398694 - DNA, 500 bp, Cannabis indica
ttagtactaatgcagccaatctacaaacaaatatattggaaaaaagcaaatctgaaattaaataaaatagaattttataattgaattaacctaaaatataagattgaatcaaatatagttatataataaactttcgataactatagttatataataaaatagcaatgtgataaaataataataaggcaataataacatgtagtgatagaaaaatagatataaagctcaaaatggtactcataaaccataacactttacttcaagaataatcataactcaaaaaaaaaaaaaaatagaatgagtcttttcaactaagcttccattaagattctataatacaaaatgaaaataatttttattggatttatgattctataatacaaaataaaaataacttataatagatctatgaataaatcaagtttattagaaattttacaatgcaatcttcacaaaaacaatgtctaatttctacatatatgtgttactcaatgatgagt

SEQ ID NO: 398695 - DNA, 736 bp, Cannabis indica
attaatgctaataatgaccctcggaactatgaagccgccaaaataaaggcatgcaaaatatcgaaaagggattatgacgaatataccgtctgtgatcatttaaaaaatactttttaaggggcaattgttatacccgaaattcggttattatttcaaaggaggacacgtgtcaaattgggaagaatatgaatcaatgaacgtaacagtaattatatttgaaaatggaataacttataatacgaaattgacagagtatatttacaacttgccgattggaaggtcttatgtaagataaagatacaccaattgttaccttgaacattaacgagaaaccatatgacttcagatgtacaaggcgagacatcaacatcgctacgcattaggagacgagacatggtgactgataagacatttagtgtataatacaccttatgcagactaagtataatagtcggtcaaacaactaatagcgaggcacccatctcgctataggaaggcgtgctcatgataccttcattgatcagctccagatacctttcaatggggttcacagctccgtcgagtcatctctctcagataaaagctgacttacaaatgatgttgactgttgaggtccaccttgtcgccaagaattgcgattttcagatggagcattatgtcttcaaacgcaggaacgatgaggcttacatcatcaacctcgaaaaggcatgggaaaagttccagctcgctaccaagg

SEQ ID NO: 398696 - DNA, 535 bp, Cannabis indica
gcttgaagaagaaggagttgataatctcacatgcacaagaaaagaaacagagagttagatattgtgagagagagggattaaacacttaatatgtattaaaaataagagattaccagtcgagaaattacctgtgacttggaatcttgatctttgtacttctgaacaccatttgatagtggaatcgagctctcaaatctgaggagcagctcaaacggagacgtaaccaatttattggtgaacttcgggaaaaaattctgatgttttctaatcctatttttctttctgtttgtgtgtgtgtgtttggagatagatcagatcgtgttggatctgatcttgtatttgtgtttgatctgggatttctgggttgatttgtgggtttggcttcgagtttctcagagagagaaactctctgctagggtttcaatctaaacatagggctgaggaaaagtgaacgagaagtttctcgatcttttggttttgttcaaagacaaaacgaggtcgtattgacctggtgactttgaaaagtcagggaatt

SEQ ID NO: 398697 - DNA, 1167 bp, Cannabis indica
cagtaaatccgcgagtcactcaaggataaattcgatgagcaacaaaaggtccgttagtaggatgcaatctgtgagtaaaacgaggtctgtcaacaattaatcccaatcggatctgtgagagcagcttcaatcgaaacaaacctgaccttcgccaataactcggtccaaagcaagaggatcctatccaattgcgaatagacgagttcgaggacaagtgcaacaaatctcaagtgggggaactagggagacaagctagatacgactcaaatgaggagcttgagtaatatcacccagatatcatgaatacccctttctcttcaggatttaaaaactctcatgaatgcgagcaagtaatgtgacgaacaatttaagctgtatcttgttccccacctcgcttgttggagcagcaagtagatgatttaacaagtttactcaccattcaataactttttgggaatagctacccgaggatttcaagaaacaattccaggcagctagggatagacgacccgaagcggcctcactaaccaatataaagcaacagcccggcgagacacttaaggcatacttaagtcattttagcatggctgctgctagggtaagaaatttggatgatagtacacaacttacagctcttcaggcgagaatctctactgatccatcaactgctgggggcgagctatgggacgaccttcatggtcgtccagtaagaaacatcacttagttcaacgaaagggctcaggtatttgttcgaaaagaagatgcccgaaaggaaatgaatttgttgaaaacaggctcgagaggcaaacccaacaacgttttgacaagtactgtctcaacgagaattgataacttgagggcttctagctcgaagagaaaggacagttctaaggaatcgtcaaaggataaaaagaaacagaagaagcacgataagcacgtgctagtatatactatttataccgagcttaatcaaactcgggagaatatttacctcgcgcatgagcaaaaggttgccttcgataagtcccagcccatgaagcatgcgaggaataaacaagagcctaacaggtattgtaaattccataaggatattgggcacacgaccaacaaatgttgccagttgaaggatgagatagaaagtctcatcactcgaggccactttaaaca

SEQ ID NO: 398698 - DNA, 724 bp, Cannabis indica
tagtggtaactcaatcatagtgtataaatctgtgaagaatccagaatcaagagaagaacattcgtgctcagatcttggcgataccctgctacagacaggatgcaagggttagagatctaagtggaaggagccattaatattccgctgcacccactatatgctttctcaaactttatatgtgtgttatttatattattttagaaatttctatttaggatgttaaacaacatacatggtagtaaatctagatcctggtaaaacatattccaacaattggatgaatggtttataaatcatctgcttatgatgccattcttttttcttttatgaaaatgaatggcacggatgactatattctcaatattctatctcgaaataatataaatcctcgatcttataaatctcctacttgtatatgcttactttaggcaaattggacttagagttagattagtagtggtggtccaagagagaataatcactcattgtatatttggtataaatttaagtctttgactttaaattttagattccaaatagaaatttttatttcagtttcctataatacattgggcaatacaatatcactttcacaaatttttaatatccattttttgtcaatggatccaaactgtatgtttatgtatgaaatatgagtttagtattctgtgaccagaatccacttggactatctaacaacactttattgtaactagatctaagt

SEQ ID NO: 398699 - DNA, 524 bp, Cannabis indica
aactgggaacaattataatcccgacaagtcactgcctccgtgaagatacccctaaaaaaatcaacgaactcattcccaatggcttcctgccccgagatccagacattatttttatctattatgctctcaatggtgtttcttcgccctttaatggcagccgacaagaagaaaaacgtagaacatttgtccccatctttgagccaagagattctagccctttgtttccagtagatcgcctttctttctagatactcattcaactctcggcggatttctcgttcccgattccaatcccgagtccccgccgggaggctctgcagagagttgagttggagttcaagatcttttatagcgacatcaagcttaccaaagtgggatctactccagttttgaagggccacctttgtggccccaacctttttgaaaattcttgcaggggcccaatcatgattaacagaattccaagcatagtccaccaccaggttgcttctagtatcccgggtccaaccttcctcaaacttaaa

SEQ ID NO: 398700 - DNA, 730 bp, Cannabis indica
tacaaaaaatagtgtcttatgtattacaattatgaaaaatataattaaactaaaaaattcttcacgaaatagataaatatgcatgcaccaaaaaaattgtctcgtggaaaaaacaaattatagttttttttttttcctttttttgaataaaaacaaaattgtagtattgaaaccgtttccacgttttatttttacttttatcatttattcaaaaaaaaataaaaaacacaaatatcttcactcgaattccaaggctaggcaagccctaaatctcaatcctttaagggtccgtttggcacagcttttggaaaagctaaaagttgctttttgaaaaagctgtgataaaagagtgtttggtaaacagtcaaaaaacagttttttgaagaatttttggaaaagctacagctaaaagctgaagctgctgtaaccaaatttttagaaaaagttcttttgattaaaagactataataattgttttatactaaaaaccatatttacttatttatttcatgttaaaaaaaaatttaaataaactaattataataaaataaataattattaaatctctttttcttaaaaaaaaaataataatttatattttattttattattaacaaacaacatcaacttacaatttttcttatatacttgagtttccatgttttttttacatttgataaaacataataaaaacatactataaattatttttatcaaatgcatataaatt

SEQ ID NO: 398701 - DNA, 487 bp, Cannabis indica
atttttattagagcaatccttcatcttcccatatattaatgaaatggcaaagtttgattattttaatataacattttttaaaataaagtatttttataccaattaacaatgacaaaattattaagattatttaagcagtaagtagtattcaaatagatatttatttaattactgatattaatgccaatagtaataattataatgaaatcatataagacatataatataatccagtaggatatatttaatcaattggaaatctacatatgggacagtatttacttgttttaagccacttaataatacagtgattgtaaagcccgcttagtttaatttggaaattagcagttaataatgattaattatggaaattatttatagctatttaaatatttattatactgttatttatggaattcaaaaatacattgctatgtcattcagtagttttcatattttgcatttccagtgcccggtattttggaac

SEQ ID NO: 398702 - DNA, 2065 bp, Cannabis indica
taagaaaagactagaccatacttcctctttttccttttaatctttaaaaatctgaattccactattcaagagggaatggaaatttgaaatcctactcttaatgggaatgcttgaagaacataaataattatctaagattgtcaaaattgatgcccacctagtagtttttagagaaacgggcttggttcacatcattaagtcaatctcacacaagtgtaaagttaacttggggggcaaatatttacaccaagagtagccctgatgatgtggacatcaatgttggacatgtggcaagaaagatgacatctcagagttgagtagtcctaagtcatagcaagtcgatctgggaggggtccctagccctatgcccagaatgacttcgggaactccggaatggaagttcagacttcagtaactcatttccaactcgctatctttcattattctgtaccatgaagacatggagcaatgaaatcgaggccttgggagctaaatttacacgtacatgtaccccgaaagtcaacctgggcacctagggtttcacccaatgcccaagttgacatcctcaactagggtttaagtttttaggaccgacttagtgcaaatgggtcaaactttgcatcgggagatgaactagacataccacggacatatttaaggcatcacaattagattcgaagaaagttcatttttgagcactcggagcacccagcgccctggttgataatttgtcaatctgggcaccttccaagtatcataccgacgatctaacttttgcatcatctttgtcttcatcaaaaacaaggaaatatgtactttaggagaagaaataatacttcttgggtgccaaaaataaggcccagcgcccaggttagcaccaggggctggcccaacacccaagttaacattttgtcaacctgggtcgattcttataatatttttcgagaaatatttcaagcatcttctccattttcagcaaagattaatattcaactatttttggggaccaaacgaaacttttgaagggccaaaatgggaactaagttcttgaaaaagtattccaggaattttttttgtcatcagaattaatgaagattcaagcaaactcagtgagaaaaccacaatctcaagaccctagaaatagggcccagtgcccaggttgacctagtgttgggcccaatgccaggttgacaatcaacatggtgcactagttcaaaatgttaaatctaatccgaccattgaatctggaatggtaaaaaatggggtaggagacctcgtcctcaagttcaagaatcttggaagtatcaaaacgacaacctgggaactcagaaatgagtacccagcacccatgttgacaaatggcctggtgcgctgggttcagcttatccgattctgattctattttgacagtctgtctagtttttcataataactaagatccatgaattcaaagaagtcaaatttacaacttcgcatttatcatttccaacatgggaaactcactcggaaatgaagagttttgagtctctcatttctacagaacagcaacatcttcgagaactgatgaccagcttcaccaaaatacagaaacatactaagtgatgtcaaaatatcacttaggcatcttaaagtacattccttggacgtttttacgcttaaccagcgtctagtttgacctcatatgtcaacttgagcattgggatgtcaacttgggcgctggatgtcaacttgggcattgggtcacgaactgccttcagtaaaacgaccataactcactcaatattgatctgattgatgtgattcaacttacgttttgaagctaaacgctctatcaagtcatggctcacacttcaatcacaattctgaagctatcggcaccaaattttaccccaaagagttacgaaaataagctctgattacccgcagcgggtcctactgggctccaaaaaaaaactatcaccatgagaagctaattttcaccgttagattatcatctacgatcaaaaacatctaatttttattttctccctatttttgtggtcctcattcacctataaaaagagag

SEQ ID NO: 398703 - DNA, 693 bp, Cannabis indica
tattgatttgattttgatgtgtagagatgagtttgtaaagaagtgcatagagtttcagagttatgttgggaagaatgatgatctgaggactttgctttcggagaaagagtttattgagaatgaagtttgcagattggataagaagaatagtatgttaaagaattcaatgcaggcatttgtggaagaaattcttgaagatcttcataattgcaattgtggtaatttcttattgtccatggattagttattatcttaatttaccaccttcttgcgtaatttttcagtttaaattggattcattatttgcataaattagggtacgtttgttaatactttcttaattaatattttggactgtggtcataggcataacttagtggttccacaattctcctcaaagaggaggtcccaagttcgaatacccctccctcaatgtatacaaaaaaaattaatattttggactccgccctagcccagacatggacacgacttaaataaataaaataaagttatagaacatacttttgtttcaaaagtggttatagaacacattttgttttttaaaaacacaaattttacttttatttttgtgattaaaaaattaaaaaataaaagtattgccaaacgctcccttacttaaaccaattttaatttcatttcgattttattgtgttataatagtttattgttttt

SEQ ID NO: 398704 - DNA, 539 bp, Cannabis indica
atggggatttggttatatctcgaatacccatcaagaaaacaatgatcccagacttttttggaacaacttgaactggactaacccatggactgtgagaaatagggtaaatgatccctacatctaacattttaattacatcatctcttactacctctttcatgtctggatttaatcttctttgactttctcgggacggcttagcatttttttctaaatgaattctatgcacgcacacagttgggctaattcccttaatgtctctcatggtccaacctatggcctttttatgttttttaaggatatctaacaactttgcttcttgtttttcatctaaatcagatgcaatgatagcaggataagtgttagactctcctaaaaatgcatatttcaaagtgtcaaacaaaggtttgagatctaactttggtggttcaggagttgactcaacatgctctaatggaatacatggttcaattttggctttccatttttcgatatccattagtggggtagactcaagcaaagaattgacatcatgaata

SEQ ID NO: 398705 - DNA, 529 bp, Cannabis indica
actttttgtagtagtgaattacggttttctcctaaaaatgatatatatagcactttaaataaaaaaaaaatactggtttgatttgaaagagagagacgattgatgggtcatttatttatttatttatttttaaaaaaataaaataaaagaatagcattataataataggtttttttttataagagactatatagtgacacgcattgggtgtgagaaaatgtgtataccaacacgctatgcgtgtcactaaagccacgtgaacacgtggctttagtgacgcacatagcgtgttggtatacacatttatatacacgcgtagcacgtctctataggccatagttttttttcttttattttaataaaattataaattttgggttttagtatttagtgacactctatatttttagtgacacacatttcgggtgataaacaccgaatatttagagtctaattgtgtgtgtcaataaaaaccactcctaactctttagtgacccacactttaatgcctgtcactatatggtgtcac

SEQ ID NO: 398706 - DNA, 890 bp, Cannabis indica
atttctatttgtgatttaattttttcgattttgattgtctgatttctgtttgtgatttaattaattttgttatttctatctgtctaatttatttgtgtttagctaattatttatgatgtatgtgatatgttttattgaaattttacattgatataaaagatttctcaataaaattagtattgacatttcattacatttacatatatctatttcattagtgattcattagattttagttgtattggtttagaatgagtccgagttttattttcagaagtagaaaatttgattgtattaaatctcttttggctttgttctctaaaatgggttttgggtttaatctctaaaatagtattttttttttcttttgaaaatccagctttggcagaatactctcgtgaaaaaaaaaaaaagaaaaacaagattatagtagttgttcatgggttagttggggatttattcatcaagtccatattttttttttatttgcctttattttttaactttctacaactattatttgtatagtatagatagctattgtatattttttagtaatcttaatgactaatcaaagagataaaaaaaaatatacaataatgaggtattactatggtattattgaatgaattacttagttgttatttttttaatgcaataatagtgtattagatgtgattcaatgttaactttacccattactatttcatattataaaaatttggtggtatcctttagctgttttgcatgaaaacgattttcaaaagaaaaaaataatgtttcaagaatgatcactcattaaattgaatacaataggaagacaaaaaatcttaaaattttttaaggctatattataattaatagaggagaaaaataaataaaagaaggag

SEQ ID NO: 398707 - DNA, 1019 bp, Cannabis indica
tcaagcttaggtctttaatgacagttttgaagtgagtttttttgggttttattggttggaatatgttgtgtatgccctgtttaggcactctggaaggtttggtagcatttggttgagttttgagcaagatttgggttttttgggggaaactggtacaaaccggttaaccggtttgccaagacctgtaaaaccggttaaccgattttggcaggttccctgaataacccgttttctcaatttttgtccatttcagtatcttagttgggtgctttcctgtttcctatgttaatgtaatgcctagtgaatataacagagccttgagttgtagattcgggtttctcggattaggattttggacatgtaatttacccagttttaatatgtgattagggcatccatccagcacaagactttcagtttaggtcggccaactcacttgaatctggaaagaaggtaagaactgtgtataatgtgtaatatgaatatgcgaatgtatgtatatgttaagtgtctatgcatgcttatatgcttgttacactaccaacacttgtacagttatggtacagagtgcattggtatagtgtatattgctaaggagtacattacagtgataccagcacaagtacgggaaagtacagggtgtgtgtggtatatcactcagtggtactccgggtacgaaacaaactctaccaacactcgtacaatgaggtatgtagtgtatgtggtatagtggttgtaccctagtatggaacgttcttactcatcagttaagccttgtaaataggtgtatggacacctagatacaagtcggtattatatggtatgttatatgcttttcttactgagtctgtcgactcacagttctgctttcatgtgtatgtaaaggaaaggcgaaagttgaacaggagtgagcctgagctcggatgaggttgtacatctcatggtggcgcgacctagagtgttcgatcttgggacatctggagttgttattttgttgtcgttgtgcgacctgacatctg

SEQ ID NO: 398708 - DNA, 523 bp, Cannabis indica
taattaattaataatatttatatttttgacaaaattaaaaaatttaattaaataaagtagaaaaaaaaaagtagataaaaaattaatgataaaaaaaaaaaagaatgtaaaaataaaataaataataaaaaaataagaaaattaaagaaaataaattattatttatcatataataaataaatgaacagtggccaatcaaaactaattatcgatatgacaatacagcaacattatcttatcctaatctactcaactaaactattgttttagtggtgtaattaataaatattataattaacatttatttatagtaattgtacaacaatattttgctctagattataaaatcttctctccgaaggttctttcttcttataaaaggtggggttctcataacgaaaaattccaattttaccctcggctttaaataaataataagtgttgtactattttatttattttttttaattttaaattcatgcacttgcctttacaaaaaaaaaaaaaaaaaactttaataaaa

SEQ ID NO: 398709 - DNA, 694 bp, Cannabis indica
gggttgaattgtggtgtttttggggctttctgcactgaaccggtcaatcggtttagtgggacctataggaaccagaattctggttagtccctaggcagatcccatggaactgatcttccagttggggaaccagtctaccggttggggcattttagtgcaccctagatttttccctttttacgatatttaggatattaccatgttatccatcgatgtaaaacttttaattttggttttatgtccccaaaaagtgatttagcgtgtcactcatcagtttacgaatattgtaatttaggggcctataaatcgtcgagcagttgttccactcaggttgaccgacacacttgaattcagaaacgaggtaagattagtataatattatgcatatgtgtttacatgtttagcgtgcatgcttattaagcctattagattacattgatagcggtataaatatacgtagagtggtattggataccgataaatgtatgtttggctcaagtactatttgacactatcacatcattacgattagagtatgactagcgtaccttgtataggctgatattatggtcgatagtattgtcgtttgaatgttcttgacgcagtaccgccaagggtgcggggaagagttatggttgggggtatgggcccctaattgtaatcttgtttatatttatgttatgattatgctttt

SEQ ID NO: 398710 - DNA, 802 bp, Cannabis indica
tggacaacaacaatatttcaatatatacgaaaatcaaaatataaattaatacattagtttttttgatatttgaaaatgctcaaaaaaaaaaaaataaatcttaatatgtgtacgatgaaaaactaaacttatacattatatatatattaattttctcttaattaattgaacaactaaataataacaaataaacaactgtatgacaactctattgtaacatgtaaattaaatagacatcataaaacaaccccattaattgcatcaactccaagaagaaataaaaaaccagtaatctataaaataaatttaaaagtaagtacaaaatatttgtatattaactcaaaaatatatgtacccataaaaaactgaacataactcaaaaatacttttttttttaattgttgttaaataacttaaaaataaataaataaacaattcgataacaaccacactttaacgtaaaaatagattaggcatcaacaaattgcgacaacttaaaaaacatataaataatctcaaaaaaataaaacaaacttaaaagtaattacgaattatttgtacatcaactcaaaaatatatgtacttgaaatattaaacatatactcttttagtacaatttgatttaatattttacattggtaatattttttattcacttgaatttctagcgattaggagccatagggtagttaaaagttgtgttgagtgttaaaaatacgtatctatatgtgtaaaattaattctatttaaattttaataaaattattgtgatatatttttctctaaaatatttttgtaagaa

SEQ ID NO: 398711 - DNA, 666 bp, Cannabis indica
ttttttatttttttttttgaggaagaagatcgaagacaaaagaacaagagctgagactaaaatcttcaaggaaaggaacttaaatggttccaaattatctctttgtccgttccaagggctgctcgggcaaggccgtgggctgttgtgtttgtagaccgagggatgtagtggaccgaagcacctggaaaagaaaacaaagaggagactatcatggcaacaagacccgagagggctgaacgatctgaagagagcttctgaagacgatgcaccaaattctggcagtcggagacaataatagcaataggaaaacggactgcttgacaccaaagtaacgcccggttgagagcttcagcttcagcataaatcggagggaggcctgaatttgaaggagccataagggtggcaatgattttaccatgacaatcggagacagcagctccgtacccatgcttgttggaagagggagagagggctgcatccacattaagctgaaacattgtacttgggacttgaagtcttgcaagaggctgttggaaactgggagatgatgtagaaatgcgattctgagcatccctgtattcctgcaaataacaactgacagaattctctaatttaaaatcagtggtactgttagaatggaagatggctctgtttctgttattccaa

SEQ ID NO: 398712 - DNA, 687 bp, Cannabis indica
ctttactgataatggcaaaaaatttatatttctttcatatcaaaataattattttaaaaagtagatcataataatataatccttaagctcaaataattaccgatgaaattagaaaaactttatcaagttttagaaaaaaagaaataaaaaaagtaagaaaaatatatgaatttcatttctttgaaaaaaaaaagcaaaaaagtaaattagatagttgatgttattaaagaatcgagtaatagtttaaaaaaaataataaaagaaggagagagtctccatgtctggctcttactggttaacaaacaaaaaatagtgtatttcggtacacgcatacaaaattatcttagcatttaaatgttgaagggtattttcataaatattttattaagtgcgcacgttgaggtaattttctcttaattatttggcagatttcctcaatctaaaaaatatattcaattatgaagaaaaaaaattacgaagaggatcattaaaaatttttgtaccttgaatttcttctctaattcaattatggataagattcaaagtttttcctatctccttctcttcaaattctctgccttgtacgatttcagtttttgtttgtaggttgtttttgcattttttataacaatggaggtcaagatctctctgtttttttttagtattccctttttgtatttggatttt

SEQ ID NO: 398713 - DNA, 525 bp, Cannabis indica
ttagacttattgagatatttcatgtaatgtcttctctaagtagatatcacttagttgatcttagagcaatgatcctaatcctgagatggttaagttctggttcaagtgtattatttaagttctttgacttgttcgttaaagttgaccaaatggatcttccaaatacttacatcttgagaacatgatagtacgattgagtgaaattactaatcatgaatataaaatctatagcttctataaatacatagaagtgaaatgatgattttcttcgagcttggctaaacgagattaaatggtggagtactcatttcagtaattatgttagtttatagaaatatcattatttacaaggagcttaagtattttaaggataaaaaacactgaagggtagatcggtaaaattatccctactcgatgtagatcatcaatagagggtcattgattatttcgattaaaataattgataatgaatagtgtatctatattcggaatatatagagcattctatataattaggagtgcaat

SEQ ID NO: 398714 - DNA, 1759 bp, Cannabis indica
tgccatttttcaacatattgcgacgcaacaaaaagtttgagttgataaaagagtacgaagaggcctttcagaacataaaaaggcatctagcaatgcctctagttttggcaaaaccaataattggagagacgttatttctatatttagccatctcagaagatgcgattagtgcaactatagtgcgagaagagagcaagcaccaacaacctatttactatgtaagtaaaaggttactaggggaaaaatctagatatcctactctagaaaaactcccattatgctccatgcatctcataaactatgaccatacttccaggctcaccccataaaagtgttaaccaatcagcccttgagacaagttttatcaaaaccagatgcttctggaagattgataaaatggtcgattgaactggggtagttcgacataacataccatccttgaacatccatcaagggccaagctttagctgacttcttgatagaaggtataactccagaagaaattccacttaatcagtgagacgcggaaacctagaaattatatgtggatggcgcatccaacaaatagggttcgggtgcaggggtgatattattatcgccaaaaggctttaagtttcactatgctctgaggttccaatttcacgcatctaataacgaggctgagtatgaagccttgatcgctcgcttaaagatagcagaggcgttgaaagtcaaaaatctcatttgtcatagtgattcgcagctgatcgtgaactaggtcctcggggaatactaggccaaatgcttaaaaatggtgaagtatttagagaaagttcgaaagaagttggaaagattagattactttcaaatcgaacaaatttcgagggaacaaaactccaacgtcgatgccttagcaaaactggccacgtaaaattacctggatgaattaaatttagttccggtagagattttgagcgagccaagtatatgtaaaactgaagacgttaagatgatagatgactctcctacatggatggactcctattgtcaattatttactcgacgggaaacttctaaatgacaaaaacgaggcacgaaaactattgtattaagtgcctcgttacacaatgatataaggcaaactatatagaagagggtactcaatgcccctacttcggtgtgttctccccgcagaagtaaacgaaatcattgaagaaattcattaaggcttctgtgggaatcatgcgggttagaaaagtctgtctaaaaagatcattagacaaggatattactggccaacaatcaataaggatacacacgaatttgttgagaaatgtgataagtgtcagaggttttcacatatacctcatgtattgcctacagaacttagaatgatgacctcgctctacccatttcctatatgggggattgacctaattggggcattacccaatgggcgaggatgagctaagtatgcggtagtagcagtcgacttcttcactaaatggacggagtccgagccccttatttccataacctccaagaaagtccttgactttgtcgtcaagaacattatctgtaggtttggaattcccatgaagatagtatccgataatggaacccaatttggtaatgacttgttcactgagttctgtgagaggaataaaattatcaaaagcttctcgtcagtatccaagccttaggaaaatggacaaatggaagccgttaataaaaccctaaagaatactatcaagaaaaagctagatgctgccaaaggcag

SEQ ID NO: 398715 - DNA, 563 bp, Cannabis indica
agagggtgagcccctgtttaggctctaatcacgaccaccacaagtttggttgcgaccatggcattgacagttccatattttttttctattttattttgtacataacttttgactccgaactccgttttggacgttctatatatcattttaaaccttgttttgagctctattgtttggtccagtattagagtcttaattgtaaatattatgaatgtaattttttggggattaaccctagtttgtaaaatccgaaaattgtgactaggattactgactcttggttagaatcaccggtggatcaagatttatccacatactttgaaaattaggtaagacatcaaactaagcacataacatatagcgtgatggtgcaattatatgatatttgattgttattgagaagtcgcgacccaaggttattaccctaagtgcatattatataaatgtgcaataatctgttaattgaatatctgtgtagagttatgtgtgtaaggcataaccaggttaaactcagtgattataaccgagacaaactctagtaaggccttaaatataaaaaaaac

SEQ ID NO: 398716 - DNA, 512 bp, Cannabis indica
tatgagaaacatatatttttttcccgctagagaaataaattacctgaaagagtaacttttaaatttcttttctagtatcgttaacaaaaataatcaaactttcaacttaaacaaaatttaatatatcaaccaattttataaattacttgatggaaaatttttatcactcattaaatatgtaatatcatgatttaattctataaacaaacatattacatattattataagtatgaaaaatgtagatctaaagaatacatttgttgattcaaagagaagaagccaaatagtggaagcgtaccttaatctctagatagtgatgatcttaatccatcttgtagagatgatctttatgatgattttaggtaatgatgacactacaagaaatgtcacttttgcaaggacatttttgttttggcaaaagtttcgtatagcgctggtaaaatggaatttacttgtgttggcaaaacggttggcaaatcaacgttggtataagaacttttgccagcacaaa

SEQ ID NO: 398717 - DNA, 561 bp, Cannabis indica
ttaaaacaacctacatattgcatcaaccctagtacgaacagttttaaccctaaaaaactaccaaaaccagattagataataacgatacaagcgaatcaagcaactgatcaacactatgtaatacacatatgaggaagaagaaaataacttaccgtttggagttagggcttggggcaacgcctgggaaatccttctgcaacccttcgaacgaagcaaggatcgccttgaaaaaatacagtcgaaggaaactcgtaggaagaaggtcaaagacaaggatggcattcaaatcttcagaggggttttatggtgatccttaacgaagaagttaagggtatttctcaaactttctgaaatggtgcaaaggtggttcctttttctttttttatactcatgataatgattttaaaaaagatttgatccaatggacgtgattcgaagtggaagtggaaaagatgatcatttaattctaatgtacctcgaaaccgcacaaccgccaaaatcagaggaatgcgtcttttcaaaaacagaggagcgtgatgaaaatacccttggtaatcatta

SEQ ID NO: 398718 - DNA, 1505 bp, Cannabis indica
ttatattattaacatccaatccttgctaacttattagcctttggttctcaaacctaagaaagtacctccaaaaggaaggaagacaaggagaacagttggggaagacgcccctcaagataatgtccaacctccacaagctgaattccctatgaacgcccttctcgaagccttaagggcagttcccgctcaatagatggatcctaccgcttgatagagtcatcattttcagatcttccatcggatccaagtgcctgagtttgagggtggacaagatcccatggtagctgaacggtggttgaggtagataaagaaaaatttcaacacagtaggaacacctgaggaatattaagttacttttgttgtgttcaagttagagggtggtgcagcagattggtgggagaccttgtctaggacaatggaaactgatgggatgacttggcgagattttgaggaagtctttagggaacaatattttagtccatctcacaagagggctctgattggagtatttgatgatctaagacaaggggatatgattgtgaatgaattttacttgaagtttgtagagctatcctcttatgcatatcctggtgttgttgagcaacccttggtgattcaacagttcatgcgtcgtttgaggcgtgcgatacgtggccctatagcccatttgacctttaataatctgacagagtgtgtgaccgcagccttgcaaaatgaggctcatgtagaagggaatgagaagaagaacacaagtagaggaagaggaaatgaccgaaagatgaccaagaagaatcaaggacagtggtcccaaggacaacaatttggtgggggtagcactagtagtggttcatctagaaagactcgtaatggaccatacgggtgtttcagctgtggtcaacaaggtcataagaagaaagattgtccacaacgacaacaaagatttcaagcatctcatggaggacccatagggagctatgtagagtttactccttttcatggacagcccaggacaaaccagtcccagtcttcatcctatgatttcacaccctgatcgggctagcagtctcagtatcaacatcagtttaggccgcaaggttcagggttcaacatggggtactcacaaggtttctgaactcctactcctagtgggagtcaaagagggtacaatcaaggtggagggtctggtgcaagtacaatccatcctagttagggaaagggaaaggcaaaagcaaagtcatccgttcaagcctacgctcttggggttgatgatgtatagggcgaggctgaccaaggagttgttgatggtatggttcttatctcacactcttgggctcatgtgttatttgatactggtgcatcccattcctttatatctttgatgtttgctagtatgttgggttttagttgggaaacttttagtcctgcactacatttgagtgtacctatgggcggacacgataaggtatccaccatatgtaggtcagtttgtattgtgttcgagggac

SEQ ID NO: 398719 - DNA, 627 bp, Cannabis indica
ggcaaaatggtcattttgcttttgtgtgttttgtcttttagtgaaggttaattagtttatatagtctgaatttaagttattttttaattgataaattaattgataaatctctctctctctcttgaaatccctagagcagctagggttcttatttttgtttcttcaattatgtggtttctagcaaggttctagtgattcgaagctctaggtaagtttctaatgctttcctctttgatttcctacgttttaagttatggaattatgcatgccgtgtggatttatactactgtagttgttgttgttgtttgaattgtgtttctggggtttaaatatgattagaaagtttgttttgtgctgcttgatggctggttgtgaggtttgttcaaagtttgagcttatgagctcaagctttgctctcacatggtgaaaattgtttctgagcttgtagtagtgttttattgcttgggatatgttctttatggtctaaatatcaggtctggaaaatttggtaaagtttggggttgaattgaagttgtggtggaattttgagtgattcccacagtgaaccagaattcttgttcagagggacctgtaggaactggaattccggttggtccccaagaaacc

SEQ ID NO: 398720 - DNA, 670 bp, Cannabis indica
gtttaaattatggggataaagtttaagcaaatggttcgctaataatgtcccattctttaaaattggagagggacaacaatggtagctgctccgaagaacaagatgagcatgtggaattggattcaataaatgatgatatcttcttactttctggcactaaagttgttgatggttttgctttgatacttgtcacttcagttgggatgaacgcaaggagagaacaaaatgttaatgtcatccacgaatcgatgcaatcaacactcttagaaacttgactacaaaaatgaactcagctagagattggatcggctatgcattttaatattcactatttttaaattttaaataatttatagtatcgaaaacagaattttcgatattttaatttaataagcgtattgaaaaaaatttatatttattttcgataatttaaataatttttacactaaaaatacaaaaggctaactttattacatatatactacatcacggtgaaagcaacttttatacacttttgcttaagttttttacatttttaccacatgcacacacatatcatgcattttgacaagtcagtgacatatatcattacatcaatcactctatacatcatttccctcttttttctcttctttttcctattattttatatttcttttcaatttttttt

SEQ ID NO: 398721 - DNA, 1205 bp, Cannabis indica
gagtttttagtctcaatatttgttgtacactaaaactaaatagtgacaacttgtaactaaatactatatttagtcacaataacttgttatgactaaaagtagtaattttttgtagtaaatattatatataataaattttatacttcttaataaacaatttcaaataataataattaataaaattgtgaatagacttaagtttcattttcattttatggggttttatcttttgataaataaaaaatgtaattaaataatataattttatttttattatatattagaattatttttttcaagtaaatatttattatattaataaataatatttttcattatagtattataaaaaattaaattaactgagcaatattacctagtatattattaaagtacatagcaccaagaacacctccttaattagtgatcgtattagactgtaatagatggagaaaacacatactgtgatagagctttaatcttttttttttctgagataaagggttaatcattatatgtgattattaaataaaatatgtaagattttatattattgaataataatacttcaaatcatgtcatttagatgtctcttactaataaaaagatcaatcatgacataataacatttaaaaaaaaaaagctaaataattataaaccaaacaatataaataaactaagaatatgttatgtagctatagacgcagcaaaaaaaaagcatatggttggcagatatatgcaagaagaatagtaatagatattaacgtcaacatataactgtccaaaagagtagtcgaggaagacgacttatgatgcgaatgatgtccatgattcgaactttctggcaacaatggtattcttggcatcggtgaacggcttctgcttcctccaccacggctgccggaacctcttcctccactactaccaccgctgctgcctgccgcgacgccggagattaacaaagctacaaaaactaccagaactaaaaggaagtgtttcgaccattttgacgaacaacttttggagctcatcactgtgttttgcgcttattcaattgatcgatgatattggatttggatattttggtttgaataaagtttaatataaatatatatttatagaataaatatcccatcatgtacgcaaaaccgtttgaagcaaacagtactgatattattttattattattattatttgaaaaagaa

SEQ ID NO: 398722 - DNA, 505 bp, Cannabis indica
taattggcctagctaaagaccccgtccgtacatgttcaatatggattatatattatttactattatatatgatgagaggttaattatacatttacgaggagagctaccgtcaatttattcttacaattttttagtgaaattttacatctaaaaatacatgttgaaatatttttttttttcaattttttttttttttcatggcagtgtttattatgcttacaatttatgcaaaatttttaaaaaattgcaaatagtttacagtgccgaaaatacgtttaaagttttttgaacacgcgtggtaaactaaaatatcaggagtttgttttcggtaccgtaaactatttaaaatttttcaaaaatttacaagaatgatattgtaactataacgaataccgctatgaaaaaaaatacttcggtatgtaattttggacgtaaaagttaactaagattgtaattagaaattgtaattagcactcatctatatttatttatttttcttaataaa

SEQ ID NO: 398723 - DNA, 514 bp, Cannabis indica
tcctggtaaaatataatccaacactttaagcaataatataaatgacacacaggttacgcaaatactttcgtttcacataaaacctagattatccaattttagcattctcaattctcacttttcagattttgaattgagatcatagaacatgtagaaggtgatcaatcttaaacatagaattacacacaaatatagataatttcacaaacaagataaaaagaatggcaattatcattaactaagcaaaaactttaatcaacattcatcgtctttcccaattgggaatttagttcataaaaaccatactaacatccataattaaatctagaatagaaattaacatagagaaattcaagagttaagaaagaactagttggtgattgcgctcccgatcgtcacaatagcttcctctcctccttcattcacttttcggggctgatttctgataatttttgtcataaaagtcgagtcccttattgtaacaccctaactaacataggcgtattacgtgatt

SEQ ID NO: 398724 - DNA, 542 bp, Cannabis indica
attacttctatccaaataaattgcgggtatgcatgaatcgattaaatttaatgagaatcgactgattcaataacaactgaccgctaaatattgaatatccaataattatgatcagatcgaattggatattattttcaaatatccaattagatcggatcggatgttgtatggggtgtttaaaaatctaatacatctaacatccaatcaaactaattagtattttcatttagtttagatgagtaattatattttgtattgttatagtacaatctatatgtatatttaaaaattaacattaaaattttactctttttttcttggattggatggatccaatcaaatacatactgaacctaaaatattagatggatccgatccgatctaaaaaatagtaaatttaatatattgggtaaacctaaattaaactaataaatatatatgaaatcactactacaatgtaggtctttagcttcccttttttcaacccaattttagcttttttcattagtgtacaacaaaacaattatattacaaaaaatgtg

SEQ ID NO: 398725 - DNA, 561 bp, Cannabis indica
atgtaaagaaaattttaaagagatattttaaaaacattttcaagtaaaataaggtttaaagaggattaagtttaaacgataatagcttttagctatggttggttcatattttatggcttattagcaaaaagggaaagtggtggaatttagtattcagattctaatattattatttaaaactaatcaagtaatttaaaaaataataaatacgaagatattgtaataaaagaaggtggggacactaattgtcaaatgcaaatttattgtgttcagatatatttgggaagtcaaattttatggaatttggtttgaaatctatgtcgtataggaaggtatcattataaatatttttatggtaacttaaaaagatacaatttttgaaagttttacagcctgtcttttgaaaattaaaataggaataattatatcataataactgaataggattattttaagtaatttcaattcaatatagattgattattatcaagtataaccaaaaataaatatgtataaaattattttttgggataagtacaagaatttgtaatattttagaaa

SEQ ID NO: 398726 - DNA, 861 bp, Cannabis indica
cgaatttgaaaaatgacaaaaattttacaaagtatggaaatgatagtcttgatgagagtgatgactaaggtttggttttttgaatgtgttcattttatttttagttttattatatgctctgtgtatatatatgttttttggtaatttttttttcaagaatgatgatttaatgatgttgaagtgattggtgtgaaaaatcaagatgcaatggaaactgttgggctggatgagatattcaatatacccaggttattttgttttgtaaactagtttattgtttattgttttgtttgaatatttatgtttgtttattaattttttattttcgggatgtttttttgtaggtttttaataatgatgctccttcatttgatattatgggtcttatttctggtaaacttgaatgatttatggaagaaaaaagaatactgataaagtgaatgatgaagaacaggttgttgatgatcatgacctttttaaggatggtgttaaaaaatgtaaggatggtgaaaatgatggtggagatgaccaggctagtttatttattattaggtttttgtttatttagatatttggttactttgttcttttttctttgttaaatgttctttattttgttttgtatattttcagggtttggggggtggtgttgctgttaaagctattggttcagatgggagaaataaagataatgttgagggaaagaatattgaagaaggtaaagatgttgcagatgggagtaataaagataatgttgaagggaaaacagttgatgtatgcaagtgtaaatgatgtcgaggatgttactagtaagggaaagttgtttgatagtcaaggaactgaggatagtatcactgtgtc

SEQ ID NO: 398727 - DNA, 763 bp, Cannabis indica
gcagttgtggaagtattatgttttttgtcacttttacgtgtttatggagtttttttttctttttaggttggggtggttattttcacgatctatatcaagaagtttgttttagatctgttcttgtttgaaaataatgatgggagttttttaatttgattttttagtttttgcaagtagtttcaaatttgtttttataaatttgctttttgttttgtttgcatttataatgtgttacagattttgcttttttttttccctattgatagtttttgctaatattgtggtacataatgatgagagtttttttatttgatttttcagtttttacaagtagtttcaaatttgtttttataattttgcttttgttttgttcgcatttataatgtgttacagtttttgattttttttccaattgatagtttctatttttttattttaattttttttatttaatgaaattttttgtagctgtgggaattctactttaagcctgaagataaattgattgggaagattactttttatcctaattcaagagtagattttattaaggtcattaagaagaaattaacctcagaacaacttgtcctctttagggaaacatgttttggtcattttctagacatgtcaacagttacaatgcaagctcaattgattcatgcatcattgtataggaaagttcatcaaaataatgagcgtgagattttgtttaggtttggcaatgacactgttagatttagtgttgctgaatttggtcttattt

SEQ ID NO: 398728 - DNA, 1254 bp, Cannabis indica
cagtcattgacaatcgtagtcagtaagccactatgctaatacaaaaatcctatcaatctgtctggtagcaacccccaaatgtcatcgccttgggtgaaacagacgaagatccagcgatgaatacttcccagactataaatggtcagctgtaaaaacccgagtcacaggttccgcctgtgggcctagtggtaggcgggaatactttgtcttataattcatcaggaaaagtcatacccaaaaattccaaccaggcaaatggtgccggtcagctcattagctagaccgacaagtcgttgagacagctaggcgtttccatatttgatagattggggacaactcatgatctcaaaaacaatttaaataggaggagaggagtggacgattagcttgacatgccgatcgtgcagcccgaaacctgcgctaaaatctccgctcagaaagatgctgatgtgactcagatcggccaaaatgtcgaacaggttagtccagttgtgcagaggaatggcaacctggaagatgtatactggtaaggcatggccggtcagaggaataacgatctcaatttggatcgagcacgtggaacccctttctgccccgagatcaatctcctggagttgccccacaagtttaaaatgttggatttattttaccaggatcttagatttactaacaagtatgttgtttaacatcctaaatatgaacttctaaaattatatgaaataaacacatataaagtataagaaaccttacagtggttgcagcagaatataatgtctccttccactctaacccttgtgtcctttctgtaacagagtatcaccaatttctgagcccgaatgtccttctcttgaatctggattcttcacaaccttacacactatgattgagataccacttgatgtgtgtgggcactcgctcactcactattggctcaatttagaagagaggaatagagagagagagaaggtggcggctagggtataggaagaaggctttaaatttttatctgaaggaatgagatgcatcatctttttcctgaagccatcacgacctatttataggaaaccacctagggttaagttaaaattatttggcactaaaataatgaaaaaaatgaatggtaaattgcactataagtggccgaccatgatgtggacaatgggccccactttacaatttggccattttgtcctttctccatctcattttctcaaaaacgccaattttccaatttaactatttaaatgccaattc

SEQ ID NO: 398729 - DNA, 603 bp, Cannabis indica
atatctttcatttcataaatataatggccattacttgtagttttgcttctccatctccattgcaaaaaaaaggcttcaaaaatgggtcataaatcagttttctatactttttttttcatgaattcgaaacagcccctattttgattgattcaggctgtcttctcaagtgaagaaattaatggtagttctctttctagttgggtttcgtttcggttgtgttgggttattgggttggtcaatcgaaggttgtgtgcgtgagtttgttcttcttcttaggtgacatcgccgaaattaatggtgctttctcgcctgctggaattttttcatcgttgatgacctcattacatcacatgaagatttcaattccaggaagtggggatcgtgtgggttgaaagtgtgcgtaagagttatttgtgttatttttttttattgagttgtatatttatttatttggtcggctaaaaagtttttttttgtaatattgttatcttttttggttaaaattaaaaaaaaaaagtactttattttatattaatatttataattagatgaatgatatattaaagggaaattatagtaaatggcatcaaatcatatatctat

SEQ ID NO: 398730 - DNA, 464 bp, Cannabis indica
tcaacaaacatacgccttcgttcttctaacgcgagatttacgacagcgcggagttcttcctgatcatgatgtatggtattgttatgaccctgcatgagtccaagagcgtcacggagattttgtaactcagtagcatctctaatggttgtttgaacatttgtgccgggcggaacgtctgtgttatgaatgccctggttgggtgcggaactgttattcccagtctccttcacgccaggcacgatttcatctatagcagtcgttacaccgtgacccacgtttgctggctgtgaaggattaacagctggcggaacccttgtgtttcttgggttctgcgttgcaggatccaccgtctgcgaattggcaggatccccttgacccctacgagtctgcgccaccatcgtatttgttgatgagcaattcttgatccttctctcaataaaagtaccaaaatgttgacctcgctt

SEQ ID NO: 398731 - DNA, 1415 bp, Cannabis indica
caggtcacactagtagggttctcgggggaaagcgttgttgctcgaagtttcgtctaactgcctgtctatgcgaatggagttaacaagtcagtgaaatttttagttgtggactgcccatcggcctacaatgccatccttggcagaccgtggatccatgcaatgaaggcggttgcatcgtcctaccatcaagtgatcaaattcccctgcaagggtgaggtaagggagattcgaggggatcaattaggggcccgcgagtgttacacctcatccttgaggagtaaaaacaagttatagcaattaattaactcttcgacctcggcgaaagaacagtcacccacggttgaggagttacgagaggtacccatacaaccgacgaacccgacaaaaacaacctccatcggcatgggacttacgggagaccgggagaatcaaattataagactgttaaaagaatattttcaagtgtttgcgtgggaacactgagacatgcctgggatagatccgaccataattactcacaaattaaatgtaaacccaaattatatcccggttaagcaaaagaggagaaaaatgggggcggattggaacaaggcggtgaatgacgaactcacaaaaatgatagaaaacgataccattgaggaggtacagtatcctacttggctcgccaacctcgtggtagtcccaaaaaagaatgggaagtggagggtatgtataaatttcaccgacttaaacaaagcttgcccaaaggacagctttcattgccacacattaacatgataatcggcgctaccgcaggacacgagttaatgagcttcatggacgctttctcaggctacaaccaaatcctgatgcaccctcctgaccaagacaaaacgtcattcatcactgagaggggaacgtactgttacaaagtgatgcctttcgggctcaaaaacgtcgaggcaacgtaccaacgaatggtgaacaaaatgttcccccaacagctcggactgattatggaagcctacatcgacgacatgttggtaaaatccaaagatggcaccgaccatgtttaccacttatgagaatgttttcaaatcctccttgcccactcgatgaaactcaacccagccaagtgtgcctttgctgttggatctggaaagttcctaggccacctattgacgcgacgaggggtagaggtgaatccagatcaaatagaagcttttcaggcgacatgccaaccccgaaccgtaagggacatacaaaaattaactgggaagatagccgctctaagccacttcatctcaaagctttcagaaaggagcctaccgttctacgacctattgagaggaaactgtaaatttaattgggatgagaaatgctagctgggcttggaggcgttgaaaaaatacttgacaactgttggaaattatttt

SEQ ID NO: 398732 - DNA, 487 bp, Cannabis indica
catagttagctagatttcattttaacggtttctattttgaccttcaatatgttgttcggtaaaattaacacaagtatatacgtaattaaatcaaataatataataatagataaagtatcgtttatattcatttgagaattaattatcaattaccaattaattaattctttttaaaaaaaaataacaatgatgaaatcaaaaattattaagacaatttctaacacgaacagatacaaaaaatgtaaccagttttgtcataatatctttagatcagattattataaatttttattttgacgaaaaatccgtttagtgtcctattttaataattttagaaaatataagatctattttgtcatttaataaaatagatagtccaattgataacttttgcaaaacacatggtccaaaatagtatttaccatttattttattacttcataatgtaagtacctaatttctcttctttctattcaattgataagtt

SEQ ID NO: 398733 - DNA, 762 bp, Cannabis indica
ggatctttcagagcagcttgaagagaccgttggttcagagggtaagatggattctgggtaatggatgtttggtggccaagtaagctttggatttgacaatgccatttttcgatcgagtgatcataggatgagttgaaggagtagcagcacttggccttggttgagtttctggtaagggtatggtgtgggattcaggcacagtttctggtgtatggtgaggtaagagtgctgtttgctgggcaaggacagttgttgtttgttggtgagattcatgtaagggtgctgtttgttggtcagggatggtggctgtttgttggttaggtgcatgtaggggtgctgtttgttggtcaagtatggttgctgtgtgttggtcatgttcagggaagggtgctggggagggtgtagtggagtgagtctcagggatgtggtgatggtgaatgattggtgcagcagcagttgtcataccagaaaaagaaggatcagtattgacaggtatagtagaaaaacttgcagatggaaaggaatttgtatgagaagaagtatttacctgatctggatgtctgtgaaatgtgtccccaggataatgaagttcattgaagatgacatttcttgcaatgaacattcggccattcttgttttcacagaagtagcccttatgagcaggagagtaaccaagaaacaaacattgctcagacctgaaatctaacttgtgagaattgtatggtcttaagtggggaaagcaggcacaaccaaaagatttca

SEQ ID NO: 398734 - DNA, 1110 bp, Cannabis indica
tcaaactgctttctattgtttgacataatcttctatggtatttcaaaccgacctatgatgttcttgacaacaaaatcaaggaatttcttggaagttattgttgttaggggtttagcttctacccacttggtaaagtagtctacaatgactacggcatactgcacccctccttttccctttgggagttgaccaattaagtatattcccgataaagcaaaaggttaaggagactgtatctttgtgagcttattgggtggagctctagatatctttgagaatatttggcacttgtcatatttttgacaaagtccatcgaatcctcgatcattgttggccaaaagtacccctattagagtatctctttggataggctttgcccctagcatgattgacgtagaagccttcatgcacttctatcattaaacgctcagcttctatcttagtgacacaccttaagagcgacattaagaagctttgtctgtacattacttttttttaggattagatacctagcatcttttcttctgatcttttttgcctcggttttgttattaggaaaggctccactttggagttaagttgtaataggtgtcatctaggttggaattttgtctaacatatcgacttcttcaatgatagtaatgcttggttctttcaagaactacattggcaccaagtttaccttgtctataatggtgttgcttgctagatgggcaagtgcatctgctatggcattatgttatcttggaatttgccttattgtatagcctttgagccgacttagcaagtcttggatcttgcttaaatatgccatcattctttcacctcaagttgtgtattcactcaggacttaatttatgactagctgagagtcgttatatatgtccaggtggtcagcccgtactttgtgtgccagcttaaggccaatgatcagggctttatattcaacctcgttattagaggctttgaagccaaacttgattgctctgtgcagctattgcccccaggtgttatgagggcaatgcctataccagacaattggttagtgcagcttccatcaacatgtagtttccatgttgattctttaggttcttgctctcgcttcttctc

SEQ ID NO: 398735 - DNA, 917 bp, Cannabis indica
tttttttttttgaaagaaaaagcctatttttgcctcttttttcctattatgtatacataaataaaaaaattataatggaaaatttatgaatgaatcttaaaaaaaaaaagctagtaatagaattatagttttaatatatacgattttttttttctaaagagctcaattttaaaattttgcccccaaaatgcttgggcctgccttgctaagaagacccgagatcgatcgacagatcgatggatatattatcgatccgcatgaacgagaaatgggtttggctgagtacttcatcaatccaggtgatcgacctaacgatcgtttaatagggaaaatctgagccaacattcaaataatatcattgagtcggttgagctagttatttccctcccttacgatcaaatggtataaatatatataggtagaattaataagtaataaaatagtccattctctataactcactctctcattttccttctcactaaattctttctcttacttaagtatcagagagtcttctgcatgaaagccctcagagctccaaattagctaagacggacagaaggaccctcaaaaaggcggggatctagcgaagaatcgaggcacttgtctatttttggcaagtcaccaccgtgcaatatttggacctcaacaattaaattaagattcttttgaagttataatcaagtcatcaatagtatcagtctttctttcgaagtcttaggctatgtttggtaggaaggagagagagtaggatggatggagattgtagaaatgatggggagtaggagggatggagaggatatttgttattctttgtgttgtttggtgttaggagtatatgtagaaagatagagagtaaaataaatattaaaattactattttatcattttaatataattatatattatttttt

SEQ ID NO: 398736 - DNA, 679 bp, Cannabis indica
gaggatcgagaatcttgggctgcataagagctagtagagaaatactcaccaagacattctctgtattataagagtgaaacactccccaaatacattctctgtataaatacatccataaataacaagactcgtggactaaggctcattaacgccccaaccacgtaaaaatccttctctaattttcttacagctctctaactttataatattttattagttgccgaaaacctcagtcaacaattttattattttattcttaaaataaaaattgcctaaccatatctattttaaaattaatttattttgttattttaattttattaaattataagattagaaaatgatattgaaaatatctatttggttattttcaaatcatttatcttattagatatttaatttaatttgataaaataattcaaataaacctagatattttaaaattagtttaactttaaattttgaaaagatattttaggttgtttttaacaaccctaaatttcaaaatagctggttagttaaaataataagttaattatataaatatcttatttcacatttgttacaaggacattgtttgtttatttatattttttgttcaaaaactttaatttacaaacctattatttatttgatctaaattgctatgattaacttattgacagatccaatgatctac

SEQ ID NO: 398737 - DNA, 623 bp, Cannabis indica
gactgggacctggaccgggactcgatactccaacgcaggacctcaaaaccgaaccgttaaataaaccaagaccaggccaagaaccgagacaaggaccaattctgaacatggaccgggacctgcactcggactaggaccctaacccagatcgggacctaggaccctgacctgaattggggacccagaccctgactcaggcgcaagacccaaacctagacccaaacttggacataagacccaaacaggacccaagacaagagctagaacttgaccaggatctggatttatacccaggactggacccaagacccgaggtttggacccgacccatattcaatgtccaaatctggaaattagaccaaggctcggaccacgacccagaccagaactcgaacccgtaccaaaactcgaaactagacttgacatgtggtttgtgtttggatttgggactaagactaagacctgaaccaaaacacagacctagacctaaataaggactcggacccagacccatacccgaaccttaaatcgtaccctgtgacccgaaattggaaccagatctggaagcggaccattaaactctaaatcctaaaccttaaccctaaattctaaaatctttacac

SEQ ID NO: 398738 - DNA, 1612 bp, Cannabis indica
gaagggagaggacaagtatccattgcttttttgagattcaagggcagtaaactttttgttgcatagcacggaatcaaagcctgaaactgagcagcctctttgaacaaagataggtataaactaagacattttgaattcacacataaacaaaagggccttgtaaatgcctaatttagcatgagtaccatagatgtaaattaacaggggtagtgacatgttcatgttggtcgtgaaattctactgctaagggtgtggtaggggtgatttttggtgtataaatggaggagaaggaggttgtatttcaggtagggaagaagaagactaggtcataaatagagtaggaagattagaggtgatatgagttgtttgagacattggaagagtataagtaggagaagatgatgtaggtgatggaggagacaaagagggagtatgagacaaatgtaaaacaaatggaagataagtaactactgtgtgaggtttatggaaaggaggtgaagggagaacttgaggaagtaaaggggaagtaatattcattgaaaataacatggcaagtgatatagactctaccagtggaaggaagtaaacaaagataacccttatgctgacttttttaagccataaaaacacaagacaacacaagaggaagagtaaaatttgagtttgtgagagttgtaaggacataagaaagaaaatcattcacaactaaaaacaagaaaatgagaataagatgatagattgttgtaaagggcttaataagtattacggttgtgcaaaacttgagtgggaaggcgatgttggtttcttatggtccatgtcagagttagaaaaacgacaagtcaatttgataaaaatagttttatccaatatgaactataagcccaaagatctcagcataatatatacatatgttaaatctaaactaataaaaagaagagacaatacctcttgtagcctattaagggatcctccctatcttttagtataattgcgatcacccaatttaagaactttgctaaagaattcacaccgtaatctttcaacccatcctcaacactcaggaatagagtgaactattagattctataggatgaagaaatttatgtattgcagtgtattatcaactcatgagatactgtaattgagataggattgatcccaatctcacaccatactatacagtgtggcgtgtgagactgaggagagagagagtggtgtgtagaagagaaagaataggagtgaaaaatatttcttcaaacttattacgttattttctggctatctcaggttattctgagttattagtttataataatatatatcatatataaaatgttataaataaacttttttaattaatcatttaaaataaaaaacatctaatttgatttaaatttataactaacagaaatcagttaaatctttttatttaattattatctttttaattaaataaattattcataataatttttaattcaataattaaaaaataattaattattttaatttaaattattttaactaataagataatcaaacaaaattaacttgcatctttatatatcaccttacacgacatgtgagccatattttaaagtccaaaattaat

SEQ ID NO: 398739 - DNA, 509 bp, Cannabis indica
caagtttatgacagtagaaaccgaataaaaattgatatctcagaaaatataatcaattagcatcactaacctgcaccccaatatgaatatccaagggtcaatgtatatggaactacatcaatttcgtacctctcagctcctcaagtttatcattggggatcttagataaatctgcctaaaagcaaataatatatacataaattttgcaaccaatgatcatgttatctaaaacaaataatttacaagcaaattttgttaatgtcaccacgtgatttatccattttaaaaattgactcatctgctttatttgataaattaactttgactacaatttaagaattaaccacgagcaaccagccaagctcaatgatgattaataccatgaactaaaatcagcattttggctctttactacagtaactacgaactaaataaacaattacatagacccaacaataccatgaaacctcaagaatctctacagatggagctcatattcattttatttt

SEQ ID NO: 398740 - DNA, 655 bp, Cannabis indica
ctgtaaagagtcaatatgccaatgtctacttgaaagtagtatcatctatattcacatatatggatgtacattcaggggtggatatgagttttcgttatattctaaagacaatccactctagattttaccttgtgtgaagaaatttcatgaatttctagcaaatggggaaaaccattaaggtaagtagttaaaagatcttgcgaacgataggggtggagaaatacttggatatgcagttcaaagatcattaagttgaacttcgaattgtattcaaacttacctccccgaaaattcaaattgcatattgatgaaagtgaaaggtttatgattagttaataacaattgcctaggtccttctagggatgtacccaagtcataggaaaatttcagaatgatggaatggttgtgtacttcgtgtaaaccattactagattcatggatgtcctgatcgtaatcttcagaaaagctagaactgttaactaaggttttcatgtttgatagctattctaagtgattaggggtggaccatcccatggtcattaagataagaaagtatttgtttcaacaaatactacttttctaataaaatgactaagtctaaaaacaaagtagtaaagtagaggagataattttgattccaatgtgttctatcatc

SEQ ID NO: 398741 - DNA, 597 bp, Cannabis indica
agccaccggttgctgtggatgctgtccttttctaatccatagccgaaccactacctcccctgctaaaacctgatgtaggaggggcaggagccccgccaaccactggagtcccaacagactctgtcatgcatctaactgcgccctcagctcgcagtgccttatccaccatttcagcataggtggttttgtcgtcagtagtaatcattagatcatgtctaatcttcacatttagtccatctagatatttctcctttttattgaaatcggttggcacaattcccgaggccaacctcgccaaacgatcaaattgagtcgtgtactcaataacactcatattttctttctgagtcaggcgggtgaattcttttctcttagcacttctgactgcctcgttatagtacttggcattgaataactcctggaatttctccaaggtcattgtagtaacgtcatgtatcagggacaccatgtcccaccaaactaatgcatcctcttgaaattgaaaagtggcacagaccagcctatcattcaagattctagtaatcactgttagccactgctcgactttcataatatctggacctcccagaaaaattg

SEQ ID NO: 398742 - DNA, 1301 bp, Cannabis indica
acacccacatcaaaatccagacagtgaaaaaaaataattacaaattggggtaaaggagaacgtaaatgaaagagatccaattaaaaacaaaactcccaaaaattataaatcaagatggaagaagtagatataaatcaaatcaaaatctgttttgacctcaaactttgtataaaatgagaaagaaaagaacgaaagagagtgacgcaccttgatcctcgcgcgattccaatcccacctaaccagaaccatctcctgttgcatccacggcctaagctcctcatctctgtcgtctacgccctaaatctccaaagtctcagacacttgtccccagaggaagctgggcagcaatattttcaagagaaagaaagaaggcgagaggagagatattgaagaagaggagatagagagaggaagaggcgagaggtagagatattgtagaagaagagagagaggggaagaggcgattttattagggctttttttagggcgcgttttatttatgaatcaaacccaatttatttctttttattaataaatattttatattgtttggttagttttatagaaaagaaagttttaagggtttgaaattataggaaaccatgccaccttttaataggctaattattaatcattattttaaaagggtgtatggtgacacgctacgcgtgtgagcaaatctatttgccaacgccttatgcgtgtcgctaacgccacgtaatcacatgtgcctttagcgacacgcataacgtgttggcaaatagatttgctcacacgcgtggcacgtctctataggccataattttttttatttttataaaattataaattttgggttttagtatttagtgacactacatatttttagtgacccacatttcgggtgataaacaccgaatatttagagtctaatagtgtgtgtcactaaaacctactcctatttatttagtgacctacacttttatgcgtgtcactatatactgtcactaaaagcctaatttgtagtagtgatatcacttactgttgggctttctgccctaaataaaactctattttaatgtaatcttttctattcaattatcaataaagaaatagatttagtttcattacttgtttaatgtgttatttgaatcatgtgatcatttatttacttatttgattaataaattcatccaaatccttatgacactgatattcttgtttattgtgttgttaacacagtggaaagtaatcaattggttggatgtatggagtatgcatcagaagggaccaatattgaacttaaactagatatgatatac

SEQ ID NO: 398743 - DNA, 1395 bp, Cannabis indica
aaaaaaaaaaaaaaaaaagccttgttgaattttctcaccaattgtaatagggtgttagctaattttgattttggaaaaaaataagattagtggaatacttgaatgatacaaaattatcaccttggaaaagtgtaatttgtagatggtataggaatatgttatttaccatgtatgacccatggaaaattagtgcttaatttgtgttctctaagtctagatttgcataggaatatgttaatttaatcttgagagcccataacatataggtttggaaaaatcatatgctcatttatattttcagttgataaaatttaattactaatgcattcctctatgacatttacattgaatttgtattgtaagtgaatttgtgtacttgaagtcttcctaaatgggttgcatccaagcacaagagaatgggtaggaggagatggtaccaccaatttctaccaactatctatcgatgaagcctattggatgctggaggacatgattcctaaatgggttgcatccaagtacaagagaatgggtagaaggaggagatggtaccaccaatttctaccaactatctatcgatgaagcctattggatgttggaggacatggcggagtatgatgagtgttgttggaattcttcaacaaccaactaaatttgggagaacacctctagccatggagcaaacttttgataatgacactcaaggaccatgggaagatgatttattaagagatcgaatatcaatgattagtgcattcatggagaaggtgaatgcatacatggataaaataaatgaatatatggctaaaaataatgccttaattcatagcaatgccacattcttaaagaatttagggaagcaagttgaggagttatcttgggagttgcataatagaccgcaatgtgtactttcaagtgatatgaaaaatgtgtgggaaggtgatgaagaaatcacttggaaaaacaatgaagaatttaagaagtgtggggaaatctttgagcaacaaatggagcctacttcaatccaaaatgacgaaaaaaaaggcagataaaatagtatattcaagattgtcgaatactatctctacccaaggtgttgagaaattgtttgagcaaagtaatgaagaaacactaaattcaccaccacccctcatgcaacaagtaattagttatcaatatagtgagcaaatggttatggagaagtacacatatgaagatccatatttgctacaacccaatccaattccattagcatcattccttggcttgtactttggtaaatcatttcataagagtcgagttgaacaatggggctcgtaaattttacatctcaccaagcttgagggcattgaaaatgaagacccatatgtgagggcatatgtgttggaaatattttac

SEQ ID NO: 398744 - DNA, 694 bp, Cannabis indica
caagattttgctgtgttcaaagacgactaatggaacttatattttgttcataaggtattaatgttcagacgttgcttcttttaaattttaaaaaatatagttgacaaatcaactagataaaaaaaataaagtcgtcaaaactaactacggttgaaacactgccatgggaggtatggcgagtcaggtgaacgtctaagattgtttgtataattaataaagaaatataatttcatcttgaaataaaaaatttttggcgaacctagcacgaagggtatttgagagatataattaacatttatctaaggacatcgctagaactgtgattactcattcttctacatcaaaattattttggggagaaacacttaagtatgcaacataattctgaactgagtatcaagtaaagtattagtaaatactctttatgaactatggttgtgattagactagtagtctacataagaatatattctatttatggatgcctaacgaagatgaggtcttataagcctcatgaaaggaatttggattccaatataataataagatactttactatgtactcttagtacttaatgagctaaaaattatgtgatcccacactaaagtttaattttctgacgagaaaatctaacaattttgaggatgttgagtttgggagagaaataagattattatagagattggtcttgag

SEQ ID NO: 398745 - DNA, 654 bp, Cannabis indica
ggagaatgcactgctcccatgtcccatagctgaagatttattggcaacagtagatcaagctataaaatgttatgtagcatggtcgaaaagattatcttacacctgttggaaaatacttggtatgtttcaatttgtttacttaactattgtgcttattcattaatgatattgctaactttactgttttttttccatatatatagacacagccacccactaagaaacttcaaaagcaacccgtgaagagaagcaaaaaagcctgagaggtcgagtaaggcaaaaggctatggtcgttatgtccaaccacgccaaacttcctcaattattaccttttggaactccgtcaaaaggtggcccaagtcgtccataatccaattccaagttgcttatgagctatttggagtcgaagatgactttatttggcttgttaaaagtgacattcaagaattgtgcagcatgcaatacttgggagcccaaccaataagagtttggtgcaagtatgatttctaactcttaatgataaacttgataatattcttttgacatggatgattattaattatgactttttatcaggtacatgaaagaaagactgttggacaatggtgggttgtgaaaaaccgtgtttttgcaaatgtcagttgtatataagaa

SEQ ID NO: 398746 - DNA, 965 bp, Cannabis indica
ttcttcttgctcaatctggtctttcattatcatatttgtggtatgcgtttcaaaatgttattttcacaatcaatagacttcctactgctgttcttgactttaaaagtccatatgaatgtttatttggaagtaaaccagattacaagattttaaaaccatttgggtgtgcttgttttccacatttgagaccttataataatcacaagcttgagtacagatcagatcagtgcatattcttgggttattcatctcgtcacaaaggctatttgtgtgagaattcacaaggaagactatatattgcaaggaatgttgtctttaatgaaggatgttttcctgcattttctactccctgctcatcacaggtacattcaacattttttaataattttccttgtgctacatatcattttcctcctgctgcttctcattctaatcttttttgtaattcctctactgctgcatctctacccgagccatcaacccaaccagcaccagcaacaacatcaaccaatattcaccccacaccagttacaatgccactctctacacaccagcagcctataccacatccacaaccctcattttccccaacacagcagcctcccccacaccagcaatcaccaattatacccactacacccaatattcacaccacaccagatataataccttcctctatccaccagcagcctacaccacttccgcagcctacctctcaccaaacacaacaaccccttacacaccagcaaccaccaacaatacaacaacctatatcccgacccctaaaccagtcctctattgtatctggtgtacagcagcagtctactacaaatcagaatgtgatccctactgcagagccatctcatccaccaacatatgattcaagcatcatttcgcgaattcacaaaatgaagacaaggtctcaaagtgggatttacaaaccaaaagcctatctatccacaaga

SEQ ID NO: 398747 - DNA, 683 bp, Cannabis indica
agattatgagcaacgctacccaaagcatgatttacagcttgctcctgtagtgtttgctctaaaattatggcaacactatctttatggtgacaaatgcgagatttacactaccacccagaaagatttaaacatgaggcaaagaaggtggttggagttggttaaagattacggctgtaagattctttatcaccctgggaaagccaatgtttcggctgattcaatgagtagaaaaggtcccacgcaggttttcaccactatttttatagctcctcaactggcctcagagatggttaattcgggaattgaatttgtagttggaaagttgcacaacttaacactccaatctgatttgctacagagaatcagaaaggcacagttagaagatctcgagctagttaagattcaagatgaggtaatggctggtcggcctaaagactttttcatttcaaataatgaaatgttaatgtgtaaagctctagttcgtgttcctaatgttgatgagcttaagaagaaatccttgatgaagcccataccacaccctttttcactacatctaggaaccacccaaatgtatcaggatctaagaccctacttcttatggtattggatgaaaagagatgtggtagattatgtgtccaagtgcttaacctgaaagcaaatcaaacctaaacatcaaaggcttg

SEQ ID NO: 398748 - DNA, 627 bp, Cannabis indica
gtaaatcgaaaaagtaagtataatactaaatctatatatatagctaaggtagtaatagtaaaattaacgtaattatataatgatattttcttgaatataaaacctgtatacaataatgtaatacttgtatatatgatgatcttattaattaattaatcttaggaaatcttatatatatatatatacacaatatatatatatatatatatatggctatatgtataaaggaaaacagtactcacataagtattgagctgcctgacgaaactagagaaattgttgtgcttgaaatatttagggagaagagtgatggcgaagttgtgagggtcccaaaccacaaaactgttgttggctctactccatgaaacgacgtcgttggttgccggatcttctacgatttcataggtcttggtcagaaacggcggtggacccacctcatgaagtccctccattgggtgaggagccaccggatccagctccacctcctcacccttcacttccttgctcctttgatgatctttatcactcccactcccgattctactatgcattaataatctcaaaataatatatatcttatatgaagggtttggatttggagaggaagaagaaggagggtgaatattg

SEQ ID NO: 398749 - DNA, 532 bp, Cannabis indica
tcaagaattttgagaatatcgtactggcgtttcagccgaagagctgtatcgaaatattgaacttggtttaattgatcatttgaacaagttccatgtttttcccactcgtgcttccaaaattccacattagttagttttggatttagtgccacccattgcctatccaattctttgcgcgtatccttgctgatcaagttctacacaatcatgtataattaatcttaacaaatattatgtatttttcatttgaaaatatttttcgcaaaaattaaatatatatgtatccaaatccaccccattatatatatatatatgtacaccataaaatattaaaattactacttacgggttgaaagcggggtgttgtaggacagtcgggcatccgcccttttttgcgttgtggccaaagaccatgaatagtaaagctattaggcaccaatttcttatctttttcgaaccgaaacctggccactgtatatattaacaccagttatatacaagtaaattaattatattataaaaatataatata

SEQ ID NO: 398750 - DNA, 1191 bp, Cannabis indica
tgtttgcattttttagtatattaatatcttcttgatgaattttaagttttgtttgaataataattagtttattgaataagaattaatgtgtaatatttaaattttgggataattacataatgaactatcttttgtaaatattttatatttttacgttcaaagatttttttttatatttttacggtattctacaaaaacaacagaaaaataacgtaaaaactacataaaactaacaggaaaatagcatctaaataacatcaaaacaataaaaaaaacatacaaataaaaaaaaatcaacaacaaataattaacaagagtacaccataaaaatacatcaaaataccgtattttctgtaaatagaatcataaaaattgtaaaaatatttaaaatttcatacaaccatatttttgtaatttttttgttgttattttgtatttgtgaaataattcctttactttttatgtataatatttttatatatttaaatttttattaaaaattttattttttatcctcgatggagaataataagcggggatggggattaaaattataatagcgatgggaatgggtgagcactgccccttattctccgcctcgtgtgcgtccctacacacaacacaaaatttagaatctaaatttgttttggttaatatatgagctacacagtttggttctctaaacaaatgagaaattaatctgcaattagtactagaaatgaggtattgcatgacattagttatagcatctaaatcagagcacccaccaatgatgtgcatagcttgttacactgcagaaacagaaacacaatcatattcaatggtaaaaacatgccaatgatgtccttagccattcgaagattattaagatttataccttaaaagcaagtaattaatggataatatattacagaatatataaaatacaattataagataagtgatacattaattatagaagtataattattaaatatctgaaaattccttattcttatagtgaaagtataatcttgtaaggaagtagagaactaagattatacgatatgaataaagtaagtcggtagtgtattaagtaatgagaatcttttatatagaactgctaagtacaatttactgtacactatatgtaaagcccgcttagttaatttggaaattatcagttaatcatgattatttatgaaaattatt

SEQ ID NO: 398751 - DNA, 846 bp, Cannabis indica
cttaatcaaacactcaattcacaatttaaagttgctatcaaacattagagagctaaaacacatagttcatgcatcaaaatccaaccttaaaccccatatttcaaattgcacaacaagcataaaatcaagctctaaactaacaaaattcaagctctataacttgagcttcaaactaatccaaccctattattttccagctgcataacaccaaataaaacataaattccaacctagagaatattttaaaatctcatccaaaactcaacaatataacccacaacaatatcttgcaattaacactcaaacttatgaagatcaacaccaatttctttttacatggaagtaagaacatcataacctaaaacatgcttttaccacaattaataataagcaagaattccaaataaaatcagttagaaagagctacctcaattcaattccaagcaaagctcaatcaatccctaaataccaaagctccaaaccaagcaattttcaccacatcaaatttgaaattcaaagagggtttgagagagagagaggggttcgggtttgaggggaagcaaaaccaggaaattctatctcatttattcaaaattcaatcttttatcaattatcaattaaaggtcaaaatgaccaatttgcccttagggcaaagaaagcatactcacacacattcaggggtaaaaatgtcatttcatgcatatataaacccaaataaattttagattaatcatcaataaataaaatgctaataattcaatccaaatttgcatttcgggcccgaacccaattcggcccaaaatacccagttgtgactataccgcgccaacctgtcagaacacacct

SEQ ID NO: 398752 - DNA, 669 bp, Cannabis indica
gtaaaaaaattattaactttttgttatgatggggtttctttagtttctttagttattttattttttatgtattataaaagatagcacattcaatttttttttttttttttttaaagtaaaaactgtggtataattttttaaatgagagggtctcccaaagttattcctggaaagttatctgtctcctggaagtatgttcttgcataactaatctgttcatctggaagaagtctcgtgaaatgatagttgccatccgaaagggagtttccaaatgactatcatgtccactctgggtgtgagcttcaagaaagctggtcttcctccagaagggaggtctggatggctaactgttcctcctagaaaggagtcctggatagttgactccagctagctctttcctatcagtaaagatccttcagcaagtactttggtctatgttttcgaatctcccggatgcactcttacttatgctgacgtagagatctcgctcatagtagagttggttaagttagttattacctaacttcttacagcgacggactttaagatcttaatcataagtctataaataccaccaacactaattaatttcacacaaaacgatctgattgagttgagagagaaagagagagagagagagagaaaagattaataggtagagagagagaa

SEQ ID NO: 398753 - DNA, 740 bp, Cannabis indica
tttagaggatcaacttccacatactcaatccaatttaatttgtatgatctaatctacaaagtgtggatatttgtatttgtgcggattgaatttaatggattggattgaaaatttaaaatttgcagtaatacggattggatattgattgacatatgtaaaaataactcattcaattcaatctgcacatatttgtgtatattttttaaaaaataaataaatatacaattaataacttaatgtataaaaagatagtaatttaaaaatctaatacatatgacacaaataaattttaaaacttaataaaccaaatttatattttttttttatgtataaagaaaatatactctaaaataaaatttttttctacgtacaatttttttcttcttcatttgaatttgttatttttgttttatttattttaatttattgttggagatcttaaaaaaataataatttattttatattgttgttagttatgtcaaaaaaatatttttattaatatatatttaataactcaatatttaaaagtaacaaatctaaaataactaatctaaactgtacttttgtagattggatttgagctattgtgcagattgtattggatcaaaaatacaaaattcgcactaagtacggatcgagtgcactatgagcaaaatagtacatattggattgaatggacacacctaccgtaaaacaaagaaatatagtgcatgtttggcatcataactaaaaactgttt

SEQ ID NO: 398754 - DNA, 522 bp, Cannabis indica
ttttgaagcactccgcgaggtctgtactatgactttccactctttaccgatttcactaacatatcgtcgacataaacctccatgttctatccaatttgattcgcgaacatttcattcactagtcgttaatatgttgccccaacgttattcaacccaaatggcatgaccttattgtaataaagtcccatgttggttacgaagcttgtatgttcctgatctgggatatgtatttttatctgattatatccagagtatgcatccatgaatgacataagctcgttcccagaagttgcatccaccaatgggtcaatccttggtagtggaaagcaatcctttgggcacaccttattcagatcagagaaatcaatacaagttctccaagttacgttgggtcttgggatgagaacaagattggctatccacgagggataaaacacctcgcctttaaagtcgttgatcggctgtgggttcttgtatgccccgtggtaacacttgcctcttcacgtctcgtccttctccctt

SEQ ID NO: 398755 - DNA, 1378 bp, Cannabis indica
gtggtatgattcccactttttatcgattttactaacatattatcgacgtaaacctccatgttccgcccgatctggtttgtaaacatctcgttcactaattgctgatatgttgccccaacgttcttcagtccaaacgacattactttatagcagtagagtcccatgttggctacgaagctcatatgttcctgatctgggacatgcatttttatctggttatatccagaatatgcatccataaatgacataagctcatgcccaacagttgcatccactaactgatcgatcctgggtagtggaaaccagtcttttgggcatgccttattcagatcagaaaaatcaatacaagttctccaagtttcgtaggctttgggacgagaacagattggctatccacgagggataaaacacctcgcatataaagtcattgactaataacttgtccacttcctgttttagtgccccttgcctcttggaatccaatggtctccttttctgcctcttcgctgggtagtttggatcgatatttaaatgatgacagataatattagggtcaatccttatcatatctcgatggctccaggaaaattgatcctggttcgcccttaagaaacttattaggtgctattttagttgctcgtctaggttcttcgcaatgtagacacactttgtgagatttcctggatcgagaataacttcttctaattcttcaattggttttaataagttcctttcatcttgaacccgggggtcaagatcctcgtccttcttttcacttttttctgccaagatcgccattaactgatgaccgccattaacaaaagagatatatcaataaagtattaaaaaaatttggcatgaaagatactataccagatgaaaggcttgtagctaaagaaaataagttatctaaaatttagtattcttgacagtttataacagtaattacaggaataggcaacaattttaattggaattcgtaaaatttattgggcccttataggcgacggtttaaaattgtcccctatagtataggtgacaagagcccaataaaaaatcgttacctacttctcaccacattttccacgtgcctacctacttcttttctatttcccacatgcccacccattttttctccatttcccactctctaaaacaaaaatcttaccaatactctgcactatcgccctcctctctcaccgtcttcctccctctctcgatctccctttcttctcgtctctctcatccatcaatctccacccacccatcctccgtcggtctccatctcctctctgtcgcatacgttgaactaccaccacctcctgtcgatgtccctctcatcttcgtctcatacgtcggaccaccatcacctcccgtc

SEQ ID NO: 398756 - DNA, 932 bp, Cannabis indica
tttttttttaaaaaaaagtcacaacccttaaataaaaataaaaaaggaataaaagaataattattttaagaataatttaattaacctcaaagctaaataatctctaaaataacctaatgtcattttagtaatttcactaatccatcaacccgacattctaataaaattctaacctaatccggaataattcttccattaacgtcgtgacattactaaccacatcgctaaatttccacaattgccgagcccaaaaaatattttatttcgaaattgatatcctcggtactcacatatcccaatataatctccgtaattaataaattacgctatttatttcattgagtaaattctcaataattaccctaagcaagatcataatcttacttcgttaccaaaataattacatatttaataaaatatgtctatttaaatattatttatttttccgggatattacattttttctttctaaaaatgttttatttggatgtcttgtaaaaaattaagcaattttgttttttacagaactcgattccgataaaaattataaaagttatgaaggtttgagaattgggtgtcgagatggtgcatacgcgcacaaggaactcggacagaaggccgcaacgtgtgcatcttcgaacaaaatttgtctgaatgccgcacgctgtccctcttcaaacaccactgtgccgagatttctcgactggtgaccctgcaaaactctccatgcgcgcgcggatagggctgcgtgcagccttcctgggctgcacgtccaaccctcctggcagccaccttcaaaaacccgaatttcgtgggattttttcccaatttcagattttttccaatttttcaaacccccaaaattaaaataaaaatattatttttaatatatttaaacttaaatatcattttttttaaattaataatattta

SEQ ID NO: 398757 - DNA, 1138 bp, Cannabis indica
atgataaaagtaaatatatttgatcaaaataaggtacaaagtccattttgacttatttagcaaaatggaggatctcttagtcatttacctattagtaaaaagggagttttatttgcaccccataaaatgataaatacaccctaatattaaaaaaaaatataaacttaaataatttttaaaaattactcttaatatttttttttcaaaatttgtcctcacattattttatgttaatttcaatactcattttgattttattttcataattttttctaactcatgtatatatactttttatttttttctaaaaaaatttcgtataattttttattttaatttttttgtcatagtatttaaaatataatttatttttgtttgataggtatattttttaagaatatgaatgggaagaaaaaagtttaaaaaacttactacaattaaagatataaatttcatagaaaataaaaattattaaaatggggtgtctttaaatatttttggggtgtaaataaaattttccttaatacaaagagcggtgactaaattggccttttcctacttatccaaaaaaaaaaaaaattggccttttcctattttactaccgatttaatatgttttatttggctctgtattttctttgaaaaataaataaaaatactgatattacctttccaaaaaaaaaacagagctaagattattttttaaattgataataataattaaatccgaaagtaaataaataaaaaggcataagagtgatggtctcatgcgcatccacactaataatttgagaattgttaaaagtcttagctatttttttgtttggtgtctattgtagttaaatattaagttttatataaattaaaaaaataaataatttttaaagtaatatagttaataattgtggagcgttatttataaaaggtattgggcactattaatacttaataacaatacattaagggcctgtttggtacacatgattagattggattagacaggctaatttgtccaatccagtgtttgggcatgttagaagtttggataactaatccagttaacctcatctgtctggaattatttatcccatccggataaataatcccatgcaggtgagatttttttttattcgtttttt

SEQ ID NO: 398758 - DNA, 478 bp, Cannabis indica
caggataaatggcatgaaaaaaatataaatatagctatgttggccatccaacaaagtaaattaaaatttgtatttcataataaatgctacaaggagaaaagcattatctcggtctaatggccattgttcgtaaattataataataaaaactaagtctacatagttagagactggggtcttcttcttcttcctgaacctcgccctctttagcatccttggcctcatccttcttggtctgctcgcagaaagcaatcatctcgtcggctccggcacccaaaaaacttaggtccatttcaggattcgctaaccaagctcgataaatagatcgcttggcaatcaagtttactctagccgtagtattttatcatttataatgtgtacaagtgatataaaataaagtggaaatggtttggaataggtaggagtgttatttgcaaaagttgaaaaatttagtaactagtaactagttactattttt

SEQ ID NO: 398759 - DNA, 924 bp, Cannabis indica
caacaattcaataacttcatcaaatttcatactaaactcatccttcaaatttttatactcaacaaaattttcttttcgtcctcttgaatacaaaccaaagccttctccaaattggaaaactaaaaataaacaataaaacataacaaaataaaaaaaaaacatataaaaaaaaccaacaaactaaataaaaaaaatataaaaacacaattaataagaaaaaaaagcataaaaagacataccttccgatcgaaacctcgaggtttcttcggaagataaaccggttcgaactttcggttttgcatggcagagttcttcagctcacgaccaactggattaaaatccttcacagtggcctgaaaaattggcaagaaatcaagcatgttaaaaaaccagttataggtaaactatgaaaaaaaaggaaaccagttataaaaagtaaaaggtacctcaacattgttaaaaacctcagaaacaagttccaaataacccccaatttttttcttgtaagtactctcccaatttagcattcgaggatatgtattcgcaatcctcttgcagtaattaggagataggcttggaagtatctcgaacaaccaaatgaggaaagcaaattgaaacccttgaaatttaaaagaacagagcttatccttttcttctttggtcttctcaatcttataatagatattgccgtcatccttaaaggccaaattcatgtagtgaaaagttctatcccacagtaatttatcaaatgctatattcctcaactctgacaaatccccatcgacaaaaccaaacgactcattgtcaactctcttaccattctcatacccttacaaataatgttgggttttgtgccctaaataaaacccatttcaatataattagatttactaataaagatcagaaatcacattttatgttgca

SEQ ID NO: 398760 - DNA, 631 bp, Cannabis indica
tttttttttttaggagtagagaatatatgaaataatagaacctagtgttaggctatttttagcctatattttggatcgattttatgttcgattttcactgttttaggacggaattacacttgttttctatgttttcaagttcttaggaataatagaggtctcaggatgcaaaagtccagtaaaagacgagcggagccaagaaaaacaccaatttgaggcgtgacgcacttctggccgcggctagatcatgaaggcagaatgcccaacatttgaagctccagtcgccgcggcgagatacaccctcgtcacggccatatagaaattacgaagacgtatttttagacgtctatttggccgcagcgagcaacaacttggccgcggcgagatcccgtacggcccaggggtaaaatcgtccgacgaaccttaaaaatcacatataaatagaaaactgcgattggaaatcaggtgaagcgatttggagacctaaaacacagtagagagttgtaggaagagcagagtaattcaaagtgaagatccagaattcatccaccaacagtttctttctctattcctctttaatttatttatgctgaatattgtcataggaatggttatggatttatttctgaac

SEQ ID NO: 398761 - DNA, 534 bp, Cannabis indica
caactcagccacaacaatcatcctgaaaccacccatccacctgctgctgcctctaaccttgcaggtaatcattttaaatccaatactataccttggataattgatagtggtgctacacaccacatgtgttctaatatagcttgcttttcttcatttacacctatttcatttcctaaatatgtctcactgcccaatggacaaactgttactgtaaaaaatattggaaccgtgcacattaattctaaaatcattctccataaggtgttgtacataccaagttttcaactgaatcttttttcagtttctgcatatatggatttcacacctaattccattttatttcatcataatccttgtgtaattcaggatcctactctgaatgtggtgattgggacagctgaaagatatggcaaattgtacttgcttcaacaagacaatcttcccactgcagcaaccattgtttccccttttgttttcaataaaactagtgtaaaccaatggcacaatcgccttggacacccctctatgtgtatt

SEQ ID NO: 398762 - DNA, 645 bp, Cannabis indica
taactcaatccaattataattaaaatagaactggttctataataatgttaataataaaataaaaacaaataataagaaataactacaaaaccgattataattaaatagaatcggttttgtaacagcgttataatgaactaaaaataaatatatatatttaattatatatatttaattttttaattcatattttaaaaatatatataataaataaaataaattatatttcaaatattatagacaaaaaaaataaaataaaaaattatagtaaagttttaattaaaaaaataaaaaaattgtacacgaatttaaaaaataaatgtaaattaaaataagtattaaaattaatacaaaacaatatgagtaaaaataaaaaaaaaaaaaagaaaaatgtttaaaaattattttaagcttaatatttttaaatatttggagtgtactctgtgtggggtgtaaatatttttttttatttaaaaaacaaacttcttctaaaatgacgaatatatccataaatttgcctgaaaattgatcacgtgtgattattgtgggcaagattggcgagttcatcggtgaatgggacttgaataaaagaaaaatatccattgaaaatataattattataagagaaatgctaaagtgcaccag

SEQ ID NO: 398763 - DNA, 629 bp, Cannabis indica
tcaataaagtattcaaaaattttagcatgaaagatgctatacaaggtgataggcttgtagctaaagaaaataagttatctaaatcattgtcttgaaagcaaccttagaattcaagaaatataaaagttaatctaatatatgctcaagcatgtatgtatttgtacttaatatacatattaagaatgttggatagatatttcagtaactttataaaaaaaattttggtatgcagtcaaatgggttatatagagaacaaaagattacatgttcactaatcagaacttagaagattttggagatcattaagattttttattatgatcttataactattttaatattgagatttttgtcacatatgactgcaaaattaaaaatagtattgaaaactattaaaaatatatgttgtgacaataaatcaatctggttgcattttagtaacaacatgagctctacaagatcaaaggcacattgatttgagctaattttttattaaaataaagttcaaagtaataaggtgtctatagaacataataaggacaaactcaatattttgtgtgattcagatcattaaagatataccacttaaggctttttaggagcttgttgctcatatatggatgtggtat

SEQ ID NO: 398764 - DNA, 615 bp, Cannabis indica
cactctcccatttggtcttggtgaaaatctagggacttgttgaaagattgttcctccggggggtacaacgggtgctggttctctgggtataccccttggagctccttgaggtaacgggcctcctattggagccgggttgagatgggatagtcggttcttaatctattcatataaatgatctagccggattaggttctcaatttcatctttcaagttcttgcattcattggtactatgaccaatgttgttgtgatactcacaccttactgggatccattcgggaattatccctacacaggggaggaggtttccagtaatttttgcctggtggcaaagtatacccgctcctgtgtccataagcttcgtgtattgagtatactgaggggtgtatcccctcagttgtcgcttatcctcagtccgattgctaccctttgaggaccttttgctttgggagctctgagggggttctgttaggttggtggcaggcacggactgagatggagcttgaccattcatccccgaggggttactcacgggcgtcccaaagtgtgatgacgcgagagccaaggctgagctttgattatatcctagggtagcggagaattgtatgccgct

SEQ ID NO: 398765 - DNA, 791 bp, Cannabis indica
taagcttgtttacctaacatagcctggttgaattgaacaagagaacgaaaacccaaaccaccatagaattttgatttacaaagagacttccaggatttccaatgaattttcctagactccccattagaacccgaccagaatctggccatcgcagtctcaattcccttacaaagcttaacaggaagcctaaaacaagccatcgcataagcagggatagcctgaattacagctttcaaaaagtacagaggcgactttatccctaagaaaagaaaaagaatggaatttagaacgagacagacattggggaagacctaaatacttagatataaaaggcttatcttccaagttaagagtgtcaaaaaacatagtacgaatctcctgaacagtgttaggagaaaaaaggatggaagatttggaaaaatcaatggcttgacccgaggccctagaatagatatggaaaatttcatgaagcgctaaagaagaatccctatcagcagagcaaaagaggagactatcatctgtaaaaaacaaatgagaaattgaaggagcatgcctagacacagaaattcctttaaggagatgagcatcttgtctagctcgaagaagagaagacaaaccctcagcagaatgaaaagataaggggataaatgatccccttgtctaagacctcgagaaggcttaagagaacctttaacctccccattaacaagaaaagagagagtagtagtagttatacatttcataattagagtaacaaaactcataggaaagttaaaatgatacatgacact

SEQ ID NO: 398766 - DNA, 553 bp, Cannabis indica
atagaggacaaagaggagaatcaagtactttcctagtaaaaagagaagttgcaactggaagaacattagatagcattgtccaaacaaacaacttgaccttgggagggataataggagaccaaacatgagaccaaaactttttgaggaagtgaaagaagaagaagaagaagaaggaagatccagagaagaaaaagccaagtaataggcagatttcacagaaaaaaatacccgaactagtcttctcccaaatcagggaatctctaccataacaccctgagaccgacacttcaagaatatcagcaattatagagtcattaaaataagtacctaacttagcaacatcccaagtacccaagtcagaaataaagtaagataaaaattgtgaaggaggatcaatattaccagtaaaagatttaaatttatgattgggtaaccaatggtcagttatggtgtgaatatcattcccactcccaactttccaaatgagtcccgaagccaacaaatctctaccctataaaatgcttctccaagtgaaagaagggttgtgaccagg

SEQ ID NO: 398767 - DNA, 707 bp, Cannabis indica
ccaagacaacccacgaccaccgctttttttttccagtttttgacccatctaacgcttgtttttgtattttctttctgatttttaacgatgtcgcgaaatatcgctagatgtcacaaaacatcacgaaatcatgaaacatctctaaatgtctccaattcacaacaacgcttgttttctgcattttttttttttatttttgatgatgctgcgaaacaactctgaaactcttaattagcagagaattctaaagctacaaattagagagagaaactcagagagggcaagaaagagacagagatcggcttcgaagtgttcttcattctagttcttttcttctccttctacttttactaaatattatgattttagttataatgtctagttctgagtagtttccttttagttaagggttatttcaaaaccagaaacatgaattcttagtttcattattgaatgttaatttctagtttctattatatcaaattgcttctattcttctatgttcaatgttatgattattgttttaatcttgtttagacggtcgctaaattaggttttactttaatctacaatcatcttaggattactattcacctaatagtcaaagattttaagtgtttgtgacaaattgtaattttaattgtgatgaagaatataacctaggttaaataaattatatgcttcattaatttgtttcctagattagt

SEQ ID NO: 398768 - DNA, 506 bp, Cannabis indica
tttatagttaactgaaaaagaaaagtttgaaacaaaatatgaaatttatttttttaaatgtagttaacaaatatatttaccaaaaaaaaaaaaatgtagttaacaaatagaacttgctttgtatatagtcttattagggttaaattttatatttttattatgataagagaaaattacatagaaaaattaaagcttctctattgtgggcaacacttcaccaaacaatcaagtgatggagatttgaaattaacagccaccagcgatgtaaaagctttttgtgatcttcatgaatgccgattaggaacttaggactaatctccattaacacaggagataagtttttcttcgatatactgccatgacagcaagattaccgtggggagattttcatgaagatgacgacaaaggatcaacaatcgaggaggagatctagttgaatcattgaatatcaacgatcgagggagatcttcttgaattttcatacccacacgttttgggttttcttt

SEQ ID NO: 398769 - DNA, 543 bp, Cannabis indica
attagcaacggtttttaactgtcacttattttgttcgttttacaacagtcgtataagcgacggttatagaaaccgacataaatactttaaacgagtgtcgggaaaaaccatttttgtagtaaagtatttttattgctttcaaaaaaaaaaaaaaaaacacattacattatatgatttggggaggagtaaagttttagaataacttatcttgattttttttttcttttttggtattttcaagtttcattgttttaaaccattcttattgtagcttaattatgattgtacttaattgccccatcaaactgaagaggtttcaaacataatttggatgactaacttgtagctatatattgacaaaattaaaaaagaaataattaatatgataacatttctcttttttactttttctttataaaagcatacgaaatatcatattaataatctttttttttttttttttaatggtaaactaaatatatataatataaaaaaaaaaatataaggtagcatttatataatgcatgtgatttactagtgtgt

SEQ ID NO: 398770 - DNA, 679 bp, Cannabis indica
atattttagatattttttttggtataatttttaagataatttgttatttgttatttaaattgtaataccatgtcattacatggtttatctacatgtaatatgccaaatcattaattttaaaccaaaataaaagggagtgtaacaaaaaaataaaattagtttaaataatttaaagagtattcttaataagtagaatattataggataaaatttagtagggaaaaaatttatttatttatttattttaaatatatattataggaaaattctttaatagacacccataaaatagactcattaatagttccaagtttcactatcctgtagtataattggtccacatacaaaaattttagaaaattattgtagattgtagtgtattgaattaaaattggatttgaattaatcaaagtgggatatactgatagacacttaattattattattatttaattgatttggtcaatatagaagcattcatatatacccttaattattattttattggttcacctggctaaacataaagtattaaaaatgataattataaatgattataatggaaaattagttcagggaaaacgaaaaagtcattctcttcaccgcccagaccgtcttctccggtgaaagtgaagattagttttttttttttttttctgtaatttcattttgattcatt

SEQ ID NO: 398771 - DNA, 798 bp, Cannabis indica
atgtcactaaagtgacaacagagatcaaaccatacttttatatcacttaaaatataatatacttttaattaaaaaaaatacctgccacttttttgtgatagtgacaaacttttgttaatttatatataatatataggcagccgattttgtacccagatgtagaaaatacggattgcaatccgttgtacgtcaggtgggtcccacggtatatgaaacttttttttttattttttaatttagttgataatcggttgttgtaggtttgttcaccgattgtgaatttgtttttttaattaaaaaataaaaaaggtacaatcaatttactgttcgtgttagttaatgtacgaaaaggtacaaccgagttactgttcgcggcagttaattgtacaaaattactgcagacagtgggtccatattgtcggagtgaggttattttggtattttcattccttcatatcatctatgtatttgtgggatggtagttgagtacattatatcacgtaccgtgtacaataattgtttttgcatgatgtttagtaaaattagtatacaaaatatcacgtaccgagtataaaatatcacgtaccaagtacgttcatttatttttcgtaatacattggtaagaaaaatttgttataaatcatcaaattatgtgttgttatatattgagttttacgttggtgtatttttttattttaattattttgtatattaaaaattaccatggaaatagattttttcaccttataagattgattttttttgcctaaaataatttagttgtgcatctataataat

SEQ ID NO: 398772 - DNA, 709 bp, Cannabis indica
aatgagtgtaaatagaattaaatgggtgatttggaggttatgggagttgttaagagccatccctatagtaaaaacgttatactattaatgctagaaaaaatagtaaattagttactagttacaaaatttttcagcttttgcaaataacactccaaactattctcactttattttatatcacttatacacattataaatgacaaaattcaatccccaacaactatatttgaattatagttttgaatttcaaaaaattaagttgtgtaaccactctttacacactcaattagtgatcatgtggaagttacaaaatataaataattccacctcttatgttacaactattacatatatgtaactcccaattacattatattgtgattattacatgtatataactcccaattatattatatattatatccataataatatatatatataatatatcaaaattttaattttaaatattatattatttaataaataatataacattctcccactagattaaaatttgtcatacttcatcgtaacactttatttaatcaatcaaatgtctcatatatctcccactttgattgaataaatcaacactctctatagagtcattgcttaagtgcataaagttaagtgtttttcaacttgaacttaactatagtgtaatcatcgcaatttttttaaaaaaaattggttgacaaagcattga

SEQ ID NO: 398773 - DNA, 849 bp, Cannabis indica
attttactaatctatgaaaccgatgccctaaaattctgaactagtccagaatatccccaaaataattcttccataaatatcgtggcatttctaaccacatcgctaaattttcacaattgccgggcccgaaaaatattttatttcattaaataaattctcaataattatcccaagtaagatcataatcttacttcgtttccaaaataattacatatttaataaaatatgtctatttaaatattatttattttccgggatattacaatttggtagatatatattttttaagtatatgaattggaagaaaaaagttagaaaaacttagtacaattaaagatataaaatttatacaaaataaaaaattactaaaatagggtatctttagaagtttttgggatataaataaaaatttctattttttggaaagttctatttgcacaacataaaataataagcgcacctaattattaaaaaaattaacttaaatatttaaaaattactcataatattttttttctcatattatttattgttaatttcaatatttattttgattttattttcatattttcttacaaatcatgtataatttttttttaaagaaaatttcatgtaattgtttttaaatttttttagggtttttttcagttttaaccaaaaaaagtaacaatattacaaaaatactttaagttggccaaataaacaaatatacagcccaaataaaagatccatgcttcctgggcaactatcgttcaaccatcgtgcaactacgcagcaaaacgcaaccgaaacaaaaattcaatgagaaagagaaccactattaattctggtgacttcacctgagaagac

SEQ ID NO: 398774 - DNA, 547 bp, Cannabis indica
caagaaatctagaggcggtgaggtagccccatccagggaataggcaccggtcgaggaggttattgatctttctaatgagctaactttcgtggacccttctgctccgaaagctgctaagtccaaggattctcgagtaggaagctcggacaggcctacacagtcgaagggtggattcgagctggccaagagcggatctgagcagatgtgggctcctaccccacctttgtcattgcatccagaaaccaagagaggcaaggagatgctctctcactacatgaaccagttggttcctgaggtgagtgagcagctggccggcgttgacaacaaatcttccctagagctactgatgggaggagtcctgagggaatttacaaaggtgagtctttcttgacagtttcctttaatccttctttacttggctcagactctatccccgagctaagtctgctgcctccaagaacgctgccatgtcgaacaccatgagggcggaagtggactcggccaggaaggatgctgatgacgccagggtggaactcggagctgttcg

SEQ ID NO: 398775 - DNA, 727 bp, Cannabis indica
ctctctctctctctcttgtttcacatgcccacactattcaaagtgtgtatgagatcaaaaatcttaatctcattacaatgtctcatgagttgagtacaccctttaatacctaaatcagttcatcttataagatctagcccactctattcctaagtgttgagactggcttagaagatcaaggtgtggatttttcaatcaagttcttagattgggtgttcaattattatacgaaaagaaacaaggatatcctgatatgcatcaagaggtaattgaatttctttcagtagttagatttatctatatacattatgttgagatccttgagcttatggctcatattggttaaaaattattttatcaaaattttgcttccgcttttataactctgatatggaccataaaaaccaataatacatggttacattcatcgacgacttctcaaggtacgtatgggttttctttatgaaagaaaaatttgaaactttttcaaaatttaaagggtttaaataaatagtagaaggaaaagttgggaagaaaatttgatgcctcctgttgacttcacttttagccaacgacaatgagtttttttgataagcgataaacgatatgtcgtaatgaatatataataaagcaataataagacacaataaacaagatcaagtatgtgaaaagggtgtaagatgaatttataaatcaaatagacaagcaattgataaagtgaaccaaa

SEQ ID NO: 398776 - DNA, 601 bp, Cannabis indica
ttaccctactattatatatatatatatatatatatatatatactattgaataactatattaaaaatgtaactatgataattaattatatacttaaaataaattaattttttaattaaaatatttaataaaacatttttcacaactaatatttataatattttttatttataaaaaaataaataaaattaagttagtattaaagttataggtaatttattaattacttttattttatttttaatttaatcataaccagttaacaataatttaacaatttaaataaatacaaactatcttgattacatatttaatataacaattcaaactttctctatatattgttgtttgtaatcttatttgccttctatttgttggcacacgccacactatggtcaaaacacaaaatcatttttaaagaaaggttcaacattggaacataaccgagttgagaaaaaaaaatcaaagaaatagaagaacatattttgaagaacctcatcaagttatttttggatgtgcctaaggttacatttacggcacataagagcacacacacttggagaaagtcggatatggaacatgggcaagatcacagacaccaat

SEQ ID NO: 398777 - DNA, 540 bp, Cannabis indica
taacttgtacgacaagttatttttttaaaagtgacatataatttttctaaattgtattttaagattattcatcttttaactaagagaatgcaactggaatttttgaaatcgaatgaacaagctgggagttatgcacattttaagtcgaaaatggccaaaatgctctctacctcgtattcggactcccacatgggaactggacaaccgattggggcagattctcacttttgattcccaactagacttttggatgggtgcagaaaggcctaagttttcgtgcccaagtgctaaaaatggctagttttctcccattctctatataaactccattttctctcaaaaactaaggttggttgagttagtgttgatcatattacatctctaaaagtgttctaaacttactttgcattattctttcataaacacacaaatcttacacacttaagccaaactttctcttatcttcccagtgtgcttacaattctctctaagatttcacattgttttcattttattagagagagttttctttgtatttta

SEQ ID NO: 398778 - DNA, 801 bp, Cannabis indica
  modified_base (739)..(739): a, c, t, g, unknown or other
gtatagggtgtaaatttccctacaattttccaactagctagagtccaccccattcaaataattgattatttccttagaatcactatctacatggataaacttataaccttttctcttagctaattccaaagccaagaagttacagtataagataataaaatatgtacagttttttttaaaaaaaaaatacaatttcacttgtaaaaattataaatatataagggtgtttggaatgggttaatgctaataagggaatggtaatgtgaagcattaccttatttgttttgagtctttagccttggaatgttattcccttagtattataactacccttgaggagggtaatgttgatactttaaaaaatggtaggattgaatcattaccttctattatattaatttgaatagaatttctgaattaataaataaatttaagtaccaataatattatcatttattataaataaaatattacggtatatatttatattgtgagattggttttttttaactgagttatttttatattattagcaatagtatatgtatattcattatacgtaaattttatgcagatggtgtacacatagataacatagcaaacaaaaataaataatatagtgatagaatatatagaaatattcattttaattaatgaaaaatacaataaaatttaataggggcttgttcatttttacactttcttaaaacttttagttttttttttttttttttttttntttttttttttacattttttacgtaaattctacatagaaacctcaattgcaactaacgctgc

SEQ ID NO: 398779 - DNA, 727 bp, Cannabis indica
caatttgatatggcagatgttgccgaaattgaggggttcctgggattacggttccatgataatgataggcaggatgggtcgcccaatttactgtaccgatgtgaaatcaaccctgtggctaaaacctggttggacttttgtgaatgctcggttggtactaagcaagcattttttctgatgttcagatggatagactgaaatatgtgtacgccattatgaaggggtacaatattaatagttaggtcaagtgatctaagtactattgagcaaattgttcagggagccacaggcggtggccttgggttggctggagtgattactgatctttgcgggacctatgatgtgcctgaatttcaatatgacaacaaggtggtaccgtaaagaaaaatggatgtcaacatagttaacaggctcaaggagcctcatccttatgggcaaccacccaagaagcgcaacctcaaggtcgaaggcggcaaagagagcccagtgtagaagaagaggaggaagagccaccacaacttcttggggccattgatccagcaatgcaatatactcatgcacaactgagttatataattcagcagaacaaccacatgcaaaactacatggtgcagaggagtatctacgatgaggggcaagttaatcaacttaactctctgatcaccagaatgaacattgggattgaggaccctaattatctggcgccacctcctcgttttcacccata

SEQ ID NO: 398780 - DNA, 866 bp, Cannabis indica
gcataaaacccaacaaaaagttgtaatgctgctgatgttgtctggatggctcgtaccactcttcgacaatggacgtgtgctcagtctaagaggctggactcgatttccctggcctctagtcgcactgacacaagagaacactggtccaaaccggctgctggtcagttaaaaattaatgtggatggggcggtttttgaagacacaaatgaggtagggactggttttgtcgcacggggctgtgatggccgagtaattgaggcgttttcaactatttcttctgtcagttgccgacccgaaattgcagaggttctaagtgtcaaagaggcacttagttggataaagaggaataacaagtcacatgtcattttagagacggattgcattttagttgttcaagctattcttagttcggtatctatgccttctatttttggtttatttgttcaagattgtcaatttattttatcttctttaagtaatgtttctattggtcatgttaaacggtctgctaacaaagccgcgcactgtatggcacgtggtgcttgttattggtcaggtcgtcgttttactgagagtgatgttccccttgctcttcagtccattgtattagcggatgcttctgtctaataaagattatttttattaaaaaaaataatttttaataaaaaaataaacaatatgaacaaatctatgagagttacgtggcgagccacgtacatattagttttatataagttctagtggtttttgtttaagacacttgtgctttgctaacaattatatctatttgatatttttcctttaactatatatatatatatatatatatatccatacacagattagatttccctttaaactttttt

SEQ ID NO: 398781 - DNA, 423 bp, Cannabis indica
tggtaaaatattcccaacatcctccacctgatgttgaacgatctcataacaacaagtgaactaacaggactcctccaccaagtcctcctcaatattctcaagagacaaggccttgaggccttacaaggggaaaatgacctattattcaacctgaaagaagtagtagaagatgctacttcgaaatcggaggctacgagatccaatggataaggaccaatgagtcgcttcatagtcagaagtattttcgagataaaagaggggagttgtgctattactttgcccatggccccgatggctaatagtacgagtacttccctcaagtttatggagaggaattgaacttgagtgactaatttaattctcttcgcacttgtgatcctactgaagaccactttgagggaagtagctgttgggttttatgcc

SEQ ID NO: 398782 - DNA, 677 bp, Cannabis indica
atatatggttgttaccaatcaaaactcttcttctccaaattataaaaaaatctcccaaaaaaaacctcagaaaaataaaattttgatcatctatgggtaagaagaatttcaaggatcatcctcctagtcctacgtctcttgttccttccaaaagaaaattagttggtggaactttgaagaagaggatatccaaatgttctcgccccattttgaaaaatttaaactctgaatttgagtttgagccagagttgttacagtcgcccaaagctgataaggttattttttattatttttgtgttgttttagagtttttgttacaattttgttttattacagatatatctgtatgtgatttctttattttccatgtttttttctttctattctttgttgtgtttttgtatttctttaacagttgtcttgttgttgttttttattattttgttaactcgtaggagaaaggtaaatcttcattaaagaatgttgaatctgatgatttgtacgaggagatcaccagaaaaggggttaatgaggtatgtgctttctttgattttgttttagtgtttatttatgtttgatttgctggtcttttgtgttgggttttatgccctaaataaaactcatttaaaataatcagatttacttattaatatagatcagaaataacatttaatgtt

SEQ ID NO: 398783 - DNA, 650 bp, Cannabis indica
tgggttcctcgtgactacctgttgttaacatgctccacctgggcctgttgtatggcttcctcatgtttgataaagtcgtcagctctatcaaggatccttcatgttgttggtggatatcctttggatatctttccagaagtcacttagtgggattattccccccagtatggctgtatatcaaccttctttagtaatgccttttactttagtagcctcggccataaatctctgaatgttctccttcagaggttccccttgtcgatgtttgattttgacaaggtcttcaaactgcaatgatacaagtttcgagcacgagaattatgtgtagaattttcttcagaactcagcccaagagttgaatctccctacggtgagtttgaagtaccattgttgacctgtcctgacaatgtggctgggaatatgttgcaatgcacatcatgcgtaaccttctagagattgagttgcatctcgaagtatttgatgtgagccagtggattttctcgtctggtatatatattccatacttgcattttaaactttggcaggggcaaggcatttatgcatgtcgagaatggtattccccttgaccaatcaagttcaaggtctaaaggttttgggccagctatgccctggatcatgtccctgagttg

SEQ ID NO: 398784 - DNA, 610 bp, Cannabis indica
ttaagttaatgtaaattatgtgcatgctagacttaagtgaaaacttaggtatattgggcaaaccacttacaaaaataagtatatttgaatgacatataatataaagataatttttgattaattaatacaaattaaagagacactacaagaaatgtcacttttgccagcacaaaaagtgttggcaaaagttggtattgcactggtaaaatagaatttacttgtaatgtgttggtaaatcaacgttagtattagaacttttccagcataaaataaaaaacgctgacgaaaaggacttttccgcgtaaatgcgctggtaaaagttagattttagccactgcaaatgtacactggtaaaactttgacatctttgccagtgcagtttgtgaaatgcgctggtgaaagtttactagcgcagtaccgaacggtgctagtaaaagtgacatttcttgtagtgagacattcctcaacgtcaaaaaaattctaacaacaacttcaactaaatgatccataaaccgccagcgctataaaacatcaaaacaatgtgagaatactagatttattagttaagatcttccaataaaaaatgagcagctctaatatcaggaatttt

SEQ ID NO: 398785 - DNA, 544 bp, Cannabis indica
ctgttattgttttcatcatgatctggagaattttttttccttcagttaggagggatttttctgagtttttatcacgcatgctctcaatgaaagcaccaaactgttaacgcagattttcgttaactaattaataaaccttgaggcatctcactgggatagaagcatctcgcttgaggcgtctagatagaggcatctcgctttgtacatagaagaatgacttggtttatacgtattccaacaagggcatgagcaccagtgtactgagcaaatttaagaactgctctttgaccataaggccttgtagaatggacaatcatgtcctttaagtcctcaagttatcacagttattataatgtgggttgtacgctaagtgcttcaacaaccaattcgtctcgtcgataagttcttatgcgtagtgagatagatgtctcgctatgcactgtctgtagttccctcaggattatgccttccgaggtaagatggtttcttgtcaatacatgaatcgatagtttgtatattctcatctcgcttaatactatacagt

SEQ ID NO: 398786 - DNA, 632 bp, Cannabis indica
agactgagtaaggtatatttgatattaagatagaaaaagggtatgatatgtaaaatccctttactcacaaaaataagttatttttgtaaataatttctaaatttaggtgcctcatgaaaatttctctaaaaataataaactttcttgtttaggttgaatatttgggagcattggccatatataaatgaagaattatgttgtatatctattttactttatttatttttatttttatttttatttttatattttttttagatatactcacttttatggatgatgtctccattaaactccttatgttatataaattatatgctagacttaagtaaaaagtaaaagtatattaggcaatctcctcaaaaaagtgtgtatattttaatataaaaacaaaataagagtatttttgattaatggataaaaaaagaagtatttttcaacctatctctatatcataagttttgagaatatgaatatttagtgttactcaaaaaagacaatgaccatgtctatcaatttttttttttgggaaaaaaaatatttttaccaaaaaacttcattaatttaacatttaaaatgtgatggtgagattatagtggacaactttttgagttgtcaattattggagtatt

SEQ ID NO: 398787 - DNA, 632 bp, Cannabis indica
taactattgtcaagctgattatgcagctgataccaagaattgtgggacaagtactttgtggagtcacattaaccacaagtgtaagaagtgcccatttagctcatatgtcgataagagtacaaaacaagcaatgataactgatcattttaccaagacaaatgaagactctgaagttaactcaagtgggactcgaacttctaggtttagtcaagctacagtgagagaattgattggcaagtatttcataattgacgagcttccttttaggcatatcgaaggtaaagggtttcgcttgcttgttagtcattttttccctacatttgagtttccttcgagagttacaattgctcgagatatctaccaattgtttttggaggagaagaaaaaattgagaaagacttttgtcaatcgtaggatgtctttaactactgattgttggacttctatacaaaatattagttatatgtgtttgactgctcattggattgatgatagttggaagatgcaaaaaagaatcattagtttcattcaagttcctagccacaaaggtgatatggtggcaaaagaactaatcaattgtctcaatcagtggggtattactcaacttttctctatcacagttgataatgcct

SEQ ID NO: 398788 - DNA, 979 bp, Cannabis indica
atcttcaaagtttagcttttatagactacgtagccaccatttcaaagagagaatatggtaagtcactaatcagatacgccaaatcttcatgatttattggcctgttgtgtttcttctcttactaactgatcagagaaatgtaatttgttcaaataggttggctaattatcattattccattaagtatttattttaattatctcctctattattagcaacacatgagttacacctaaatactattatgattatatatatatatatatatatatatgtgtgtgtgtgtttgtggaaaatctggttagagagtatatcggtggagaaatttaagtgctttggacaaagatttagagagagaaactaaacaaattcaaaaagaaagaaaatagaaaataaaaaaacaaagttacgtacatttgaaaattgaaggatggtgacggttgtagttgtaattacaaaaatacaatactgatgtcggtggtggagtaatcggagggacgttggcaatggagacttgatgtgaagcttgtgtacgtttggttgctatggaggaataggagtcccctgcaactcaattaatcaaagttaaaacttataatgtaagggtatattgggcaaatcaattataaaataggatatatttcaattaaatctattttgcagttatttttgataaatgtgtaattaaaagaggtaattatcaacttatcccttctttattttacattaaacttttacactataccatacaacaacttctctattttttctctatatcatttaaataataattttttaatatatataatatacataacaaaataagaataaaatactatttatatattattaaaatatttttgaagcactattgcattctttatattgctctttaaaatacatcacttgttagcagggtcggccttgagcataggcaggttaagtttgtgcctagagtccactcattttaggggcccaa

SEQ ID NO: 398789 - DNA, 775 bp, Cannabis indica
gcattttaatgcagcgatagaaaaaagcattttgactacttacgttgaacaatgtagtttaggattcaaactcatgatttgctgatttcacgagaccccatacattaattgacggctgcattaatgagttgtcaagtcatacataaaagataagtctagtctcatcaaacacttaggaacaacacaaacacaccataaaagtaggcaagcatgccctaagatcagatttgataaattgtgaaaaacatagttcatacaaacaggataatagtggtcttttttaccaccattatgagcctataaatatcccaatgatgtataaaaagagagatagttcagaaaattctcagtagtaaatactctcattaatacattgactcgtggactaagactcattaatgtcctaaccacgtaaaaattatctcttctaacattcattaatcacttcatacaactttaattactggttgtcggaaattttaatcaacagttgtattctaaattttagtaaaaaataaatgttgaccaattatatttgtcactttagtgaatacaattagcatttcacagaatgatagttacaaaattggatgaaaactaacatttgatattcgatccgtcgaaagaaaaaagatgtagtgtttaagtgtatgtgaaattccgtattttaatattccaagtttaattatttaattaagtgattaattaaatgcggaataatgaaactggtactgaaaacagtttttccgtagttacagaatacaactctgtaact

SEQ ID NO: 398790 - DNA, 842 bp, Cannabis indica
ctccataaatcttcagccttcttcagttccaacacgagtacggttacaagaagccgtatttgcagtttgatgcgtatccaagaagttggggtggatagtatgtatttgggtcttcctagtattgtgggtcgtaacaaaaatgctgtcttgggcttcctaaaagagaagatgagaaagaggatcaatagttgggagggaaaatttctctctcgggctgggaaagagattctcattaagtcagtggttcaatcacttccctcatatgctatgaatgtcttcttattcccggttggaacttgcaaagaacttgagaagatgatggctagtttctggtggaagtctaataactcttcgggtagtggaagtggtatcatttggatgaattgggatagaatgacaaaacataagttagaaggtggtatgggctttcgatgcttgcgggattttaatcttgctatgcttggcaagcaaggttggagattattgtttcgtcatgattccatagtgggaaaagtctttaaagcgagatactatcctcaaggggattttctttctgcggagcttgggtcaaatccaagctttgtttggagtagtatctttgctgcccgggatgttgttaaagcgggtttgaggaaaaggattggcgggggattgtctgtgcaaatcacatcagacccatggcttcctattgttgatcgagccactccaattcctgttgtgccgggccttgagcacttcacagttaatagtcttttccaagttaataatagaagctgggatgttgatgtggtaagggatttattttctcctgaagatgcatctattattcttggaattccctt

SEQ ID NO: 398791 - DNA, 1029 bp, Cannabis indica
cttgacttaaaaaactatttttttttttaaatttttttaccgatggaacattctcagcccatatgatatataaatgagagattttttttaattagatagaaaaattaagtataaaactcaaaattttctaattttacctattcgtagttaatacgcattaaaattgcaccgatatatagatatgaaactgagaaaaaagaaatatgttaagcaaggttaagtttacattttctgaaagatttttacataattgtattttttattgctatttattacatgattgaaacttgttaattaagcaagactatactttatgtaaagagctttaaaacatatatttttttagtaaaaataacttttaacacacattggaaagaaaagaaaagaaaaatcgtatcaaatatgaattgagagaaaaagataccctagacttaatttatactagctagtctatacctttcttcttttttttttttttttcttgctttctgactttagttttgttgaaaactaagtcatacattacgtgtaaagtctatttaattatttaaaaaatattgtctattactactttgaatttccttaactaaaaaaaaatcccaccacaaaacattattgcataatgattggtgataagaacttaagataaagaattgatcataagttttaaggtagggagtttgtaattattagtttaaaatcatgcatgaataagcttttcttaattacattctaatatagtaatatgtatgtattttctatcaaatattctaagattattgtaaattgtattagaaagctcaatcttagtttgataataaaacaatgactttcaatcaaagggcttagaaacaacatcattctcaattttcgcattcgaaaatacacgtgaaaatattttttttcataagtgtttgttatcgttataacattattgtaaatttttaaaacttttcaaataatttacaatattgacaatagagttatgatattttaatttattatgtatgttcaaaaaatttcaaactt

SEQ ID NO: 398792 - DNA, 624 bp, Cannabis indica
cataatcaagaacatgagtagttaaggtctaattcctaaattatctttaaatgactttgaagggtggtgggtagaattgttgagtaaactgctagcaaaataaaagaggaacgatattaccgaatgaagaattctgggttgagtcgcggactatgtcgctctctttaagatgttcgctctctttgtgtataactagtgtataactttgtaaaatattacaaaaataaagtgtgtgagtaagagtcccacatgggatagaaacacttcatttgaagtgtataactagtgcaagtttgagatatgggtctgggccccaaagggtacccagttttgtgcgcatgggtgaggactcacacaccggaccaccacacacgggaccaccacacacgcgcgccgctgccgaccgtccgtgccgagcgggcgggtgtggtgtcaccttattttttgggaaaaatttatttattaaattattatttatttaattaattaaaacagttttttttaaatgtgtttgattaatcagtaaacaaaggtttcctgattttgtgcatcgttcccacgatctgttccaacgttcccttccagtaacatatttcttcccgttactatcagtgcattgcctat

SEQ ID NO: 398793 - DNA, 1592 bp, Cannabis indica
gaagtagtagtgatacactgcgagatccacatacggaatctctgagggattccaaagcactccaacacatggtcaataaacttccaactcaacttatcgtaggctttgaccagatcaattttaatagcaaaaaagccctctttacctttcttccgattaaaggaatgaataacctcttgaacaatcacattgttgtcatggatattccttcccgggacaaaggcagcttgagtcggacaaataaacgagggaagcagcggtttgatcctatttgctagaattttggatatgactttgtaaaccacattgcacagagaaataggtctaaagtggtttgttcgggtcggattcgggaccttcgggatcagcacaacatttgttgcgttaatccctctatgcatattacccgtcacaaagaagtcactaaccgcatcacagaagtcagctcccacagaatcccaatagtgtttgtagaacagaacagacattccatcaggtcccggtgctttatggttagtcatggcaaacagaactttcttaatttcatctggactcgggccactaaccagggccacctcatcttcaggagagattctttcaggaataagctgagcgcaattgtactcaacatcattgacagatcccgcaaaaatacctttgaaatactcaatgaattcacaaccaatagctcctcggccagtaatccagatgttatccttattcaaaatactctcaatggcatttcttctgcctttaatggcagccgaaagaaagaaaaacttggaacacttatcaccatcctttagccacgacactctggctctctgcttccagtagatcgcctttctttccaaagattcattcaactcccggcgaatgtgactttcctgattccagtcccgggaaccagcggggaggctttgaagagagttgagcttatgttcaagctcctttatggttacatccagctttccaaattgggaccgattccagttcaggagggccaccctagtggcaccaactttcttaaaaaggcgagagggagcccaattgtgattgacagatttccaagcatgggcaactacaaggttgcttcggatgtcacgagtccatccttcctcaaatttgaagcatctcttgaatttgggttccaagcccgccgaaaagagacaaaggggtctgtggtccgaattactcgtatgggcagaaaaaagaacagccttcggaaataaattaatccaggccccattcacaaggcctttatccagagcagactttacatggtgtctcccagaccgatggttatcccaagtcaagaagtccccctgaatgggcaagttgatcagacctctactctcaatgagagtagaaatgattgggataaaaggatcacgaccagaggagccttccctttccgatccactgagaacaaaattagtatctcccaatattaaccaaggtccaccgaacctatcccctagtttcaagaactcagtccagaatttcttctttgcattcaaataaggaggaccatacacacacgaaaggagccacggggaagacggggggtccgagtaaacaagacccgaaat

SEQ ID NO: 398794 - DNA, 536 bp, Cannabis indica
gctaaggcttggcctttgattgcagttcagggtgggaaagtaatttcgtattggcccaactccactgctcacttgagtagccgtccagaggcatctggcttttgcaatatttggcgtaatggttggtcagtgtacacctagacaggatgagcttgaagaaaaggtcctaactttcttgttgctagaatatggcagtaagtgagtttctctatcaatgggtagcggctttcggcctcaatgagtcttttactaatgtaatagactgggtgttgtatgttgttctcttctctgattagcacgacacttacagcatgtttcgtgacagctaagtatattccaagttcttctccgtccagaggttttgagagtacgggaggttttgcaagttgtgcttttagctcttggaaagctttttaacattcctctggccactcaaactgcttctttccttgcaggatattgaagaatgggacacacttatctgttgattttgaaacaaatccgctgagtgctgcgatccgaccagtcaaactttg

SEQ ID NO: 398795 - DNA, 743 bp, Cannabis indica
cttaataaaacataaaataatttgcagttaaattctttatacttttatgcttgttatagtttaatcttcttaattgaaaaattatagttatacttcttgaatttgacaatcattttagtattatgtagtccttccatccattttggtttgtttagtgtcaaaatagactgcctatacacaaatatacacgtgacaaatttttattggccttcttaatattaataatttatatattaatatttttttctttttcttcttcaaaccccaacccaaaaatcaccaacagatattgaaccacattccgctagtccttagaaaggctcaacaagtgcatattacaagtattgccttcacaccaaactgtagatatcccaatccggggtttactcatatcatcctcagaaagccccactccatgaaaaatggcctgagacccaccttgggatttgggctcagtaatttgagagctgtacttgtcgagcttctgggtcttcatcggttgggattccacgacgatcaatgccgaagatagaacgacctcgacagtgagagggagtcgtgggtttagggtgagacgtgggctgagggttaggaatgcggcttgcatggtggcgggtgcggtggctggagatgaaaaaagagaggtttttggaaagggataagcgaaatccaagtggaaaatgactgttggtgattttaggattggggttggggtaagagttttttgggttgggataatttat

SEQ ID NO: 398796 - DNA, 1167 bp, Cannabis indica
ttccttctcagaaagataatgacatgactcagatcggtcaaaataccgaacaggttagtccagctgtacaagcacagctcgatgaactaaagaatatgttccaagggatggccggacagagaaacaatgatctcgagttggatcgagcacgtggaacccctttttgccctgagatcaatctcgtggcattgcccaacaaaatttaaaatgccaaccgagaagatgtatactagaagagaagatcatccttcccacctcaagtatttcgagatgcgaatggatctgcacgggttacgaggagacatatgttgtagaatttttcctgcaaccctcttggaagctgcccaacaatggtatttcaagctggcccctggaaagtttgactcatggaaacctttctcttcggagttccatgcgcaattctcctctcgccaacttctgttgcatttaggagacctggtcgaagtcaagcaaagaccaggcaagctactctgagactaaggttttaggggtaacggaagatggaaagttgtctgcgatactagggggcattgaagtcctcggtgagctctggaaagacataagaaagaatggtccggtagattcaaggagggattttcttactgtgctgaaggcttcatcaaacttgaagatgtattcagcgagcagaaggtgagcaaaaacccggcaaaccaaaagctccttccactggaatgtccccccaactcccccattacccaaataattcgagctcaaacagtaaatgttcaaacaacaacaatagacaagggaatgggaagaagggaaaattcaccagaaaaacctaacaagctccccaggagaatcaagccaagtacactgcatttaccatattgattgaggatatataaagtgtttacatggccaatcagtcactagccccgcacaagaagcccgcgcccatgaaaaacgatgtcagcaagagagacatgaccaagtttttgttgggttttatgccctaaataaaactcatttcaatataatcagatttacttattaatatagatcagaaataacatttaatgttgcatggttcacatgatttatttcattgattatatgtacataatgtataaattcatctgaaacccttttcacatacttgatcctgtttattgtgccgtcaac

SEQ ID NO: 398797 - DNA, 708 bp, Cannabis indica
attattcttattttgcttgaaaaactgaattattgcatagaaaatggtgttttgtttgtttgtaatttaaaattaatctcattagattacacaaagaaataaaaataataatgtatagtacgttaaactgaacaagtatatatataattaaaaaatgatcaagtactgttaagctgattaatttttatagaattttatgttaagatgatcatcaaacatatttatttcttttactatatattaatattaattaggcttgagagatgtgcttaattaagaaactattgatgagtagtaaagaatagagtagatgaagttaagatcacgtgcacacggtcatttttataaatgtaattgtaaaatttatatatttctctcttatccaagatctaaatattaagttaaatttgaataaaaaaaaaaactaataaaggttatatttattgtaatatttgttattgtgtctgatgcacaataatattttgaacattgttattggacactcgtaatacttagagcttgtttggctaaattttcagtttttagtttttaaaattgtgtttttaaaagtgagaatagaaaacagtattttgtcattttaaaagttaatggtgtttggcacaaatttttaaaaactgtttttagattttttcttacgaaaaaaatcaatattttagcaccatacccatgacattaacccattcgggt

SEQ ID NO: 398798 - DNA, 1181 bp, Cannabis indica
gtttggcttgatgtttcataggcgcaccaatcaccatcatgaagatagacactattaatccacctcatccacaaactatcttctttgttagcaatagcccaaatgtacttccccattgccgctttattccaagagcctatatccttgaaaccaattcccccagctgcttttggttggcaaataaaatcccaagcaattgcacctggcccatggtactcagctttggcattccatagaaagttcctgcatatagcttcaatattggacaccactttcttaggtaaaatcattacctgacaccaataagagtgaatggccattaagacagaattgatgagaaccactctccccgcaaaggagagatttctagaactccacactttgattcttgctgtcattttctcagctaggatctcgcaatctttcccagatattctctttgcaccaatggggactcccaaataagtgaagggtaaggattggtgctggaaaccagatattgccttaattctcctaacttgatcttcaggcatattacaagtgtacatagccgattttgtagcatttggattcaatccagatgtttcagagaataacttgaggccttgtagcaaataataaacactcttgagatccccattgcaaaacagtaatacgtcatcagcaaaagctagatgatttagggaagtggctgcacatcggtcatgataatagaagtcttctttgtcacctattctccccattattcgagtgaggtattccattcccaacacgaatagaagaggagacattggatccccctgtcaaagacctctttttgactcaaaatatccatgtaaagtaccattaaacatcagtgaaaaacgaggtgttctcacacagttcatgactagcttaatgaacttaggtggaaatagaagtccctgcaacatttcttcaagaaaatcccattctatagtctcatatgccttctacagatctaacttgataatacaagaaggtttattattcttcctcccataatgtctcaacaaatcttgacaaatcataatgttatgtcctatgaatctccctttaataaagcctccttggttcaaggagactaaattagggagaatgagtttgattctagaacacaaaagcttttttgcaatcttataaataacattacaacaagctat

SEQ ID NO: 398799 - DNA, 1260 bp, Cannabis indica
agatatatatatatatatacttgcttactgtagattttggttaatgggtatatatgtatataccccaacaagaatagaaagatatgatctttagagggagatttggtatacacctatcttctgaattgtttagtgttctttggtcattagctagattcaggagattatgtatgtatatatatatatatatgagaggttcctctttattcgttgtattgatgtctagaatgttagggagtttagggtttgttagatttttgaattgttatttggcttggaaaaagtttaaattttttgatccaactagactttgtaatgatctcatgggcttgtttgtgggccttgtttttgaacataaataattttggtaaattaataactttgtattctagtgagttgagtgctagtgaaaattagatgtaggtgatattttattgatgcttatctttgtaaaattgaatgatagctataccatacttgtgaaattgaccatagataaattttaggttgctcatttgtgtgactggggtgtagtcgaaggcatagccgtcgactctctgatgcttaagtcagtatattattcatagaaaatataatacaaaaagaaaaggctgagttagaaataatattgttttagatgagtggcattccagttgttgcctatttctcgaccatcctctgcttgaagtcaatatgccccttgtcctattactttactaatcttataggggccttcccaattggggcccaaattactagctcctgtctctttggtgttttgaaatactcgacggagcacccaatcaccgtccttgaatgttcatgcttaaatgtttttgttgaaatgttgagcaaccttctgttggtatgctgcggctctgatcaaggctttctctcttttttcatcaagtgagtcgagctcgaggttcatacttttccagttctaatcatcagtcaaatgttcatacctggaagtgggaaatcctgtctctgctgggatgactgcttctattccaaaggtgagcgagaaaggggtctcaccagcagaggtttttataatagtgagataagaccacagaacaccaggcgattcatctacccacattcatttggctttctctaaccttttttgtcaatgtgttgacaacactcttgtttgttgattctgtttgaccgttggcttgtgggtatcttggggtcgagaatgagagttggattccccattctttgcaaaagttttggaactctaaacttacaaat

SEQ ID NO: 398800 - DNA, 1301 bp, Cannabis indica
taattgatttcattttctacatcaaaaagttgtttcctccacagaacgtcttcctcctccgaagcgtcgagaaaagctgtagctaaatcatgttgaacttgtatcatgaaatcaacatagtcggatattcccttatacggccgagttgtatggtctacgaagctcattcttaaagtcgctctttcaagttgagtttgcatgagtcgacccttgatatcttcacgcaaagcatgtaattctccagtcaggaattgtgttttgttttttgaaatagaaaactgattaacaatcctaaccgtggctttgtcatgcatgatattatgcttcatctgcaactctaattttctattgttgatcatcatctctttctctataagaaaatgttataatggtgatatttgggtgacctaatcacacatgtcaatcatatttataccattgaaatgtttagattaggcatgtgtatttttgaatgattacattgagtaaaacgagataacccttagaaatcaacatagaaaatttcgaattaccattccaacatggtataatataattaatgctactttttttttaccaatgtaaatttcttgagccttgtgtaagtttttgaagataacaatgacacgtttaattaaattatatttttactgtcatttgtagattattttattgtacttataaatgaagctagttccccataaaatatcagtgcccagtaccctataaaatataagtttctttatttacacgtcactctaaccaaactcttgactttatctaacatttgttcttttaaatattttatttaataattttaatactaagtatgttactttatagtatttctctacatatattatactaaaataaaaataatttaataaaacagtaaaccattaaaataataaaatattataaaattaatataaaaattataaatataagatctccctattcttttagctattctatagtaaaaaggggacatcaatagagttgaaaatatagagttgcttagatatattaagagttaaggaacacactcccccagtaaagatttgagttgctaacaaaaaacataattttttttttttgtaaatcgtatgtaagtacaaaataataatatgttaagttcaagttattttatctatcaaataaaattaaatatagaatggttagaacaataataaaaatgatgtggttcataaggaaataaaatgatcgtacatgtgattcatttattatatttttctaactaatgttaaagtaatgaagataagttatcgttataattaagt

SEQ ID NO: 398801 - DNA, 806 bp, Cannabis indica
atcaatcaggtacacatacctaattatttatatcttattattgtgttctatgttatatacaaatagatcttgggttaattgttaatttatataacatgtccctagatctctaaatcagaagcaggtttattttatctgattatcaaaaggtatacaattgtgatgagacaatatgattttatagagttagggaggggacttagctacaaaaccctagttgggctgggcctgctcatcaaaggcttcagtcaactagaaaagcccacacttctgcttcacctagactttactcacagatgctaagcccattaacaattgatcaccaacaacatgggctaacacagcaaagaactatccaatcaacccaagttttaataaaaaccaataaaatttaatgtaagcccaaataaaagtctaacattttggtcatttctattctttcggtagaatgaagcaagtcaagtacattaaaagtgtataagaaaatgtctcaagtttctaaagaatggtgaagctaatgtacaaggattaatgattaaatagtcagtttggttttgattttatacgctgaagagcaacaattgaaaaacgttacttttatattttgttaaacttttatttagttaacaacacataaatcttgtataagatattgaacattatatataatttgtttatattttagtcgattgagcagcaattttattatgttttaatttttgcatcaagtattgataaaaattaagaaacttttaaatttcaaaaactaaaattcaacgtaaaaacaacataaatacaacatgttt

SEQ ID NO: 398802 - DNA, 509 bp, Cannabis indica
taaaaaaaaaaaaaatcattttttattatttttttttaaacgatattttctaattaatgtctgtactgacccagatccaaacttgatcttggtcctggtacgtcccggactcggaccttgcatcagactcagacccaaacccgacttaaataaaatacaaaaaataaaaataaaaatacctttataggacataattatatttttatttttaaaattaaaaattaaaaatagttatagaacgtatttatattttttaaaaataaattaattttattattatttttataattaaaaaaattagaaaacaaaaattttatcaaaccgcaccaccataatattttcgttttcgtttgtgtaccaaccgatcaagtatataaatatatatatatatatatctttatatattaaaagtgcctatttaacgacatttcttggtttaacagaatatacttaaaaataaaagaatattctgttaaatttaacgattaggtttgatctcccgttaacaa

SEQ ID NO: 398803 - DNA, 924 bp, Cannabis indica
tacaatctttgggacaacaggctatattttgattggttgctaggcgacaaattttgtatcgaatgcattgtatcaagattgtaacttttgaaatacgagatctcgactttgtaaaatttattttatttttaagaaagattaattaagaaaagttttaattaaaaacgatttccaataatcatgttgattatcaacgagttgcacagcaaatttcaaatcatgataacacgcctaagctagtagggtgttaaaattttggtatcagagctgccaggttttatttcaaagatcgtcacgacatgtacaatcatcaatattaaacacgactcatggtcgagtaagcttttaatgcttttgtagtttaatttattagtatgttataagaaaagcctgatcggaagcatgttagtagcctaatagttgaataggcgcaagtttcattttctcaaataagcgttagttagtaaattattattgagcacgatcagaccaggctagctcttggttttataggcttttctattagaatggacgcaaggcagaacaagagaagctagggtacctcggtcggatccagtggcagttagggagttcagtttccaccaaataaaagtggtggaggtagaggcctaagaggtagggtatgtggtcgaggagatgttaaccctctacaagtagcccaggattgtgaaaataggtttgcagcaatgcaagccagaaataatgcacaagacaaagaaatcaaacgcctgttgcagaaaggtactcctgaaatgaagttggctttggccttgctgtgcaggcagggccggtttctgctgtgaaccgtatggaacaactatatgaaatgttctacaagaaggcacctccagcctttctgcaacgtcccgatgtgatgaaaggcgtgttggaaattattttacc

SEQ ID NO: 398804 - DNA, 862 bp, Cannabis indica
ctctctctctctctcttctttaccccttcgattccttaatttattgatcgaccccttttacgctctatttttgaggtatttatcgtgttctttgagagaatcactagaaagggatcacttgtctttaagtgtcagccccttaggggtacaaattcctagtagatacaaaataggacatacatgacctatgccgtaggtatcttagggattaggtgaatataatttttttttccttccttaattgatgtgagtcttcataatggagccatcactagactccttgattatcgtgtaatcgcagtaaaagaggcttgcgccatctgtcaaatcctcttatggaggttctgatacgtttttctcatgccgcattaaatgcaaaatgactgctcaaacgagttcttctcctcccggagatgcattgttatactcctagctccctgagagtaagggcatcctgtacgctcctctccgggaggctcaccccgtgagatgcacttctctttccatttatgacttagccaatttttgtgagtgaggtgctcttgaaatctatgtgtcacacgcaaccgctgccacgtattttaggaaaaataaaaggcaacaatatatatagtaaaatttctatttatttaagaatacactcgagacaaaaaaaaattatattctaattaaaaagttataattaaatagagttacactaaaagaagattaaaatacctaaaaatatcaatgtaacaacaataacaataaataatccttaatactatatcataataaaattatttttgaacaaatataatatttatacatgtattacaatttgaaataaaattataattctacataaataactttataaaat

SEQ ID NO: 398805 - DNA, 570 bp, Cannabis indica
atatgctgatgtggatattgtatttaagggactggttatatgtggaatttactcaacaatttccaccctaattcctcttataaccagttctgatgtaatgtttattttatctctgagagtcctagcttgataggtcctacttttagtctcctaggtcgattcttaataagttcatacaatgtgtgaacttattaagagtcacaattttagtacccatgtctgttgggttgtcctcagtaggcaccttctcaatttttacttcaccttgagtcactttatctcgtataaagtgatacttgatttctatatgttttgttctgtcatggaacatagggcttttgcattgaaatatacagctttggctgtctgagtacactgtaggaacacctttaagtagtttaagctcattcaatagtccttttaggcatatagcttcctttatagcttctgttttggcaacatattcagcctctgttgttgagagtgccacaacaggttgtagctggactttccagccaacacaatttccccaagcaagaaaaaataggcagatgtagatctcctattatc

SEQ ID NO: 398806 - DNA, 593 bp, Cannabis indica
actaggcaacgataccgcgctttgcgcggttgtttagaaactttttatttatgaaaaataattttaataggttaaatattaagtcacattatttaattgaaggctaataaggatttttgtcccgtgaactttgacatgtaccaaatcataccccctgaacttttaaggtcgttcaaaatgcgtcctaaactattgagattattggatttaaggacttttgtctaatttcattcaattttactatttcagtgattggttatgtacttaaccatgctccttagactttgatatctaccaaatcatgcccctcaaactttgacatgtactaaatcatgtcctctgaactttcattcatgttagactctttttttaaaattggacaaaaattcttaaatccaacaatctcaatagttcaaggagtatttttaacgaccttaaaagttcaggagacatgatttggtacatgtcaaagttcaagaggcaaaaaacctaattagccttaattgaattattattatattaatgtctatatattaattacaactataattatttgttaaaatatgtaaaagatttttttctaaaaccaaatt

SEQ ID NO: 398807 - DNA, 656 bp, Cannabis indica
ctagataacaaccattaaaaagctaacataccttagcaatagaatcagcaaaaacaatagaaaactgtgtctgcattgaagccattgagaagcaaaggaaacaaactgtgcagaaacaaactctttcaactcaaccaagtcagagaaatcttctgttgggaattatgcagcaaatcaatcttcatctccaaaccatcaaagtttttagaaaaaccatcaagcttgatagaaatgtcactctcaaccgcagaaggttgttccggaacaagaatattcttgtaagaattgtagtcaatgtcaaacttgaaattgctcaatttcaaagctttgaactcagcagcagtgggtctcgtatttgatagttctagctgagaaaaaaacaagaaaatagaaaatttcaataagagagtgtattaataattaaagacaacataaaaacaactaataaaaaaccaaaaaacaacaaacagaaataccttgtctttagggacatcaaaaatagtagtcttcaaaactttgaaagtcggctgactggtacaaggccactaaataatccttggaatacgagaatttttcttttggcaatacttacctttcatgtacttacaacactcataaaaccaaacttgaaatacatgaggacaaccaatcaaagt

SEQ ID NO: 398808 - DNA, 775 bp, Cannabis indica
taatttgcattaaccctatatttttggagacttttgccttatttttattactaaattatttttattattattgttattactttagattttgataagggctgaagtgtatcaaggcagaaagttcaaagtcaaagtgagtcgatgattttttgttttgttttttcaaatagttatacggagaaaaattatttgtggaacacgctacgagacatactctatggatgcaacatcttgctttccattctctgtatcccttgtgggtttcgaagatttcaagagattcgaatggctaggtttggatatagtctttctttagcgtttcgtaacaatctcttccgtcttttctttctcgttttctacaaagtttgaggtcaaacagatttgatttgatttgattatatctacttcttcgatacttggttttaaatttttggagtttattttctatggatctctttcatttacgttttcctttaccccaatttgtacttattttggttcattgttctggattttgatgtgggtgtgtgagaaattttgttatttgattgtaaacctaggcttttgatggaggggagatatagtggggattgaatgttgaaggtgtttatagggttgtttacttgaattatttttggaattgcgatgatatatccgccgccgactccgagaacaataaaaccctccaaggaattgaattgaaatgggagattcacgccttacttccctttcaatggagaatcatcacccttccaccatgttgtccatggattcc

SEQ ID NO: 398809 - DNA, 878 bp, Cannabis indica
aactagccttagtggcttgagatagtacgatatttatacatatgtttctcgtttggtgaatatttgtatgatgttgaatgtcatatgtttatttttgcttatgtactaagcaaacttgtggatataaaagtgagctagatattcatatttacatgtttaatttgtcatttgcatagcaagcttagatctatgacatttcacatcaaaattaggtcttgcaatctcctagacattaataaagtacttagcagacgagaacaaattgcacagtctctgtgcacaaaaaatattatagaagttaaactaaaaatcattactagaaaatgaaatgcaatttaattaaaaacaaaaggaacacacctaaagtcctatacaactcaattcatccaaaactatttccaaaggaacactatgatttcctatcataagatgcaattgagaaaagtgtatatggcgacgttcataaatccaagcatggaaataaataagaaggcaatagcgcacaaaatgactatttctaccaatacaacaagatccttatttcttacggtcacatgtcaatgtattataaacacgaaacaatttagctttgaagaataatatatagcacgcagtcaatgttttttccttcttaagatacgaaaaagcacaaattcttacgttatgccaattaggggtgttcatcaaatccaatccgcactattttgctcatagtgcatccaatccgcactaagtgcggatttcatattttggatccaatccaatctgcacaatagttaaaatccaattcaatccaatctgtaaaagtgcggattggatcggttattttagattggttacttttcaatattaaattatttaatatttatgaaaaaata

SEQ ID NO: 398810 - DNA, 643 bp, Cannabis indica
ctgaggtgccgatgtagtcacataaccaatttcagtggctcgtgtgcccctagtttgatggctagttgttgtggatcttctttctacacttgaggagcgtgttgcaataaatcaccaaaatatttgttgacctcgcttttagccaacgacaatgagtcttaattgtaagcgataagtgaaataatttagatgtaatatgaaaagataaataaagaacataaagtttttaaagaggttcggccccgagcagttcggtaatagcctactccccttgatttgtatcgacttaagaacaaagaatacagtgattcttctcttagagctcttataatgaaatctctgagtatactcacttagataattcttttgaccttttacctagtgagaatagataatcatttatagggctatgtgcttaagggaaggtttcccttctgtttacaatgtctttaattggtaagattacacattacatatatagagtacactgattgagggatttggatagcttgccatatctctgtgtcacgatcccagattaataggggttgctttttgtgcttcatgatgcaaatgctgaagttgctaagtgttgatatgttgttcgatttgtccactgctcggctgggaggacctcatccgt

SEQ ID NO: 398811 - DNA, 1069 bp, Cannabis indica
tttaaattataaaatattgattatagtagaaaaagagcaaataataataaaaattagacttttttattttaatttttttagctaatttttagtaaaagaaaatagaaaatactattaaaaatatgctcataactaacgactgtaattagaatcacttaattactttcatttgcataattatataattacattatcaggtaaacatgttaaattgtataattatctctaattacactataactttttaacagagtcgatcctaagctaaggcgggctagacccacatctagagccgactcaatttaagagtccaaataaaaatatattttaaaaatatacatattttaataatttttaaaaagggctaaaaaaacttttttacctataacctatttcaattaaggtgggctctactttttaaatgcaattaataccataaatagaagtattaaacacaactaggaatatttatttattttttataaaaaaaatgtgtagatgcgtaatttgaattagtgtctaccattactgaataatgtgaatactactctaactcttttgctcttctctctacagatgatattaagcctgtctagtcacccactatcttattctataattctaggttttttttttttgttttttaatttttctgaatatgacttttcaaaaaagataaaaatttaccgaatatgcttagtggtgatttgcttacgcctgcatatgcaacatgcatattttccattattccagtatctttcgatgccgtaggaataagatatgcctgcctgggaatataataatgctatgtatggaccgattcaccaatccatttgctttgcttttaaaaaaaaaataatattgggaatgttacccaaaatctcatttttcacacaattttaacaaaataatttgttttttacatttttatataagaaaaaaagtttaaaattttactgttttaattttttaattagaattttattgattttttttcaaaaaaaattacaattttattatgtcctaaaataacataaaaaaaatagaaaagcgacgtacaaacaacatt

SEQ ID NO: 398812 - DNA, 684 bp, Cannabis indica
tgtgtgatatcaaatgtgaatccaaaacactatataaggaggtctaaggtgctcatttgtgtaaaacagttttttgtcaaaaaatcactttgctagaaaaccctaaggctctataattctcaaagttatttactagagagttcccttagtgctagttaaaggtagggtaataaataagcttttggacaaatgtgttatactttgctcaagtcatggtgatcccgactaatgtacactcaaagttgtgagtgagtatatatatttaccttcttgttatgtatgtgttatataatatatttttgtacatcttcttctatctttcttttatatatacaatatatatattatatatatgttgtaatacttatttaattaatcttttatattattcatttattaaattttataatagaattataataaattttaattttcataaaatctctaccaattattctgttaatgggacaaatcataattagtacctttaagcctgattaatctagcccaccataaatggctcaataggaccatgcacctatgtaaaaggatctaaatttcactttgtaagccgaaaccgtaatgaaattcctaagagaaatttcatatattattattgtagtaattttaggggtatattgaaaaatacctcttttatttatcaattaatcaaatttaccttta

SEQ ID NO: 398813 - DNA, 697 bp, Cannabis indica
tcaagtttaagtgaacaaaaaacgatgaggaattgaaagaggttaatgaagggagtgatgacaattgaattttatcaatgaaagaatgaaaagcaagaattacaattaggaacgacaaagaagcatctactctctaataacccaccatgagcttactttggagttaaacatacttaacttaggggtaatctcaagatggaaaatcttctagggattcatctcagaaagtgtacgagtgataacaaagtacgctagaaagattcatattaggatgtaaaattagtagtcgttccagagattatcaagaggaatggatgtcttaataagtagatattgacaaggtattgagatgagtatatagtagtggatggaaataagaagttctctaattgaatatctatcaaaaatgaatacttaacttattattaagctaagtcagtaggtcagcttaggaggcccatataaggaatgcaaagacataattatgaattaggtattgtgggatcttatgatttcgactgaatagtaacggttggagataccgagttaatatgttgtctatcaatatcgataatttatacaataaataagaatatgaaattcatgttgggttttatgccctaaataaaactcatttcaatataataagatttacttattaatatagatcataaataacatttaatgttgcatggtt

SEQ ID NO: 398814 - DNA, 686 bp, Cannabis indica
ctataacgtcctcaaacagcacatccaaagagctagagctttagtttgtattactgaatactacacaccaactcattaacatatcaaaaatggtcttcaaaacatctacaaaacaaaataagataaaaaatgaattgatcccctagcgatgatattaaactaataaaagaaatttcaataatttaaaaaaataaaatattacattattcataaaattaatatattactattaaattactttaattaacaagagatatttatatttaataaaaattacaactccataaatcaatttctatactattaaaaatatgataaatataacaaattagataaaaaaaatataaaatataaataataataaaatcttattagagtaaaagtaattaagaaaatttctaattcaataaaatgaaaagatttaaacttaagttttacaaaaatataatatacaagaacaaaatcaagagaaaaaattactattaatagtaaataaaaaatatgttgctatgaaatattatttatagatgtccaaattactaaattaattatcaccattaatgcttggttgtatttttctttattacattgatttagttttccattcttttagtcatatgtttgtataaatagggattcaccttattggaataaacaattgaaaaattctcattcagtttttcttt

SEQ ID NO: 398815 - DNA, 559 bp, Cannabis indica
ggctgtattatatttccctatccgctccttagtgtttaatgaaagtaaaaattggtttcattaaacttatatcaattaaatattcagaatataatccccatttaactcactaaaagacaaggaattaacctaagctaaaagactattttgcgcttcccacactaaaagggcataaaaggcacttaggggtattttgggaaattttaaaatcccgactattcccgacattcccaatatctactatattgtcctgctataccaaaaatactaagatgtgattctaatagccaagcactgcgttccaatgttgttgggcacaaaacatgcaaaattatgaaatctatatatgacataaaaatggattctgaattcaaataaaacatcataaataaataattcaatgctaataaataattttcatcattaagccctaattatctgctaatttccaaattaaagctaatcggtctttacaataaaaaacttatatatagtattcaaatccaagttaaacttaatagaatttttattatgttaatttattttccttctaattttt

SEQ ID NO: 398816 - DNA, 770 bp, Cannabis indica
aaaaattgctaattagtgcagtttatgcttaatgtctcttatgcactggtaacgaactgtgctggtaaaagcgatatttcttgtagtgctatatggttgtgtagcatctatgatttttatgcttaatgtctcttatgtgtttaaatttatcataagagtagaaattttatatatatgttgagatttatatgtcctagctcgaatataagtttctttagtaaatttgctatcacatgaaaatttgaatttgagaattaaattatattaaaccatataaagtagatgcaatcaaaattaatcaccctaagctttaatcattgttaatttcaccttaattatttgttttctttgttttttagtagaaattaaatatctttttttttattattttatttttattgtcaccaaatagaattaggaatttagttgtttggtaattaactacagttcttgtgggatcgaccctacttttatgagtctcttacttgtaagtgatacgtatacttgcgtgttgaaaattgacgttacatatgaagcttaataaatccttaaaagtatttttagagtttccctaaggtgacgtttggttggaggtaataaaatagaatggaatggacaggaaaaaatttatttccattcatttgtttggttatattttaaagtaatggaatatcattctagtggaatgacttttctactattttggtggaatggttattccattttgaaatggaaagaaagaccattctaatgcaacatggaaaaaaaaa

SEQ ID NO: 398817 - DNA, 514 bp, Cannabis indica
ttgctagtacggttcactgatgtgttagccctaaataaaattttatttcaatgtaatcttttctattcaattatcaataaaaaaacagatttatttttattatttatttagtgtgttatttagttcatgtgatcatttatatgtttatttgatttataaattcatccaaatccatatcacatcgattttcttgtttattgtggcagcacagtggaaaataatcaagattgtgtgattaaatgtattgtatgatttatcaatacacagggtttaactaataggataatctacaatgtagtttacttgcaccttggataagtgctatgtcctttctagagcactgattaaagtaaacttgggttggatacatggagtatgcattgaaagggacaaatattgaacttgaactagatatgataaacttaccataatatctattaaatctcacctagttgatcctagatcaagtgatctcaatcctgagatagttaggttctagttcagttgcattatt

SEQ ID NO: 398818 - DNA, 512 bp, Cannabis indica
agagagagagagaggatcggctgggctattatagtgagcgaggtatttccacaccaaattacattgtaaaaacctagttgtttaaccaaaaattttagaaaccaataaaacagagcttaagaaagaaataaaatatagacagataattttttacgtgattagacattaataatccctagtccacgagtcaatagtattagccttactggcgagtgtttgaataatacaaatatttacagtataaaccttaggtttgcactccttttgtttctcttgaagaagaagaaagctagtaggaattttagtagaggttcagctagtagaaaatcggtcaccctttgtacataaaatatgagggtatttataggcatatatgtgggtatggccataccctttacccacctagggtttcgtactcaacacgatgcaagggctgatactacaacatgaccatctaactgttggttggtaggaactgtaacgtccccgcttcaagcctctattgggccctt

SEQ ID NO: 398819 - DNA, 692 bp, Cannabis indica
gtcgagtacctcgaagcattcagtgattcccaaattggggtttttcagatcaatggagaatatatggctaggggaggacacttggcaaattacctttcctatacttgtaagttgttatctaaattcaaaaaagttattattagtagaatacctcgtgcttataattcttatgcagagtatttggccagtttggcctcaacaagagaagcaaaattactcgatgtaattcatgttgatgtgttggctcatccaactattcttcgcaaagagatcatgcaagtcgacataactgagaaaatcacttagataaccccaattattaattatttaacaacgggaaaactccctaaagataaacttgaggctaaagagttgcaatattgagctgcttgatatgtcatttatgacaacaaactgtatcgcaggagttttagccaacagttgcttaaaagtatcgatggagacgaatgcgattatatactccaagaagtacatggtggtatttgtggcaattacaccggaggtaattcccttgccttgaagatcatgcaacaaggttattacttgaaaaccttgcaaacagacgcgaccaatttcacgaagaaatgtgatatatgccaacgaattgcgacctatgtcaacaaaccaacaagccaattaaattctatcactagtccctggccatttgcagt

SEQ ID NO: 398820 - DNA, 563 bp, Cannabis indica
tcttattgtaataatattgaatcatggactagtactcgttaacgtcccaactacgtaaaaattctagtattttttctttattatttatttattttttagcttttatatttgattagtttctaaggatattggtaaacagttcttgattaaaaacaataggttaagtcgttgaaggggaggtaattatcgtacacataacataatatgttggaaattaaaattctctaagggctcatttggtacgccataaggattgtattgtattaaatagtaaataacactatgtttggataaaacaatatattgtattaattattagagaaatgctaaaaggcaccagtggtgccaagcaccctcctacgtgtcagtatcgctattggtctaattaagtatcaagtcccatatagtttaatataatagcttttaggaagtatcgctagccaatcacaaagcgacacatcttaagggtgctaggcaccactggtgcccaatagcaatgctctaattattatgatcaaaatttttaatataatgtatgttgtaatatataatacataacaaat

SEQ ID NO: 398821 - DNA, 721 bp, Cannabis indica
gtcacaatgaattcgttctactaggacttaaatatgaagatttctttcgcgttaaatttggttaaagtgaccccctattaaaaaattaaaaatattattcttttcagggaaaaatttaacaagttttttccttaatcttacactggttagtgttctcttaaaatttcaccatacatatctcaaaaaatcatgaaattttatagggccgaagccaagactattatgcatcacttttctattaaacaggttgagagaaaaattagttttcaagcactaacaatcattttaattgaaatagtgaaaatctcacaattttgatagtcgtacccctttgtaaaatatggctcggactcatctcagaatatttttctccactagtgacaatgaattcgtactactaagaggtgaatattaagattactttcgcattaaatatggttaaaatgccccctaattcaaaaattaaaaatatttttcttttcagggtaagttttaataagttttttctttactcttacgctcgttagtgttctcttaataaatcaccctacatatctcaaaaaattgtaaaatttcacagggacgaatccaagaccattttgcatcacttttatactggacacgttgagagaaatagtagttttcaagcactaacaataatttaatagaaatagtgaaaatttcacattttttacagtggtaaccctttgtgaaatgtggc

SEQ ID NO: 398822 - DNA, 905 bp, Cannabis indica
gctcgggctcttcgtccgagtcatacccaggaaatttcccatattccccatcttggtatctcgtgaatttatcctccaactcaagattcgcaattggataggatcctcttgcttttgattgagttgttgacgtaagtcaggctttttctggttcaattactcacgaagatccagtcgttgtggatcatagttacttatagacctcatccttgagtagctctcagttctagttgtgcccgtactctatcaatcattactgcgatgagttctatccgctcctcgcgtagatcaactatgatctcgagatcttatacgtcccgagctagaacctgccttggcacgtactggcgttctcttttgggaatgggttgatacatgccccctgctgggatttgtatgtgccccttccctatcagttcgaaaatgaggttgacagtgtctcagtggcaacccagtggtcctaggttgagtcttaggatctctcttgttaccacaagggatttcacgttctctagtctggggttgccttctactctggtaaatcattgttttcattcccctgggttgtgtatccctggggtctttgaggcactccttgacgaggtgcctgatcctttggttgttcatctttaggaacatccccagtttccccaggttgctcctcctgagtgttctgggggtcttccttaaccgtttcctgcctcctggttcgtgagccgcgaggtctgcttcgcggcttcctcactccaagatcaggttggttttgtgtgttgttttcctgtgccaccctggccacagctatctctcgttccaactcaacattttgttggttttcctcctccaaaaattgccgaagttgacaattttccaattcgaccaatagtacgtatcttgtggggtcatag

SEQ ID NO: 398823 - DNA, 1059 bp, Cannabis indica
gcctaggttgacaaaatatcaacgtgggccctgacccctgttatttatgcccaagatatgttgttttcctccagaaaaacctaattcctcatttttgatgaagaataagaaaacgcaaaagtaggatctctgattagacacttagaaggtgcctagattgacaaattgtcaacctgggcgctgggtgctcgcagcctcgggtgttaaaaatcaactagctctaatttctgattctgatgcctcaaatatgttcatggtatgtctagttgatgtactattaaaatttttgaccatttttcattaagatagtcctaaaaattgaaaccctagttcaggatgttaacttgggcactaggtgaaacccttggtgccgaagttggcttctacggtacaagttcgtgtaatttcaactcccgaggcatggattagggtgctccatgtcttcatggtatagaacaatgaaaaatagtgggttttattcatgttattaaagtccaaacttccatcccgatgatcccaaagtcaacttggatgcaaggctagggtcccctcccaggttgactgctatgactcaggtctacttaactttgtgatgtcatccttcattccatgtgtcaaatattcatgtccacatcaccaaggaattttttggggttaacatttgtgcctaaataaacttacacaagtgatgagttgacttgatgatgtgaaccgagcctgtttcgcttgaaactaccagatgggcatcaatttggatattgttaggcacttgtatctattcttcaagtatgtctaattgaattaggactttgaaaacttttgattagtccttgggaatcttgaaaattaattaacaaataaaaagagtaaaaatcttatatttttttttacttatcttttatctctttctttgaaaatttgaatttttcttactttttgttatggcattaggattaattggattggaatcctaatcctagttggagatgcatttgaaattagagagataaaggaagaagaaaaaaaacttttggttttttgcttatcattttttttttc

SEQ ID NO: 398824 - DNA, 567 bp, Cannabis indica
tttgtatttaacacataaaatgtttataaggctctgttctattcaagaatttacacttaaggctctaaagttctcttacagtaacataatgcagaatagaacatatttctcctgaaaaaagctgagcaaccacattggtccactgctccattattgattaacactcgttctagcttccaccgaaatcacctcttccgtagacaaacaactgaaaccacacctgcagaatgaaagcacaatgcaccatcaaactaatgtattttcaaaagaaaacttgctgaaaatgtagaacaagaaaaaattgagtacttgtgcatttcaaacttcctatcttgtctacaaattctatgtttgagttttgagtacaaatgttatttacacacaacaaaaataatgctaaattattagttcaattagtttattagtttactcaatatgatcgatttaaatctgctaacatgattattatcttaaacaaatattacagcttattgataaattaaaatttaactacaacattcagttatagtaactaaaatcaacacagcaccaaatcaattagttatt

SEQ ID NO: 398825 - DNA, 1486 bp, Cannabis indica
ttgtaaccagttttaggtttttcatatcttaaatgccttgtagtattttcatttaaacttaatacaattttgtttgcttgtatttttattcacaatgtaaacaactatattttgatcaaatatacagtacttttgggtttctccattgctcgtaatcttcctgtttaagtagttagtaatctaccaaattttttgattttcgagcagttgtcaattttgcctcgcagttgcagttataatctgccttaagcaaacttaaatatactttaaggattttatcactttgtatatttttaatttgttcgtataaatagttatattatctatccactttctaggtttaagtacttttatcaaggcatcgtgatgcctcgttttgtactttcctagcttgcgagaaccgttagtatgtagttttatatgcgagttataaatttcgattttcctttcccgtcggataggttttaaatcaaaaattataattgtttgatcccttatttgtcaaaaaggtttgatcaaggtgttataactattcgacccctctctcatcaaaaaggtttggtcacggagttataacggttcgactcaactttcgtcaaagaggtttagccgagaacctttgaatttcaaaaaaaacattgaaatgacgggtttgcattatataatatatttctagatgaattccgattaatcatacataaatttcccttaagtaattttcaaagaacgaaactctgtcattacttaatataaatgattctctttattcataactgatgtttaaagtttacattagtaatgcgggttacatcatttatttattgatagtagggtcgcaaatgttctatgttccagtagttctttattagcgagccatcaagtcgagccaatttatagactctgactccaactactacttcgatgacatatggaccctcccagttcgggttgaacactcctgcttatgaatctctcgtatttgcaaagactcatcttagcaccaagtctccaacattgaatagtcttttcttgactttttttgttgaagtatcttgtaactcagtgttagtatgctgcgttggtgatttgcgactccattcgtttttcttcaagtagatccaactccaaggacaattttaaaagttcttggttttcttcttgattataaactctcttctgtgagttgatgtgttcacttcaacaggaagcattgcttccaagccaaatgctagcgagaaaggagtgtgtctcgtagctgtcttctcggtagttctgtgggcccagagcacctgaggtagctcgtcaacccatctgcctttggcagcgtctagcttcttctttatagtatcctttcaggttttattgatggcttccacttgtccatttgcctgaggcctggatactgacgagaagcttttaataattttattcctctcgaagaattcagtgaacaagtcgccataaaattaggttccattattggata

SEQ ID NO: 398826 - DNA, 590 bp, Cannabis indica
actatttataaagtatcacatcaccaatcatactttctaatcagagtcattagctaaaatagagagtgaacttttaagaaaataagcttcaactatccaaaaaatagtttcctatgatataaaataaatagaaagctcttagggtgtgtttgtcataaattttggtttgcatggagtgtgagcaaaaaaatcacgtggaaaaatgtgaaattgaaaaaagagatattttatattaaaaaattgttaaaaagtaccaataatgtcaatcaccctatttcatgtcaaatcgctattagtgtaattaagtaacgattcttatataacttaaaaaaattacttttaaagaatatcgctagccaatcgtaagataacacttataaaaagtgttaagtactactggtgcctaataacaatcctctttatattccccactaaaaaccattgagacctaccacattctcacattaaaaaatgtaggaaaatttacaatagcaacaaaaacacccaaaaattcattttccattattccacctaatcattttgattaaaaatgacttaaattatttattttatttttaaaaataataaaa

SEQ ID NO: 398827 - DNA, 642 bp, Cannabis indica
aataaatatatataagttggtattaccatttagtgtgtagtagatatgactgaaatgcagtagaaagagatataacgctaatccatatagtcagaattaaactcaagctttccctaatgttggctttccctcttagtctttgtaggttatgcttttgagattgacacctactatatagactttgcttttatatatcttctgggtggtagtcttagagctactgataatatccttatatataatctatcctagtagagaaatagtccaaagaggatatttagaaagacatatttgaaaagatagataagatttttattattcgaaaacttgatccccttaacagaaatgagaggccatatatataggccctcaacaaatagaaaacattacaaaccttaagacagaaaacgttaaagacttaaattacatcattccttaggtagggaatctctggcattccagattcttttttttaataactacaaacagatgatattttcagaggaccagaggaatctctattgtctgaatgattccttgtcgctagttgtcattttgttacgagaggaaatctcttttgatcttgtgagtagtcactggtcaaggcacacgaaacgaatggactgaccttttcaggagtca

SEQ ID NO: 398828 - DNA, 503 bp, Cannabis indica
tttattaaaatatatccatttttttttagtgggttgcttaatatactctcactctctacttaaatctagcatataatttacattaacctaagaggtctaataggaacattatctataaaagtgagtatgttttaaaaaatataaaaataaaggtaaaaattaaaacaaataaagtaaagtgggtatacaatgtaatttcttatttttaatattatacttaaaattgattttatttataaaaatacttttaaaaaaattattttcataaataccgttatttcacatcagcatacataccgaaatttaaaacaatgactgaaaatagaaacaactggaaacatctcgttccaaaaatttttgcgttttaggagttttgaaaaaagtaactatttagttgcttttgatgtgaataagatatcaattggttgttttctattaaaaagtttatttcagaattttacacatatataaataataaaataactattttaatatgtgagaaa

SEQ ID NO: 398829 - DNA, 605 bp, Cannabis indica
tatcaagttacatataacttaaagcgtcacaccactggtatctagtaataatacttgtatttatatttaaatttaaatatactattattattggaatatcttactattataaaagtaagtgtggtaatagtgtgagatttccatagtacttttgcccttcacaacaatatataactacattgatactaataaagtgtaaaatgtaacctaatgagatatatatacctctttgaaaagtcaatcaataatattaagagaatatgatattttgataattctctaacttttacattgtacaatagtaaagaaacaaaatttaatattttgtcttttactagctcacctacttttaaaatacttaagcaaaataaacaaaaaactttcttattttaacttttatcgttattttgtttttttattattattattagacaattaaaaactctagattagttcttcctttttaattgaaaattttattaatttaattttcttattttctctaggatgcttattatataaaataaataaatctaatattgtaaaactattttatgtttttgaaaattaaaatggtggggttccacctaagaattcttgattgg

SEQ ID NO: 398830 - DNA, 597 bp, Cannabis indica
aagctttcaagaagggaaaggttctgtatgtacaacccaaaattgctgagattataggcatcaaagaagcattgagttggattgcgactcatccctgggacaatgtagcgttagaaacggatagtttgatgtgtgtccaagcagtctaaagtaaaatttttatgtcctcacagtttggtcttattgttcaagatgttaggaatttatcttttattgaattatgttttgttaaacgatctgcaaacaagttggctcattgcttggcaagagactcttgtttctctacaggttgtgtgcctcagttagaggattgttcctctgaagtgaattctattgttttgaatgagtttaattaataaatctcttgattaattaaaaaaaatgtcattaaatagtaatatttgaaaatgttactaaaaatattttatatgtttatttttcaaatttaaaatgattttattgacattttaaaattgttactaaattatattactcacatttaataaaaaaaaaaaaaaaaagaaattacattcactataagattttaaaagttgtttacttaaatatgacacttttaagtttgaccaatttatatgg

SEQ ID NO: 398831 - DNA, 351 bp, Cannabis indica
tccctcatgaatacttctcctctgtaaatggaaacttactaggagctcttgctggtaaagtgtgatggtggagtttgatgaaggcgaacctgtgtcgtggaagaagttcctgcgagttcaggtggatattgatactgccaaacctttttgtcaggctgcttctttgagttatgcagtggcaccaaaatatgggtccaatttaaatatgagaaaattagaattttttactttaattgtggaaaattggggcaccacgtaagggtgtgatctttcctcccatgtttctgttgttaatcctctaggcactcctttcccgatctttggaccgtggatgtgttggaaattatttta

SEQ ID NO: 398832 - DNA, 977 bp, Cannabis indica
ttaagacatcctgtaaaatttaaaaaaaatttagaaaaatttaataagccgaaaataaagcacttctttaaaagtggtgcactgatttactcctacctgtttcggcattcgggagacttgtttagtctttttttttttatggtcgtgtacattatagttatttaaaacatcttgcaaaattttaaaaaatttaaaaaaatttaacatgccgaaaataaaattcaaactttctgttgcgtgactcttttatttagaagaatacattgtaaaagcaccttataatatttatttttgtgtaaatttaaatgtgaatatcataaattattttttgttaattaatatgatatatatttttttaatttattaaaaaattaatataataataatgaatatttttttagtgtaatttttggtgttgtggttggagtagaaataatttttgacaccaaatttggtgatagtgtaacactaaatttagtgtctctttggagatgctctaagactggtcttaaattttaagccctaccatttttaagctgctaattaactcttattagttttaatttagtttgtgtaataagactggtgcttgcacttgtaatttattttactactagttattgaccttttgttttttgttcaaccacacccaacaaaagccattaaattaaggatctaaccgttaacaaacttcatgtgtttaagtctataataagattatattactctaaaatttattctatgatttcttttcgatgaaacaattcccttcagagttttgtatcagtcgatcaaacattaatattcttaatatgtcaaaagggaaattttattttgttttcttaaaaaaaatattctatatcaaaatttagaccccaaattaatttatacaaaataattcttttgtttacatatttttcccattttacccttagctattaaaaaaaaaacctgatcactaatcactctctctctct

SEQ ID NO: 398833 - DNA, 1281 bp, Cannabis indica
tcaagaatcgctcttcattctaagtttaaccacaagtgcgatgctggtacagactcgtaggggccttgttgttctaacaaatccacaggcggtggatcatgcattgcagaagcaaggaaacacaaggtttttgccaactgttaatcccgagcaaccatcaaacgcaggccatggggggatgactcctgtggatgaaatcgcgcctggtgtgcaagagtgatgacccagtcagggcattcataacacagtcgttccgcctgctaccaacgctcgaacgaccattagagatcatagtgagatccgaaatctccgtgctgctgttggactcatgcagggtcataccaacaccaaacatcatgatcaagaggtacttcccgctgcgataaatctcgcattcgaagagcagaggcgcatgtttgcagagtggagagacaaagagatggaagcgttaagggctcatcatgcagagattgacaatcgtagttggaaggctactgtgctgatacaaaaagcctaccaaactgtctggcagcgacccccgaatgtcatccccctgggtgaaacagaagaagattcagcgacgaatacttcccagactataaatggtcagctgccaaatctccggtcacaggttccgcctttgggccaagtagtaggtgggcagaccttttctagtaattcatcaggagaagtcatacctgatagttccaaccaggcttacggtgccattccacctgtcaaccaagccaatcaatcactgagacagccaggcgcttctgtattcgataggttgggaaagactcatgatctaagaaacaatttgaatagaaggagaggagtagatgatcagcttggcacgacgatcgtctcgctcggaacccgtgctcaaattcccactcagaaagatattgacgtgactcaaatggaccagaatgctgagcaggttaggccagatgtgcaggcacagctagaaaaagtaaagagtatgttcaaaggcatgcccagacagagaaacaatgatctcgagttggaccgagtacgtggaacccctttctctcccgagatcaatctcctagcgttgccccacaagtttaaaatgccaacctggaaaatgtacactggaagagaagatcctctttcccatctcaagtatttcgagatgcaaatggatctgcaagggacatgaggggatgtgtgctgccgaagttttcctgctaccctcttggaagccgcccatcaatggtatttcaagctagctccttgaaagttcaactcatggaa

SEQ ID NO: 398834 - DNA, 571 bp, Cannabis indica
caaactaattgtcacatttcttaaaaataataatttcattaccaaattgaatatttaattagctcatatttactattttaaaaagagtaaaatatgtgtaccaaattacaccaaatatcacaatgacattaacttttcgcgataataatatttaagttatattttttagaactatataggtataaatgtttagttattatctacgtgtcattttcttattagtttattttaattaattttttaaaaaaaataaaaatttactaactttgaacaatcaggaattatcatgtggcaatatacttacaatttaagaactaagtacctacgaaaattttcaaattattattactataaaaaattaaatttaagtatttatttgtaagttaaactttaatatttatgccgcaaattacttaaaattatatataaaaaaaaggaagacagtaaatttcgaccgaataattctctaacattgaggttctagtaagccctcgagcaactgtgtttacacaaatgttgtccttcaccctttcacatgccaaattctttgtcatttgattaattgctcctg

SEQ ID NO: 398835 - DNA, 754 bp, Cannabis indica
aaaaatatgtgcatcaataagggcaaatatcgttggtaaaaagctatttttcgtcagtattatctatcactgaggacatttcgttagtgaaaagtcattgggaatagtttgtcagcaaaaactattatcaacaacgacttttaatgtcgtcgccaattaataatatcaatgacgacaaagtcgttgttgatttaaattttttttttaattttggtaaatcaacgatgataatatcgtcattgattatattatcaatgacgacattgtcgtcattgatgagtgtctcgaaaaaaaaatatttttaataattatatcaaaattatttctatttaattaattaatatataaaattatattaaaattatttaatgaatataaattatattaaaatttctattttaataattatatatattattatttaattaattaattatattaaaattatttatatttaattaatatataaaattaattaattaattaatatatgaaatcatttaactaaaagtaaatattatttagagtcacaaatattacaataaaaagtgagttataaacattacaatacaatactgtttacttaaatataaattaagtgttaaaatattaataaacataaaaccgatagttcaaaaaattaaaataaaaattttaaaagaagtttgtagtagcatcgtcctcatcactagcatctccaagaacatccgacatctgtgggtagtatgacggcatttgcgaacttgtcatcatc

SEQ ID NO: 398836 - DNA, 1362 bp, Cannabis indica
ctacgggtctctcagctaataaggccaaaccccaaatttattttggtggggttaaggaaggtatcaaaactcagatcttggatctcgttaaaatagaggaaggttccttccctctcaaataccttggggtcaagcttcgtccaactaaatggaagtctgaagactgtggagtgattctagacaagataaacaagaacttaaactgctgggctagcaaaaatatcttgtttgtgggtcgtgctcaattgatccattcggtcctcctcgacattagaaattattggatgagtatttttactcttcctagccatgttataacagccattgatagaagatatcgagaattcttatgggaacctctgggaatcgatctaagatgcattttgcctcgtgggagaaggtttgtctcccgaaaaagtatgggggagttggctttcgtgagggtaaaaagtggaataaagccttgatggccaagttcctttgggccattgcttgaaaacaagatagcctttgggtgaagtggataaactctatatacataaatgatcaaaatgtgtggagccttcctatcaaacaagatatgagctggtacttcaaaaagcttatgaaactccgatcaagtacaaatgaggcatccttattgcttgctgaaaaggaggtaagttccgagccaaactcttttataacatgcatgtggaagctcaagaagagaaacatagtagagctgtctggaataagctgattgttccaaaacacaggtttattctttggcaggctagcaatgctcaactccttacccgagatcaattgaacaagtttatgagtttactctcgaacttttgcccagtttgtgagagtgacatagaaacacactcccatctcttctttgactgtgtgttagccaggaaaacttttgcagaaataggaagatggttgggatctgcggattggccgattgatgctgagcacattcagcaatggtgtatccagggtccccttgattttaagaaccgagtgataaacactatttttgcagcagcaatttacttgttgtggaaaaatagaaatgattgtatatttgatttagtttgtacttctccttttaagttgagcatggagattaggaagatttctcaatctagaatcttaagtatgacttgtaccacccttaaaaagcaggataaatacattattgatgtaattaggggctggtagctttttcttttggttgctgccttgtttgcagtcctgtaggctcgttgagcctttgttgtgttttgccttggtagttttgaataaagctccattttgttaaaaaaaaaaacaaataggctattattcaactaacaattagcacttact

SEQ ID NO: 398837 - DNA, 961 bp, Cannabis indica
caatgatattatacttgtgacaaatgttgtatacttaaataccataatagaaaataatattttaatttcttaaccaataatattacaataataaaaaaattaataaatataatgaacaaacataatataataactaaaaaaaaaatactatacacatattattacaaatagataatataactaagacttaaaaaaaaaaaaaaacaataattgttctaatagttaaacactaacacaaacgcataaactatataattatgcatcattttgcaacacattcataatataatacatttcatttcatctagtatggcataaaatactcgcatcaataaagattctttagctaatatgttagtggcttgaatacacgcataacagttaggccattgatcttgcttatttcattgtagaaattgtctagcatctcagttactttcttatcaaatattacatcgatcaatccttgaagtttcaggacaatttcaaataagaattctgccaatgcaccaatatttgtggaaatacatccaggaactcttttactactttgacaaaactcaggcccaaatatttcaggtctactggagtcaatcacaactgctaaaaatcctacacatccactgtacagtaaatctttagcctttaaaactaaaatgatcgaaatctgagaaccctgaacagacccgacatatacaaatggttatttgccctcttgctaaaaagttaccatcttccatttactatcaatactagccaatttgataggaaatccatcccaagtataatgtcgaactcggttaattccaactccagtaggtaagcacttaactccctgttttcaattctaactagcatagacctaacccaccttttggggataagcaattctcctctaggtagtagggttccaacccctatttcaataaactcacaaggcctaactgttggaaattatttt

SEQ ID NO: 398838 - DNA, 757 bp, Cannabis indica
aagcatcgtctataaaatgagctataacagccatatatcccctcttttaatgattggcagtcaacatttcagtggctaaagctattccacttttatttttcttcaaaatttctccacatttttccttctcaagcttatgtatcttcataaagtcagaccctattgtattccttgacattagttgaaacataggagaaattgtgtttacaaaatctataaatccactatgttcaatcatcgataaagtgtactcatgtagaatgatcacatgagctaacttttctcttcttagttcttgatcaagattgtaggtgattacaggacttgcaacgacatttccacatttttctttcaacactggacatcaatcgacgtgaagatttaaatgcccagtccctttattatttcctatcgccatgtgcctcccgcagtgattgcacacttcttcaatatatattgtcaatcatttgcaaagtagagtaatccactgcaggagatcttctcgttctcttatttgttgtccctccactctgagtttcatctattctattactagactctatttcttctgacataacaaattcaacatccttaaaaattcatttggccagacatataaccaatttctttgtcttaaaatgttcactgtctcctactaaatttaacaatgcttcttgaaattaatataaaacaagcatattgtagacttgaaatataacatgcaattcaagtatttttgcaacaaaattcaacttaa

SEQ ID NO: 398839 - DNA, 798 bp, Cannabis indica
gcttttgggggaaccgaggcatcataggttttaaaatgattaccccttctttgctgttttccctataaatacgactgagcattgttcacaaactcattttcaccaaccttctttgttaagaaagttcagagaaaaaagagaggtttctagcttcaagtttgttgaaaaaatttcacaagaactgttcgttcatctttgcgtaaattgaatccagacgtcgatcattgggtaagttctcgatttgttttacttttacattgcacatttactttccaaattcgatcttaactttggtgtagatgatatgtagaataccctgggttcagaaactctacgatattcctttgtaatgattcatgagacttcacctttcatgatgcttgccttttgactgcacaatgtctgtctttcatctggcttattcaaagcttcgtaaaaaaatttccctaactctcgaaaaattcaaacttctgagttttgactttttgtcgaatatttttattctttaatctgttgagtactcatggtcggcatattcgcctatttaatgatcgataccccaaccaaacactaatctcgcgggttgtcttttgtagatgaaccaaggtgagttttggggaagcgaatatcgaatcgataaggattttcttcaactcttgcacgaggattacccttgtctttgttctactctgccctcttcaagcgacagaaattttagttcaatcctcccatccagccataggatgatggctcgcattaaacagacaatgcgtaaagtcaacgcgtctgaccctcatg

SEQ ID NO: 398840 - DNA, 865 bp, Cannabis indica
gaaaagaaaggcaccaactgcacttggtggctaaggtcagaataagaggttctaggggaaccagggttggggtaaccgtcagggtggttctggaacccgatacacttacccagagttcagttgtaaaaagcatcatctgggtgagtgtagagggcaagggtgtttccagtgtgggttgcctaaacattacaaaagagactgcccagagcttaagaaagaagaggagaagacagtagcaaaacttgctctagcaagggtgtttgctataactcaggctaatgtagaagctagcccctcaactgtaacaggtcagctctcggtctacaactcttacttctctgtattgtttgactctaaggcctttcactcttatgtggcagccaaaatttttagtaatttagatagaccgcatgatagttatgataaagggtttggaaccctagtgcctggcggagaattagtcatctccaaaaggtggattaggtctatgccgataaggattgaggatagggagttgagtgctaacttaatagaaatgggtttagcagatttggtatcatacttggaatggatttttttatcctagcactcagccagtattgactataaacgaaagatggtgatcttccaacctgaggacgaggaaacatttgtttttgtggatccgtttagggaccctggattctagtgatttcagtattaatagctagagaattgttgaaagacggaatgtttagggtttttggccatggtattacatacgacacggcctgagacagttcggccagaggacattagggtggttcgggaatttttagatgtttttcttgatgaacttccacgtttaccaccgtaaagggaaatt

SEQ ID NO: 398841 - DNA, 813 bp, Cannabis indica
tcaaaaaaataaaacagacaaataaatcaaaataatcacaaaaacaacactatgaccaaacccttacaggaattcaaacacatatcaaatcctaaccaatcgaactatcaatacactgatccaaacaaaaataaaccaaaaaattataaaaaaacaatactaccttaacctaaacacttacaagaattcaaacacatagcaaaccctaaacaatcgaaccatcaatacaccgatccaaactaaaataaacaaaaaaattataataaaaaaaaaaaaaaacttaataaaaaccttaaatgctatctggaactacaatctcttcatcactattgacatacttcatccttttcgaagctcgatctacatttctcctttcttaattagattgatcatttgcattcctcaccattgaaacatttgattttccacttttactatcctcagacattgtttcctttatttttctcttctgatttatctccttaaagaagatatagagggagaatgtgatgaacgtgttttcatcattactaagaaattactaaaaaaaataaaaataaaatgcaatgggtatcatattttataagaggcagttttgtaaaatatgtttacaaaggaagtttacagaaggtggtattaaaaaaaattatggaaaatttgaaaaactgtgatcacgcactctgcgcctcctgacgcatgtcccatccaacgctgacatcgtccctctattcagtgtattctaaaaaagcaacaaaaatggattaaattttaaaaacggtataaagtagcggtaatattaataattagaaaaac

SEQ ID NO: 398842 - DNA, 988 bp, Cannabis indica
atacacttgggctgatctccgtcagactaaggagacaattggtccaacgggtaaaatttaaaaaagaagtggaaaaggtggttattaaatgctaatgtgtctcgaaacgataaaactgccaaaatcagaggacatgcattttttcaaaatggattatgacaaaaataccttctgtaatcatttaaaaagcacttttcactgaaaagaacctttcaaggggcaattgttatacccaaaatttggctgacacttcagaggaggacacgtatcaacattagactacgaataaccgaatataatggaaattttattaaaggatattaaaatggaataactcattaaatacgaagttgataaagtatatttataaatcatggactgattacgctcaaacttgtcttcacaaagcgatcgttgtagtgtagtatgagcggttgtgtccacatagagatatcttaatcaaaaagtgattagtggaattttaagcattataagtaaataagtcaatgggtttttgaaaaaatattaatagtaaattttaaagcaaataaaattggtagaaaattataataacaaaaatgataaggtttcaagaatcaccatatgtttggctcatttatttgggttttaattcacacatataacacaattagattattcacttcccaataatttaatcggaagataaaacttgaagaacatatattaaaaaaatgtatttgagtaatataaaattctcacattaagattgtagaaaataatcttatgaaaaatctaagaatgacaatataccttttgttgggtaataatgcaataagagattaatcataaaattataatattaatatatttatgctattatattcacatagaaaaagcatgactatttctatataatactaaatagataaatatattaatatagagataaagaaaaaatagaagaaaaatatactactcaaatgtataaactttaaagcaacttggt

SEQ ID NO: 398843 - DNA, 532 bp, Cannabis indica
atcaggactcgaacttagacccagagtaggaccgagacctgaaattggactagaactagaactcagactgggaccgggaccgggacccgatactcaaacgcgagacctcaaaaccgaaccgttaaataaacccagaccaggccaagacccgagacaaagaccatttccgaacatggaccgggacctgcactcggactgggaccctaacctagatcgggacctaggaccctgacctgaattggggacccggacccatgacttaggcccaagacccaaacctagacccaaacttggacataagacccagaccaggacccaagacatgagctagaactggaccatgatctagatttagccttggactggacccaagacccgaggcttggactcgacccatattcggtgtctaaatctggtaattagacctaggctcagacctagactcagaccagaactcgaacccgtaccaaaactcgaaactagactcgacatgtggtttgtttttggatttgggactaagactcagacctga

SEQ ID NO: 398844 - DNA, 736 bp, Cannabis indica
atgggtttgcaatataatatgtaattctagattaattccagttaacatatacatatatatgccccttaagtaattttaaagaaagtattgtcattacttgaaccaactttaactttattaataataagaatttacttataatagaggtaattacaacatttacattttaactttactggtaataaggtcacaaatgttcactattccagtggttctttattagcgagccattaagccgagctaatttataaacccggctcccactactacctcgataaaataggggccttcccagtttggattaaatactccagcagacggatctcgtgtgtttgcaaatactcatcttaacaccaaatctccaacattaaagagccttttcttaactcttttgttaaagcatctcgtgattcgatgttgataggctgcattacttatttgtgactcagtatgtctttcttcaagtagatccaaggacaatttaaggagttgttagttctcttcttgattgtagaaaatttacacctatgggtcacaatattaacctcaatgggtagcattgcctccgagccaaatgctaacgagaatggagtgtgccatgtagctgttttctctgttattctgtgagcccaaagtaattttggtagttcatctacccaccttcctcttgcagcatccaatgtcttcttgatagtatcttttaagtgttggaaacattttaccaggatctagattt

SEQ ID NO: 398845 - DNA, 596 bp, Cannabis indica
aaaaaaataactacaaattaacaaaataaataacaaaatattgacctaattgcaataagtaaaacaatataaactctttaatatatttttgtattacgatttttttacttagttttgacaacttgattttttttttattactattacattatttttttcattagaatttattgttacaactctattttctcaattttttttttcatatagtaatgttattattgtaaattagataaaaaagatgtatattattctaaactttccaatatgacatccttggattctaaaatgtgaggctcgaattcaatccttttctttctgtgggctgggcctattggcccattatttggtgtactctacaatgttgttaacaaggaagccttttaacttgagttactcctcttatcttatttataagcaagctcccttcaagtgttttaaatgataacttcaccaaatgaagaataaattaatatgaagaatttacaggttttttttgtttttgtttttttacttgaatatgacagttttaaatttggttattttttatagttatttttttttttaatttttgaactattttataatatttgcta

SEQ ID NO: 398846 - DNA, 908 bp, Cannabis indica
attgtgggatttgttcggggcaagacttcgaatctgagcccatttttcccgtatggggctgaaggtgtctttagagcttcagctgttgtgtattggtcttataccggttttgatatggtggccactatggcagaggaaactaagcagccatctagagatataccaattggtttggttggttcaatgagtgtgattactgtggtttattgcctaatggctttggcgttgacaatgttgcagaagtacactgaaatagatataaatgctgcttattctgttgcttttggaagtattggcatgaattgggctaagtatttggttagtatatgtgctcttaagggaatgaccacaagtttgcttgttgggtctctcggccaagctaggtacaccactcagattgcaagatcacacatgattccaccttggtttgctcttgttcatcctaagactgggaccccaatttatgctactcttttggtaaccattacaagcgcaataattgcattttttacgagtttggatgttttgtctagtgtattctcgttcagtacactctctatttttatgcttatggctgtagcattgctagtcaggaggtattatgcaagggaagtgacagagaaggttgatttgctcaagtttcttgcctttttatctcttgtgattggttcttctattggaatactgtactttggaacacaaattccagaggttggattggttattcagtgactagttttgtttggcttgttgggaatttgggaatggccttgcttccaaagcaaagagctccaaaggtttggggagttcctcttgttccatggctgccttcagtttccattggtatgaatctttttctcattgggtctttgggagctgttgcgttttggaggttccaaaagagtagc

SEQ ID NO: 398847 - DNA, 577 bp, Cannabis indica
ggggtgatccccagaactgaggtacatgtctttctgtaatattcagtaaaggcacacattcccaatggatacatcataggaaatgcatggtctaatccctaggctttttaggggtttaatggatgtaatccattatcctttcttgactgatgtgatttctcataaagtagccgtcactaggctcattaatcatagcgtagtagctacagaaggggggttacgccgtcagactttaatacttatggcagtttcaatacgccttctcccatgcggcattaaatgcgaggtgactgttcagataggatttgatacctcccggagatgcctcattgtagtcttgctctccgggagtatatgaaacttacatgccttctccgggaggcatgttaaatgctgatccttttgattaagaagacttagtcgaattatctcaaagtcttgcttcttcagtccacgtgtcacagtccggttggtccacgtattttggacaccatagattatttgcttctctttcttcgccgtttctggtcatccctctaccggcgatcaacaccaacccccagccttcaaacttcat

SEQ ID NO: 398848 - DNA, 1443 bp, Cannabis indica
tagctttatgatcaatgatttttacaccacggaaataaacctcaatcaactggtttgattcctgggaaaacaacaatttgttgcaatcaccaaaacaatcaataccagtgatcaaataaaactcctcgacactgaaccgtatacaacggccagcaaccttagcccaaaattcttttggattaggctggtacacttccctcaacagtaggctattgacaacttgggggtggaaaacaaaatcaggtatatccagaaaatgaccaaattgggcgtcacgaaacatagacaacaaattcacagataaagtattctttatattatcaataacagagaaatttctagtacaaacacatttggatctgtaaaaatcagagggactaaatttgtaatcccagacctgcaatttaacaaacatggcaaatataaataaaaatggcgaataaacaagtatacaaactataataaaactaataaaaaaaaaaaaaaaaaaagcctgaaaaaacaaactgacaaacataaataattcttcgaacataaactacaaagatcttaaatcaaattgttacacattgattacctaaaaatgaacagaaaacaactagacctaataatattcccaaaagacaacatacataaacagattacactattaaaaaactatgtaaaaactaaaacacactgagaagagacattaaaacaaaactgaagtttaaaaatatttaaaaaattagaaaacacaaacagaataaaaaagacaacaaaatgaaacaaaagtaagaataaacaaactaaaatgcaaaacccacaaaagaacaaataaaattgatcaagaaaaattaaagccctaaaaatccaaacaaaaccaaacgaaattttaaaatggaaaacctagaatatcacaaatcagaaacacaaaatcgataaaatgaaaaatacaagaatatctataaaaaagggggaaacgaaaaagaaactgtaaacaaacctcagttcgaataacaccaccagcattatcgttttttccagcaacatcttcagtcattttctcttggacaccgacctttgatttcttcttaggaggagctcgcccacgcttcgttaatggaagagcaaaatcagagtcttcatcctcaataataggtcgttttcccttggccttattagctaatgatttcaaatccattttggagcttttcttttgaacaggaaaaagagatgatgaagaacgggtcacagccattttatatatggattgagaaacaaaaaagaaagaggaaaaatggttatgggattgggttagtgggagttgaaaaaattttgaagaacaaaaatgagcgggaaaatggatgtgggatcgtggggagggaaggttcagcaatggaggttactaatttttttttaaaaaaaaaatgaaaaagatatggaaaataaaaggaaaaagaa

SEQ ID NO: 398849 - DNA, 513 bp, Cannabis indica
attctataccaatttagtaaaatgatgtaccattagagagatgctctaacaataaaaatttaaaaaagagacaaaaaaaaaaatttgcaagattgtaaacaaaataaaaattttataattattaatattatttaattatgccttttaaaaaaagtaaacctttaacttttacatataatttctagggtaaataccattttcgaccctatattttgtgaaagttaccaatttgaccctctattttgttaaatgataaaatggacattgtattttctaaaattatacaaatagaaccctaaactgatttttgtcaaaataaaatttaataataatctaatctagagatactataacaaaactacttatatgttatatatctgttaatgttaaaaattgtcttaaagttgattatattaaaatttgaaattattgaaaattgagctcagtgtcctatttttaccattttaaaaaatataggatttattttgtcatttaacaaaacagatggtcaaa

SEQ ID NO: 398850 - DNA, 690 bp, Cannabis indica
gatttatcagtgcacatgatttacattgtcgtgataatcagtgatatagtttacttgtacttggataattggaattccttttccaaggtattagtaaagtagactaagatcaaatgtcaaagagaaatccccacatgtactttttttaatggaaactataagttaggtccgaatgttgtttttcgctttcataatgttttacattttaataatggacttaaagtccttagagtaggcttgggggtagtttaatgttactttggaaagatgatgtagatgtatcacttttaaattttaatacaaatgtctttgattgttatattggctttgcaaatcacccatgatggcactttactgcattttatggagctccttcaacttaacagcgttctcaaataaggactctcttggatagacttaagaatgttgcacatttatctccatgactcgtaattggtaactttaatgagagtttatctaatgacaacaaattgggaggggctttatgcaatgaagcgcaaatggatcattttagacgaaccattgacaactgccatttaaatgaacaaccatttgaaggtgacccatacacatagataaaggaaaacattcggtggaaacaattaaagagagattggattggtgttttgtgaatgacttttggacctccatattgttggaaattatttt

SEQ ID NO: 398851 - DNA, 1186 bp, Cannabis indica
tttggttactttcgctagtttgcaaaatttccttagagcctttataaaaaaaattccagacaccataaatttcttgctactcttccttcgccgttgtcaatcctcgttataccgttgatcaacacctacccccagctctcaactttcatgcaacttttctggatactttgtgctcgtttactgtttgtttgtatatcaggattagaatgtctgggttgagtgctgaatttctgggaaataaccttgactgtattagctgggcaatgcgtagaatctctcttattcgtatcctttctagagataacacttttagggcacagggcgattcttgtttccaccctcggcgttttctcctttcttctttttgtttttttattttcctttcctctacagtcgctgcctttgggatttttgcacccgatgcttgttaaggaaagtccttggagtttcctttttcggcaagcatccggagggggcctctttccagcggttaggggacccccattccctttcttaacattcgtgtttggtttggggcctaattgttggatttcttattattttcagaatagaaatgtccgctacctccgggacaaaatcttccaagaagggggcggccaccgtggctactctggaggaagtaatgaagggccctgttgcccaggagaactacacttctcgcgccaacggcagggaggcggatgagctccattccaccctggtttgtgctcatcaactagagaagatcgtgaccgtggctggtatcaagccgtctgcgtccggggtctttcaccgccttcctcgagacgaagagatgcccaatcacaactatgggaggttcagagcttggagccaaacccatcttatttctggggctatgctccctcttcaagactacttcattaactttcttgtctttgtcggccttgcgccttataaattaattccacaagcttaccgtctgctctcaggcttgtttatcttttacgttgccagaggctgggcttcgcctagcccggccaaaattttgtatttttacgaacttgtatctgtccccaagaagggggacaagtttaaagaagattttttcaccctctgggcccggtcccttttaatcatcaaaagaatgtaaaggagtacctattggaatttattttaccaggattactgtatcaaccaccatcta

SEQ ID NO: 398852 - DNA, 499 bp, Cannabis indica
tgctggaatatttgtgtcatagtcacacattctttccccttcccttcaaagaatacaaaactattgtccgcaaagaaaagatgagacactttaacattattcttaccaaaccgaaccccagttatttctccagccctctcggcctcttgtattaggcatgaaaggccctccgagcaaataaggaagaggtatggggataaagaatcaccttggcgaagaccccgggatggatggaagtttccaaatctttcccattgatcaaaaccgaaaaggagacactagttacacacctcatgattttctcaatccaaacatcatcatatcccaaccctcgcatcatagtcataagaaagctccactcaacccgatcatatgctttggacatgtctaactttaaagccattttcttcccattaccaaatcttctcgtcttcatacaatggaggctttcatacccgatgatagcattgtcttggattagccttccacctacaaacgc

SEQ ID NO: 398853 - DNA, 918 bp, Cannabis indica
ttctttgataaacatggtcctgccgcatgcttaccatagaatcctccatgtacctcgaacaagattcatcaacctcttcttttgtcacacatctaagaaatggcatggagaagcttctcctatacatcacaccttcaactattctatcatttcgacttcttccgcgcagttgatgctcgcctcttctaggaattggattaggactaagtttgctttatctatcactgtgctgctcgcaagccgtgacaaggcatcaacagttgtattttcttccccgtgaatctatttgagggtgtaaccttaaaattgtgcgagcatgtcttggatcttacttagataggccatcaactttttctccacgggccatgtactctcctgagacatgctttactactagatgtgaatcgttgtagacttcaatgtattcggtgtgtacctcccgagcaagttttagcccaactatgagtgcttcatactctactttgttgtggaggccttgaacccaattttattgcttcgtgcaaaggttgccccaggtgtgatgagagcaattcctgcaccaaaaagttggtcagtagttgatctgtccacatgtaatttccaagttggtctatctttgttctttgctggtaaagattcttgtactagctccgagttatcctttgtattgctttctctttaaagtctaccaaggcctgttctctaactgctgtacaaggttggaagattatttcatactgtcccaactctatttcccacttgagtaatcatccagaggcatcaggcttttgcaacacttggcgtaaaagttggttgttatatacccaaacaggatgagcttggaaataagaccttaacttccttgtggctaatattaggcagtaagtgagtttttcaattatggggtaccaacattcg

SEQ ID NO: 398854 - DNA, 1059 bp, Cannabis indica
tgcattttatgatttgcaggttcatgcctcgggcatctaaattgttcggcaggaagaaaagggaagtgtctgatgttgtggctcggcaacaaaaggagattaaaaatttaaaagccgaactcaaatcccttaaatagaagaaaaatactgccgaacaagagggtgaaggagaggtggttggtgaggcgtatgttccacaacaatacactcatgaggataagggtccaccacaaacctatgctgaggagtttgtttcactcaacgagcctgctctcctgtacaatttcaatgaccatttggccctttatcagcaagtatatctctactctgacaatatcgacaacattgtggcccgagcatatctttacaagcatgttggtaaaatcactgttcactacacgaactacgattattcacatgtccgggttctgatttcggaaatgctgcaagaggatgttgaaatcccaatatgaattgaagggcgcagatatgttagggaagtaccgaacatgttccttcgttggcctaaacacttaattgtaacacccgaggtaacttctgttataaattaattattaataattagtggagtttgaatatcttcaatattcaaccatagtgaagtaggctctgcgaatatatgtgctgtggtgggatggattaataaactactgttatttgtcattatacaggcatgtttaaaatttttgggggcattcaattacagctgttatgctgccgaaatttcggtagaatttggatcaaatttgatatattatgttgtgttttgtttggggtccactcactaaaccgccttcaaggcgtgatgcgttgaaggggaaagctcccatgctttctccacaaggcggtcatgaacggcaagatgaattattctcgcaaaaggtcatggaccagattcctaaatttctaaaatggagggttgttgaattttctaaacctcataaataaacgtgatataatcacaattcttgtaccacgatgattcataacaccgcgtacccagatcacgttgtctggagaggatttgcagcaggttgc

SEQ ID NO: 398855 - DNA, 1132 bp, Cannabis indica
gaatttagttggttgtgatggctagttgtggtgttagccaagcattgagctttgaagctcaaacttggagctcacatggtggtttttgtttctgtgcatgctgggttgtttggttgcttgtgaattgttatttgggatatttggagcaggtctggagagttttatgtggtttggggttgaattggttgagaaaggaatttttgaaaaattcctgcactgaaccggaattccagttcagggaggcctgtaggaactggtctagcggttggcttccaagaatttttccagaactcgaattctagttggggaaccggtctaccggttagggaaaatttgggaaccctagttcttcccatttttgtgttatttagggtattgccatgttatttatcaataggaaaacttttagtttcaagtttaagtccccgggaagtgatttagtgtgtcacttatcagtgttgtgattaatgtgatttaggagcctgtaattcgccgagcagattgttccactcaggttgaccgacacacctgaattcggaatcgaggtaagattagtataatgctatgcatatgcttatacatgtttaacgtacatgtcagttgccatcacatattagatatatattaggcaaattttatatagccattagattagcatatcatggcaacagtgaggtgtacatagagttgcaccgagatgccaacagatatatcataggctatcagatagtatggagtaactgctaccacatcgctacgactagagtaccgagtataggctggattcacggttaatcatactttgtcatggacgttcctgattcagctagggttatggtcaggtgtatgggcgcttgattataacccagaatttagtatgtttattatattatgcttttgttactgagtctgtcgactcacagtgctatgtttatgtgtaggtaagggcaaggctaaggccgaggaaccgtgagaacgagcaaatgaagattgtacatgtcgggccggttacgcctggagcgtacgatcttcgggacaacagtgcttttgtagttagtcgctaggcgacagatattttgtattgaatagtaaacttttgtaaagtattttgtaaacgggatcccgaaatatt

SEQ ID NO: 398856 - DNA, 620 bp, Cannabis indica
acactgaatcttgatgtggcaaaataaatcccgggttaccaccactagcacaggagttggtggtaacacttgttctgttggagctaccggtgccagttgcttagactgacacaattcatcttcttgacgaagtatgatactttgcatttcaaggatcatttgttgccaatcggcaggtggatttgcattattcacccctgcattatcccccagattctacggaggcacaagcggtgccgatggattgggttggtcattaccaggatctacatgctcgccctgtggtctagatgattatggagggttcattctttttcaaatagccccgaaattaacaaccccgacaagtcaggcaccaataccacacttacgcacttattgccttaaccctaacttaaacttactatttatcgtattaaaataaaatttattgatttaaacattaaacatgctttccatatcacattcatttctagatgctcacatactgcctaaaacggaaagcagtaaataaataatcacaaaggtagttaagcatttactcacaacacttattgtaccacgagtcgagcttgtctctgacgatgattgtacatgttcggctggtctacaggaagttt

SEQ ID NO: 398857 - DNA, 805 bp, Cannabis indica
aaagcaataaagcttagtgaattgtgagtcgagctcatctctgatgatgattgtacatgtcgtgatgatctttagaagataacatggcgactctgatactgaattgtaacaccttactagtttaggcgtgttatcgtgcttttatattaactgtgcagttcggttctaatcaacgagtttatggaaaattgtgagtaattaaaatttttctaaaatactatcaatagtgaaagtaaataacttttataaaatcaggatcccaagtttaaaatattacaactgattcaaaatattctatacaaaagttgtcacctagcgactatacaaaatacaacctgctgtgtaatacccggtaaaaatgtacatatattttaaaaaatttatttgttatacaatttgtgtgagaataagtattttatttatttctactactactgaatagagataattgcttagaatagtattgatagatttctaaacatagttgaaattatagtgggtttaatttattgtatgagtgcattaaataacataataatggaattaatgttaaaaaaattcgtaggtttggataaattggcaggattaaaatctgttttagtaaaatgatcatatctagagttttagagctccgattaaggtaattccaatggcgttggaaagataattcaaaaatctataaattttgtatacagttatatcataatttggaagttttctaggtgaaaacagagcctaaagttacgagatagagggcttactttaaaatttaaaaattagatatttgttgatttaataatatttt

SEQ ID NO: 398858 - DNA, 564 bp, Cannabis indica
acaaacagtcgatatactgtcgacatgctatcgacattatcacaaaagcaataacaaaataactttgtcgatagcatatcaacaaactgtcgacattctatcgacatgcaagaaaaatgaatcttcatttgcagcaaatcaaaatcatcaacaaaaggtcgacataatgtcgatatcatgtcgacatcacaaaacttagctatcataggaagaactacaacttattatcgacaacctatcgatatacagtcgacaaattatcgacatggcatgtcaaaactacataacagcatagacaaggtcaaaccatcgacaaattgtcgacaacattgttcaaacacaaaaacagataaccgcgcatatcgatatcctatcgacattgcatcgataacactatgaaaacacaaaaataccattgaaacatatccaacatatacaacctaccacaagaaagagcacaaaatctacaaaaattccactaatctcaacgacattatatgattggcatcaaaatctatgaaaaatatattttttcaaaaaaaaatcttacctttgactgaattt

SEQ ID NO: 398859 - DNA, 762 bp, Cannabis indica
aggtagttcttctccctactctttaatttttaatttgtaactgaatttagaattggaactcgtttaagttttgaatgttctttattgcatgttaagtggattggtgttaattttgttgaaattgagtttgttgttgttctatgctttattgttgagtttgggcagagattttatgatatttctaggttggaattttatgttaaagtggtgttatgctgctggattttaataggattgtattgggtttgagttcatattcttgaacttcaaatcttgttaagtttaagcaagatttgtgttgttttatgcaatctgaattttggttttgttatgggattttgatgcatgaaatgcattatttgagcatctattaattgctagtaatcctatttgttaactggaaagtttggttgagaaattggggtgaaaagattggaatttcttgctgaaaatcgtgttcatgcttgctggtttctgggtttggaacccatgtgccacggtatgctctgaatcatgtcgcggcccgcccctgttggtggatcctgggttttgtcccaggtgccgtggcatggtttggacatgctgccacccgccctcgtgattttgggcagttttgtgtcgaacttcgaaaattcataacttttgattccaaactccaatttgggagttctttatatcgttagaaagctcgttccgagctctgtatgattatctgaattttaaatgccatgattgaattttatgagtatggaatcaggggtt

SEQ ID NO: 398860 - DNA, 537 bp, Cannabis indica
gattaactgtaaacagaaaatggtggtgtttgagcccgaaagtgctaaccgagcggtgttcgtgggtaaagtttagggggcacgcataccaagattaacactgttgaaagctaaggacctgatgagcagaggttttttgggattcatagttactgcagtggataccagtcaacctgtgacatctggacctgagagtacaagattggtgtgcgagtttcttgacgtctttccaaaagatttacagagattgccacctacctgggagattgaatttgttattgagttggttccggaagtggatctagtatcgatagcaccgtaccgaatggctccagcggaattgaaaaaaattaaagatacaactacaagagaaactgaatctgggattcattagaccgagctactcaccttggggtgctctaatattatttgtgtagaagaaagatgggtctctgcgaatgtgtattggttactgggagttgaacaagcttacatcaagaacaagtatcccttaccacggattgatgatctgtttga

SEQ ID NO: 398861 - DNA, 767 bp, Cannabis indica
tggttttccttttctgaaaaagatatttttaaggctttgcaactgccagaagatgtgactaatgctataatgtctatggatcgccatctaatgctcattgaactcactggtgcaagagttgaatagaaatctcggtagagtcttcacattactcatctcacatatgctcatgcatcactcatgaggtttgctcttagcaaatggcttctcaattccaacaaaactgtggtgtctcaagatgtggcctcttttctctttcgtatcacctcgtgggcatccagtaatctggcttcttatatcttggaccagattgtttcttttctaagagtaaaaagcacactcataagcttgtttttcctaatttaatctataagattctttcctctcaaaaggatgtggcctattctcatgagacacttgagcctcccctcacggacaccatatttcaaccctcagagtactttgatggagcctttcccaagcgtcctaaggttgctgctggtacatgttcgagttctgctcttgtagatgtccaggaggtcaagcatgaggttcaacaggtgaacaattgtcttgctgccatggaggaggttcagtaagagatgttcgagcagctgtctacattgatcaagctctatggggcataagtttctctttctttttcatgtttcttggagatatttcaatattttcattactttttgtctttggcccttagataaacaaaaaaggggaatagttttttttttttttaatttcttgtttct

SEQ ID NO: 398862 - DNA, 565 bp, Cannabis indica
caagttttggaattggaagagaaactatgacatggaagggtttattgatctgatgaatattcttgtgaatctcagttactcttgaaattttgtggaattgtatgttggtacagataaggtatgttggttacttgtattgtgtatttgttttcattcatattgttaagactataatttatatgttttcataattttgtaggagttcatctcgccagaaaacttgcccaaaaatttgaagaacttaattcgttatcccttggttaattggaagcatctcacacttaatattcattataaactgatgaagaacgagttagactggaaagaaaccttgatgtggatatcaccctctttagaatcattatatattaacaaaaatgtcatattttagttgattttatttttcctttgctaagtgctacttttattgagattttttagtaaatgaatttgactactttgctttagagtgctctatttgttaatgctggaacatttattttttgtatatctttgctgttggagaagctttggattcttttttggttttctaatttattgtatt

SEQ ID NO: 398863 - DNA, 836 bp, Cannabis indica
tgccaaatgtatctcgctgaggcatcttgcctagtacataaatgagtaacttagtttactcatattccagcaatggcatgagcactagtgtactgagcaaatttaagaactactctttgactataaggccttgcagactggacaatcatgtccttcaagttattacacttagtaattataatgtatattataccctaagtgttccaataaccaattcgcttcgtcaatgcagcgagatagatgcctcgctatgtgttgcttatagctccctcgatgttacgccttctgaggcaagatagtttctcatcaaaacatgaattgatagtttgtatatccttgtctcgcttaatactaatcagccagcgagttacggacatgctttatttattctatatttaatgagttataatataattatcattaaatctgttggttcatatcccacgagattgacacgtgtcagtttttaaagtacagccgaatttcaggtataacaattaccccttaaaaggtccttttaaatgaaaagtgctttttaaatgattaccgagggtatatttgtgataatccattttgaaaaaaatgcatgctctttaatttggcagtttatgttttttaggcacatcattaatattaatgagccatcttttccaattctccctcgatttctatatgttggatcttttgtttcttaatctaacagagatcaaagccaatggtataaaactgaaaaaagaaccacctttccatcactttcaccatttcaaaaattcttgagcttttctacgaaaaaattcatcctgattttttcgaagctttgcatgccctcactgtca

SEQ ID NO: 398864 - DNA, 521 bp, Cannabis indica
atttattttttaatggtaaaatctattagattcaagttctattactacttaatcattttcatctattttatccatgtgtacatactgttgtttccttcacagccaacaattcataacaccaaaaagaattttaggaccatgtgcaataaggggagttcgcctcaatgaaggccttcacttccagaattgtctgtggaggtctagcccaactctcaacaatttgaagctaggattttcatgattcttttcttgtggagataggaaggttcaaccctccacaggggaacctgtatcaaccacacgccaaataacaatagtatcagttagaataatgaagtttcttaaaatgaggatcatacttgtttgggctttgaatgaataataaaacttgtgattatactatatattttcatgtgttataatacaaatgaattaatgaaataattttagatcctgtattttgcaaaaattattaattggaccatttattttgttaaatgacaaaatagatcttgtatttt

SEQ ID NO: 398865 - DNA, 517 bp, Cannabis indica
aacgacatagtcgttgggaataaaaattgatttattttttattattattatttttgtgagtatttccgaaaaaaaaattaatagttatattaaaattatttttaattaattattattatataaaattatattaaaattatttaatgaatattataaaaaattatattaaaatttttaatttttataattatataaaaattatttatttaattaattaattatattaaaattatttctatttaattaattaatatataaaattatttaattaattaagatataaatcatttaactaaaatttaatatttagagtcagaaacattacaatgaaaactgagttataaacattacaatactgcatacttaaatataaattaagtgtttataaaatgttaataaacataaaatcgatagttcgtaaaattgaagtgaaaattctaaaagatgtttatagtagcatcgtcctcatcactagcatctccaggaacatccgacatctgtgggtagtatggcggca

SEQ ID NO: 398866 - DNA, 702 bp, Cannabis indica
ctcgagcaagccatggaccataggcaccattaaaggcatcaagcaagttagagatggcccctttgtttatctcatcttctcttttgctgatgaccttatctggtggacgagcgacgttggatgaggcaaagggcttttggaaatgcctcgagcaatttcgcagatcattgggacaaagtgttaataagctcaaaacctctatcttttttagcaataatactagtgaagggatgaaacggggtaccatgcaggaactaggtctgaacctgccaccacgaatattaattacttgggcctcccgctcttttgctctaaacgcaaagatgcggacttcagtttcattattgataaccttgtgtcgaagttgcatggttggaaattaaaattattgtctaaagctgactctgccacgctgattaaatcagtgggtctggctcttccagtgtacactatgccaaccaccaagctctctaaaaagcttgcttcaagaattgatgggatgattagagacttctggtggggctgtgagcaaggaaataggggcttgtatttgaaggcttgggaccgaatttgccttcccaaatctaaagggggcctggggttccgtaaaactatcgagttgaatcaggctctcctggctaagtggggatgggccctccttactgaggatcaatctctttgctgcagggtgttgagagccaa

SEQ ID NO: 398867 - DNA, 682 bp, Cannabis indica
aaggttaggtcgatcggggcctacgttggtggcatcttgaagtcatgtggcatcaagcagaggaaaggttgtgtcataaggtccgtggcccatagggaatttagctgttttccttcagaaagggtaatacgcgaggatcgtagtgggcctagcacgagtaattcctcgggcattggagcttggagcctcgagcacatcaaggctggggcggtcattccccttagggattactttaaggagtactgtaattaccttagggttgtcccatttcagctgaaccccatcttgtataggatccttgcaagcttgaaagtcctataccatattttaggatgggagtgccccactccttttgagatagcctgcttttactcaatcaaagcagtccctgcgaggaagaatgttgcatgaggcttctactaccttgggacttatattggtgatcgcaagatcatagttaggttgctaaacaagaaagagcttaaagatgacttcttctggacgacgggcctctctcccataaatacaaccgcctttcacattatatgtaagttcttttccttagaaacttaactttaaaatgtattaatttgtatctttaaagtcgcttactaaactttcacatgcttgcactggttcttcgtgttgggttttgtgccctaaataaaaccctttacaatct

SEQ ID NO: 398868 - DNA, 716 bp, Cannabis indica
atgtcacatcaactttattggcagttatgtcagatagtgggtggaccattatttgtccttgtttgacaaaaatttggacatttagcccggaagtctttatttggcctttggtcaatgaagacttaagacttatcttctttgctttggggatgtatgattgttgtggcgcctctcaaaaaatagttggacagagcctcatggatattggtctcattcataagttttttgacccattgaatgggtgttagaacatggagataattgcaccaagctcggaggccttagttttaatctaaaaaattcctaagccttgccggtgttagaaagtcaggagaagtgctccaagccgataggtcttagaattattttctaggtgtctaagccatggtagcattaggacatggagagaattgggccaagcccggaggcgttgctttttcttgaggtgcctaaaccattggcgttaggactttgtgcctaagccattggcattaggactttgaacataagtcattgacattagggcttggtgcctaagccattggtattagcactttgtgcctaagccattgacattaggactttgtgcctaagccattggcattaggacatttttcctaagccattggtattaggactttgcgcctaagccattgacattaggactttgtgcctaacaattggcattaggacttgtgcctaagccattggcatta

SEQ ID NO: 398869 - DNA, 549 bp, Cannabis indica
aaaaaaaaaacaatattatatttggcataaagttacttttctaagtattttacagtttatttatagttgatttaccgttattatgtatttttataattttaaaattttaaaaatatatttttataattaaaaattttatttcgtaaaattttcctttgattttttttataacaatatagtagagtaaactttgtaaaatgagcctttcgaaaaacataaattaagtaaaaaaaaaatgtattaataaaaacaagcctaattagtaatttttctcctgaactttgacatgtagtaaattgtgccctttaactttttttgtcgttaaaaattcccccgaactattgagattgttaaatttgaggacttttgtctaatttcattaaattttactgtttcagtgattgtttatgtactaaatcatgctccccaaattttgatatctaccaaatcatgcccctcaaactttgatatgtactaaatcatgcctcttgtactttcatccatgttagaatttttttactaaatttagacaaaagtccttaaatttaa

SEQ ID NO: 398870 - DNA, 569 bp, Cannabis indica
tttcagtccatccattgtccactgtgtcaataggccttcggaggtggttcgttgatgtcttggatgtggttcgtcttcctcagagttttggaggcttgctttgtcgtcttggaggtggatcgcatgtggtgaaacgaagaaagggagaagaagaacggctgggtttttttgctaagtgatagggttttttatttgaacaaaaaatctgccacctttttttttgaacaaaaaatctgccacctttaattattttattttataatatttttttatttattaaaagtgtaattaaagtttttaatttttttatttttaatttagggttatgatatagtgacgcgctaggtgtgtgaggagacatctacccactcacgcctggcgcgtcactgtaagccagtaattttcaaattaataaaaattagaaaattttgggttttaccttttagtgacactccataacttttagtaacacacattacaagagactaacattgaacatttagagtctatttgtgtttgtcactaaaaatactccaactctttagggacacacactttttatgtgggtc

SEQ ID NO: 398871 - DNA, 831 bp, Cannabis indica
atatatatatatattattatagttacatataattaattatattaggattattattagcaaaaaatttaaaaatatagtgagttttgtatatattgattactaaccaattataaatagttaactattaagattattattacaaaactattaagatcatcatatataattataataattgattattcatctattgtatatggcacatgttaatatatttattataactatattattatattattcgaatctattatttggtattttttttttttttacacaaaaataaaatataggaacataatataaaatatatttacataaattatgtaaatataaaaatacaaaatatataaattatgaaatcagtataaaataataattaaataaaaataaaattatataagaaaacttcaaaaaataattgaatttaacaaagaaaaataataatacttaaaaatgtagccacaacaaactctgtggttctacacatattcattatcttcttccagttagtttaatatatagctttatatgagtacatcttatagataaatttgaacaattcttcataatcgtaagcatatataataaagagaaaattgagatacattgcatcctatgcaaatatacatagtactatgtacgaggtatatagccgttgaacaaagaacatatgtagaataaaaataatatatagatggaatcaacttaccatcatcaaaatcttgatactatcctcctcttcaaatttctcatgaccttcaatatattcaatctcaattctgtatttttcaagcacaagaagtgtaatgaccgctctagtaatgtgga

SEQ ID NO: 398872 - DNA, 547 bp, Cannabis indica
ttcaaaatttattgtgtaaagtccttatttgatttctcaaatcaggtttctacttatagtagttaaatttctttaattaaatcattatttaattgtttaaataaataaatatctataaccgaattcggttaatgatatttatgagggaatctctcaactacttgagagaatgtctcaataaccttgaaatatctataatcacttttcaaattaaatatttacctaattgaattgatcaaataattaattaactcaaaaagacaaatcacatagggacgaaaacaagctaggtgttgagaatattttactaggatctaaatttactaacaagtatgttgattaacatcctaaatatgaattctctaaaacaatgaaattaaacacataagggtttaagaaccttacattggttgcagcggaatataatgactccttccattcaagatctctagcccttgatttctttctgtcgcagagcattatcaagatctaaacctggatctctttctctccttcgagtttggttaccaccgtcttactcactatg

SEQ ID NO: 398873 - DNA, 685 bp, Cannabis indica
ctcttgtcttagaatatgttgaagaaaactcttgtcttagaatatgatgaaacaaagcacataggaacccgtcatcactttattagagagcttgtggaaaataaaactcttgtcttagaatatgttgaaactagctagcaaatagcatatatttttactgaagctcttgactcggtctgttttatctctctaaggaaatctttagggatttgtactatttaatgtttgtgttcttcatgatccttgatttttgagttgacttagggttcataatgtcttgtctttgtttttattctagaggaaaatctcaaccttataacaatacagacattattttattgctaatgtttttggtgttatggtttcatacaggttttgttcaggaaaattgttcactcctcccaggattattcaagctcttcaaacagtgttatttaagctaccgctttcaaaaagtaaattaaaaaaaaaattaaaagttgagtgttcaagctccattggatgaatagagctacctaccttaatgtgtgaaagttgtctctgagtaagttggaactatgtaattaggagttatgtagaagatacgctaccattgaaaagggctaccattgaggtagtgtgacaacgtctcctatggttacaatctatcaaaaaagtcttttcgacaattcgggcaatgttccct

SEQ ID NO: 398874 - DNA, 520 bp, Cannabis indica
aaaaaaattaaactagtttagaccgaggaataatttgcaaacagtaactaccctattagtcttggttataagattcttaatcctgaaggcgagatgatgaaatggtatgaacaaatatggagtaaatataatttctaaacacaaaattattttttggttagcaatacttgatggattacaaactaatagactctagaaatttaacacttgtcaagatattgttagcctgatttgtgattttaagtaatgaaaatgttaaatacttatttttgattgtcactatatttgtttgtgtttagggactatatcatgaattaacttgattggtcagcccataaaaggaacattgatagattattgagatagatctcttgattgcatatcatttttttcttaagtctattcaatggctcttactacgattgtttaccatgtttgaaaaaaacgaaaattacaactttttgtaatacaataagttcctttcaattagttggttgaaagaaaattaaagagatagtgt

SEQ ID NO: 398875 - DNA, 278 bp, Cannabis indica
tttctaaatttaattttaaaatactctaataaaaataaatttcatatattttaaaactaattatgttgctaattcatctttaattaggttaaactaatattattagcctaatacaattatttcaataagtcaatgagccttcacaactggaggtgatttgtgtgagggagggttgggttcagtatgtcgtacccactactatggccccttaactctttaaccattaaattaaataattgttattcattgaataagcccaatactaattgggcctaatt

SEQ ID NO: 398876 - DNA, 876 bp, Cannabis indica
ccaaaagcaaaggacaagtatggccaattttaaaacatatatgcaaattcttgttgattgtacgtgtaatttatgtactgtaccaatttgtttatacacagtgaaccaaaataattacacaagaaaaactggtaagctcacatacataacatgtaactaatactgataatcattttcatacttaaaaatttttcttaacgtaaacaaacctccagaaatttctttctaagtttaggagtaagcactgcaaccgattctgcgtgcttccttgtagctgaaagtctctcttgacaataaaaaactgcttctttaccttgaaaacatatcatttttaataatttaaattaaaataaataaataaataaacatatcgttttaataattcattcatttttatttttgttacatgggaaagtaatcacactctactagataaaaatgatttttgcattttggcctactctgttttggagcttcaatatatattttcatcaatggcggtgacaacctttttgagagtgatgaaagcaaaaggcagttcctcagcaaccaacacttaaatggaattgaataattattaaagataattattcaaaaatagagactaattaagagagaggtgagaagcattatagttattgacacattacaaagccgaatgagatcatcgtaattcacaccacatataatctcaaatctgcaaatatgaaaaatattcaacaccaataattgtaacgcctcgatttcccgagacgtcacactagctagtccgtttaaaaccatttaagataaagacagtaaaagacttctttaatgaaaaataactaagcatgagatctcattatttttaaaacaaaatatttatttattcataac

SEQ ID NO: 398877 - DNA, 597 bp, Cannabis indica
ttagcgtttaggaagatgagaataaatattttaaatttaaagtgttttttctttaatctcatgtgttaaatgaatattaaatcaattaatatatatttttaaataaactatattatatataaattataaatatatttttaaaatatataaatataattggatgaccatttgatgataattagatcagtttggtcagttatccattggatcagatgttccatccaacaactgatccaatttgattggattttcaaaatttacatttgatccaatccaattatgattggatatgcgattctattggatcggttaaaattggattggtcggttataattggattggatgactttctgcacacccagctattaatatgcatgactttgatccaacaccctaaatctacaagggcccgtttggtacgcaggattggactggattggactcgactggacaagattggattatgctgaaagtaacctttgtttggtttaagaatagactggactattttatttattttcttttagaagaaaaaaattaaattgaaataaaaatatataataataaattaaattaaaatatataataataaataa

SEQ ID NO: 398878 - DNA, 821 bp, Cannabis indica
aagacgaggatccttgctattaacaacaagaactaaccgctgacaatcagaaaaggcagtaacggacgtatatcccaactgcaggcaataagaaagcccttgaagtcaaattttagtatcacactatcactaaatttagtgtcaaaaagtattactactctaaccacaacacaaaaaattacactaaaaaatatttcttattattatattattttttaaataaaatttttaaaaattaatatcatattaattaactaaaatcaccacaatgcaccatctaaataaaaaagtcacacgtgcaacagacagtttgaattttattttctgcatattaattttatttttttttttttataattttacaagatatcttaaataattataatgtacacgaccatgaaaagaaaaattgaactaaaaaagtttgtttggtgcaaaagcagatagcaatacatcaatacattacttttagaaagatatactctaaaatttccaaaaattaaattcttaatttcataaataaatcaaataatataaatatacataaatataattaaattaaaaaaaatatatcaaccacatatataccgtgcactggaacattaactttgaaatggggtgtttaataaattaatagtgtctcctttgaaacaaaaaaaaaggattttatataggtatttttataccacacactaaaatttttaatcttttttgttttttatctttttactgtggggtagaatttttttttaaaaatactatatttttttttcataaatactgtgcattttttatagtgtgtactatgttaagtttttact

SEQ ID NO: 398879 - DNA, 676 bp, Cannabis indica
tccttggacttcttctctacttctaacatgcggaaaatagttcgaagaacctccctttcttcctggaggtcagtcacttctttggacaaggaggtcatggcagcctcaagttagtcggaagcctccaaatccttggccagctcggccactttcttctcggcagcaagaagctttttgttgacttcacccagttctattcggatggctccgagttgaaccctggcttcatcaccatccttcctggccaagtccactttcgccctcatggtgttggacatggcagcattcttggacgcaacagactaagctcgagaataagtgtaagccaactttagaccagtttgcataaaaaaacgttagaatgtgagccaagtaaagaacgattaaaggaaactgtcaggaaagactcaccctcataaacttcttcaggactactactatcaacaactccagggaaggctcattgtcatctccggccagctgctcattaacttcagggaccgacctattcatgtaatgggtgggcatctccttgcctcttttggtctccggatgcagtgatggaggtggggtaggagcccggatctgctcagatccgcccttcgactgttcgggcttgcccgaacttcctcctcgagagaccttggacttagcagtttttggagcagaagggtcc

SEQ ID NO: 398880 - DNA, 701 bp, Cannabis indica
atttcattatagcataatcaatactcacttctcaaattttataatgaaaatcataaaatatttaattggtgatcaagcaattataaaaaattaaatatgaataaaatagatacacatagaaaattgggggagaactacatcacattaaaatcaaaataaagtgtcaaataatctccattaataccctaatacgaagtctagctactcatattcattaaaaaataaataactgaaaacaattaattaagaacatgaaaaataaagtagaagaaagaattcgttgaaaaaataatattgaatatctctaaagctgtcttttgtctctaatttttgtcctcccaaagttgttttctaaaaagttttgaaaaatagcctttatataactaaaaaagattttaaaaaactctattttttgtagtttagattaggcaggtcgcgacactacaaggtagtgccgcgatgcttaaagcacgatttttggcagcgagcttcctactgggttgattgatataatattttggccataactctttcattatcactcagaagtagacgattcaatatctaaaacttttattcacaatattttttctcaaaagaaacgcatcatagtcataattgacttgaagcttaagacttgattttcgattacaaacaaacgtgttgagcatctaaaacttagaatttttcaccaattatat

SEQ ID NO: 398881 - DNA, 524 bp, Cannabis indica
tttttaattattttaaatttgtaatttagcattatttagtccttctttttatttttttagattttttgtttaattgatctatcattttctcatttctttttatttttctttctcagatggctctttctttagactatactatgatttggtggtcaagtttaataaattgtgtttgaatcgttgtggtattatgcctttgatgagaatttctccatttaaaaattatataaaaaagatataatataaaatttaacaatatgtatttagtagaaagtataattactaaactaataattacacaatataataattaattttttttattatttttttaaagtgatctgtatcacaaacaaaacgtcgatgaaaaaggatatccaattaaataaattaattgtctaaccaaaagatatacaaggtcaaaatgtgaattattgcttgtgacttatataaaactaaggtgacgttttgtaacacttttttaatcagttttctgtttttaaaattgaaaaagtgaaaatatt

SEQ ID NO: 398882 - DNA, 767 bp, Cannabis indica
atttttgtggattctatgggatcctaaggtctaatagacataatacatggcaattgctcgaacacctcagaatagtggctactggaccatggatggtagttggggatttcaatgaaatcttaactaatcaagataaggaaggagggaacttgagaagaccttcacaaatggaagcttttcaaaatacaatagaattgtgtgctctacatcctttgccttttacgggtgagcgctttacttgggctaaaatacaaatggaaatctaatcaaggaaagattagattgggtaatggtaaatgaagcatggaccgagatgtttcccataaacactttaacccatttggattattaccattcagatcatagagctttaatagttaatatgcaagaaagaacagataattccttgaagattatgaggaaaagaccacggtttcggtttgaaaatatgtgggctaaggaatctgaatgccaaagcatcatcaaggacagttggtcttcctcctcgacatcatctataaatgccattaccagtaacattcagagatgttccacaaatctctctttatggagtcgtgtcaaatttggttctttaactgaaaaaattaaggagactcatgaccagattgcaaagttgcataatcttcaacaactttcaacatattcaaaggaattgggagaattggaagaaaaattgaatgatttgctatttaaagaggaagtgtattggaaacaaaggtccaaaatacaatggctacaagaaggag

SEQ ID NO: 398883 - DNA, 753 bp, Cannabis indica
atatatattaatcttggattggcatggtaactttcccttagtttccctatgctatgtgtatatttatattatattaagttagtttttcaatatttaatagttattttcttttgggcctctcttgatgattgacaattttatttttttgggacttctagatgctttagtttctgatttgggacctttatataatgttaatttttatatatattactattcgtatatattaactttttaactaattaatggagtttttattaaaagtagcaatcatggacgtactatttttgaattattgattgtaatatcctagagtctcttttcattattgtgctggtgcacataagctataaactatatagtgaatgaatcactctcaagaacacaatgcagcaaccaaaatcaaacaaactaaccaacacagtttgatcataaactttacgtgctgataaaaaccagcaatttaaagaacaattcaaagaggaaaataggggtgtgcagaaagtcatctattccaattccaaccgatccaagatcggatatccaatcataattggatcggatcggatgcaaattttaaaaatccaatctataatcggatcggatcggatgttggatgagacatccgatccaatagataaccgaaccaatccaatccaatatcatctaatgtccatccaatcatatttagtatttataattttatatatttaattattttgttttaaaaaatatattaattattaataggtt

SEQ ID NO: 398884 - DNA, 774 bp, Cannabis indica
tgaacttcaggtaagttgacatttgttcaagggcttctgcaaaggggatgttgatattcagctttttaaatacttcaagaaacttgctaaactacttatccacaatattctttcgcaacctctgaggatagggaatctttatgtgatggtcaatactgatggaaggagaagtttctttttgttgaaaaccatcagtagtcttcttcttttctggtgtaggtgctggttgatcatcttcttcatcctctggcttgtctcagcttggatcatcatagttattaccacttctcaaggtaatttccttacagttctcttttaaattgacttcagtagtgctaggcaattagtgttttgagaagccaactgtcccacttgagtttctaagaccttaatggaagattcaatctctgccatgaattgtagtagcatatctatctgaggattaaaccctccactagagccttgctattgttgattctgttgttgactctgttgaggctgatttctctgttagtagaacccttgttgcatctaatttggaaactgccctttaaaattctgtcaatgaccccgcccttggatgaaaccatgattattctgatagtttccaatggcttcggcttgctccattggcaaactgtctacatctatagggcaggtgtcagtagtatgagatcttccacacagctcgccgacatcttgagcttgtttggcttatgcagtcagcaactttgttaatgcctccacctgggctgtcaacttggttatggcatc

SEQ ID NO: 398885 - DNA, 853 bp, Cannabis indica
tcttctatattttaattataaaatattaaattttttgaaattaaatattatgaaaaatagattttaaattgggtatctacacattatcaaattatgtcgtgatgagttgaacaattgtctatcaaccgtcactactagaaaatgcgtatgagacgacaagttttaaactgttgttcatatagacatccatacaaattcttacattattgtctcgggcgatattatgttatgtttttgcgtcataacaatttctattttatgatcgcgttatcatgcatacttgtggtatgacatacaatttattttgaagtgtcattttatttagtctttgcataacaataatttaaaaattgttattacatgtagtgttggcacgataattttggataaaattgtcgtgccgtgtagtataattttaatagaagactgtcgtaagtacataataaataatgagatgaaaatatttttaaatctcttatgcatacacaaaaattgggattcgttttcttccttaaaataactgtatattcatttaaatttttttttccattacaaatattatctatctagacaataaattaccagaaataaaactataaaatttcattcaaatgtattttaaaagagaaagtacaaaatctagacttgccttaattatgtaaatgttaactaaaactatattaaactgtatatatctttttaaccatttgtaatttttaagttacccccaattatgactcatcaaattaacagaatagttttttgcccccaaatcttctgattggaggacacaactgcaattttcttaaaattttggggattttgttgtgaatatcctttattattattatta

SEQ ID NO: 398886 - DNA, 623 bp, Cannabis indica
acatgtcgaaatatttttttcatttttcttttcatagcagtattcgttataattacagtatcatccctgtaaatttttgaaattttttgaatagtttacagtaccgaaaacagagttcctgatactccagtttaccacgcgcgttcagaaaatttcaaacgtattttcgacactgtaaattattcgaaattttttaaaaatttacagggatgatgttgtaagcataacgaacacccccgtgaaaaaaatatgaaaaaaaaaatattccatatgttttcgggtgtggaggttgactaagaggttgtaacaggaggttgacgatagcactcctctttttagaataattttatggtaggcacattggttttgttcctatatcatagagatattttcttaacccttcttttgtatgacttttgagtctacacatcacttaatgtgtacttagaaaaagttagattatttaatataaaatattggaaaagacaaatatcagtgcccctaatctccaatttccatcttttcctctcactacaaaaaattttacttttagtcacaacaaaacttgtgagtaaatattaaggtgccgtttggtaacacttttgtttttaatttttaatcac

SEQ ID NO: 398887 - DNA, 687 bp, Cannabis indica
ttggataataaaatgcaccaagcgtccatcaacgtcttcaatttgttaggattcagagtttcaatactcgaatcgaagacgaacagcttccttcagattcacgtccatagtgatccaatatttctgtcggtccaagaagatggccatgtatatgcactccatatccttccaagacggtatgaattagtttggatccccacgtacaagttccaagatggactcatcccagagaaagccaacattttcagtatttttcttccaagcgtcccaccgacccttcaacgatgaaagaaaccaagatggcatgatagtgcacttatgtgggtacaactctgggaagaagtgttgccgcctcctaatcatatggaaagccacatccaaatgctgcataactcatacaaataagtcagcacaaacacattagaacattacaaaaaataaaacaaataacagtagttaataacaacaaataatattttgttaagaaacttacatcatcagaaagtcattcttttttagtaagtagcccctagaaccaagccacgccatgtacactagagccgacgtccctcagatacttgtttccaatggttcccactaaccaatttcgaaaactatgtagtagcttctcttaaacaagccaaagtgggtcatgttgggttttgtgccctaaataaaacccattac

SEQ ID NO: 398888 - DNA, 822 bp, Cannabis indica
gatccttagttgtgtttattcaagtttggatttttttgaacccaaaactttgattttcaaaataatatgatgattttcgctgttgtggttgttgttattgtttagtggtgttttctgtggttaaattatgttgaaataggttgaattatgcatgatttggtggttgtttgaagggttagtcaagttttgagtttttgaactcaatcttgaaccttcaatggtgaatctcgtttctgtgtttgaagcttggtttcattgcttgggttttgttatttggggtatttagaataggtctggaaggttgcatgaagtttggggttgatttgagttagaaatgaatttttgaagtttcctgcactgaaccggaattccggttcagcatagtctgtaggaaccggaattccggttggtgttccgggttcctcccagaaccgaaattctggttgtagaaccggtctgccggttggggaaaaattgggaaccctagttcttcccatttttgtgttgtttagggtattgccatgctttttatcgatagggaaacttttagtttctagtttaagtccccgggaagtgatttagcgtgtcacttatcagtgttgtgattattatggtttaggagcctgtaaatcgccgagcagttcgttccactcacgttgaccggcacacatgaattcaaaattgaggtaagattagtataacagtatgcatatgtatttacatgtttagcgtgcatgttaggaagcctgttagattacagtagatatgtatgttggtttcgtaccatccgacagtatcacatcggtaaggctagagtatgac

SEQ ID NO: 398889 - DNA, 690 bp, Cannabis indica
aacaccacttaggagtaatttggccaattttagaatcttgactattcccgaattctcaatgtttaactatttttccacagtatactaaaaatactaaaatgtgattctaatcgccaaacgtctcgttccaatatttctgcgcaaaaaacatgcaaaaatataaaatttcatatatggcatatataatgcattctgaattcaaataaatctccataaaatgataaatcataattaatattccaatttatgataaccctaattatttgctaatttctaaaacaaagttaagctgtctttacaattatccacctgttaaaaggatttcatcctcgaaatctaacctgaacaactctggatactgagtcctcatgtcggattctaactcccaggggacttcttccaccttactgtttctccagagcaccttgaccaaagctatagtcttattccgaagaactttatcttttctgtctaagatctgaacttgttgtttttcgtatgataggtctggttgcagctcaagattctcataactcagcacatgagcgggatctgaaacgtactttcgtaacatggaaacatgaaatacattgtgaactgctaaaagagctggagacaaagctagacaatatgccaatagtccaaccttctcgagaatctctaaaggtcctataaacctagggcataact

SEQ ID NO: 398890 - DNA, 702 bp, Cannabis indica
tttttttttttttttctgctttcatgcatcttgatcttttattattttctcacaatccatgcataatcctcttgagtctcgtcttaaagtggtgaataagattccgagatatctcaaaagtaccattaactatggaatatatcttaaatcctgctctaatatggttttccacaggattttgtgatgctaattgggcatctgatcctaatggtaggaggtcaacatcatggttttgtttgttctttggttctaatagagctctaagaaacaaaagacagtatcaaggtccaacgctcaagttgaatacataagccttgccaataccactgatgaattggtttggtttcaatcactgctgtctgaaattggtctttctcaactacctactcttacaatctggtaataattaaagcacagttttaatgtcggctaaccatgttttacactcccgaactaagcacatcgaactggatatgtactttgttcgagaaaggattctcaatcaccaacttcttgtcaaacatactctagttcaagaccttgccaatatcctaactaatgctttgtccaccctattttcaaatgttaagattcaagttaagttcggtctctctgtctcaactcagtttgctacgaaggggagtgttagttaagcttaataattagaagttagttgggattttgtttcacatgtgtacaact

SEQ ID NO: 398891 - DNA, 563 bp, Cannabis indica
tgatggttttttcactagtgtctacaacgcccatcaatggtaccaaaataaaccgttcatacttgcatcctaagtaaatttaatatattacattctccacctaaagaatggaatttattggaagcttgtcaatgtttacactctttgcaatgtctgggatttcctagatgaggatgatgatgagaccacgactatacaataaagaaactcttcgggaatctagttagtcgttcaactttcacaactggacgatgtcggatatattcgtgatgatgtcaacccaattgaagtgaccagtagggaccgtgagcaccctcaacctcaccgtcaatatttagataatttattgtttaattatagtgatgatgaagacactagtgataatgataatgaaaataatgtaatattaatgatgatgatgatgatgatgatgatgacaacgacctgtaaactttaaagtactgtaatatttaatcccactgttaagctatctttatcaaacatgtcgtttactataaatacctgattcatatcataaaaatgatcaatggtagatcagctta

SEQ ID NO: 398892 - DNA, 599 bp, Cannabis indica
aggcaggggaagctaaaatcgaagctcaagaaacctaagaaacaaggtccaacctctactgctgatgttcgaaagatgaagaagatggactcagtccttggtgttgagccaattgacttctcggagaaagaaggtgatggtgatatggagaagactgtgcgatcgaaggatgctgatctgtttccagctccattatctcctaaatcatcactataggcaattaagaggcaagaagaagtgagtaaagattttgaatactttcttcaggctaatcgacaatgttttgccagtgtgcaacaaggtactcctattactcttcccatttcacgttctggtaatgtgttgaggaacctagatacctccttcaagaattctgagaactctaataaggtcaaaattgttgggttttgtgccccaaataaaacccatttcaatataataagatttactagttaataaagatcagaaatcacattttatgttgcatggttcacatgatttatttcatgattgcttaatgtataaattctattaagtcgagaacatatgtatttgtttatgattatagtgttgtcagcacagtggaatataatcatgat

SEQ ID NO: 398893 - DNA, 521 bp, Cannabis indica
ctagcatttttttgttcagtgtggtgcggtgcgggcggttgggtggatttgatgaacaccctacgtaacaactaaaaaaaaaaaataagagtatggagactcaaacataagaataaatattaaaacaaaaaaacaaataagaataaattgaaacagtatcaaaaatcactgaattaacatcgattattcataatatcaatattaaattttattaatataaagataaaaatcaaaatatatatatgcagatagaagtactcaggtaaaccaagaaaaaagaatagtaacatagaaagagaataatatgcatgtattatagctaagtatttaactgctcttaaagaactttcaataacagatcaaatatcaaaaggaatacagtgaaacttgggagttaatcagtttattttgggttgtgatttatttgatatggtaaccaggagtagtacaagaatcatagtttgttggagctaacttaagcatggactacggttcatcagaaaaaaatgtcaacattgact

SEQ ID NO: 398894 - DNA, 510 bp, Cannabis indica
taatgatgtgtcgtgttgtatgtcgcgacatacggtagtttgttttttgataattttttccatttatatcgatattgtttgtgatgtttatcgatatacttagacgtagtgtctggggaagtccaaaatgacctttttcgacaaactgcgatgtgtcgcgatgtagttgttgatatattccacgataaattacgatgcttttaatatttctcgacatattttttatctgaattaagtttttctcatttttgtttgcaaattcaactatgtttgtggttgtattgtatgatggggcttgggaagttgaaggtttcaactagatattcaataacccaaaaagtaagatgttaatgtttaaggttgacactaatttacaaagatgcaagaaattttgtatgaggagttggatatagaccctcttgtgtatgaactgaaagtagaggtgtgttacatgtacatgaaaggcaatatgataccgccggaggttttagtgaaagatagtcaagtaag

SEQ ID NO: 398895 - DNA, 931 bp, Cannabis indica
ttttatttctctttattgttttaaatcaggttgaaatttttcttgtcacattttgaggccttctgtgttttcctttccaagcattatttaagattagaagtaatattacatgaagataccatgatcgataagtagtgggtgttattttttttattaaattttttattatatatgcttatttcatgagcatttagtggagattttttttttcggatagtaaagaacgattcatataaatatatataggtataactagaagattgtgcttttgtgtttgaacaaacctcatcaatacaatttgcctaatatgtatattgattctatatttttaccatattttatatttgtttttaatattgaatacttatcattttttttttaatttgcaaaaatattggctggaattggtgatattagaattgagtgacattgtcactttggagtttggattgatttatgatattcataatttgtacactcttgtttatgtaacatgtattatcttatgttataatttaggatagatttatgttgcaatttaggttggatttatgttggacttatgttacaattaggttggatttatgttgggttgtaatattttgaactactatattagctctttaggtgaaaaatcaggttttactctgaaattggattggatggatccaatcaatccaattaatattggattaaaaatattggatggatccaatctagtataaaatattggatcaaaagtattggatggatccgatccaatacagggattcatccattagatgaaaccgatccaatccaatgttttattggattggttggtgaaatctaacatctaatgtgtaattggattagatctggatgggtccaaaaatattggatgtggtcaaatgaacaacataaaataatgtgaggaaatttttttaaaaaa

SEQ ID NO: 398896 - DNA, 653 bp, Cannabis indica
tattcttcttaattttttcgttttttttttttgaaaaagagtattatgggactcaaatccacacaattatgaaatttgtcaacatcaaacaagttatgaatatttattgtttacaatacacttaattttatttaaataaaatctaattataaaaccattctttttttttattttgggctcttaagaaaagtgtggccctagacatatatatgctcagcctgctaatgcctagggttgtatgtacatatattttgatttggtttttggttttttaattatttttctaaagtacatatttatatatttggatttaatttctattattaaagaatttacctatgtattttgattgagtttctaatcatatatatatacattatatggagtaatttctaatcagatttaaagcatatatgtatatttacacatgtatttagatttagtttctaatcatatgtacatgtaatttttaaggagtttctaatcagattggttttagaaaagcctttgctaatacaatcactattgacccaagcaaattactggcaagtttattgtaaattaatatataataagctcaaatgttaaagaaatttttatatatatatatatatttatatatagataggaattaggtaattaccagctgaggc

SEQ ID NO: 398897 - DNA, 614 bp, Cannabis indica
acagtcgggttggctcgagacctgataagcgaggtgtctatctcgatatgagaaggttcattcctgtaacttgccccaattaacttcagacatcttctcaatgaggcttacaattttgacgagtcagaagctaacattcaaatgagcctcaaagaaatattttttataagaaccacgatcgtcacaaagaagcgacaaggcatagttcgttgacctcggaaggataaagaaaaaaggctccagctcgctattacagccactggaatcaaacccttatcgagacattttctgacgtaaaaattaaagatgtgttaaaacacacgatcattttgacccagtaaaagcgggaaaatcacaactgtatgatttttaaatagtaaccgcatgtacactacgtgatacgtaatccaaccccatgattttaggggataattgttgtataaagattacagtcaactatgtaattaactacctactaggtaattataaatagtcctaggtaaaatcaaaaaggggatgaaaaatcatacaaaaaaggctcagagaaaaccatcagtagtctaaataagattgactcgtggacttatgctgaattttaactgaaaaaccatgta

SEQ ID NO: 398898 - DNA, 510 bp, Cannabis indica
tcgtatctttttactcttgtatctcatcaccaagagaaaaagtcagagaaagattttgatagaaattggaagatcataccaatcaaaggtcgattttatggacactggtacgcttccgctaatttataatgctattatttaattctcatgaattaagagcatcaagagcatgtggtactcctaacatgtggtatcaagagcatctctaaattaattcttgagaatttatgttagtattgatctttcataaaagtattcatgccgaatatatatgtatttgcttggttgtaattattgattactgtgtatatatatgtgtgtgctgttggaaattttctatttctctcctgattcaatggttacttacagcatatgtatatgcataattctgtgtggaattaaatttgtgagcgatatattcttttgagaatatatatataaatataggcgaacgattttgtgcccagatgtgtgaatcacggattgaaatccgttgtacggcaggtaggt

SEQ ID NO: 398899 - DNA, 692 bp, Cannabis indica
ttctactccaaaagccgctaagtttaaagattcccgaggaggaagttcgaacaggcctgaacaatcaaagggttgatccgagctggctaagagcggatctgagcaaatgcgggcttctactccacctttaccagtgcatccataggccaagagaggcaaggagatgctcgcttattacatgatccggttggttcctgaggtgagtgaggagtggtcggcgttgacaatgaatcttctttggaactgctgatgggaggagtcttgacggaatttataaggatgagtctttcttgacagtttcgtttaatccttctttacttggctcaaactctaatgttttttctttgtgtaggctggtctgaagttggcttacacctattcccgagctaaatctgctgcctccaagaccgctgccatgtccaacaccatgagggcagaggtggacttggccaggaaggatgctgatgatgccaaggtggaacttagagcagttcgattggagttgggtgaagtcaacaagaagctttttactgctaagaggaaaattgtaaagcccgcttagttaatttggaaatttatcagttgtttatgattaattatgaaattatttatagctatttaaataatttattatactgttatttatggaatacagaaatgcatggttatgttattcagtagttttcatattt

SEQ ID NO: 398900 - DNA, 752 bp, Cannabis indica
aaaattaaaaaaaaaaatctacaaaatttacttaatctgatgaaaattcccttaccaagagtatgttcagtaaaagagcatcaagcatcagataaagtacattaaccgcatgatccaaaccttatacaataagaatttaaaataaatacataattattatatgttattacaagtcatgattgtatattaaaatctctcataataaaaattaaagatatatgtatgtgtatctttttgagaaaaaaagtactaaaaatgattatatagacatagaaatataatggaaattggagagtagcatatgagaatgagcctagctattatttttcttgaatctcaagagcttatcataaaaaaaatttattttttctacatcaaataatttatgctaatgaataaatcatgaataattcaaagtcattgaggacaatcaaattgccaacataacaaaaaaatccgatgtctccaaatatggagaaatatttgatgagtaatagaaagattaagaatatatctatgtatatataaagaaatagaaaaataagaagtagagagaatattaaaaggaaaattttagtttttgtcccaataaaactcccaatatcaaaatttagaccctctactaatttgtacaagttaattccattgattacatgaactttccattttacccattttttaaaaaaatataaaaaaattgttaaaaactaaaaaaactttcctctctctcttccctctctcttcctctctct

SEQ ID NO: 398901 - DNA, 592 bp, Cannabis indica
acaaatctgaaatatcaatttaattacatgtaaaattatagtcttgaaacattcataggcatctaagttccatatgtcatagtttttgtatctttgtattcatgtttcactttcctcaagcttaagattctcagaattaaagcatgaaaaatgtaaggctggcttgctatgataatacaatggatgtcactaacttcttctctggtgagcattttatcatctttgaggaactagtttgggttagtattaaagagaaatgataaaagggcaacactatagttggtttccaatcgctattcgtgcaactcaataacggatctcacatattttaaattaaaaaatttactaaccacatatgtcacttattgaattcaaggaattctgtccgattttgttcaatttttctaacttgtcaattgtctatgtattaaatcgtgtcccctaaattttgatatctatgaaattgtgcttctcgaataaactttgcatgttttaaattgtgtctcctaaactttcattcacattagcctttcgttagtaaaattgtacaaaagtctttaatctaacaatatctatatacagtagaacctct

SEQ ID NO: 398902 - DNA, 861 bp, Cannabis indica
ttaaacttcagcttagttgtattgcacaagttttttgacttgttcgttactagcttaccgtagaaccaacccaatacttacaaattaggaactcagtattgcagttgagtaggagtgttaatcatatatatggacatttatagcttctataactatttagaagtaaaccgatcgatagttttcttagagcttggcttaatttgataaataataaaggcctcattttagtagttatattagttttctaaaatatcatttacaagtagctaagtgttttaaggataaaatatactgaaggataaaatggtaattttgtccccactcaatgaaaaccgtctatagaggatcaataattgttgtgattaaaataatagataattcatagcatgtctatctttggtatataagcattctatataatcagcagtgtaattccgaatatatagtggagttaagaagaattaataagttaggaaatttacttggtaaatttcaagatctacttattaggaacttggttatataggcccatggtcgccatattgtctgggataatatcatcttgtagactcaactaattaacttaataagccaattagaatttgaaaacagactatattttatttgagacttttcatcgagtttgggtaattttgagaaaaaaaagagaaatatgggtttatttgttaattagtacactttgggctcatttggaacgccgcattaggtcgtattgtattgtattgtattatattgaattgtattttatgaaatatttttatgtaaaactatatgtggtattaacttttatggacacctaaatatataatattttagtataaattaaagtttaacatagta

SEQ ID NO: 398903 - DNA, 1093 bp, Cannabis indica
ctctatcaagtcatgtctcacatactagtcgaaattctgaagctatcattgccaaaatttatcctgagagagttacgaaaataagctttaagtagctcgcagcgggacccgccagacataaaaaatcaaccatcaccaccagaaggtaattttcaccattagatcatcatcaacaatggaaaacactttatttgtattttatctcctattttttagggccttcttcatttataaaaggagagctcccttagttcattttttacattcaaaaaactacccacaatgtaagagattatctctctaaactttctctctctagagtctaaagtttctaatacttaaatagttgttgtaattaccatctcgtgagaaataaaaactcaaagtagacatagtcccgttaatatcacgatataggggtgaactaatataaattgttgtgtctctcttattaattactttctatttttcattctcgccaatctagcgagcaggtgtggcttaaaagtctagtccagatttctgagtcaatattttggtgctttcattgagagccacaactcaagaaattcactagtcaagatggttgcaacacgttctacaagtgttgacaaacagactctagcagttggccaatcaactgggggcacgctgttgatggagctgctcccgggactaatcctgcgccctaggaaccaggatcaggcctcgaaactagctcctcaactcatcctccaaggccaccactagtaactcccatgactggcatcaacgaccagatcctacctggggagccacatgttgagatagaagaccttgaggggccaatcctcagttagcttagctcaaccaaagaatggctgacttgcaacaactgctacagactctctcgataagaaacacgaacagttttaacactagtttgtggaaaactagaagaacattgaaagccaatgcgttgagcaggaacagtggagagctaacctgtcttaacagatttgagagacttatttgtaacgtcctaatgctaaggcacgctacaatgctttttcaattacagtgcaatctttgctaatcaaagaattttcttgaa

SEQ ID NO: 398904 - DNA, 846 bp, Cannabis indica
tcgagtctaggtccaggtctgggcccaggtgtggatcccaatctgggtctgggtttggtccatgttcgagttcaggtccctggtgcgggtccatgtttaggtttgggtcttgatctaggtcccagttttcgatcttggtctgacttttggtctgagtccatgttcgtaccttgatccctatctaggtccgagtctgtgtttgggattaggtcccagatttaggtctaatcatattctcagttccaatctaggtacacgaccatctctaagcctgagtttcggtctcggattgggtcttgggcttggtccgagttcggttctaggtctgggtctaggtcctggtcagggtcctagtcttgttacacggtcctagtccggcagttcttgtttaggtgctagtttcgggtcctgggtctaggtctgggttcgggtttgggtcctagtctgggttcgggtcctagtctgagtcccagattcaaacaccgactacgggtctgttcgaagccccatttactggattccgagtcaagtcacaagtccccgcccgggtgcaagtcccagtatgggttcttgtttgagtatgggttcaggtttgggtcctgttactgtctcatgtctgggttctactccagacctagtctgattgcaattctgggtctgagatcgggtttagatcccggtctgggtctgagtctgggtctggatcccggtctggttctcggtccaggtataggtactgatccaggtccgagtcctagattcaaacactgactacaggttaggtcaaagccttaggtcaaaattcagacctcagtcttggatctcggtcttgttccagtcccaatc

SEQ ID NO: 398905 - DNA, 534 bp, Cannabis indica
agttcttcgaggctcgtttgaatcttagcttttgacttgttaggaatgtaagcctcaccaagaaaatttctggagttaactgggtgaagttactggaagccttcccatagtgagataggcacctcgcttactaggtctcgaaataacccgactgttgcacttagtttattcattatacactaagtgctttcacagctgatatgggtcgcttttgtcttcctagatgtaaggtacttgatgcctagctattcacattcaacgacatatggtttctcgctaatatactaagcaatagcttgtatattgattcctcgattaagaccttacattcagtaggttacaaatatactttgacagttacgtaattaatgtgttatttcatacaaagcaattgcattgatccatattccttttatcctaacacgtgtcccccactaagatggtagctgaattttgagtttagcaatagttaattattaaataaattgacatttatcctattttttaattagatcatacaaagtctcttaatta

SEQ ID NO: 398906 - DNA, 504 bp, Cannabis indica
cttaagtaccaatatttaattcgaaacatatatgttaattatataaataaattggtggtttggtttggtttaaacaactatcgagaattctaatcaaagttcaaaaatatttaaacagttatattgaccaaaccattaataataccaaattcatttagggttttattttattattttacattttaaaatatttttttttttatgtatttttaccataacaactaacataaaatcttaaatcgcaatcaaatctgttagacaatttatatgtataaactgaaacatatatgattaagtataaagtgcggaattaataaaacatatatgtactataactaaggatcgaaatacctccagccattgaatctttaagcttcaaacccaaaaactttgatctgcaacagaaaccgattgatgtgggtaatcgggcttcctcgctctctcaactctctttagatggaattttgctgttatgaacagaatgagtgaggagctcggggaccg

SEQ ID NO: 398907 - DNA, 952 bp, Cannabis indica
ccgacaacgactagcaagaagaagaagagtaagataggtgagaaaaactgagcgagtagaagaagaagaagaaaagaagagatatatatatgtatatatatatatagagagagagagagagggagaaaatggttggggataacatgaggtgtatcctgtaacgccctgatacataggcgtgctacagtgatttttcaattacagtgacatctttgctaatcaaaggatttttcttgaaaattgtgtcaaattaaaattttggacttaattgctaaactttaaaaaaatctataaactttagacatttatttacaaaagtcgggatcccgtatttaaacttttacaacattatcaaaatataattagtgaggtcacatagcaactacaaaataaaaccccatatgtcttgatactgaacactccaggtcgcgtcgtctcgacatgtacaatcttcatccaagcccagagctcactcctattcagcctacacctttcctttacctacacatgaaagtagcatttgtgagtcaacagactcagtcagaaaagcatacaacaaaccatataattacaacatgtgtttaggcgcccatacacccatccacaaggcttatgagatgacttaagaacgttcttaacaattggtgctactgaccataatatcatccactatcagcactatggttgcactgcgggactaacactatgtttgtgctgctatgacagcatcaatagcacccaaaagtataattggccatgatatcactcttaactagtacgatactcgtactgctgaaccgacacaatggttgtgtcgctatgatagcgccaattaattttctagggtgaatatcattcttaaccagtacgatgccattattgctaaacggacacaatggttgtgtcgctatgatattacccaaacatatatatcataaacacagcatgcata

SEQ ID NO: 398908 - DNA, 532 bp, Cannabis indica
ttctggaacaaatttgaatagtgaccattgaactatgggttttggttggaggtaataaaatagaatagaaaggaaataattttttttttattttgattgcatattaaagtattattgtaatatcacataattgtctttcaacattttagtagaatgattattgtattttgaaattaaagaaaatactacccttgagaaaaaattcaataatatttttatcaatatcttagggctttttttcataaatgtacaacaaaaataacataataattacaaaaaatacgcacaaaaaattattttaaaaacttatacattttgaaaatttattacatgaaaccatacattttaatcattaaataaataaaaatatatttattaaaactcaaaataaacaatttcgtaaaattaattaaacaattttattaaaataaataagttaaatatttttttattaaaaaataaatgtttattatctattttagtatgatttattataatttaatatgattttttttaataaaattacaatatc

SEQ ID NO: 398909 - DNA, 688 bp, Cannabis indica
atattttactatttatttcatgtaaaatattattgtacaataataattaattattttttaataattattattaaattaaaaaatatgtaatatattatatgtaattctattcataatgatattataagtattgaatagtattaatatttttttagaccaccactactaaaaaattaagctttaaagacagttttatgaatttttagtgtcaatttttgcaaaatatattacttatgttgttttagacaatgttgaaggagtattaaataatgaccgctatagagaccctataatgtcgattattttatagaaacatactctatgaggtccctatgatgtcagtttttatgagataacagactccataaggaactatggaattggtttttatgaaataattgactctataaaggcttcctatagtttttttcaactttaaaatttgtgttttaacataatttatttaatttttattaaaaatataattttttaatatatttatttattaatataattaaattaagtataaattatatagaataagcttaaataaaaattaaattgaaaagttaaataaatacacatttacatttgctctaagtgtttgtatattggatatctttttaataatattttatattttataatatgtgtttgtatttttttagtattttattatcatttttat

SEQ ID NO: 398910 - DNA, 1485 bp, Cannabis indica
aacaatgattgaggactccaaggactagtttaagaaatgtgataaatgccatagattttcaaagatacctcgggcaccgcccaacaaactaactcagatgcaaagtccttagttttttgccatttggggaattgaccttatcggacagttacccaaaggcaaaggcaaagtggagtatgcagtggttgtagttaattattttaccaagtggatggaagttgagccattggcaaccatcacgtccaaaaaagtgcaagactttattgtaaagaacataatttttcggttcggattaccgtctaagatagtctcggacaatggaaaacaatttgacagtcaatccttcactgatttctgtgcaaaccatgggatcgtaaaaagtttctttgcagtggcacatccccaagcaaatggtcaagctgaaggagtcaacaagacactcaaggacaccctaaagaaaaaacttgaagatgctaaaggaaactggccggaggaacttcctgaagtactatggtcataccgtacaactgagaaaacatcgaccggacagactacattttccgtgacatatggatatgaagctatgttacccgtagaactcgaactgccatcccacagaagattaacatatagccaagaggccaatcatgcagtcctcacagagtcacttgatgaagttaaagagacgaactgcagcaaacttaaaactgatagcccatcagcaaaaagtagctcgatattttaacaaacaggttagagcaaagaaattcattgtgggagatatgatcctaagaagagtatttttgaacaccaaagatagtacagcaggtgtgctcggacaaaactgggaagggccatataaggtggtcgaagttctagatacagaagcatacaaattgggtaagtatgacaaaaagatgcaacttgttctagtaccatggtattggaacggggaacacataagaaaatactaccagtaaaagtaccaggtcggatgaccatatcaagtacaaaatagaagaacatttgctcataagtgaatagccttctaggcggaccaaacccaaaggtttggataaaattataaagtactccggtcggatgaccacctttgaaagtataatttttattttctgcaatttgttttgtttatgctaagctaaagatcagatcagattaatataataactttgatgtaagttactacggtaacagacatatttccgactaataaataaatgaagatgtttatttaaattcaaattgagtcgagttcattagcatgttaaaaatttaccatccagtgcgtacaaaaggtctggttgtacccaaaaccctgaacaaacaaaaaagcatacttgtgcaaaaacaagtgactaagagtcacaagtctgctcggtgacttggggggcacctatacttgtacaaagcatttggtaaaaaacaaaaacaaaacgaacataattgcacaatgattataaacaa

SEQ ID NO: 398911 - DNA, 501 bp, Cannabis indica
tcaattgtaccatatgcatcatatatatcatctgtgattgaaatcaaagcagagattttggttgttagctttcttgctcgagagtatttgggttcataatatatacccaacatccaaaaatatagttccaccatcctatctcttgcaaaagggaatttgtttgcaaaatcatgctttttccaccacctaataataagcaattattaagaacaatctaaattagtaatatatctcaaataaaatacaattaataaacactaaaaacaactacttttagtgataattttttagtcacaacataatttttttgtaattaaatgaaacttttaatcacaacaaaaactaaaagttacttgtgactaaaactgtgacagttactagtctcgtgatccgtaagaggaaataccggataagctgtgcaatctcacattacctggggaaggtcaagtgtgatgattttaaggctgtgtaggtatgggactacacagttgaagagggctt

SEQ ID NO: 398912 - DNA, 721 bp, Cannabis indica
cattatccacgtgttaattttttgttggtttatttaaattaattgtttttaaaaaaaataaaaattcatgacttacactaattagggattgacacgtgacaatttacttaacacttaataattaaatacttacaaaagttctaaaattataacttaagtattattaccgtcaaattaaacttaaatacttatttgtaactgaaagttaaatttaaatatttatgccacaaattcttaaaaaaaaaaaatatatttgatcttaagaaaaaggacaagaaatataaggagagaaagtgattcgcttcattatgagagcaacaacttctttaggaagacggaggaaatttataagtataagtatatttagaaaacatgttattgagtttacttaaaaatcacgtgaaatcttcttttttttgttccatgtctttcatttttaacttttaactctaaataattttttttaagagaaatttaagtcaagtttagtatagcttcttcataaaagtttcctaataagttaaagggaaatttatagttttgtataaattatataattttattacacaatataatacaaaataatttatttacatttaattatatattctatattaaatacataaacataattttaattttaattatacataaatgtacaacaaaaataacataattacaaaaaatgtgcaaaaaaaaattattttaaaaacttatacat

SEQ ID NO: 398913 - DNA, 821 bp, Cannabis indica
gatcctcctcattctcatgagggctttctcgttgatcagttttcggttgtctcccatctggtaggtcgttttgattttcagggggtatctcattttctctgggttgttcttcccgagccttttcctgtctcctagcttgtgagccacgaggtctgcctcgtggccttctcactccaggttcaggttgattttgagcattcttcccctgtgccgccctggttgaggctgcatcacgctctaactcagcgtttccacgctgtgccttttccagacgacgtctcaggcggcgattttccatttcataagctacttctcccacagattgggcacctccatgattgagctcttcatccctcgtcccgtgattctgacatttttcacgctgagttctcctcaagcgtgttgtccgcatactaggaccaacgttggatcgagttcttcgagaacgtgtggtccgtgcactgtggccactctcaggttgagccctcctagaacgggtggtccttctggattacgggttggtagatctttgggagcccatgggctctttccctgaacgatgattggtttcctcatgtggggtgttaacattttctggatgttcaaccatgaaggaggtggtttttcttcaaaagaagggaggttttttttttctaagctttttcatagaggctctcaatgaaagcaccagactatatacgcagatttttgttaactaaatttgagcctcacagtagtaatttcacacagaaaaataaaaactataaattctttaagtattggaacatcaatttttaattatttttagattaacttaagaa

SEQ ID NO: 398914 - DNA, 739 bp, Cannabis indica
gaccatgcgaggatgaggaggcaattccacgtcattgtctcgcgactgaggtctgctgcgaggattgcgtcgttcagggtcttcttcagtctgtgcctcctggttgggatatctcgcagattggtccctcgaggttggttgattcaagtcgagtccttctgggttgatccttcgttccctgcgagtacggttattacgacgtctagagttagttacctgagggttttttgtgcgagcagtgggtgctcgaggaggacgtcgggccctgttctgtccatccacctcggcttgcagggcgcgtagctggtcttggattgcggtatactgatcggtggtcagttggacaatgccctcggacaccgctgccggagtgaagggtggaaagtgccccgttgtggctgctggtgtagatgtttccccggcatgaaggccagtagtttcagggaataggttgagaggtctcacattaccccgacctactccgccattgatgacatctacgggaggtgctctaccacctgacagtggaacgttcatcattccgatgttgatggattcgttgttaagacctccgtttgcttggtttccatccattatgattttctccctaaattagcaacaaagtacttcttcgtattcccacagacggcgccaaatgttctttaaaattgctgacctgatacctcttttgatgactaggcactacttcaacaaaattctttttgttcccatggaccac

SEQ ID NO: 398915 - DNA, 787 bp, Cannabis indica
gccatagggattaaagaagctcccagttgggtaaagaccaataataggcaacatgttcaaattgagacggacaatcttgtttcagtacaagctatgtgaagcaaccaagcaatgaggtccactttcggtcttttaatcaaagactgccaacttttattatctaccctcccaaatattaatttatttttcattagacgaccagcaaaccgagtagcacattattttgctagacatttttcgtatcaatctgatcgtagcatttctgatattcctatttttggtgaactcttatatcttttgtattcataatgctaaattattcaatgaagttgatatttcatctcaaaaaacataaaaatcgcgaggtctcttttcactacctttcgtaacgataaagaaaactcctcacttttttcgacaggaaatagagtaagagaagacttatctatattctttcttgttctacattcttctttctctttaaaaacagttcagattatttagtaacaaaatttgaaattttaagagcataatttgatacataaagttatgggtgcacaacttaatacataaacaattattatattattaaaattgaacagaattaaataaaaattcataaatctaaccatctcaataataaataattttcacaatctaaaaatacaaaatacaattttacataaattaagaatatttatataaattaagaatatttaattatacaaaatacaattttacatctgtcaacacttttttcttttaaataaataaatatatttttata

SEQ ID NO: 398916 - DNA, 675 bp, Cannabis indica
ttttatgcttcctgttaaaatctgtaagggaattgaggctgcgatggctagattctggtggggttctactggggaagctaggaaagtacattggaaatcatggaagtttctgtgtcagtctaagttcaggggtggcttggggtttaggtctcttgtgcattttaatcaagccatgcttgctaagcaggcttggcgtatttttcaaaaccctaattccttacttagcttgatccttaaagctagatactttccgcaatattctattcttgaggctgtccctggtcatagtccttcgttttcatggcgaagcattttatggggtagggacctgatggcatctgggcttatttggaaagtgggtaatgggtatgggattcaaacactgggcgatcattggctgcctaataatagatttaagttttttacttcaaataatcctccccttcttcccactctctgccttttttttattactgattcgggaacctgggatgtgggaaaattacagtcttgctttgatgagtccatggtccatgacatccttgctgtccctgtttctggcaattatggtcatgataagcaaatttgggaaaaggagagttctgggtgtttcactgttaaatctgcttatcatttggccttttctaatcaggatctcccttcttcttcttcttt

SEQ ID NO: 398917 - DNA, 534 bp, Cannabis indica
tcccgaggccaaccttgccaacttgtcaaactgcgtcgtgtactcagtaacactcatattttcaaactgggtcaggtgggtgaactcttctctcttgacacttctgactgcctctttatagtatttggcattgaaaagttctcctggaacttttcccaggtcatcgtcgtgacatcatgaatcatggacaccatgtcccaccagaccagtgcgtattcttggaactgaaaagtgtcccaaaccactctatcatttccggtgatgcccatgaaattcaaaattcttgtaatcactgttagccactgcttggctttgataacgtccgaacctcccaaaaaaactggaggtgcttgcttgcagaacccttcatacagaggttccatcggattgttgccacaaccggtttggcctgcaaaacaagggcgggtgccactggtatctctggaacaggcactgcaggagcaccctgcggtctcaattgccgaattacttcttcttgttcattgattttagtttgcatttctgcaaacctgt

SEQ ID NO: 398918 - DNA, 541 bp, Cannabis indica
atttgacttttatattaattaatctatattgggaaggaaagttttctagtttttctatttatagaaaatacagtataaatggtaagtttggtaactcatcctttctctatctatccagctgtgtttaatctgatcttgtgtgagttttctattatgtttatttctagaaaattgaagcaagattttctttttctataaaaagaaagtcgcacttactgttcacgattctgtaggtacaaaaacaaaaattcctatgctgattgaagatttattttagcgaatcgtcttgtgagctgtggtcttattcagatcgtgtgtgacctgtcaataaggtgaatatttattatagtacaccttatagtagcttggtcatgtacctcttgttacatctttgtatttcactcatatctttagaaaagagagaccttgttttgtagagaagactgtgttcatctcttactctgtttatatgtattttgtactgtgttaagtctgcaaaagaagaagaacaacaatgttaccttcgggagaaggttttaca

SEQ ID NO: 398919 - DNA, 666 bp, Cannabis indica
ttaacccaaaactatgattttcaagagaaatgatgaaatctgttgctgctcttattgttgatgcttgctgttgttttcagaggttattttatgcatatttaggtagatttgagttggtttggatgcatgttagttagatttaaccaagtttgagttttgaactcaaagcttggagctttaatggtggattttgattttatgcatgaagctttgttttatcacttggaaaatgtttattagggtctaattagcaggtctggaaagtttggttgagtttggaaacgttttggttggagaattgatttttggtgtttttctgggtaaaaccggctaaccggttttacactgcttgtaaaaccggttacccggattttgcagtagggtgagaaaccggtttttctcaactggtcgtttcgtgctagtttcaggttttcaggcagtttgtttcctgctagtttggggtatttttgtattaagttgcagtaggttaagtttggttttaaaacctttgtcccggttgtgatttagtgagtcacctaagtgttgtgattgttacggtttaggagcctgtaaatcgccgtgcagttcgttccactcaggttgaccggcacacctgaattcggaattgaggtaagattagtataacagtatgcatatatattacat

SEQ ID NO: 398920 - DNA, 765 bp, Cannabis indica
ataccacagaagagtgtcgtcaactgaaagataagatagaaggtgtcatagagcgaggacactttcacgatatgtaaaggggcaggacgctgcccatgatcagctcgatctgcctagtaactctagtgaccaaggattataacccacctctgtaggaggaatggacacctcaattatctcgagacggagcgagtcacaagaatacaaggggcagttaattcggtaaagcaattttgtaaaagaattgcgacgtgagtagatatcggccaactatggttgccatatcaagctgccacgtggaaagttggtcatcaaccagtagcaatcaaagacaaacaactaaaactaggataagttcacctgtaaccccgcgataagtcagggattgaccctggatattgaaacaattgtgggaatatgtgttggaattattttaccaggatctagatttactaccatgtatgtttttaacatcctaatatgaatttctaaaacaaagtaaataaacacatataaagtttaagaaaccttacattgattgcagcgaaatataatgactccttccgttcggatctctagcctttgattcctttttgtagcagagcattatcaagatccaaacctggatctctttctgaccttcttgttgattggattcttcccagtcttacatactgtgattgaggatcaacttgatgtgtacgggcacttagtcaatcactaatggatgaatattatttggtaaagaaagactaagtgttttga

SEQ ID NO: 398921 - DNA, 698 bp, Cannabis indica
tttatagagaattcatgtgcttgagagtccttagttggcattcataaaaaaaactgtaatgaattatgagatcaataaagaattccctataatttttgaattagatcacagagatatggcgagctgtccgaatcccttaattagtgtattatgtatttatagccctcccaagcttatagccctataaatagtgattcatattcagagatactattgtaaaagctctaagaaaagggattattttccttgttcttaagtcaatacaaaccaagaggattaggctattactgaactgcttgaggctgaacctctataaaattcccgtgtctttatttactttattatattacatacacattatactacttgtcccttacaatttagactcactgtcgttggccaaaagagaggtcaacattttggtgctttcattgagagttgaactcaagatcgttctcaaatccaatctcaaataaaatggtggtacagacttgtagaggtctggttgatccggaaaatccacaggcagtggatcctacactgcagaacccagggaacacaagggtaccaccaaccacaaatctcgaacaaccctcgatcgtaggtcacggtatgacgactcctgtgagtggaatcgcgtctcgtgtgcaagagactgggaataccgtttaggagctaatcagggcattcccaacact

SEQ ID NO: 398922 - DNA, 574 bp, Cannabis indica
acaattttagcaccattagttgagcgaccgacagtagttaccatagttcttaaaaaagaaaccccaagtcgtctggagaccaaactctctaggtctaacaatcttgatatgtacaaccatcttcgagctttggactcactgatgctcagccttcgtcttttctttacctacacattcaaacaataactgtgagtcgacagactcaataagaaaagcacaaaagcacaaaacacataacataatactaacttgtagctacacgcccatacacctatttacaaggcttcagatgcatcaagaatgttcttaacaaaagtataacctctgtaccacatgcactaagtactcgtcccgtactagtgttggtagggttgaaccgtatcccgagtaccattgagcgtcacatgtactacgtcctcgtcttgtactagtgttggtaacactatgtcatactctttgagcatcatatactgtatcaatgtactctgtactgcaaccatactagtgttggtagtatacaaatcacataatacaacatgcaatttacatacacatatacatatacatattttat

SEQ ID NO: 398923 - DNA, 601 bp, Cannabis indica
aagagagagagagacctgcaagtaatatgcaaacaaccatcgattctttcaacatagaatttacaacgagggcatctcttccaattcttctgattcgccatttctctaaccatcaaatcctcactccctctctcatcttcattcaatctctggtaatcttcgcacccaatcttcgaatgccaacccacattacaccgcgcacagaacaatctatggcaaatcggacactccgactccattatcacctcatcttccccaatttccctcaccaaaaccgccgaacaatcattaaacggacagtaaaacttctcacactccattaacagagcttcacacagagcctcgtgggtgttattattttttaattttaggtttttattttatttttaaaaaattattttgggttggcttttggtggccgattgacaacattggggctggagtggggttagggctggccggagttagcagtcaggatgtggttgtggttggggtcgtggtggtgctccggtcacactttgtggctggttggggttgggtttctggcataagaagaagaagaaaacaaagaagacgaagaagaaaagaaagaaaaagaaaa

SEQ ID NO: 398924 - DNA, 1864 bp, Cannabis indica
gcggatagcccgccgctaatagggcagggatattaaatgcgggaaaaatcttgcctatcccattcaaaactcattagcggcagaccaataccggtgaagagttgctagctttagcatgtgggtcagatcactaagtaacatattatgaagggattgtagtgaacggtgttcgttacatggtagctgaacgtgataagaagcgtactacacaaaataacggtgtctctgcggcaggaacagaaggatttaattattatggaacgctggaagatgtgatgatgttaactttttctggtgtgtattcagtgatattatttcggtgtaaatggttcaataccaatccacggaggaagaaaacgatcattgagaataatatcattagtatcaatgttagtggtgaatggtacaaagatgacccatttatacttgctacccaacctaagcaagtattttacctcgatgatttgcttagaggtagacattggaaaatagttgagaatgtaaaccatctactaatatcacatccctggagatgaacacggaaggagcttgtcacgagacaaaagctcaataagccaactgagacaactcgagcctacccaccatgatgggatttggctgagggaagcattgttggaacttattttatcaggatctacattactaacatgtatgtaatattataaattataatctaacatcctaagtatgaatttcttaaaacaatgaaataaacacatataatgttatagaaaaccttataagaggcttgaatataattctctttccgtttagatctctaacccttgatcctttctgtcgcagagtatgatcaagatctaaatttggatctccttctgttgttggaattcttcacaatcttccacaaaaggcctgagtgttggcttgaattgtgtgggaaatcactcaactcactatagggcattcgaaaattagaagatgaaaagaggagaatttcgaatatataagaggctctctttattttctaggttgtctgacaaagtagtttgataaaagcttaggttagaaaataagagacatctctttctatttataggatttcatctaggttaagatttgaattatatggaattaaaaaacataaaataatgacttaatttaaaccttgttggccgaaccttatgtgggttcgacagattttaattttgccattttatttaataacttatcttttctttcacaaaagtcatatttcaattctaatcctataaatatcaaatctatttatttaataattataattaattataaaataaaaatgattaacaaataaaccctaaatcctctatctcctctcaattaagcccttgcttagtgaaaattcataaacaagatatagtcttatttagaactctaattaattagttaaaacaaattaatattgagtctacaagacaatattatctcagacaatttgggaccatgggcctatgtaaccaaactcccaataagtagatctaaaatttaccaagtaaatttattatcttattaactcactccactataaatttgaaattgcactcctaattacataaaacgctctatgtgttccaaatatagatacactatgaattatcctttgttttaatccaaataatcaaatatcttctatagatgatctacataaagtagggataaatttatcattctaccattcaatgtattttatccttaaaacacttagtttcttaaaaatgatatttcagtaaactaatataattattgaaataagagcttttctatttattgtctattaagccatgctcaaaagaaatcattatttcacttctatatatagttataaaagctatagattccatat

SEQ ID NO: 398925 - DNA, 866 bp, Cannabis indica
ggccttccgacagtctccgcgcaaccaactccccaacgttgagggccttcttgtcatacgtggagaattggcccgctagagaaatacttcggtaggcgcggtccgcatgtaaggagggatcctaacccactccgtgagaagctccgggcggtccatggcctggaaaccaaaggagaagaagaagcggtggcgatactccttcacatgtttttgatagttgaaagggactgggccctggttcaaaggatgggcccagaggccataaaatccgtctttaaatttgtcccccttcttgaggacagaaacaagttcgtaaaaatacaaaatttcagccggactgggcgatccccagctctgggcggcatacaagataaataagcaagcctgaaagcaggcaggcttgagggattagtttggtacggcacaaggccaacaaaaatgggaaagtttacgaagtagtcgtgaagagggagcatagccccggacatcaggtgggtctggctccaagctccgaagcttccataattgtggttgggtgtctcctcgtcccgaggcagccggtggtaggtcccgaagattgaaggtttgatgcctgccaccaccataatcttttcaagctggtgagcacaggtcagtgtggagtggaactcatccgcctcccacccgttagcacgggacttatagttctcctgggccacggggccctacatgacctcctccagggtggccagttgaacttctcctttcttggaaggtttagaaccggatgcggaagcagacattttggttctgaaaaaatcaagaaaatccagtagttaggccccaaaccaaaccctaatgttcgaaaaaagggagtggggtcccct

SEQ ID NO: 398926 - DNA, 3779 bp, Cannabis indica
aagtacctaaccaatggtacatacaaccatcacttttagacaaacacttcgccagaataaaaaattattctaagataatcttacctttatcaaatatgctcatagcaaatttctaatttttcattattctttcaagaataaaatattatactattttcactttaatccccatagttctcaataaccttcattaatccttaacattatagccaaggatatcaactttgggatttcacaagattagactattctttcgtatgaattccatatcatcatttatcatatatattgtctacactgataaatagcatattaactcggtatgtccaaccgttactactcggtcaaaaccataagatctcacaatacatagttcatatttgtgtctttctattcctcctataggaccttctaaactggtctactgacttaacttattaacaagttaagtatttgtttctgatagatattcaattaaagcacttcttatttctacttattaacatatgcttatcttgataccttgtaaatctttacttattaacacatcatttcctcttggtaatctttggaacgactattgattatgcatcctaatatgaatctttgtagcgtactttgtcctcacttgtacgctttctgagatgactctccggaagattcccaccttgatattaccctaagctaagtatgcttaactctaagataagcacatggtgggttatcagaaagtagatgcttctttgtcgttcctacttatatttcttatttttttgtccttccgttatttaaatctaatttccatcactcccttcattatcctcttacagtttctcatcgattttattcagttatgcttgaggaattttcatcttattgtaaacttgaatcttatctatctccactcattttaacttggatccatttcctgagttcttagctaataataattgatcaaagatcattccttgatctcaaagtttcgtatctgtgttaggtagaaatcttgaaattctccttttaacacacctagaaatacctcaagtatattttttgttttatttacaatcccttggtatgaactaccactccaacttgtagtgagtctctcatcgatggtgttgattcatcaacatctaagactcttatattcttttttctgttattaccacaaaggttttactccatgattcgtacattactattgcttccttgcaatcatcactgtctttatacttggttaatcactctaaaactcattttatccttaaatatgtagtccattgtttaatagacaacctattttgtgacccaacattcaccaatcactcgaatacatgtctgttaaattgcatctcaatttataagcctttcccccaatctaggtgagtatgtctttcaatcattgcttaataaggtaatcatttcccagaatctcaatagtctccttatataccagattgaccatctggtcaaatataaaagtattttccatcattaccatatcaccatatgtaatctaggtaatttttcttgccttagtgataccactactcccctgacattcttttatacgttacgctagtaatttctccgcttcaagcctacattaggccccttacacccacagaataatgactcttatataagagtgcatcactttagctacttccctagactgacgactggccctacagaccgatccaagtgttttcaacgtgctttattctaattcgcacgcttcatggggaaacttcctaaatgtaatcaccccaagtcaaggacacttaactttggagttccttcatggtgagctaccaaaacagtatacttcttgttaatataagcagtcccaaacaattcattcaagtcctcaacactatgtagtcccatgcctacataatctcaaaatcactacgtatacgacctttcgtcaggcgatgtgggattgtacatctactagtattttccttgcagatcacggggttctaatcgtcacaacttgactcatgccttttggcagtgaatagatccgcccacataatcatcgcctttaattcacttagggttccagacaatactcataaattatcccacttatactaatagtagatcactttatatcacttatactcccattaactactcatatcctatatttccacttgggaatatcagcaaatttaactcatattgccatttttttaatctgtctaccctgtcagatgagctgtcactatataacatacacgcactgcccattcatatattttgatatcccctcattgagtgtacaatgtttgatatcgatattaatggaaacatcaactataatcttacccataaaattctaactttagccagtcaaaggaccgatacccaagtccccttgaatcataattagcacttgggcatgacttgtacacttttcttctttaacatcagtctttcttaactgtggataggttcttttcagatgacccattaccccacaataacaagatttggttctacattagcccaaatggcgcctttttgcatcttgaacaccctagataaggtcatcatttcttattctcactttgaccgctatcctggtcaccctagaagctttcgttctatcccataatttgtggttcatttagtttctacctactgatctgctcgtaagttgggttcatatatttcaccacatccagtggtacaacaggaactgtcagtagtacaagaatagatacaagacgcgcctgttgttttctcaattctcagatttgcttccccttgttgtctaatcacatcctacatagagaaatttacatgtttccagtatcacgacaataaaggattcttttccttaccatttgccccaagcccagacagctcgctaatcaggcaattcaattgcccttactgtataacttatcacatatttagtccacatctttcaaacatttaaaactcagacggatattaatatcaatatgcatataccatacacatattcttataaaaattatcagtatgctacttttcccaacatactttataattgcctaggcaggtaatccaatagcaaataatataaatacttactatataccatgagtcgacctgtcctcgcagcaaatgtacatattcgaccagtcttcaggacctttaaaaccatggctgctctgataccaagttgtaacgccctaatctatagggacgccacgtgtgtgattttataaactagtttaatactaatagaataattaattattaaaaaccgtgataatattaaaaacttgactaaaataaaacactaaaaatggacattataacggcataaaaagtgtgttccgggaatccctgttgtaaaaagttttgctaaagaaatatatacgacaaccatttaaacataaaatcaaaatacacagcagatacaaccagtctaaaacaactcctggcaactcggcacgcaggccggcgaggtcaatatgtacattgctggagaagactgccacctcatggttgatctagcttttctttgcctttacctgcaccacatagcacccgtgagtcacaaggactcagcaagaaaagtaataataacaatcatatagcttattattcgaatattgtcatttatacacaataagaatcaaaccatcacactttgttcataagatgaaatccaaatcactactggcatctgccacgaataaacattagtatacagatatttggtaatacaaaaccattataccaataatggaattcatattcatttaatcata

SEQ ID NO: 398927 - DNA, 1326 bp, Cannabis indica
gggccaccatatagtatataatataaagaatagagcattgctataaggcaccagtggtgtctagcaccttctcgacatgtcgcgttgcgattggctagcgatactctctaaaacctattatattaaattatgtaagacccgatacttagttgaaccaatagcgatattgacacataggagggtgctaggcaccactggtgccctttaccatttctctaaagaatagattatataaatggaaaattttttttttgttgggggggggggggggcatggcctctatagactttcatatacagccgccctgagtgtctttttgataaccttgtctcttacaagatagacatccaattcaagtgctttgtccgagcatgacacactagatattagtgaagtaaacctagattagacaccataagcaaagaaagggactcaaccttactagagcgttttagaagattttagctcagcaaataggttttgtaacgtttttttttatagtattgaaaactaatctaaaatgaaagttatttcttaatagaattgaaaaagaagaagaaaggtcgtgtagtagttgtgaagagttttaaataagaattaattgcggtaaaaacctccagtacttttattttgcttgcacttaactcccaaaactttttttttgcagtaaaaccccaaaaactcttgggtttttttaccctaaataaaactcattttaatataatcagatttactaattaataatagatcagaaatcattctatattgcatggttcacatgatttatttcatgattatgtttgaaatataaattctattaactccagaacatatatttattcatgattatagtgtcgtcaacataatgaaatataatcatgattatatgttcaaaagtttaagtcccataatttgtcaatacactagatttagactaacatgataacaagcgataaggtatacttacaccttggataagtattatgtcatttttaggcaatggtaaagtataccagtatcagatgtatggagtacacatttgattggtccgatattgaacttggataagatatcataaacttaccgtcatatctttctaagtcaatattactgattgatcttaggtctatagatcttaatcctaatatggttaggttcaatcttagttgtattatttatattctttaatttgttcgtgaaagtcaaccaattggatcttctcgtgacataccgatttagaacatatggtagttcaattgagtgggaacactaatcatagatatggaatctataacttctataagtatatagaagtgaaacgatgat

SEQ ID NO: 398928 - DNA, 628 bp, Cannabis indica
taattaggaaggctgaggctcttacagcttcatcccaaaattttaatgggagagaggcatgagcgagaagagtcaaggcagtttctataaggtgtctatgctttctttcagccacaccattctgttcatgagtggtggggcaggaaagacgatggtgaatgccatgttcaaccagatatgaggtaaaggcttgaaattctcctccccagtcagattggagatttttaataggtaagcctaattctttttcaacttgggtcttgaagtttatgaaagtctgaatagcatcagatttgtttttgagtaaatatacccaagtgaatcgagaaaaagcatcagtgaagtgaacataataataataaccatttgaagaaatcatgggagagagtccccacaaatctgtgtggatcaattgcaatggttgtgtatatatagtttcagaattagggaaggggaatttatggatttttcccaaacaacaggcagaacgaaaatcagatagagttttatttatattgtgaatgttacaactgttcaacacatgtttgacagtcttggcagcatggcctagcctagaatgccatagatgaaacaatgaatcattttttgaagttgttacagtttgaac

SEQ ID NO: 398929 - DNA, 1286 bp, Cannabis indica
atttattaaaattaattctcttgtctaaacattttgtatagaaatattctatcactaatagttttatataaatctcgcaattttaaacttttaaaaaagataatgttacgacaatcccttttatagttgtcatcctacatttatttttgtagagaaggtattttaacggcaccataaaataaaatgtaaaaacttttataaataataattaaatacacacattaataaaatattatattttagatatatcactcaatataagtataataaatatatatatacaaataaagattataaaagttaaacaacaccgcgcgaagcgcggcttagttacctagtttattataattaaaaatttacaatagaataaaaatttcctaaaaaaaataaaattgataaaaattataaaaacactttttactaaaaataattattttttttttggttgttatatagtttatttatagttgtccagtttaattttaatattttttattttttctaaaaaatgtatttttataattttaaaatttgtaaatatatttttataaataaaaattgtaaataaatatgaaaataatatttttaaaaaaattttcaaaaattatatcaccatataagacaatatgctaacttagaaaaaaacgatcattcatatatataattatattaattagcattgaataattaatcatgagagctaacattttttgaataaatattttcggttaaccaatggaagaataattgttacagagaaatgttaaagagcatcaacaaatgttagcactctcctacatgttaatattattattagttcaactaagtattgagtttcatataatttaatataataatttttcgagagtattactaaccaatcgcaaaacaacacatctaaaaaatgttaagtactagtggtgtctaataacactgctcattattataacatggaagtagtttaatatttgtaccaacaaaactatgttataaaatcacatttatatctttgttatttttctaaattattttatttactattactattacttttttttttaatttttcttagcgatatcatttacttacattaccacccggagaagttgaagaatatttttttttatacattaactaaatttatcatcaaataaaatttaattcaaatataccttattttatgagtattgtaacacaatttcaactataatagattgtgttctttagagatggatgtatagatttgtgggaaagttagagcaaaattttgattagaaaataataaa

SEQ ID NO: 398930 - DNA, 1660 bp, Cannabis indica
gtcaaccatagaagcagagtataaagcagtagcaatggtagctcaagagagtacatggttaatgcaactaatgaaggatctacaccaatttacaaattctgcagtgccactttattatgacaatcaattcgctattcgtctagcagagaattcagtttttcatgctcgaacaaagcatgtggatgtgcattaccactttcttagagagaaagtacttcaagaagagttaatgatgcatcaagtgaagagcgaagatcaagtagcagatttattcactaaaggactcatcaaaacgagatttcagaagttgagagaccaactcaatatgaagagtcggcgttgagggggagtgttaaaagatcaacacctactgtacaagtatctagaattttctatcattttggtaatattatagaattttctggaatcatagagagtaatagtcataagaagtttcaagaatattttaggctataataaattgataatttgctagaacattctagcataataatgtaccatcctttgagtagtataaataggggagtagttcctttggtggtgcatggtgagttgagtgataacttgagtgttcaagtaaggtgtgtcctagtgtgttcaactaagatccaacaagagtgttttcaaagtgtgttcaaaagagtgagagtgtgttctaaagtgtcccaacataaaaataaagtgtttcaaaagtgtgagttatacacaagaatgttgtaaaggtgtctagtattaaaataagagtgtgagtgtttggtgtattgtggtctagtaaaaagtattcaagtcttggtgtaattacttttacaataataaagtaattacgttttcacgtgttgtggtgtccaccaaataatacctgatcgtacaatttcaaacttatgaaacataaaaaaaaaaaaaattgagaacttaagtcaaccaaaattctttagaattcaaccaaaacaacaatcaaatttttgttccaattttaaaatcgtactcctctaaatataaatattattaaaacaatagttaattttaggattcatgtacctcatgacactacctcccaatacaaatttaatatcacaatcaccgcataatgcatatatactaacaaaatgctcaaaacaaaattaaggaaaataaattggacagcaacttttcctcatgttcaacaactcgaaatggtatgtgctacttaaaattcttaaaagaagtatagatttccaaaagcaagaatcacactccaacgattaattaaatacaaataaaatagatatacacttgtcctaaaaattaaccctctagatcaataaaactaaataccttaaacttaaaccaccaatacaaaggaccttttcctaaccccataagatacacttcaacaaattgcatttcggcacaactaaccccaaaacatgtataagttatctcattacagatacgagctacattccaacatgcttaaatccatcaattacgaaagcagactccattaaggtggcgtttggttggaggtaatgaaatggaatggaaaagaaaggaaacaatctccattctattcctttgtttggttgtatattaaagttttagaatgtcattccaatggaatggcctttctaccattttggtggaatgacaattccatttt

SEQ ID NO: 398931 - DNA, 737 bp, Cannabis indica
tttaatttctaatttttaattgttttagttttcattttatttttatttaatttatgtattaatttttattaacttttataacttttatatttatttttttaattttgaaaattgtattttaaaatcatttttataatttttaaataataattataatattatgtgtactaatagaaatatgctacgtacaagagtgtatacataaatagctcatgttagcacttaactgtagtaaatagatgtcaccttaaatttgttaacgattcagtaatttagaaggttttactattaaaatttaaatttaaaaaattaaatataaatgaaataatagcacgaagggtttagtcgcaaaaaaacttttatttattttctaaaagtgagtctcctatccaccaacatatgtatgccaagattttgttatgatagttttagacggaaaaaaatcttctgtcccaaaaagcatgtctctaccctgtctcaccaacaagtttaagccacctattttttttcatttattaaataatttaatgaaaaattataacgttaacttaactgaatagttaactttcctcctatatttaatgctatattctctctctcagaattgtaaaagtctccttttaacttaataataatacttttcaaagtaaataatattttaaacaaacaaattttacttttttttatctccactgtagaaccatcatttttctgggtttttcctactttattgaaga

SEQ ID NO: 398932 - DNA, 589 bp, Cannabis indica
cccattaatctatgtgatcattaaaaatatactaatttatatttaatttattacttatttcctttaaaaaaaaacaaaaacaaatattacttatttttcattaaagaaaatctaaaagtaaaaagaaactagttaccatatgaatatatataccatatcttattcagacatgaaaattactttatattaatttttgatcattttattgatattttgtgataaactatttattaaatttatcaattttgcttattttttatttaacatatttttaaaatgagtcaaaaatattgatagtaattatgttaaacaacatgtagtctaagaaaaatttaatagataagtaagaatatttaattggtacataaacatgatgagtcacacgaaattataaataaatcaagatataattaaggggttttttctattttgggttaatattattttaaataaacatttatactgttacaagcaaaaataaacatttatattctttattaatttcaaatttactattttcaaagtttcttatttacaaaaatacggtagaaaaactacccccagatgcgcaaggagaagtgtgacacac

SEQ ID NO: 398933 - DNA, 973 bp, Cannabis indica
tatatatatttgatgaaattataatttattattgttatttgatgctttatattatagttgtaggtatttcaatttcttttcaaaaaaaaaaaaaagttacatataatttaccatatatactacaaaacaaagtttaaaatagtcaattaaatttacacgcttataagaaaaataagtgtatgtgtagctgaatgttttgaactttatttttcacattataaattattttatatatttcgaaaacaagtaacatgattgttataactacattgtatataattataatttttttttgagttatataatttttctacatataaaaaattgagacgtccaatagggataaaagtagtggcttattataaacattttctacatatgttatattaaatgtgacccgaaattatagaaattctaagcgtcaaggagtcacttagttggataaagaggaataacaagtcaaatgttattttagagacaaattgcattttagttgttcaagctattcttagttcagtctctatgccttctatttttggtttatttgttcaggattgtcaatttattttatcttctttaagtaatgtttctattggtcatgttaaacggtctgctaacaaagccgcgtactgtatgacacgtgatgcttgttattggtcaggtcgtctttttactgagagcgatgttccccttgctcttcagtccattatattagcggatgtttctgtttaataaaaattgctttcattcaaaaaaaatatttttctattattgttgttttctttttaaataatataataaaaaaagtttatatttcttaaagaattactattgtcatgctataacttattgcagttacttaaaaaaatatctttttattaatattttttttttaaaaaataaaaataaaaagtgtatgatatttttttaaaaataaaaaaaaaaattacggctaaactaaaattataattaa

SEQ ID NO: 398934 - DNA, 555 bp, Cannabis indica
tttgcaactgcttccttttatttcaaaaattaatctgtattttgtctttcgagaggtagaaaatgcatgagacgataagatatatgtataaaactttattttccttttgactaaatatgcatttctctaggaaatacatacttgaaactcaaataatcattggttttgagtgtttgcatatttctcgttgagtatttcgaatactcgcgagtttcatgatgatcatcttgaatactcgcatacacttatgaatatcagaaatgacttagtaaatctgtaccttagccattttaatccctgttagaacttagggtctattttttagccttcaggtcatatgtgcttttgttatgaaaactgtctgagactgttaaatggtgggcgtgtcacagtaacttaatcttcatgcaaacttacgcatgttccttgggtcactgtgatacgcccaaccatttgagacatgcggcaagctttcacttttccttctttatagtcgcatgttgggactaaccaggtttctcgaaatggtgggggtgtcccattaactcaatggtc

SEQ ID NO: 398935 - DNA, 564 bp, Cannabis indica
ttttctttctttagaaaaaatgccactaaagtggttattgaattttggatttacacaagtgatgggaaaaagtccagaagtggtattaaatagtaaagaagaatacccaaatgggttccaattgcctcttcactatccaaattacaagaaagaagattatgagaaaatggaagaatggagattggatttgctcttaaaagaatatggtatcactcttaagggttctcttgatgataagagaaactttgctatgggagctttcttatggccacatcaattttaattaattagttactttgtcactaataatcttctttaagcatgtaattatgcatgtattactcttgtttattagaataaataaaataaaagttattctaataagttttttgttctagattttttgtttatatgatttctattttattttatttttttcatttaattatgattttttatatataaaatttattaatctttgtgctttatttaattttcaagcatccttttagactttttttttattttattttttataaataatttttatcaatatatatggtt

SEQ ID NO: 398936 - DNA, 521 bp, Cannabis indica
aaattttgaaaaatttataaaaaacagtacttaaacattttatattacattcacgtaaaataaaagagtcacgtatatttgactgtttcaaccctgttatcgacatgttaatttttttttgtaaaatctcacaaatttataaattgtcttaaataattacagcatgcacaaccatgaaaaaaaatttagctaaaacattctcacaaatttctaaaattatattggtaccacatttttgggaacgcattgtagaattttcctacattattttttatattttattttagggtgattttacgatgcaccctcccttgtgtactaatgcaccatctacttatttcggcatctaaaaaaattttttagtctaattttttttcatattcatgtaagttatagctatttaagatatcctacaaaatttaaaaaaattcggaataatttacaatatagaaaacaatgttcaaatagtctattttacacatgtatataataaaatagtcacgcgtgcaacacactacttg

SEQ ID NO: 398937 - DNA, 980 bp, Cannabis indica
atatacatatactttagtaattataaaaaacagaaatatgaaaaagtaaagtacgaatttaagtcagaatatgaaaataggttgacctatttaagaaatgctggttggcacaaataaaacggaacacgaatctgagcacgatatgaaaatattaggcctacatgccttgccgggtgtaacgtgtgtgccaagatgacacgttacaagttaggtgatgcccacaagttggccaagtggtggtcaagtagtggcgcatgttgaggtgcatgctggtggcatgttgatgcctagtttgtatggcagtggtattttcgtaaatatctttaatattgtccgaattggggcgggacttggtagttgctgtttatttgggtctatgaatacaatggtgcaatcggatttgagaagttatgtgagtttggtatatggtttggccatatgtctacagagccataatcgtgtatgttcctggtagaaggctaaaaacttagaatgctcgtttacggggggaccctggtgtcagctctccactactctttagcaccttggtgctaagtgagctactactagtcagcgggactaatagggcgggcatatgaggacaacgaggggactcatatgtctccatgagttgtcgccatgagttgaagtactcatagacattatcgggccgacccggtagtgcgtctaagaagctgcaagaggttaaccggtacatttccatcagcttgccggaatgtcgcttacacaagatgtggcctaaacctccaagagacgttgtggtgtgtgttgaccacgagtcttaatatgagatgacataggtagtcatttgtgggctagcttgcatacgcgcatgggacagatgcattggcacgtcagcttggtgttggcatcttgccacacacatgctaccttggtcacgagtgactaggtgagtgtcagagttgggatttgtcttattatagtgagaacctatggac

SEQ ID NO: 398938 - DNA, 790 bp, Cannabis indica
ttttatttttttttattttacaccttaaaacagttttttgtcttgcattttttacgaaattttatataaaaatccttatagcaactaatggagacttaaatcgcaaccaaaatccatatagcaacccacatagaaactagaaatttttacatcaaaaatacaaaatggattttttattacatatatactcccacgcggcagtagttacatttgtacactttaagttttatttatttacaattttactacttacacacactgtacacataatgtcactctttaaatgcaactgaggtgtctacacatatcagctgattgatacctatcaatccatgctttccctataaaatattgacctaattgtttagttattttcacatattagggccacatatgtaatttgacagaaaaaaaattaaaaggctttaagatttgtttattttttataaaaatagctaattgattttctaatatatacatatatatattaattatttttattttaaattacattcatggcgcactactataaaataactctttagaggcttttttcaacaagtttcataataagggaagctaaagggtgtaaaaatacccgtctattgaaaattgacttttagagacaatttttgtataaaaatcgttggtatagaattagattatgccatttagagtcagttgggaggaaaacatttctgagtgcattttcaaaagcctatcccgttggttattagaaaataaccgacgacatagggtacacgtgaaatttgacacgtgtaccctatgc

SEQ ID NO: 398939 - DNA, 733 bp, Cannabis indica
ggttttaaatcaaaaattatagttgtttgataccttcttcgttaaaaaggtttgatcaagatgttataacaattcgacccctctctcgtcaaaaaggtttggtcagggagttataacagtttaactccactttcgtcaaagaggcttagtcgaggacctttgaatttcaaaaaaaaattgaaatggtaggtttgcattataccatgtatttctagatgaattccgattaatcatacataaatgccccttaagtaatttataaagaataaaactttgtaattacttaatataaatgattctctttatttataactgaagtttaaattttacatcagtaatgcgagttacatcatttatttattagtagtagggtcgcaaatgttctacgttccagtagttctttattagcgagccgttgagttgagctaatttataaacaacaactccaactactgcttcgatgacatatggactctcccaatttgggttgaacactcctgcagatgcatctctcgtatttgcaaatactcgtcttagcaccaagtctccaacattgaataattttttcttgacttttttgttaaagtatcttgtaactcggtattggtatgatgcattggtgatttgcgactcagttcattttccctcacgtagatccaaggacaatttccaaagttcctggtttttctcttgattataaaactctcttttgtgagtcgatatgttgacttca

SEQ ID NO: 398940 - DNA, 584 bp, Cannabis indica
ctaaatatcatcaacaacctttttactttatctcgtaattgcttataggttaatataaataagcctactaactagcagtattctccctcatcttacattatctagaataatcttataatttgaaattcaaaatactaactttctaatattattcttaattttaatatcaacttattccttatttctctctccttcctatatatatgacctatatatatataaagcataataaatacgattattatcattaaaccaataaatgccacgtacctatttatatgtataacaaatttggacttctattttaccttacatatagtagcataaaaaatttttactgctttacacactcaaaactcggtacacgcctaacacctatttcataacattatttagtgtattcctagaagaattaaagggactaaaatctggtacattattaattatcttttatatattctatattagttcttttgcattaagaaaataaatgtatatctggagtcttagctaaacaatatctttaacttgtaacaataccaaaatattgtatttggtaaataaagcaacttttaacttatttt

SEQ ID NO: 398941 - DNA, 705 bp, Cannabis indica
gcaaatatgccgaccaggtctactaaacagattaaaaagataaaaacgcataaaggttaagtcataacccaggagtttgaaatttttggggctaagggtaaattttcatgaaactttgaatgggaaaggtgaaaattgaacattgcgagattaaagccaaaatgtcgtaaacaacgaagtcgtatgatctactacagagaaaatcacaaagtttcgagcatagattctatgtatattgtatacgataagtcaagaacaatcatattttctacaatagaaacccagaaaattgaagatacaaaatcaaaggagagaaagataaaaaaaacttactcactgtttgaagccttagcattgtccagatgaagctgttcagatacttttgctagaacacgacaaacttgaagaaagaaaattcttctttctctgaggttatttcgtgaagaaaatggtaaaagtaacttaagaaaattttcaggcctatttataagctaacttgtgaaaaggggtaatcaattcaaaacctcaaacgcttcgaatttcccccaaaaaaaaaataaatattgggaattgaaagcaatcaagtgcctcaggaggataaccgtcaaaggtgtgcgaaagggattcgtgtctcgaggtactaattaatcagagcattaattagccaagaactgaagagacgcctgttggaataaattttaccag

SEQ ID NO: 398942 - DNA, 815 bp, Cannabis indica
agtaggtagagatcataagtttgtttaattaaagaaatagagaatgatataatgtttgtttaatttttgttaatcatatcaatttgtttattaattagagtgaaaatgaaatgcctacatgacgattatatactactttattattattattttgagaaaaatatgactcattaaacttacaacaaaacccaataaatgtcacttcctttacctaagacaacgataaaaagaaatataaaaacaatcattcactactatacaaaaaccatatttagcaacagttcacaaccgacacacatatacacattttgcatagcagttgagaatcatgaggttctatatatcctaattaaaactaattggtgaaaagtggaatagcccatgttcttatatatgactcaatactctacaatttatttcatgtgaagtaaaaatttcgaggacgaaattcttaataagataggagttattgtgaggacaaacaaaaaagtaaaggtaaatttcggggacgaaatttctttaagtgggaggtaattgtaatatccgcttttcttgaagggtaattaattttctttatacttagtttattttgtttgctaatggacataatttatcaatggtggctattttttgctcaccaatcttgaaccagtggatatggtcactatcaatataagtgcaaatcgaataggatcacatgcctgcatgagatatatatggctctgatgccatattgagaatcctgaggttccatcttaaaaccaattagctagtgataagtggagtagctcatgttcttattgttgggttttatg

SEQ ID NO: 398943 - DNA, 1904 bp, Cannabis indica
aaattaaatattatttaaattaactttacgattggccaatatagctaatttcatttcatagaagtaattaaataaattacaattaaatattacaaaaatattgtaaaattagtccaagtattaacaacttaataaatctaactacaagttaacctaaaaaaataatctagaaaagaaaaattcttagtcctttcagcatcaatcgtctaagtcttcgtgaatcaccgccatcaaccgttctatccgctatcgttatactggtaataaatcaatttttggattgtattcctgcttgtctcaaaactaaaaaaaagtaaaagtttatattagtttataaataaattattattcgtcattataataaatactataataaataattaaaacttactactttttgatcttgtatataactattggggtttgcacgtgcgacgatgtcaatcatgtattttaaaacataaaaaccacattcttgatttttaggttgtcttggacaagttgctagtgaaattcttggccacagcccaagatacgcatttgatgttcctatatattcgtatgctctgtttgaaaaattatattaacatttcaattcattagttaattaaataatttgttacataaatagtcattaaattattatctttttcaacattgcaataatttgttcaggaacttggtggccacgtatagggtctaaatgggtaactttccttggcgcaacgacctctagcatccaatgcgcactagaaaattatattgggttttaggtaagatagcataaaaaaaattccaagttctaatacagaaataaacaataaatttgtggtggaccctcatcctcacgagcgtattgttgtggaacatacgcctgatcagccacctctccttcttcctcttgttggtcatttttttcttctgtttaagggattggattttggattttaatttatcaatctccttctgttgtcgagccaaaacatcagaaacttcccttttcttcctgacgaatagtttagattcattggttaggaacttgtaaatcatgaaataaaattagctctgatttttttgtatggcgaaggaaacaacatttcaagtactagcatacctagccgctctgacacatcttggatgcactgatgtcccgagcacctgtgtcaggatatcgttttggccatggacctgaatttgtcgactttcaaaaaatttcaaccaatcagtaaggtcaatttctggatgcttttcagggacttgtgccagttgttgcacatccttctcttctaatgcgggcattataacgtcttttgtcattctattcttgaagtctttcattaacttcccagcaaggatcagacaatcatgcttgcttgaatcacaattgacccatattctctcattgatatcatttctaatgtattcagcatcgtcttcctcaaggttacgatcaattcccataacttcttcatgaattggttccttaagttagcattctcctcatcctcttcattctctaagaacatcctctctggtgtcgataaaacaacaaaccatttatctttagccggatctgaaatgtaaaaaacttgaaatcattggctagccatgatgaatggatcattcttgcttccactcttatttaaatcaaccaaagtaaaaccaagctcgtcagtttttactccaacattgttgtcaacgaaagaacatttaaaaagtagaattcagaacgcaaaataattgagctcccatatttcttcaacaacttcataatacgtcatagtacctaaaacaaggtttctatcttttgcacttgcaaaatgcattgtttctgtgacaatacgtatgccactattttgaacctctcgagcatcatctcttgactttgtatggaaacatttacc

SEQ ID NO: 398944 - DNA, 1553 bp, Cannabis indica
ctgaatagggtcttatcgaaaaagtagtgtgatacagtcttaatattattaatatatatatatatatatctccttttttttattttattttattaaacaatcatattaggtatttttttttctttctatcttatctctcagcctactttgcgccatagtgaccaattaaggtaagcttttttttttatcttttctttttcattcttttgcctgccgaatgcagacaatatttatattgttagagttcaaatgatagattatttatatataaatatatattatataatttgttttaaaagaaatatattatagtcaattgtttatgttcgtattgttaacgcaaattttcgttaattaaaattgagcctaaccgtgacaatctcacacagaaaaaatgaaagctataaaataaaagtatgaacacagggttttttacgtggtgttgcagttaaaattctgcatagtccacgagtcaatcttattcagatttctgattgttttctcagggcctcttttgtatgagtttttctgtccttttcttgatcttgcttgccactatttataattacatagtaggcaaataataacaaagttgattgtaatctacttacaacaatcatcccctaaaatcatggagtttgattacatatcacgtagtgtaaatgcggttattatctgaaaaatcatatagttgtgattttcccgcttttaccgggtcaaaacgatcgtgtatttaaacacgtctttaattgttatatcaggggatgtctcgacagaagcttggttccagtgatcacaatagcaagctggggccatttttccttctgaggttaacgatacacgtctagtgaagatcacgattcttatatatacaaagagttcttcgaggctcgtttgaatgttagcttctgactcgtcaggactgtaagcctcatcgagaaaatttttgaagttaactgggtaaaattataggaagccttcccacaacgagataggcaactcgcttactaggtctcgagccaacccgactgttgcacttagtttgttcattatacactaagtgcttctgtagttgatatgtgtcgcttttatcttcctagatatagcgtacttgatgcctcgctagtcgcacttagagacatatagtttctcactaatatactaagtaacagtttgtatattgattcctcgcataagaccttacagtcatcaagttacaaatatactctgatacttacgcaattaatgagttattccataaaaagcgatttcatcgatccatattccctttatattgacacacgtcctccactaagatggcaactgaatttgaggtataacacgtgtatgtattatgtttattttttgggccttctatttactggtacgatagccatttatttgctttatttaaattgtgaacattaaatgctctccttttatagcatgtagtgggtcatagtcatagctcactttctcaaacatgttagacttttcttttcttctttttttttgaaagaaactttttcttttttcaaataagtaatataaga

SEQ ID NO: 398945 - DNA, 211 bp, Cannabis indica
caccttagacaagtatttacaatatcaaacaatgaagaaatttacaaataagaataactttgactctcgcctaccgggacatcgttggattcttattttaaatcgaaattatcctttacttattcctcttagcttattcattttgaatttgcttacatataatcccgacattctatcccgaaacgatataatcctcgatcttagaactcct

SEQ ID NO: 398946 - DNA, 371 bp, Cannabis indica
gaaaagggtcgtaagtatctcactaatctgatggcactgtggtctctaccaggattattgtctcgcatccataggccattgcatatggcgtatgccccattgaagttctttctgttattctataagcctagagaacgcgagggagttcctctagccagtgggctttacaagcctgcagcttcttctttaatgtggtcttaaggattttgttgacgcttccacttgtccattagctctttgccaggttacagcaaagaagcttttaatgatttcgtgctaaacacagaagttggtgaaatattcactatcaaactgcttcacgttgtccgacacaatcatataggggagtcttattggaaattattttacca

SEQ ID NO: 398947 - DNA, 662 bp, Cannabis indica
ttaatttctaaacttaattttttagaaattaatttctaaacttttgttttaatagtctcctatttcattctcattcacaatatttaacaaaactattagtttaaaatattcaatatatacaatatacaatacataaaaaatatacaatataattacaatatttttatacatacatattcaatataattttaaaatatttacatacaatacatattcaataaaacacaaaatacatacatatatactattaaaatttagatttttaccttattacaaaaatccggccactaataccgaccaaaatccagccaccacgcaccaccataataacacaatcttaaaaatctaaaaaaaatcttaaaaaaaatttgcaaaataaaaaataaagcaatataaattactaaaaatattagagattagatttataccttaatggacattgagattcaacgatttctccaccaaaagcggtaggcggagctaaaaccaccacaatcaccacctctaagcccagtttaccatgaaaaaacaaaataaaagatgatcaaactttggggatatgttattgggtatgaaaaaatgcaaacatttttttttaaaaaaaaaaaaaagtagggtaaaaaaaggaaagaaaaataagagaaatagggggagtagggagg

SEQ ID NO: 398948 - DNA, 599 bp, Cannabis indica
attcttgtttctctacaggtcatatgcttcagttgcaggactgttcctctgaagtgcgttctattattttgaacgaatttattaattaatagatcttatgatttttattaccaaaaaaaaaaaaaccaaacaaataaatcatgttcactgaactttgcaatgcttgcatagtacacatttttactgtaagcgtacaatgttattctaaaaaagttttaattataaaaaaattatcgaacccacaaagaataattattaaattttactaattactatactttttttggttttatactttaattagacaattagaagtaaataataattaagaaagaaattataaaataaccgaaaaataaacagacaaacaacaattttaatcagaagataaagacctaaagtattgatttctttattttaaactatgaatctcaatttaccaattatcccaatttattctattatttctagtttcaagaaccataatataatctattaacttctctcaagcgatgatataattaacttaattaactaatatgatatatttattcaatattaatcaatcaagcaataataaagcaatgtgattctcttta

SEQ ID NO: 398949 - DNA, 491 bp, Cannabis indica
tgacagttgccaggtgcatgattgacattggagcctcctccaacatactttttgttgactcagaatttggtcaactgacagcaggtaatgacctactcctcttttatgtaaagatgacacaaagatttatagaggtttggcccccttgtttagtgggtaatgacctattccccttttagttgtattcactcttgagataataacatgcagatcataggtgaaaaccttataatttctagctatggctctcttcagtattacaattatgagaataatgtgttacagattaagaactgataagttcttgtgaaggacttaagaagagacttgacttagtgtctagaaggtattaatagaatgtgaggattgagagagagaaaggctttcatgtgtgagagacttggaggagcatgagagaagacttttgtcacttgcggaatgacttcgagaatgagagagacctaatgccctttatgttgggttttgtgccc

SEQ ID NO: 398950 - DNA, 676 bp, Cannabis indica
attggtttgatcgaacggtgtttatgagttaagtggatgaggagtatggtggggtcccggatagggagtaagtgcttggttcatgtcgacaggtattataggtaataaggtgatttttggtggtgccgcgtatagaggtgtggctgaagcgtcggcagaggagaaaacgacaacgtttactcagtgggtcccacttgaaagatttctttttgactcgattattacacagatagagagtgtgcttatcacgctcattacaaacgcgtggagtatttaagaaattgagtgtatactatttatataatatttgctctttttagaaataatatcattggtgattttctaatttctcgaaacagttttatgataagacgttaatttcggtgatagtaagtattgggggtctttttaggagatttttacttaatcattgtgaagtttaaaataaattaacccacggttatgtaaaagaggagcatagttttgatcaattaaattggtattagaaactatttgtaaaatcaaacaattttcattaatacagctcaaacctcataattaagggtattaattggatcacatctaatatttttaaacctaatgagatccaattcaatcatatattggatattttattttactatccgatccgatctaattaatttcgtcatccaat

SEQ ID NO: 398951 - DNA, 986 bp, Cannabis indica
agaatacactacttatgtagtagagtactcatatatttaatagtaaataaatggaagttaagttactccactttatttttattttttttttttttttttgaagaacatgaaattacaattgaattaatgtacaacacttatattttccacagcatggaaaaatataatttttcctgagataattaatgctatctaattgtgtaattaatttttgattcgtggaatatggaaccttactattagtgtttcatatttcaaatcttattcttacaagaaaagcaacatgtcaccatatgagatatggaaagaaaaataattctaactcgactatcttaaactttggatttcctatctttattgtaagaggatctttaaaagattgaatttatgtatttgattggaagaaattaaaacataaaaattaaaatgagaatagaatggaattaaatttaaataaataaaaaattattaaattttttcttatcttgtatttaatgattttttcttttattttaaaatagaagggtcatcacactaaaatggtgaaaaagtaaatttattggaatgatattctaatactttaaaatacaaccaaataaaaaaataaaataaaacttaattttattttatttcattatttccaatcaaacgtcacataaatgtatttttattggctatgcctcttacatcaaagcttataagatattaggtggtttttggttcacatgaatgagcattggaatggacttgctattccttaagaaagctcaatcaagtgtttggtttctttattagaacttgaatgcccattccaaaggaattacaattcacctaaactaaggatttacttttccactataaaatcacttgaaagctaattccatactaacaaaagtctattttaccctatcaatcctcctccacttctcacttttttttggatgttaccatcatattactaattatttaatatttaaatgcaattt

SEQ ID NO: 398952 - DNA, 532 bp, Cannabis indica
aaaaataaaatgaaagttataatatatatttttattttttgtttttaaaattaaaaaatacaagtaattataaaacacatttttgttttttaaaaaataaaatttgtccaactttcctaatatattattagaataattggacaataaatgtgtcatttataataaaatcaaataaaacatatctattgaacttagttgaatattaataataattataaaatattttgtggttatagatatggcctagtagttcattcttttttttttttacaaagaagaggcccgaacttcgaatcctacttttccaaaaaaaaaaatataattataaaatattttattcaattaaatatgttaaaaataaaattaataatatagttagtcctctaataataaattagtcattataataaaaaaaaagatttctatttgcaccctataaaactaataaatacaccacattattaaaaaaaaatataaacttaaataaattttaaaaattactacttaatattttttttaaatttttttccct

SEQ ID NO: 398953 - DNA, 879 bp, Cannabis indica
ttattcaaatgctaaaccttttctgtccacgtgtcctcatgcggtcggtccatgcattttgggcaaaatcaggggcaacatttacccccaagccttgtttagttaggaagtgaacaaggcttgctaaggtgcctccggttgcctcatcgacttcctggaacgtgctttgggcgtgtgatggtgtatttaatgaccttcattactgcagttacttgctttttgcaggcgtcgattcatttcttgtccatttattgatacgatgcattaatgggtgtcagacgggtactcaagcatttctaccgccttgatgacgatctaatccaaccgttggatccagggaattcgaatcgattgctatccctaccgttcgatggtggctgatcacaactgtctctctcatgctctggcctataaaagccaaccttcttacttcatttggttactttcaacatttcaccaaaatttcccaaatttccagagagaaaagaaaccttaaataccatagatttcttactcattttccttcgtcgttgccaatcaactttttaccagcgatcaacgccaacacccagttcccaagctttatgtaagttcttcgcatcttgtactctagtgtttgtttacatagcatgctttactgttcatctgcttttctgggttgtatgttgaatttctgggaatttctgtacaacacgtttgattcctccttttttttgtgtttgaattacttcttttcatcgtgttctttgtcgaggacccatctttgtctcacgcctgacattcaagggtttagagcagacttcgtcttctcagttttacccctcttattttttttttcttttttcttcactttttcgtaatgtcactatctatgggatt

SEQ ID NO: 398954 - DNA, 510 bp, Cannabis indica
gattgtggtagtgtggaccttgaaggtgtaggtgcaatgtacacatggactaatggccaagactgggagcatctcatcaaagagaagttggacagggtgatgttctcaacctcttggctggaacaatttgctaaggctgagactaagaatctccctattcgacacatcaaccattcagcgattgttcttgatttatttcttgaaggtgatcattttaagtccccctttcagtatttagatgcctgaaatatggacactgaatgaaaagaagttattcaaaaagcttggtcgcaaacaatttagagctatcacagttttattcttagtgctaagttgaagtgtaccgcgattgcgttggctaaatggaataaggaacgctacgggatatgcaagaaaaaactcgagttattggacaagccactcattgatgttcagaaccgtgctccctctctgaaaatgtgcaacttgagagttccattttacttgaaatagatgaaattgagacatgac

SEQ ID NO: 398955 - DNA, 439 bp, Cannabis indica
tacttagtgagaaaaatggtaaacaagtttgtgaaagggtataatcaatttaaacccaaaacgcttcgatttcccccaaaaaagtaaatattgggaaattaaaagcaatcaagtgctggagaagagtaaccgtcaaaagcgtgcaagggaaaggcgcgtctcgaggtacaaattgatcagagcattaattatccgaaaaatgaagggactcctagtcagaatcacatcgaatcacgaacagacgcattcaacacgtgtcacccatttagatgtaaggtcggctcgagtgaagtctacacgtaacttcgaaagtcccatacagacataaggggagcacatgctggtgtcacatggacctaattccccatatctgcccgagagagatgttctgaacagggcacaaaatacacctgcacggataatgtaaagcccgcttagt

SEQ ID NO: 398956 - DNA, 683 bp, Cannabis indica
tataagaaaataaatatatgtgtaagatatagttgtttagaaactaggggttgtccagttctaagctcatgcggttgatctaccatcttttgccaagagtgtaagatcgagatgtaagagacaccagcaaagtaaatgctacacgagagcatgctttcagtatggggtagtaggctatttagaagaagctgcctactgttgcagcgactggaatagaggggtgatgacattttagatcttgtttgggtgtttgtttgacctagactgagactggtgctggtcttttcaccatgataagttgaacttctatgaatcatactttgttaatagttttaattgattccggtgcaacgtattcctatatttcgagaaggatgattgagagtttgtataaagttaaggatgtgttaccaagtggttccggtaccctatttttttactggagaactagttagtctccagcaagtggttcaaatccctaccaaagttgtgggggaaaaggaatgctaggttgtgatagttaagatagcattaaaggatcctgaggatgaattaacaatggattgatgtgtaaagtttaatgcaattatcgattgtgaaagaaagatggtaattacttgaaccagaaggtgaggacccattcgtgtttgtgggcaaggttcaaggattctgaattccattaa

SEQ ID NO: 398957 - DNA, 832 bp, Cannabis indica
agttgtcactaaaagtaatagttctttgtagtgtgtctgtaaatatcattttattacaaatatatatcgtaaccaagtaaaatacatatacatttttttctcgattttttttttcaaagaaggcgactatcccgccacgcttttatgtgggttcgccgttaggtgcaacttaatatcagatccaacttattttacttttaataatgattatagaaaccaataactatttaattgcaacaattttttaaaaattacaaatttaaaaccgtcgagaattgtactttttgtcgtggtgacactctcatatgatttttttaaaaaaaaaaattaattaaaactactttgacgctgaaaatacgaagagacatatattagtggacaatgcatcttccccagaagggatattttttttttcaatttttttttcattgcgatgtttgttataaggctaattagtaattttttcccctgaactttgacatgtagtaaattgtgccccctgaactttttttgccgttaaaaattccccttgaactattgagattgttaaatttaaggacttttgtccaatttcattcaattttactatttcagtaattgtttatgtactaaaccaggctctctagactttgatatctaccaaatcatgcccgtcaaactttgatatgtactaaatcacgccccttgaactttcatccatgttagaattttttactaaaattagacaaaagtccttaattttaacaatctcaatagttcgaggagaatttttaacggccaaaaaaattcaaggggcacgatttaatatatgtcaaagttcaggggaaaaaat

SEQ ID NO: 398958 - DNA, 612 bp, Cannabis indica
tcatctcgatgcatgcatttttttctcctcccatatgtctacaaataaagagaattattaaaaggtattatttgttctctagtattttactcagtgtcatattcttattgatataattaaatattaatttttaaaaaatatcgttaaccaatcataaaatattacttataaaaagtattaagtactactgatactttataataatactcacaaataaagtacaaactaggagcaaaatcagaattaaaatttaagttgggtgattatttaattttatagtgaaatgctaattaaaaggtatttatagtgcctatcattttttatgaagtgttataagctataggtatagccagtggtggacttaggatttataatgagaggatgtaatatttttttatcatatatacaatgtagcttagccattctaccaaagttattattatgtcactacagaaaatcttacttttagtcacaacaaaacttgtgactaaaagttattaaattgtgactaataataaattattattcctatgttgtaactaataggttcgtgactaaaagtatagtcacaaaattacaatttattgcgactaaatgtatttttagtcacaa

SEQ ID NO: 398959 - DNA, 565 bp, Cannabis indica
aaataataaaaatattttagttgcgaaaaattatttttcactaaaataaatagcaatacaaaaatttaatataataaaaatatatttttaaaataaaattatttttataaatgtatataaaacattagaaaattttacattgtagcccttaaaaagggtgtattaatacacctttatctgttttggtattttaaaaaaaaattagtccaaatttttttttgtgatcgtatacgttgtggttatgtaagacctcctgccaaattttggaaaaattttaaaaagttaaacacgctgaaaataaggttcaaagagcctgtcacacgcgtgttttttttattttatacgcatgtgaaataaacggtttgaacattaaattttaggctaattagcaattttccccctaactttaacatgcactaaatcatgctccctgaatatttttggtcgttaaaaattctccctgaactattaagattgttaaatttaaggacttttgtctaattttagtaaaaaaattctaacatggatgaaagttcagggggcatgatttagtacatatcaaagt

SEQ ID NO: 398960 - DNA, 747 bp, Cannabis indica
gtttattagcttagggttattactcacgtaaattattaatatgtaattgttatgccatgatgtatataaatatatattgaagtaaaggtttgtgtgctcaagacataatcgggttggactcggtaactagaaccgagatgaaccgttctaaggccttaatgtaaatagacgtgtgagcgtaacaagtaggtctattccacatagacctaaataggcgtgtgaacgtaacacgcgggctgtgtcctacagacaaaaaaaatggcattaatattatgtgatgtgttaattatgattattgataattatactgtcttactaggcttggctcacgggtgctctattgtgcaggaaagggtaaatcgatttctaatcagccattagtgtaggagttggacgatgaatgtacatgttcgggccacactagaccaagcgggttggggtctaccagtgttgaaacttttgtaactctgtgtttgccgcttaggtcggctaagtgaaaagacttgtaatattttgtaaaataatttttgggatcccaatacatgtaacttttgtttgtcaggttttaattaatacaagtttattttcattccgttttcgtttaaagtttaatttccacgctcattttattagtaatcccatttaagggattagggtttcttaatcatcttgggtagcgcgcctaaatgttagggcattacagatggtatcagagcgccaaggtttttaaacttcttgtagaccggc

SEQ ID NO: 398961 - DNA, 1347 bp, Cannabis indica
gtgccaactaattttattaagaaagagaaattcctagatggattaaattcgaagataagacatgatcttatgattaccactaatgataacaccacctatgctgatatggtaggaaaggcactacgagcggagggtgtagtggagtgcactcaggagtctcgagggactcaggtcgttgtaggggctcctactcctcctaccattggttatagtaggggtggtagtggctcaacaactaattaggaaagaagggcacaaactgcatctagtggctcaagtcagaataagaggttctgagggaaccatggtcgaggcaaccgtcaaggtagttctgaaacccgatacacttacccgaaatgccctaattgtaaaaagcatcatctgggtgagtgtagagggcaagggtgttttcagtgtggattgctagggcactaaaaaagagattgtccaaaacttaacaaagaagaacagaagactggaacaaaacctgctccggcaagggtgtttgctctaactcaggcagatgtagaggctagccccttagttgtaacaggtcagctctcagtcaataactcttatttctctgtgctatttggctctagggccactcactcttatgtggcagctagaatttttagtaagtttaatagaccgcgtgatagttatggtaaagggtttcgaaccctattgcctgacggagaattagtcatctccaaaaggtggattagggctatgccgatcagaattgaggatatgagttgagtgctgacttaatagaaatgagtttagcagattttgatattatacttgggatggatttcttatccaagtactcacctagcattaattgtagacggaagatggtgatcttccaaacagaggatgaggaaccatttgtttttgttggatcagttcagggatcccagctcctagtgatttcagtattaacaactagaaaattgttacaagagggatgtctagggtttttggccgtggtattggatacaatatgtctagggtttaccaccacaaagagaaattgattttattattaatttggcacccagagcagaaccagtttctaagacacgatatagaatggctccagcagaagttaaagaattgaaaatttagcttcaggggttgcttgacctagggattttgcgacctagtgtgtcaccctggggagcttcgatattatttttcaagaagaaagatggatctttgcgtatgtgcattaactaccgagaactgaataaaatgactgtcaagaacaagtatcctttacttaggatcgatgatcttttcgatcaacttcaggggagacggtcttctcaaagattgatc

SEQ ID NO: 398962 - DNA, 837 bp, Cannabis indica
ttttcttgaagtttaaggaaagaaaaattgtgcatgcttgtggttttgttgttgtggttgctgttagtgtttagtttgtttttagaagttaaattgtggttgattgtactggtttaagcttgaattgatgattgctagttagatttaaccaagttttgagttttgaactcaaacttagagctctaatggtggattgtgtttctgagcatgttagttggttttgttgcttgggttatgttcattagggtctaaatagcaggtctggaaggtttcatgaagtttggggttgatttggttgagatatgaaaattttggtcattcctgcactgaaccaaaattccagttcagaggggcctgtaggaaccggaattccagttcgctcgcatgaattttccctgaaccgaagttccagttggggaaccggtctaccggttggggcaattttgggaaccctagtttttcccatttttgtgttgtttagggtattgccatgttatttatcgatagggaaactcttagttagtttaagtccccggaaaatgatttagcatgtcactcacctatgttatgattgatgtgatttaggagcatgtaattcgccgagcagttgttccactcaggatggccggcacacgtgaattcggaatcaaggtaagattagtataatgtcatgcatatgcttatacatgtttagcgtacatgttagttgccatcataataacatattagatatatgttaaggtcaaattttatatagccatcagattagcatatcagggcaacagtgaggtatacatagagttgcaccgagatgccatcagatatatgctaggctat

SEQ ID NO: 398963 - DNA, 1500 bp, Cannabis indica
cagaaaaactgagccttcccttttctctctatagccgaaatcaaccctctctcttttcttcttctaaatttcgaaaccttagtgatagagtaagtgcccacacacagcaagtggtacctcaatcatagattggaagactgtgaaggatcacacacaaagagaaggacattcgggctcagatcttgataatactctgcgacagaaaggatacaagggttagagatctgagtggaaggagacattattccgctgccatcaatgtaaggttttcttaactttatatgtgtttatttatcgttttagaaagttcatatttagggtgttaaacaacatacttgtgagtagatctaagatcctggtaaaataaattccaatatttccatcaagaaatcatgcattatacattctaaaactatcatgcaactgaaaataccaaaaatgttacaatttaatgtgagaatcaaagtttctaaaagcttaaaacttgtcaatggcaatttcaaagaagagatgtcaaagaagaaaagaagaagcatatatggagagagaagagctaaaagcatgccataaaaaaagtcaatacttggctagaaaaggctgcttgatagagactattacaagtaagacgagagctgggaagtccctatttgaccagatgtccgaatagagacttgggggacaaatgttatccaaattattttccatctaacatggcatgtccatgtaagccaagactaaggacacgtgtaatacaaccttgtcaataatagaacaaagtctccttacaaggcatggcagaaccgtcaagcaacaagcaagaggagttaagaaagccatcaaaaagctacagaaccatgtctagtcagccgaagggagtacgtaggccagctaggaggagcttgtatggtcggctaggttttgagcctaagctggtcgaccaaaggatggttgtcagaccaaagagggctcgtccgacaaacgaagcatgaaccttgcaaggaaagttgtgaaaaggttagcatacatgtactaaggcatgccaacacatgcaaaggctggccaacacttgccaaagctggcaggcaattgacctgctagaccttggtaggagcatggccggccagacctttgtaggagcatggccggccagaccctgataggaacatggctggcaaaaccctagtctacacctggtagcacttggcacgcagccttcattagggacaacacagctcatcaacccacaaaaatagaggagaaatatcagttactcccctattcttaagggataattaacctatttactatttattatttaattatgtaaataatgcttgatagttcctatttttaaggaatattaggttattatcttcatgtaagctttcctatataaagagcattagcctaaccctaatcctcgatgtgtaagaggtctccagctccacaaaagctctcaagctctaagtctgaaactctaactctatcttccctcctcat

SEQ ID NO: 398964 - DNA, 646 bp, Cannabis indica
ataagagtaatcctaaatagatttctgaggtaacaaatgcagttatatatcacaatattttgtaccatacaaataattaaggacctttttagtacttgtgtttttttctttatttcgaagatttcaatattcaattgcattaatcttatttaacttcattatcaattttagctttctttttacgagaaagttcgagattcttttatttatattagtagtgttatgtggttaaattttaaattactatctagaatttaggggatttgatcaaatgttcatttaggttttgaccattgcctagaatggttaatgcattctagaatttaggggatttgatcaaatttacgagaaagtttgagattcttttatttatatgattttatttattgtcacaagttctatcattttttcattaatttcatttttgttactaatttggtcactaagtaacttctctttgctgtagtgttttggaaacctacaagattcaaaaaaaaaatatccaaaatagaaattgaggtaaagatcaggcaatacaagtgtcgaggacaaccgaacgatgtatagtgtggatatcatgaagattattaaaagtttcatgacttagtacaatcttgtaacttttttgaagaatgaggtaattaaa

SEQ ID NO: 398965 - DNA, 1034 bp, Cannabis indica
caaaaaaaaaaaaaagtcttcttctaacaatattcctataatatatgtcttgttaataatacctatcgaaatataacttttacagtaacctaatcatttcatcacattttattcaattttattatgaaatgagtgaagcagtggattatagttcataaatagatgcaaattaaatatcattcgtcctttttatattaataaataatagaatagaaaacttttttttataaaatttatattttttatttttagtattttaatcattaaagtaaaaaaggttaaatatatttagtttgtgtctatttattaaataccatttaccgcgtcactcgttttacgatagaattaaatacaatatgatggaaggactactataaaaattatatttcgagaggtatattaacgagtcatatactataggaggaacaacttggtagtgtaaaaaattcaaggataaaaatactaattattcaaaaaaaaaatgtacctacttatatataaatggagaaagtttcaatgatcacatcaaatatgtaaccataatgtttacatttatttttagtcattgaatcactattgaatggttgtaattaatttaaaaactaaataaaaataaataataaataacttgtaatctgataatttattttcttataaaaccttaattaagattaattttattttagaattaaattaattataatttttaattaattttttgtaatttgttactaaacaagaatcttttagcaattaattttttttttttacttaaacaattaaaatatttgtaatatcctttgaaattatttcacttacaaccttataatttgaaattattttacttataaccttataatttgaaattatttcacttataactttaatttaaaattactacacttaaatattagtttttattttttattctaaaattaaatacaaactagtttaaaatgtaataaaaattaaaaaaataaataataataaaaataattatagaagtaatttataatctaagattgacctaaatc

SEQ ID NO: 398966 - DNA, 827 bp, Cannabis indica
attattcccactaataataatatgtaccaaaatcaaaccaaatcacatattcatttaataatatccagatataaatttattaggcattatgcacatgccaataatatcaaatattatatcatcacaaaaatctcatacatatttaaacccataaatatgtaaataataaaaatactctcagctaaaaaaattacaaaaataccctttctgagttagcggatattacaattatccccctctaaaagaaaatttcgtcccgaaattttactcaaataattctggatattgttctcgcatatcagactctagctcccaagtagcttcctcaaccacactgtttctccataggactttcaccaaggtaattgtcttatttctcaaaattctatctttttgatcaagaatctttaccgggcgttcattgtaagacaagtcttcctgtaaacccagtgtttcatagctcaaaacatgcgatgggtctgacacatatttccggagttgagatacatgaaatacattgtgcaccccagataatgatggcggtaaagctattctataagctacactgcctactgtccaatatctgaaatggaccaacatatctgggacttagtttccctctcttgccaaatctcttcaccgagagtccttttcgtggtgtcactcaaagaaacacatggttacccacttcgaacacaatgtctctccgcttcaagtctgcataagatttctgtctgctctgggctgtgatcattctagccttgatcttctgtatagcttcattggtgtgttgaactgcatctggccctaggagtttgttctctcct

SEQ ID NO: 398967 - DNA, 345 bp, Cannabis indica
tgtaagttttatactgtgtattagtttaatttcacgattgttccacggttgttttttagttgttccactgttgttttaattgtttagttttgttgtcttactgttgttttataaaacacagtattttgtaaaaaaaaattcatgagataaaaaaaattgtaaacttttaattaaaattcagtatttttgtaagaaatccttttatttttgatacaataatattttttggttgacgattcttttatatgtcaaaatatttgtatatattaattttatgattaccattatttggtgtgctcactatcttttattaattttatttatgtttgtaagtatttgaggaaa

SEQ ID NO: 398968 - DNA, 669 bp, Cannabis indica
tacggccttaccaaattgagacgtcgacccactcatagtactaatctagtctccttctttttctaatcgaaggcccatttgttcctttcgttcttggcccaaccaaagagataaagcattttccccctttagcatactttggcttggacagtttgtgtttaggtctaatatatgggtccagtacccctttgaagaccatcgccatgtggtccacttttcttttatccacatcagacttagcgcccatagtattccttggcccaaatgttggaacttatattaccaagatttaaatttactaacatgtatgttgattaacaccctaaatatgaattctctaaaacaataaaattaaatacataagaatttagaaaatattacattaatgcaacagaatattaatgtctccttctgttctaacccttgttcctttttgtcatagagtaataacaagatctgagcctggatctccttctctctttcggtttggttaacaaccgtcctccgcactataattgagtacttgacttactatgtatgggcatggtactctatctctaagggcttgaatctgatggaagaacattaagggcccgtttggtacgcaggattggactggattggattgaaaaggattggactggactggacaagattggattatgctga

SEQ ID NO: 398969 - DNA, 666 bp, Cannabis indica
attcaaaaacacaccactggaatccgaattcaaatttggtggagccagggacggatcgacctagtagtatcaatatgggggctatagcccccactaacaaaaatattaccttttaaaaaattaaatgtaatttttttaatttgataattatagactaaaataataaaaaagcccccacaaaattaaataaatctagtaagagtgattataatataagtataaatattttttaatgataaataagctcccacaaagtaaaaattctgggtccgtcactgggtggagctaatgaacaacaattaacttactatttatttatttaccaaatcagtcttatatatttgccattttctttttctttttcttttttttaaaggtttttatttatttaccttttttatttttaaaagtttttatatatatatttaaaaaatctagtttgtttctaaagaaaaataaactaagggtacgtaaggggcccgcttctagttccctcactgatatacgtgatatttgattaaatcgtagatagtattagatataggactaatagatttttctaatcattaattcatagctaattaaagagatctcatctcatataaacaggccgcgcgatatgatgattgattttttttatatatatatatatttatatatcaacat

SEQ ID NO: 398970 - DNA, 1650 bp, Cannabis indica
gaaaatacaattttaggtattttgtataaaattcattttattttatgtttaaaaattgtttaggtacaatgtttttgaatattattgtgtaccatatagttatgtgtgtaagttgtgacttattttgtaagtatagtagtttgtgcctagtatgttttgtttggtatcaatatatggtggtggttgttttgtgtttatcctaagattgtcgtgaagtagcagtgacatatgatctgttctgcagttagtagagataagtttttcttcataatataatatttcgaaatattttttgttttaataaaaattctcatgtgtgctaattaaattttatatattttatataggtattaacttttttagcaacaactcttgctttcttggttggattgagatggactcaaggatatctcaaagtaattcaggcggaagttgtagccctaatgatggttgcattggattggttgttggaattggactccctctcatttcttttgagcctgattatttaagatttgatctctgccttttttaagaggttttctttctataacgatttaggctctctatttgatgtatttttttagtttactgtccaattttcctaaggcgtcccttattcatgcaaatcattcgaccattatggctatgcatgaattagttgcgcacgcacttaggatggatggtgagctaattttgatgaagaatcttcgatctcttctttatgatgtactcaacgctaatttctttctcaatgaaattttgttcattgttaaaaaaaaaaaaaaaaattgtttaggtacattcaatttggatcttctttagtaccacacattgtctagcaattatctggtaccacagttcaggtctagggaggctagttatatttaagcaaaatacacctaggatatataatgtttatttttaaaatgttagtgagaactttggacctgatgttgttggtgaaggctttgaaagtgactctgatgttctttctatcatagccgatgaaaacttttctaactcttggattttggattttagttgttcgttccacatatgcccgtataatgagtgttttgatacttataagatatatgatggttgtattgttttgataggcaatgattctagctctaaagttattaggataagaattgttaacgtgaaaatatttgatgttgttgtgagaacactgatgatgtgagacatgttccaacatgaaggaggagcttaatctctttgggagttttgaatactcgtggctatgactattttgcaaaagatgatgaaataattatgaagaaaggtggctaggtagttgtgaagggtaagaaagagtttgtataaattagtcgggaagactattttgggtggagctatgaatgagaagttaagtcacaaaagacattcagttagtgtgaagaaatgtggcaaggtggagaagactctaatttcagttaaagattgtttgaagagaaaaggcattagtgaaagattgaagaatgtaaagataatgtgctcaagtgaagttcaatgagagtatgaactcgatgttagatgtttatatgcataaactgaaatatatgaatgcgtatataaaatgcggaatataatttttagtatcttaaagtgttggaaattatttta

SEQ ID NO: 398971 - DNA, 831 bp, Cannabis indica
atacacaccattttaacatatatgcagtctcctgggagctactcttaccacttaccatacagtgaagttcatattagaaaaataaaaataattaataacaataataattaaccaaactcactagtaatagtattacgtttgacaacgtattgtgtggtatagtcagggctaaccctgagaatatatgggcttaaggcggattaaattttggggccctcagaaatatacataaaaaaaaattaaaatgagtgttatgaaattcgaactcatgacattgtataatatgtcatacacctcaagtaactaaactatgactatttgtggtttacaatatacttaattttattttaataaaatcctaatatagttttttttttattttaagtcccccgaaatgacattatatagtagtagagaaacttttattggtttgtttagatggagagttcgaatctcactataactctttattggaatgaattatgcttgaccttttaaaagactagcttgctatgacgataatatgtcatctttaatgggataggaaccctcgaagtatataccaataactcaattaaaacagaatgatgtttaatacccctatagctgtcacatagtcttcaaaattagtcctcgagattattaaaattactgaaagagtgaaaaaaaaatctacaccacgtgattttttttcttaataaaaagaaaatactattaggtttggttttacgagttgtttagtagtattaggtttggctctctagcaccatagtaaagctcataccttattgtaccatatgctttaacacattgtaccatacactaccaaac

SEQ ID NO: 398972 - DNA, 676 bp, Cannabis indica
tacctcaaaaagaataaatacatttattaataaattggctgcataaagatatgtaagtacttatttgttagttttaaataaaatactttttttttatttatgtttataatgctttcaaacttatattcttgaaataggatgaattggtttcaacttatgaaaaatgtgccattgatcctgacgctagatcagttgattagcttgaaataagtgtacctagtgaagtacttggtgaaagacgtggtcaaaattgaggagtggggaaaattaaaggggaaatttttgtcgcgacgcactcaacctacttctactcaagatatacctatggatccaagagtggagcgttaatttgaaaaattgataagaacaatgttgtgaatgtctcgaagattgggacttgatgttcgtctacctactcatgaggagctgttacaaatgtcaatgcctccaccatagaagttttaatctcaaatgtctggaggtcaatatgcttcatcttcacagcttaggacttcccaatatcaccaagggcagcagagtcctcttccatttatgtttctttcgtcatcacctcagcaaatgtccatttttccttagttgtcatcgccgatgtcgcaaatgcaggtaatgaatatgtagcagacaccatagatgcagaaaatgttgggttttatgc

SEQ ID NO: 398973 - DNA, 549 bp, Cannabis indica
tttaatttataatataaaaaaactaattagaaattttgtcctcatatgagctaaattatacccttaaaacttttcaattcattaggtggcgtttatttggaaagaatgaaagtataagaataagaatagctattggaatagaaataaaatgaaataaaatttaaaatacataaaaaaaattgataaaaaaattggaataattattccaccaaaatgtttaaaaggtcattctatcagaatggtattccaataattttaaatgtaaccaaataaaggaatgaaacgaaaattatttccaattccatttcattacctccaaccaaatattatcgaaattgttgaatttggtaccattataattcgaagcacaattaaatacatatcgaagtttagaaacacaatttagtagataaataactatacattaataaaattaaatagaattagacaaaaatcaaataattgagataaatttttaatgatatgaaaagtttgagatatgatgtggagtaaaaattctatttaccctataaaaatataaaaaaatta

SEQ ID NO: 398974 - DNA, 1129 bp, Cannabis indica
gtcaccattgttgtttgtcttgggaatggaatacctttctcggcttatgaagaagataggtgagaagaaggatttcagatttcatgagcgttgcttggggctcaaattgaatcacctggcatttgcagatgatgtcttgctcttctgctatggagacaacaacagtgtttcctacttattaaaggcactcaagctgttttcacttacctcgggattgaatcctaatgcaaataaaacggctatgtacgaaatccactaacttattaattcctcattgcatccaccatagaacttggaattgcattatgagttacatagaacgctctatatgttccacgatatagatacgctattaattatccattgttataatcccaataatcaatgattctctatagatgatctacattgcatagggattaatttactgttacacccttcaatgtattttatctttaaaacacttagccacctataaatgatattgcagtgaactaatataatcagtaaaatgagtactcaaccatttaagctcgaaggaaatcatcgtttcacttctaagtccagatagaagctatggatttcgtatctatgattagcgctccaacttaattgtattatcatgttcccaaattgtacgtatcaccagaccaaaaggtaggcttaactaacaaatcaaagaacacaaataaccctcttgagatcgaacctaaccatgccaggattaagatcatttgatctaagatcaactaggtgatattgaattgaatggaaattacggaaaatttatcataactaatccaagttcaatatcggtcccttccgatccatactccatacatccagcccaagcttactttaaccaatgtcgtggaaaggacataacacttatccaaggtgcaagtaaactacgttgtagatcatcgtatgagttaaaccccgtgtactaataattctaggaatacatttaatcacataatcttgattagttaccactgtgctgacactactacaatttagtcctttagtgacgagcatgtttgtgcgggtcactaaagagttatgagtgatttttagtgacatgcacaattagactctaaatgttcgttgttagtctcatgtaatgtgt

SEQ ID NO: 398975 - DNA, 629 bp, Cannabis indica
cacaatcacataggcagacactctactagtgattagttatactactcttatctctttcttctttctctctcaatttttaactttagttaaaaataatttcggccacatcattattctgttaatctttaaagaataggatattttacaaaaataccaatttttttttattacttttacatttttactatcaaaatctattttttacatttttactgtataaaattttcaaaaataatatgttaaggttttaaaattacaaaaataatatatttcagtaaaataaaaaaataattaaaaagcaattctaaaacaacttaacaaacaatataaaaataactataaaacaacaaaaaaaaataattacaaagcaacacaaaaatatcaaaataatgatctaattacaatatacaaaacaatatcaactactcaatatatttttgtattacgattttttttacttaattttaataatttaatttatctttttgtatttctacattatttttttcatagaatttattgttactacttcatacttttaaaaacaaaattctcttttctttttttagttagtgacagttaaaataataatttaatttttaaaaattaaataaataattacattaata

SEQ ID NO: 398976 - DNA, 681 bp, Cannabis indica
tttttaaaaaagttcaaactatatattataataataagtaattttacggtataaatatttaaatttaactcccagttataaataaatatctaaatttaattttcagtcgtaataatacttaagttattctcttttgaactttgtaataactagtcgttaaatgtcaagtcattatccacgtgttattttcttatttgtatatataaattaatttttttttttaaaaaaaataaaacttcatgacctggatcaatcagaaattaccacgtggcaatttacttaacatttaacaatcaggtacctacaaagtttcaataatataacttaggtattattgctgctaaaaattaatgggtatgtactattttggactctgtattttgcaaaagttacagattggaccctctattttgttaaataacaaaatggaccctgtattttctaaaattgtaaaaataggaccctaagcttaattttcgacaatttgttttaatacaaccaaattgaagacaattcctaataagaacaaagggttttttctataataaactaataaagacagcattttacatttataccatataaaggaaaaataaccataaatagaaaaggaaagtttgtatttacaaaaacaccgacctaacaaaaaaaaatggaggaaactcctccttcttcgtgagc

SEQ ID NO: 398977 - DNA, 861 bp, Cannabis indica
cttggtgcttccttgtaaatggccaaaccaaagagagagagagggaaagagagataattttgtgttagaattttggaataagatgagtggggttccatctcaaaaccaattagcaatgggagaaatagttcattacttatatattttattatcttttcacacattaacaatgtgagactctctaacatcccctcaagatagtggctattttatatgctcaccatcttggacaactccatcataagtgactcttttttggctcactatccctgattacaagtggctcattttgctctactttttggatcagtattttttggatttttggtggctctcttttatttagctcattatccccaaatcacaagcggctcttttagctcgtctttttggaccgatttttgaatttggatcagttactcgttagagaaatttggtttattatgcttaaatgtaaaatatattgttttaatatactaccaaattagaaatagtatatattatatatacttttaatatttttttcctcccaaaaatatccttacatattataagaaaaatttggtttattatgcttaaatgtaaaatatattgttttaatatactacaaaattagaaatagtatatatatacttttaatatttttatcctcccaaaaatatccttacatttcaaaaaaacttctctctctcactctctaacgttaatcccgacccaaaaccccgatcgcaaggtctcgacgtcatcttctctcacagcctctcttgtttttttgcgtttttttcttttggtttaccacaattttttgtgatatttagcgatgtatttgtaataatataacaaatttgaggttagggatga

SEQ ID NO: 398978 - DNA, 832 bp, Cannabis indica
tacattataactactattactaggtttatttaattttatgagggtttttctactattttagttcataattattaaattaaaaaatttacatgtaattttttaaaagacaatatttttattagcgagggctatagccccacaataatataactaagtcggtcaatgtgtcaatgttccatataaatatttaaatttttaaatcacacccaacaaaaaaaataataatacataattttagttttacatttttttaaataattttaattatagaattataatttttatctatttataattgataaatacattattgttattattattatgtcgagtcatactttctagaatattgagtgtcgtgtcttttaagcttatgtttttgtgtttatgtgttgtatttttatattttatatttaaactcatatctttcggtttaaaaaattcaaatcatatttacaactaaaaatattaatgttcttatacttttatcttttttagatattcatttctatctttttttatataaaaaaataattttacaataataatgacagcaacctaataggtaactttgagaaagaataattagtaattttaaccaatttttatttaattttacctcctaaaatatatgacttattaaatattctccctaaaatataatagttacataattatgtcccttctgtcaggttctatttttttactgttaaaaattagtatttttaccctgaaacttttgaccaatacaaaattttgccccccttttattaaaaaatttattttaaaaaattataatattttatccatttaaagcaattataatattata

SEQ ID NO: 398979 - DNA, 553 bp, Cannabis indica
ggaaaacttaaacctaaagttttggctataattaaatatatagaaagagaagatgacatggagttaaagcaagccaagacaactaaagctatcaaagactcagaaaactctctctctctctctctctcaatttcacccatagcaaatcaataaaagtgtttgagtattaatctacacttatcaagacgatagttatggaattgtgaaagattgtgtagagctcaatatacaacttcgagaatagattcatgttctactcttgattatacattgctgaaggaatcaaataattagggatgcacacgggacggagaattggtggggagtgctcccctgtccccatccccattaaagattttaatccccatccccgcttattccccatcggggatggggcgagaaatcccctaatggaggcagggacaggacagggaatcccctaataaaaaaataacgtttataataaaatttttaatatacaaaaatattaaaatatataagaattaaaatattacacattaattattattcaataaactaattattattcaaa

SEQ ID NO: 398980 - DNA, 1132 bp, Cannabis indica
ttaagctacaacttacccgaagcaggtcatgcagacacaaatcaagctttaaaaattgaccaccgatctctggagtcaatttcactattagatcattatcagcggtcaacattagcctaaatttatttttccatatttcttggagtattttattattattttaataggacctccttccctataaaaggagagcttcagaaagtcatttttaagttcaaaaaagttcccatatggtcagagcatctctctctagaaattagagtatccaaacttagccatttttctataatccatctagtgagaaaataaaactcgaagtagacgtagctccattattgttgaagtgcagggagtgaactgctataaatcgttgtgtctctcttatttatacctaacttaaaatacattctcgccaatctagcgagcggatgtggccagacatctgtgtctagatttctgcgttaacaagctccttagtcctgaagtaccataactaagtgcaataggagctctaatgtatcttggtaactacataagaccttatatagctttctctatcaatttgttagctagatttagttctactcaaatatatagacattttacagggattaagcacatactttgctatcattagggtactgtactatttataaaggactattctattctaataattgtggaccacagttcattgtctacgtagatgcaggatatttatcttatccacataagattagatctcaaacaaagtatttgttcacttgtggtgacactactatatcttggaggtcaacaaagcaatctctgctggctacttcctcaaatcatgctgagatacttgcaatttacgagaaaagtcgagaattcatatggttaagatcaatgaaacaacaaatttgaagaacatgtggattaacatccaataaagaagtaccaacagtttttaatgaagatagtgctgcttgcatcacttatttaaaaaagggtacattaaagaagatagaactaaatacatttacctaaattcttctatacacacaatctttaagagaaggacgatttcgatgttcaacaaatttgatcaagtgataatcttatagacttattcacaaagttattaccaacatca

SEQ ID NO: 398981 - DNA, 807 bp, Cannabis indica
taaagacattttctgattattaaataaggagttaaacatttgatatatgtgtggatgttaatttattaatatttattattgaataatttatattgaatatcagaaaatttcttattcatatatgaggttgtggcttgtagttgtatagagaattaagaccacttagctatgaataaaacaatcaacatcatattaaagttatggaatctttaatcaatagtttctagtatggttcactgatgcccgttctatggtgcaaataatctcagttcggattagtgatgtagtgagatatctaagtgaatgtgctgtatataatagagattatatatgataaagttgtctttattaatatgtcgtctatcataaagacctaattcatatcataatgatgatcaatagtagatcggcctaaatcttgggttatcatgaactgttgatcatgttattagtttctttgattcactcgttaaagtttctcaaagaagataattcttacaacttttgttttgggaatataataatatggatggctaggaacatgatgtaaaattatgaaatcctaacttttctaacggatcgaacgttggttccctttaagtgttaattttggaacttgaatgttgtgcacaaattcagatggaatcttgaattatacttccactagtgaattaatagaactaatggataaagaagtaattagaaaggtaaaatgatattttgaccaaaactaattacaaaccaagacatggagggctaatcactaaaattgattatatcaatggacactatagttaaactcagtaa

SEQ ID NO: 398982 - DNA, 547 bp, Cannabis indica
tgtaaaaatgaaaaagccccaatcataattgtgctttaatgtattcagataaaataaatttattttgataatattttaaatggtaaatctttattttttatttaaattttagttaaaataattaaaaaaattagaatagaggacctgaataaatataagggttagggtttattcgcttaagtacattggcacataaagtacattgttatataggtagcgtttggtaacactttcttaatcagttttctgtttttaaaagtagaaaagtgaaaatatttttcaaaaacatgttctataaaactgtttttacttttcaattttataattagaaatcaaaattttaaaaacaacaaaaattacttttaatatttttttaaacagtttttttttcttaatcaatcttttggattacgaccagacccggacccaaatctcctccccacggccctggcgctgaacccggcttttgacttgaacccgaatacgaccccggacatagacccgacttaaataaaatacaaaaaataaaaataaaaatgaactttac

SEQ ID NO: 398983 - DNA, 686 bp, Cannabis indica
tccctcacagccgcttgttcgacgatgttcctcaccaagaatctcttgatggccttgtcctataacattagacccaaaaatactctaatttacatacaaaatctaaccagggtaccagagtattaaccaaaaagaagaattctagagagagatgcgattaccttagggcaacatttaccacagttggaacagcggataaatttcacatggccacgaccatgtttgtttcttccaccattccttcgcttgaaagtctgagaaaaaacagagagatatgaataatagtctttgattgaataaagatgaaattgtgtgaagaaagcttaccatgttcgctgctgaaccctaaacttgatcaagatctcagactcagagtatgtggttggggtcgagaaagcatgttatgaaaccagctagggttttacagtgttttgggctccttttgggccttgaatgggtcgggtataggaatacaggatttacaattggagaaaattacactctataccctttttatattgttctcttttatttttatccactttttaaaaatctatcatttttacctcttttgtcaaacattgtaccaaatttacccctatcacttcaagatactcttcatgtgactctctcatgtaagggtattttgggacaatacatataaaaagaggtatgtttcaattaaa

SEQ ID NO: 398984 - DNA, 650 bp, Cannabis indica
atcttatgcggtatcaggaggcctaatctcatggtcttaatagtgatttgacatcgactattgtgccttcagggatggtgttgcctgtagaaatccaattgggacaattcaatccattcgtggatgctggtgttagaacagaagcgagagcgatgggacttggggcagtgctgtctaatgctgctggatctattttgttctcgacagctgctcttttggttttctattttgaaccccttatttctgaagcggctgctttactccatggtctccgactttgtcttcaaatgggatattttcatgtgaagatattctcagattgtcttcgtttagtgcaaagtgtgggttgtaaagaaatttttttttcttgagtttcgtattgtgcttcttgatatttttcgtgtgtgggattctttttcttttattatattatctcgttgtaagtagactaataatgctaatgctcattagcttgcacaattagctttttctcttgagtcactgcatgtttggtggccggggttccctaattgtttagcatgatgtccgtcttttgtttagtagttttcttggcgatgtgccttataatattgatgaactttctttcaaaaaaaattattattagtttttagagttaaaataatgagatt

SEQ ID NO: 398985 - DNA, 831 bp, Cannabis indica
caaaaataatttttaaggttaccgttttaaattataattaaccataatataatttaaaaataattaattaattactaagatatatacgactaaattttaaaggtaatcaaaatgtatctcaaattatatgatataaaaataaatttttttatataaaaataactaatttattttttatcaacaatattagtaaccaaaaaactacttttaaaaacgtaagaaaacaaataaaaaaaattaaaaaacgtcagatccgtcagatttggctgacgaagtaaaagtagtaacgttattattgtaaattaaatgcaaaaatatatattattgtaaactttcctaaaaaaaacgcattcaagtgtcatgtgttaactccaaggccaaccttgtgctaagatgaggtaagcttacgcctaggacccactcagaggagcctctaaaaaaatttccttttagaaaatatacaattttcttttatattttcaaaaaatatcacatattcttaaacattagggcccaataattaactttttgaagaaataataaatattatgggttttaatactttttgtgtaaaaatggtttttttttccaaaaaagttatttatgaaaaaattgaaaaatataagaaaatcaaataaaggtaactaggtaccctgatgataaccataagagtaactagttaccataaaagagtaaccaacttatgctgtttttttccataattttttaactttttttctaaaaatatcctataaaatagcaatggaataaatatttaaaagattataatattaaattattaggaataatatatatgatggatgatgagat

SEQ ID NO: 398986 - DNA, 1050 bp, Cannabis indica
agtctgaggcaaaaagagcaggagtaggccccaatgaagcggtttgaaccattctgtccaaaagggatcccatatttaaaagcctaggcgttccccggagtactcgctgctaagagaaattgtcctgggcctcccttaggaccttttttcaaagcctccacctccgcattccctttcgtatattctgccatagcgtagttgtgcttggaaatccggagctactgtgtttcctcgtcagcaggaacgggggtcaggacatactcggaggacagtgactcctccgcctcgggtgggatccctgaatcagagctgagagccagagtgtcagctctcctgggcttcttggaaacctcgacctccaccatcttgcctttgcccttccggtccagaggggtgagaatctcgccctcctcttcctcttcgacctccccatcctcgtcaatcaaaacaatttggcttaagtggaggctagaagaaggattccccactactacaaaaaatatatttagcaacacttaattaacaacacttgaaacaaaagtgttattgctatgtttattttactaattaaaaacacttttaacaaaagtattactaaaagattgtacatgacaaattaaatatttttgttattcaaataaaatatcatacgacaacacttttagaataatagttgctatattgaatccatattaaaataaatcaacgctttctactaaagcgttgttatttgaccaaccaaaaaacaattctatcttttgagaaagaaaataaaaaaaaaagaaagaaaaaagacttctgaagagcacgcgtaaacaaaatggcggtattgtaaatttttaataaccaaaaattaattttcccccttcattttgcgcgggcatgatgaaaaaaaaaaactcaatattagggcatctttctgctaaaaaaaaatacctgaataacctcaatcttagctctctctcatatgttcatgctattcttgttaggttttatgccctaaataaaactccatttcaatgtaatctattttattcaacatcaataaag

SEQ ID NO: 398987 - DNA, 754 bp, Cannabis indica
cttttttcaataaaaaaatctacacttttatattatgtaatgtgaagatattttggttacatctaaaacttacgtgtatacactataataattattaattatttaagttaaattaatacatttgaacatgtttttcttctaaaaaaaaaaaaacatacatttgaataatttttaagtttattttaaaaaataatgagttatcatcaagtaagttactattttaataaattgtattcaaaatttaatatacaccaaatttaatcctacaatcgtcgttcacccagagacccatttgaaagaataatcggaggcccatttgaaagaagagaatagattagagtgttgcagttggagattttctgttgaggctaataatttgaatccatggaaatcaatcccagaagaatgttgagttgattgtgcgaagagtgttgagtgttgagttggtcggcgatggaaaagacgtgtggatcttcgacattgatgaaattttgttttctaatcttcctttttacgccgaccacgggtatggatttcgccagattccaggtggtttgagtttgtcgtcggttgccatcggtggttgcctaaatgaatagtggctgaagtggtagtccgcttttcttgcgtgatggcgagtttggcgagaaactctctcttaattaataactgctttgattattattattattatttaattaattaaaatgccttcttgaatttattttatataatcttactatataattatttt

SEQ ID NO: 398988 - DNA, 428 bp, Cannabis indica
ctatttgttaatttaaaagttttgttgagaaattggagtgaaatgattgatatttcttgctgaaattcgttgaaaggcttgctggtttttgggtttggaacccagatgccgcgacatgctcacggcccgcccctttttggtggaaccaaggttttgtcccaggtgtcgcgacatggtctgggcatgtcgcggcccgctctcttgtttttgggcagtttcgagttgaatttttaaaaatgcttaacttttgattcaaaactccgatttgggagttctttatatcgttggtaagctcgttccgagctctgtatgattatgtgaattttcaatgccatgattgaattttaagagtatggaaccaggggttaaccctaagtgtgaaattgttggaaattattttaccaccatcttagatctactcacaagta

SEQ ID NO: 398989 - DNA, 755 bp, Cannabis indica
ttgtatcatcttacaaagatctttgtcttttaaaactgaaattcaacgacatgttacctcatcaaaagattcgaatatgtcaatactaggttggtgaatggtgcagacaattgttctcccagtatctgcaacattcttcactgctcgcatgactatggcagctgatcttgcatctaaaccagttgtaggttcatccataaagattacagatgggttcgaaacaagttccacagctattgtaagccgcttacgctgctcatttgaaagaccactaataccaggtattcctactaaggcatcctttattccatcaagttcaattgtctcaagaacttcattcacaaagtcctgttacaacatgtcatacatatattatatcaaagcttctcaacaattttagatacaagtggggagcaaaaaaacttgataactacaaataaaaaacttacagctttagtttttgcatcaatcttagaatctagacgcagccaagctgaaaaaatgacagattcttctacagtgatttgcggtgaatgtatgtcggtctgctcacagtatcctgaaatcctggcaaatgtctcttgaactttaggatacccaccaattcgaacatctccttcgatgtaaccagtggtttttcttccagctagaacatcaagcaaggtagtttttcctgccccactgactcccatcaatgcagtgagaactcctggcctaaatgaacctgtaatatcagctagaagttggagtttttt

SEQ ID NO: 398990 - DNA, 660 bp, Cannabis indica
tcacattggcacttagggacaggactcagaagattcttcagctaccggatgctgctcggaatatcactttgttgacctcgaaggacaactttgtgaagtacacttcgacaggtagcattgcttctgagccaaatgctagcgagaagggaatgtgtccctttactgtcttcttggtagtattgtgagcccaaagtacctgaggtagctcgtccacccacctgcctttggcagcatctaatttcttcttgatagtatccttcaaggttttattaacaactttcacttatacatttgccagaggcctagacactaacgagaagcttttaattattttgttccttttgcagaactcagtgaacaagtcgccatcaaactgggttctattgtcgaatactatcttcatgggaattccaaacctacagacaatgttcttgacaacaaagtcgaggactttcttgcatgttatggagactagagattcgacctcagcccatttagtgaagaaattgacagctaccactgtgtacttggctcctcctcgccctgtggggagtgccccaattagatcaatcccctatacagcaaatgggtaaggagaggtcatcatccttagctctgttggcggtacgcgaggtacatgtgaaaacctctgacacttat

SEQ ID NO: 398991 - DNA, 713 bp, Cannabis indica
taaattattatttggtagttcgacaagatcgaccaattcagttacattcttagtaaaaacctatttaaccacattatgaaatgaaaaattacattatttaaaaataaaaataaaattacaacttaacaaaaaatataatttaatctaggttacttttaaaggatgcaactcttaaaaataggtttgtcgatatgtattaagagttagtcccacattgctaatgtgtggaaataaattatgagatataagatgaataggctactcctcctattctcaattggttttgaaatggaaccccgttcatcttatccccaaattcttaatatagtatcagagccccttgtgatccgttgtgagcacaaattgccaccagtccaaaaagccatttatgatccgttgtgagccaaagtgccgccggtccaaccagatacttctgttatctcccctttaacctccatttgggacctttcatccaatgtatgccagtttccagtattggggtctttgatctgtttcaaaattcacaaataatttcttgacgtgtacacccacaaatttctcgatattttgccttgtgggattctttcaaatgtcacattcggtcctgtaatctcttaaaggtcgttcgttatacctacactttccatgcccaaacgtgaggagggtgtattaagagttagtcccacattcctaatgtgtggaaataaattgtg

SEQ ID NO: 398992 - DNA, 621 bp, Cannabis indica
tcactcttgttgatgatcatactcgagtttacatggagtatatttagcttctaacactaaagtctgatgttacccactactacataaccacaatttttacattatcttcaaacacaattcaattgaggttttcaaaaaattacagatccgataatgcgcctgaatagttttaaagatctttttttaaacatggcatcatgcatgatttcacctgtgtagaaacactcgaacaaaacgctattgccgaacgaaaacatcaacaccttttaaatgttgcccgtgctttatattttcaatctaaagttcctattcggttttggacagattgtttaatgacagctgtgtttctcatcaaccgaactcccactcctaatcttggaaacaaaactccttacgaattactttttaatgagttacccttatgctaatttgagaagttttggttgtcttgtgtttgcttcaactcttacagctcatagaactaagtttgaaccaagagctcggccatgtgttttcataggctacccaagaggaatcaaaggatacaaactctatgacataaattctaagcaaatctttatttcaagaaatgttatttttcatgaaagtgtatatcctttt

SEQ ID NO: 398993 - DNA, 535 bp, Cannabis indica
aattaatcaattacagctcacaggcctgaagatgctctctaagtgcaaagtgaagcttgtgagttggccttgagataactttggttgtttcttaagtgacttgaacatgaatcctcagataactggagagtgctcacacgtgtgacaccatccaatagtcatgatgaagaaggcctagggggatttggtacgacaagtgaccaatgaaggcacttctttgatcacttgggggcacataggttatgttatggtataagagagccatatgttacacgagcatacaaatttttttttgcacatttgtgtaagtactctcatggtaatgataaccttaagcaaacagtgacgttactcctaataatcgagtttcttaagacatggtgtactgtgcaagcattaaagggttaagtggtaacagagaaagtaaaataaaaaaataaaaattggaattgaagttttattaagctggaaatatttttgatttaactaaagtaaaattctaattacattttactaaggcttatccacatcgaaa

SEQ ID NO: 398994 - DNA, 547 bp, Cannabis indica
agggtataatcaaggtggagggtatggtgcaagtaccaaccatcctagtaaaggaaagggaaaggaaaaagcaaagtcatccgctccagcctacgctttttgggttgatgatgtacaaggtggtgctgaccagagagttgttgatggtatgtacaaggcagtgtttcagttattgatgtgttggagcggggtgcatctacaatgatactacaaataaaagcaactgtctctaaaatagctcacttcatagtgagattcaccttacctcgtgtaagtgaatcgattaccccttatttgacggaataccacgaacttgtctgtaggttaagaggtccatcgctaaggtatggctcctatgctaagagttgaacatggcattaacatagtgaggattacttcagctaagcttggatgaaaaagaaattctacaactactacatcaaagtatatccttttttctttcaacttagctcacagtaatctatttgtacttaatttaatgagaacaagcataagtaaagtttttttggtacttcatttaaattaa

SEQ ID NO: 398995 - DNA, 718 bp, Cannabis indica
aaagatgagaaagatatctaaaatttctatgttttgatttttttcaatatataatcagaacatagttgaatttaggttagaagttacagctttatttttcttgtaaagtttttctacaaaaacacaaaaataacaaattaatactaaaactaaacaaaatgaataaaacaaacaaaacataaaaaaaaaataaataaacctaaaagattataaattaacacaaattcaaaagattaatgatgaaaaataactcaatttcataaagttaacacatgtcaaattcgtgttaagagactcatatcgtgtttaacccgtttttatttcgtgtcgatctgttttcgacctgcatcatattttaccgaccttaacccgtaacactcgtgtcgtgttcgtgttcgtatgttgtgtcgaaattcgttttgccactcctatagtggtgcctagcaccatctagaggtagtgcattacgattggtttacaatattccttaaaggttataatatagacccaatacttaattgcgcaaatagagatattacaccaagggggtgctagatacaactggcgtcttttagcacttttctttaataaataaaatgatgtgacatgttagtatggtgttgggcaacttagagcactctcaacaacttttttattctatcatttaaaataaattaccaaaactctactttatctattttcatttttacacttcaaa

SEQ ID NO: 398996 - DNA, 524 bp, Cannabis indica
tatctgattatctgactcaattctcctaacttctattcttattttcctagtgtgtatacatagaggctacatcacacttgaaatgttccccgttttcaatctttctttttaacagtccacaaattgcatactgaattagcagcaaccgaattcctcgcaacaagctgaaacagggaaactttcataacagattaaaaagaagaaaaaaacacaatataatgtgaaatctttgaccttaatactgatgatatcatataaaactataccccccttaaagatgtttaacatatagaataagagaatctgggttggtaatgttggtcatcaagacacttggagtaatttctgtagattgttgtatggcaataatggtcttggatcatggagtttgttagtgaacatgtttgaaaaatgtacataagaatggactatggagagggaggagttcatggagattttgcattgacttctgcattggctaagaaaaaaaaaccaaaaaagagtggagcatttgctgtttagag

SEQ ID NO: 398997 - DNA, 1024 bp, Cannabis indica
tactactagaacagattaaagcagtagggtcacaaacagagacaggatgttgtcgaattgggggttgtgagtattcttcaagcacgtacagtccatctttaagtgttcccttgagcagcactttcccagtgtgtttgtccttgacaaagcaacatgttttatgaaattcaagaaacacataattgtcatgagtaagttgtgaaacactgaccaaattcttggtaattgaagggacatgaagtactgaatttaatttgagaggtaaagagttgtaagactgtaaagaagttgatccaatattagagatggatagtttcttaccgtctccaactgctagaccttcttgacccgcgtaaggagcagctgaatccaggtttgtagtggctgaagtgacatgattagtggcacctgtgtcgacaaaccagctagagtcatctccaaagtcgggcagaaaagaggatgcatatacttgaggatcatactcgacttcttgctcagtgagataggcacgaggggtggactgagagttggtggatgactgatgtgtggtgcctggttttgggggaacccaattcttgtcgaatcggtaatggcatacgggtgcagtgtgtccaaaccgaagacagagttggcacagcggtctattgttctgagttgggggtcgatagcctcctcttgtaaaattcttgttggtaggagggcgatatggtgtgtttcttgggccagagacagccatattcgcctgaagtttcatgctgagatcagcaacagtattgtgatgatcgagacgactttcatgagcaagaagaagcgactgaacttcttcgaatgtaagatcatcactgcgcgcagtgatgccggagacaaccgagtcgtattcaggtccaagaccgtttaaaagttgtaagatcaaatcttgatcttgaatcggagaaccagctatggccaaggaatcagcgattgtctgaactttgtcactgaagtcagagatggactgtcctcccttgcgaagcgtggaaaattg

SEQ ID NO: 398998 - DNA, 676 bp, Cannabis indica
aaataagaatttcagctttacatgcgtatccttttttaaattgatcgtatctctcactccatatatgttttttctcatttcgtaaatggtcatttcttacagtacttattgaactcttgtggactaattactgctggcctgcaatggtgggttgttctgggaacattgtattggtggtatcagagtcatccttccctttttactatgtgtatagtttagttttcctttcttgaattttcttgttttggaggtagccgttcttatggagatagcaagcattgtttcagagttgtttaggggttctagctaaacatttaattataaatatataataaataaataagttagagcttataatataatgcgtaataaataattataaacttaatataaatattgtaaataaacgtaattatagcataatatgtatgcaaatgaacgtaattatagcataatatgtatgcaaatgaacgtaattatagcataatatatatgtaaatgaacgtaattatagcataatatatatgtaaattataaacaaaattatatgtatatattgttaaatacgcatataagtataaatatatgtatagaatatgtaacacacaaatttaagtagttcgacagaatatcatttacttacgtctacggtagcatttaagctatgattaggttt

SEQ ID NO: 398999 - DNA, 902 bp, Cannabis indica
catcaagcactcaaggcagcctcctgcactccctcctaatgttacggatcgcgaaaaaggaaaagcagttatgataccacagtcgactgattcagagtacacttctttaactccatcttttcccgcactctcctgtggtctaaacaacattcctactgttgggaatcctagcaatgctacacttgttactcagaaatgtatcacaacacatactcctagatcgtcctctgtgaagaaggttcccctgccacagtcttcacaaatgaattcaatgcctgaatcatttggtgttaaaagtttctctagtgcagcaactgaccttactcccccaaaattctcatccacggctgctataacacaccataagacggtggttttatctactgctacccctccagcctacttacatttaagtgatccccacttatctagttccacaatgatgactatgccaataccttctgcttccaaaacatttgtttcttgaacaattactgcagttccgaatcccgcctcagcaaaaataattcacccaactgaagttgcacctgatgcaggaaataggatggcttctcttttccccaaaagacaatttgtttcctcaagtggcgatgttcgccaagtgctcaagcgttgtcgcacaagaaatgccccctttactgatattaccaacatcactgaatcgtctccaaaccttgactatatctctatttcttcaaacaactcactggtcgaggacaacgaaggagactctttggccaaggctgttacacagcctcgccaatcacaatgattctgcttaattggaatgctcggggcttgagcaatccgagagcattccatcaacttcgtttgctcatttcacaaaaaaaaaaacctgatgtaatgtttattatggaaac

SEQ ID NO: 399000 - DNA, 529 bp, Cannabis indica
aatgtctgacttatatccataaacattgattaatttgaaaattcagtaggtccatgaatgacatggaattatagataagagccactcatatagttttacagtttcatatagccacatctttcatgacctacttaagatatatattttgaaaaaaaaaaaagcattaatgttttattgctcatcattgttgttctaatttgttttgttacaatctgcagaaagaacacttggcaattagagaaaagaaaaaaccagaggaccccattgacttaaatgacctcaaatcaatgaggtttactcgtgcggtaagagatttcaatgcctttttaaagatgctctatctgggtttattcagacacttaagaatttaaagcattaacatctttttgctttaatttttttaattgcaggtgatttttgaaacctcgagattagctacgattgtcaatggtgttcttagaaaaaccactaaagacatggaactaaatggtgagtttggaagatttcaagcctagattcataggtcata

SEQ ID NO: 399001 - DNA, 931 bp, Cannabis indica
ttataaaaataaaaaaaatacataaattaacctaaaaaaatttattaattagtatataaccacgcaaagtgcagttatgtatgaaaaaaatagtaagattgaaatttgatgggctatagagttcaagaatatgaccatatttccactatttgctctaaaacctggcctaaagagaattctgaaatgaaatgggttaatatcatttagaatagaaaaagtactccaaagcatatactcattactgggtggcatgttggggtagactccaaagtagacatttagcttttgaagtttggtgtcattgactcggatagttgtcttttttgtgaagggaatatagaaactcaccaacatctcttcttcgattgtgattatagtaaaatgatcttttatgagttgtgtgattggattggcataaagcttcataaaagtgagttggtctatagtcaaaaattgatcaagaagtgtaggggtccaagttaagaagagaagtgtttattgctttgataaatgccttggtctaaaatatttaggatgcaagaaataatactttgtggaatgctccaatttttacttctaattttcttgtaaatagaattaaaagaaaattttattttaggttttctcaattcaaaaaagagaaagctagtatagaatattgaatgaatattagatagtttaagtacaacacattaatttttgttattttttaaaaaaattaatagtttgcaataaaattcttacttacaaaaaaaaaaattgaaatttgatattattggagaacattgtcccacatgaattaaatgtaaaagtattgaactatatataaagaattgtcaattggttttgagatggaaccctatgattctcaaccgatataactttattatttttctatcattaaataaaagttataatttattaaatatat

SEQ ID NO: 399002 - DNA, 657 bp, Cannabis indica
tttaaatagttaaaattggggaatgaaagtattttttttttttactttggagattagtttatatatatattttcaaatagaaaatttatcacaaaaatataaaattttaaattggtaaatccgaagctaactattgttcgttattattttaaaataaacacaaaagttgatacattttttatgatacaataaagaaatatttgcagcacaacttaatgtagtgcccgtaaattataaaaataaaaaaaatcataaattaacctaaaaaaatttattaattagtataataaccacgcaaagtgcagttatgttatgaaaaaaatagtaagattgaaatttgatgggctatagagttcaagaatatgaccaatatttccactatttgctctaaaatctggcctaaagagaattctgaaatgaaatatgggttaatatcatttagaatagaaaaagtactgcaaagcatatactcattacttgggtggcatgttgggtagactccaaagtagacatttagctttgtaaatttggtgtcattgactgggataattgtctttttgtgaagggaatatagaaactcaccaacatctcttcttcttcgattgtgattatagtaaaatgatcttttatgagttgtgtgattggattggcataaag

SEQ ID NO: 399003 - DNA, 628 bp, Cannabis indica
ataaaaaaaattacaaaaatactcaaaaattttaaatattcttttattttaaaaaatttatttacagaaaatatgaacttttatgttttcatgaaatttttgcgtgcttttattattatttgtatattatttttagagtaatttgtggcataaatacttaagtttaactctcgattgtaaataaatacctaagttcaatttttgacggtaataataagtctgtaagtacctgaccgttaaatgtttagtcattatccacatgtcattttcttattgatatatataaattaatttttttaaaaaaataaaaattcatgacttagaccaatcaagaattgtcacgtgacaatttacttaacatttaacaaatgagtacctacagaggtacgaaaatataacttaattgccaccaaacattaaacttagatatttatttgtaattaggagttaaacttaagtatttataccataaattacttttatttttttgttattttcatataatttttttattatttgtgtgtttttttacaagacgtcgaataaatataaataaggaattattacataaaaaatataaattgacattttatttacaaaaatacttccataaggtaaagacaacatt

SEQ ID NO: 399004 - DNA, 667 bp, Cannabis indica
catttttttcctaaatttatttttttaactaataatgcatcatttttttcctatatatttttatttatttgttaaaattaataaaaaaaaatctgaaattcttatcacataaaaatgtaatttactatagaaaagtttaaaaatttaccaaatttttttaaattccactaatattatcatcaataataatgtaatatgatgattacatgaaataaattttactctaaaaaaaatacatgaaataattaactataaactttttatatattgttctagtcttcaatttactaagtacggctcctgaaaaaaaaaatgtcatagattatatgttgacattcttctattttatttttaattgaatatacaatatctgtacatttttactattgctattacattttatgttaatgtaagtttttttttttacttaaacaaaattttttacttaggaaaccatttcactaaattatgtaacagatgtaaattttacgtatttcgatcatttatttattcagtgtaaatagtatgtacaggaccacgaacatacatataagttaaagaaaagaaaaaaaagaaacataaattgaaaaaattaaagcttattactggtatgatacctgtttacaatcttaatattatttacgataaataaaataaataataaaaa

SEQ ID NO: 399005 - DNA, 359 bp, Cannabis indica
ctaagagaactggaataggcagttataattaagagaaaatagggatcataatgagatttgttcagagaggggatcaaacctgtaagggagacattaatggctgggcacgctttctcccaaatcgtcagcaaggttgacgattccgatcccagctgagagaaggctgatggatggctgtcaatcgccattaatgttgaaccaccacgacacggagacgggtgggaaaaagatttttgagattcatcactactctgaaaatttgaagaggaagaagacgagatctggacagccagcatgcttgttgagagacggagaagacgaaggcttaaggtatggctaactatccagctaaccttgtt

SEQ ID NO: 399006 - DNA, 984 bp, Cannabis indica
atattgtaagggtagtttagggattgtgtatatcctactaggcttatatatacatatatttacataaatttttaaaaaattatatatatacctaatatattatgtaaaataacaatttataaatctaacacatataatataaatatatttcaaacttaatagttcaaatgtctattctatttttatatattatataaaatgtgattatgtaacgaaattcttggtttaacgattctttttgagtttctacattaattttaacagaatatcctattaattaacagaatattttttttattaaatttataatattattatatatatttaaaaataaaaattatgtagatattttatataaagaaattttaatttagatttaaaatatttttaatcatattttaaaatttattggcttaattttgaattaaaataaaaaaaaaatcatataaatattttatataaagaaataaagacactacaacaaatttttgtattaccggcggagacatccgccggtattaatagcccagaccgccggtaataattaataccggtggaattcgctggtaattatctgccggtattaatcggtcgctataagtgactattagcgacgaaaatagtcttccaccggtaataatattaatatcagcggattaatagcggtgggatccgctggtattaatgtctgcacttttacacgcaaatacattaataccggcggaccacaatcactgttccgccagtattaatatttttaaatattaaaaaaacattattttaaatatttatataataaaattaattataattatatatataataattattttataaatatattattaattagaaataaaacattaatatattaagaaattaaacattcatattaatttgtccattacaatataaactatattatcttaaataaaattagaaaattgtctttaaataaacattaaaacataaaaattgacataa

SEQ ID NO: 399007 - DNA, 584 bp, Cannabis indica
caatttatgctgtattttgttccacacctcacttgttggagcagcgggtagctggtttaacaagtttactcaccattcaataacttccttggagcagctgtccagggatttcaagaaacaattccaggctgctagggatagacgacccgaagcggcctcgttaactaatataaagcagcaacccggcaagacacttaaggcatacttaagtcgttttagcacgactacggctagggttaggaatttggatgacagcacgcaacttacaactcttcaggctgggatctctacttatccattaaccgcagggggcgagttttgggatgacttacaaggatatccagtgagaagcatcactgagttcaacgaaagggcttaggtgttcgttcgtaaggaagaagcccgaaaggaaatgaatctgttgaaaacatgctcaggaagcaaacccagcaatgcttcaacaggtactgtttccacgagaattgataactcggaggcttctacttcgaagaggaaggacgaaattaaagaaccgtcgaaggataaaaagaaacaaaagaagcatgataagtacgtgccagtgt

SEQ ID NO: 399008 - DNA, 568 bp, Cannabis indica
agtaagttgtacaatcccacattatctaaaaaaggtcaaatactatgatattagactatataattgtgagactacataactgatgaaaaattaatggattgatgggtattaagatgcattttcttttcggtagctaattacttaaaaaatcaaaattaagtatgttttgacattgagcaatcttagaatgaataatttttaaaaaagtttttcccgagagcgtgcgaataaaactagtgttagtttgaacgtgtaaattagtcgctacaaattttgtaacccctattctttattgttttgatactatttataaaggttaaattatattattgtagaaaatcaaatgatgagacgaataaattaagggatagttacacgtaattaacctattgatttattgcaatttgatatgtgtcattgttaagtgtaaatatggttagttctcaagtggtccttaaaaatgggattattgatctatttgcttttttgtgttttcggaaggtagatagttaaaattttttctttaaatttttattgtatcactttcaaataacatagaaaaaaacta

SEQ ID NO: 399009 - DNA, 664 bp, Cannabis indica
gtaatatatatatatatatatatatatgtacattaagacctccattgctagttttttatttattttttctttttttaaagatatgtttctaaacttttatatataaattttttgatgtatttataacaataataaaaaaaacttttcctataaaaaaaatgagggggcttgtgcaatggcccaagctacccaaagcttggatcggccttgtatccactcttaggaaaagatctcgattgttgaaagatatacccaaggttttgcatcttttgagttttgaaagatgagtcctatcagtaagcaacatcctcccaaatcaatttgaccagtttagtttctgtacatttatattgatgttttggacttacattaatttttattattttattaaaatttatattgattggataattttttgttgtgttaacccatattaagtgatatgtagttaatgagtttagcatttatgtgtgtaaagtctattaaagtagaagcgtggacttttctagttaactaaaatctttgaggagcatgtctagtccaactatagttatgtaattatgtctcttttctaatttataaatacatattgtctcatcacaattgtagacttcaaataatcaaataataaaattacttctaatttaaagatactgggagaaag

SEQ ID NO: 399010 - DNA, 629 bp, Cannabis indica
ttcataatataatacttaatataaaacatagaatacgtgcatcgcacgtaacaatatactagtatatatatatatattactcaataccgttttaaaaaatatatattgtttgatacaaaaataatttactttcaatatgatgagtgccttaaataaataaatacttaatggagttgtgtctcctataaaaaaaaaattaatggagttgtgtcaaaaataaaataattgagatgtcacaattttcatatggacctgtccacacctaagttctattcagctcatctcacgcgtgcaacgaataaatgtagacgaacaacacaaactattaaaataatacagataaatatatttttttagaaaaaaaaaaattatgtactccatcaataataataataaaaaaaaatcaattattattatttgacaactttcatatgtaccaaaattgtgtttctgaatttaagaatttttgtctaattttagtaaaaaaattctaacatgatgaaagtttaagggatgatttagtaagtatgaacgtatgaacgttagagacatgatttgatagatatcaaagttaagtatgacttattgaatgaaattagacaaaaaaatttaaaatctaacaatctcaa

SEQ ID NO: 399011 - DNA, 820 bp, Cannabis indica
tgttgcttgtgtatgtggatgattttattttagctggcaataacatcaaggatcttgaagcattgaaaatgagactcaatgacagatttaaattgaaagatcttggagaacttagatactttcttggtcttgagattggaaggtctaataaaggcatttttatctcccaaagtcattatgctttgcaattgttggaggatttgaggtatttgggttgcaaatctgtcaatactcctatggagattaacttgaagctgagccaagatagtgatgacaagctagccaatcctactctccacagaaaaatcattgggaaattgcaatatttggttataacaaggcctgacttagcttattcggttaacaagcttagtcagtttcttgcctctcccaaaactactcatctaaatgcagctctaagggtcctccaatacgtgaagggaacacctggacagggtttattttaccctgccaagtctgatatcagacttaaagcctataccgatgccaactgggcatcctgcgttgacaccagaaggtctaccaccagtttttgtgtttttcttggcaattctctcgtgtcttggaagagcaagaagcaacacattgtgtctagatcttctgcagaggccgagtatagggccatggccaatactacttgtgaattggtttggttactatctttactcaaagaattggggattgagcatgaaagttcagccatgttgcactgtgataataaagcggctcaacaaatagctaccaatcccgtttttcatgagcgtaccaaacatattgaaattaattgccacattgttag

SEQ ID NO: 399012 - DNA, 951 bp, Cannabis indica
tttggatttatttaaattacagttagtatactgccgaattttttaaactaaaaagggaatatgttcttttattattgttgtttgcttgctttaggctatattgattactagtgagagccatgctgatcataattttgttcatattattctttcaagacctagtttgtgtgatcataggtagatcaagtgtgcactcacttatagatgaaaaacctagaatctgtataggttatggttatcaggtgtgattactcagtttagaatgtcattttctatgattgatattgagagctcgggatctagtggacggtgtgatatacacaggtagcttgtcgcttgtgattatttgtagtctctctatttaatttatatatgataatgatgatgatgatgagatgttttgtttttaaaaactaaccatgcatagaattatattaaactactggtcttttgatattagttgtttctctattgggctttataagctcactccctatatttcctttctaggaaatcaattcattccttatgggatgagagagaatatttgatggagaatgatgagattagcttagtcctatcttaattattaattaattcttcatttaaagatggaatacgtatctaattattaattgatgatctgtatcatggaaatagctacgagtagctaggtgttaaagcatatttttcgttaaccaaatatgaggctaatagtgacaatctcacacagaaaaataaaattagtaaagaaaaaagtataaacggaaaggattttttacgtaattttgcagttaagattctgcatagtccacgagtcaatcttattagattgatagtttttcagggcttttttcttatgattttttttcctttactctttttatttctgtgtgacattattgttgggttttgtgccctaaataaaaaccatttcaatataatcagatt

SEQ ID NO: 399013 - DNA, 878 bp, Cannabis indica
gtgttaccaaacgccacctataaaaacaaaatttttaaaagtgtaaataaaagaaaaaagattcgtaaaagtgaaaaaaatgtaaaaaaatatatttttttggtgtattgtgtaattttttcaaaattattaataaaaaaataaaataatcataaattaaattttatcttttaattattataacaaccgcacgaggtgcttatattaatttatataatttatagaaaaaatattaaattagttaaatgatatttaaaactgtaaatattttaattattataaaaagacagtttaaattatttaaaagtctgttattattaatatttagctcactaaaaaaatgttatatttttaatctatatttccaattataaaagaaggaaaaataaaaatttatttaattactataaataacttgcaagaatagttttttttttttttttattgttgtcctataaattatttttgtttatcctaatttatatatatcgtataatttaaaaaattaaaaaataatatattttcaatttcattcataattaattaaaaatctaatttattttaatataaattttaaaaaatgattaaaactgccccaacccaaatttatttcctagttatattataaagatagggatagtggcggctaaaccacctgaactttacggtttgtaacagataactacaaaaacttaaattttggcggcataactacctaaaccctagttccattttgctctgtacacctctgtccaaaaatcacagttaagtgccacggtggactgtccacgtgtacacccttgtacacgtggcaaacttttagtggtccacgtaatattagttttaaaaaataagtataaatatttaaaaaaaattaa

SEQ ID NO: 399014 - DNA, 537 bp, Cannabis indica
acatgcatcaaaatcccagaatttagatttgagcaaacacaacaaaaatcatgcttaaactaagcaaaactcaagctcaagaacaagagctttctcttcaactattctaacagttttcaagccatgaaaacattactttaaacatgaaattccaacctaaaaataccatacaatctctgcccaagctcaacaacaaatcaaataataaataaaagctcaatttcacaagattaacaccattcaccatgcaacaagaatattcaaaactcaagaacatgctttttactctaaaatttcagcaagaattcaacatttattttcaattaatttagcaagaaactaccttaattccttgcacaagctttaatccaacctttaacaccacaaattctccaaccaacactcttaattcaagctatttctcacaaatcaaagtttgaaaactaagagggtaagagagagggtgggttcgggtgagagagagagagaaccagaaaatcaatcctttcctttcaaaaaccatttaattcaaagtaa

SEQ ID NO: 399015 - DNA, 801 bp, Cannabis indica
agattgaaactattgttggattttctcttagcgacgtacttgattaggtacgagcaatagtgacatgtgagtaccgggctatattaggggcttgtcttattaggaaatgtgatatattagtgtcacgttgtggcacgggctcacctgattaggtggcaccttgatattatatatgatgttaaattatgacatgggcttgcctgattattaggcaatgcaatataagataatttctattcctatgcatatgactagttatattacccactcttgaatgtttttgcttaatcattttataatagtgaaatgtattattagttatttaatgtattcttctttgttacttttcttgctgagtttatgtgactcacgggtgttgtgtggttcaggtaagggcaataaaaagttagaaaaactatgagatgacagtagtaatgtacatattgaccctatcggcatgtgtgccgagttgctaggagttgttttgtactgcatctactgtgtatcttgattttttgttttgaattgttgttgtatattatccttttgtaaaacttttacaacatggatccttggaacacgtttttaatgtctttatgatgtctgtttttagtattttattttagttaaattttaaaattatcacggatttttaataattaattaatctattagtattaaactagtttataaatcacacatgtgacgtccctatgggttgggacgttacaggtgtcgaagtttatcaagtggtgtgagcagcattatagtaaagaaactctccagaaaatagacttcact

SEQ ID NO: 399016 - DNA, 501 bp, Cannabis indica
cgaatcaagatcgagaaaaggaaattttccactcatgactactattacagatacgtcatggtatgagattatttggactacaagatcaaacaagattatagagcacgatttgctaagtaatagtcaataaacgcttttttgattcccgaatatctaactgattaattaattctttataacgtattctatttttctttgacaaataagacatcatcctttggcattggtgaatttaaatgattaattaacacataattacatatttaaagtaaactaaattattttataataagtattctcacaattttatagacataattatattcatgccactaaattattttatgttattggcattttgtgaaattataattatgctatcaaataattaattgaatgcttatgtattcacttatcgtgaatctaagtatgtcaattttgttaatcatcaaattgtgagaattgtaacgattttatcgttaattaatttaatctcataca

SEQ ID NO: 399017 - DNA, 932 bp, Cannabis indica
aaatgtcaacctaggcgcagggctagcccaaggtgtcaacctgggcgttgggccctatttttttgtacccaagaagtgttgtttcttctttgaaagtacatatttcctgtttttgatgaagacaaagaagatgcaaaattcggatctcctatttgatacttggaaggtgcccaaattgacagattgtcaacttgggcactgggtgccggggctctagatgctcaaaaataaacttgctctgattctaattttgatgcctcaaatatgtccgtgatatatctagttgatgtcccaatataaattatgacccttttgcactaagacggcccccaagactgaaattctagttgaatatgtcaacttgcgtaccgggtgaaaccctaggtgcctaagttggcttctgggttggatgtttgtgtaatttcagctctcgagccttagattaagtttttccatgtcttcatgctacaaaatacttaaagatagttagttatattcaagttattaaagtctgaacttccatctcagagattctgaagtcaacctgggcgcaggactagggtcccctcccaggtcgacttctatgactcgggcctattcaactctgtgacgtcatccttcatgccatgtgtcaaatatgtctacgtcaccagagaaagttttcgggttaacaattggcatacatgcaataatatatgtaaatcttcaatattttaaactacttgtaattttttaaaaatttataggtggtcctaaataattataatgtatgcgattatgaaaaaaaatagactaaaaaactatcttgtattcttaaattaataggggatctatcaaatttaagtgcacaataaacttacccaataattttattgctaactttttatttgtttttaacaaaaacttattaaaaaatctgattttttagaaca

SEQ ID NO: 399018 - DNA, 1013 bp, Cannabis indica
cggctaaaaaagagagggtttgcctgtttgattgagggtgaaggtggtggtggtggtggtggtcttatctgcttcgacaatcaattttcatgaaagagtagaagagttcttcgtcgatagggaaagggcggtgggacagttggtttctaaaacttgcccttcctttggtttggaccatatctatgtgagtccccactccccagtcattgattttcaatggagaaattttaatttcaattaaaaaaacaaaaattggagaaatttactcaataaattttgatttttttttaatgaaataaattttgaattttaagagaaaaaaaaaaaaaaaatatcattaattggttaaaaaataacaaaagtgagattaaacttaaacaaagtatcaaataatcttgtcaagaagacgatctaaatgcatattgctgagctgggattagtaaatgataatggttaaatgttttgtacagtttgaaatttgatattttgttgtaagacatttataacttgtatctctttcatttaaaggagtacaatgacgtgtccaatgattctaatataattttattagagtaatttatgtcataaatatctaattttaacttttaattgtaaataaatatttaaatttaatttttaacggtaataatagataagttatatttttagaactctgtagttacataatagttaaatattaagtcattatccacgtgtgattttcttattggcatatttaaattaattttcttaaaaaataaaaatttaatgactctaacgaattaagaattgccacgtggcaatttacttaatacttaactgtcaagtacttacaaaagttctaaaaattaaacttaagtatttatttgtaactggagttaaatttaggggttttttttaatattatacctaaaataatcttatttacaaaaatacttttaagaaaattatttgcacaaatattgttgtgccacgtcagcatacataccgaattttaaaaaaaatttcgaaaa

SEQ ID NO: 399019 - DNA, 917 bp, Cannabis indica
ttcatcttttaatttattttgttcttgttctttcaccaagtcatccattgaagaggctttttcggaaaaatgtgagataatgatgatgagattgcaactttaaagattaatgaattagtttttgttgtctttgtctggtttcaaagacttgttttgttatgtttatatttttttttctgatgtatttagttagaagaattgttcaaccttaaatgacttatgtatctcacttattctgtttctaattagttgttttttagttttaatttagttattatacgattcttattctaaggttcttaagaaaaaaaaaactagatcattaggtttggtcttacatttatcaattatatttgagatttaattggaattgttttagttgcatgtttattaagttttataattatgttattttttagttgttatattgttgttttaatgttgttcagtacatgatatacttgcagcattgtataactattaatcgtatttttattggttcattgttttattaattttgtcatcctaatatttttaggtgcgtgataagacctctgacgttgttgacaagttgaagcttccaaagaaaaatattgtcaaggtttataatttacttttttgatttgtcttgtttgaaatgttctctgattgtagtttattcatttgaaaaaagagtagaaagttcttttatagtttgtataatgttgttttaactgctggaggacttaatttccagtgatgatgaactttaaaattgatcaaaatagacctgttgttcatttctattcctttggtagaatgaagtgagttgcatatattgaaagtgtacaagaaaatgttttggagtcttttaaagttgacgctactgtacatgaattaatgattgagaaatgtgtttagttttggttgtatgcact

SEQ ID NO: 399020 - DNA, 1017 bp, Cannabis indica
cacaaaccaccctatcatttcccatgacgcccatgaagttgtatatcctggtgatcccagttacccattgctcgactttcataacatctgaacctcctagaaaaaccggaggtgcctgcttacggaacctttcatacagaggttccatccgattcattgcaaccacaggttcggcctcgacagcaggggcaggtgccactggaatttatggagcaggcactgcaggaacaccctattgtcttaactatctaatcacttcttcttgttcgttgattttagtttgcatttctgcaaacctgttttcccaattctgagctttctgggtatcttgggcagcctgggcagcctatggccggttagcatcaccccgaccacgtgccttacccctgggacctctacctcagcaccgagcatttgggggaaactgagctccctgaccttcatttgatccgacggagttgccttgactcctggtatttcaattggcatccatatagtctgaacagcctgcgtaaccaagagttagcatggtcagatcatgatcaacgagaactaattaatgtcgcttatttggaatttaaaaacatgggcctattccactatcaggctactaacatgcttcctaacaggcttttcttcaatcatacaattaaaataacctaataaagcaataaaaccttactgaaccatggaacgagctaacttctgatgacgattgtacatgtcatgacgatcttcgaaagacaacctagcggctttgataccaaattgtaacaccctaactagtataggcttgttaatgtgattttaaacatactgtgccgctagtcgctaatcaacgaggttaatgaaaatcgtgattaattaaaatttgcttaattaaaaacttataatattacatacaaaatatttcgggatcccgtttacaaaatactttacaaaagtttgctattcatttacaaaatatttgtcaccctgcgactaacagcaaaagccctgatgtcccgaggatcgtac

SEQ ID NO: 399021 - DNA, 1214 bp, Cannabis indica
agaagccattgccacccatctccttcctcactttccactgaaacgcactcccattagattttcagaaatgtcgtatagcgttcgggctagtgtcgttttgaaactcaacccggaactgaacccggacacaacccgagggatttcccggtagaattttgccggaataaagtttttgaagctccgggacgacagtggttctccattgccgcctggttgaacgaacccattgttgttttcttcatcaaaccgagacatggaatttccaacccgaacagcccgaatcgaagaaaacccaacccgcatacccgactgtcaacccgtcaaaccgactgtaacctcccgtgtgctcattacaatatgcggagacgagcattagagggtggaaaatgaatcagagacgccattgtcgctcacctctatcctcacttcttgctcaaaacgaattgtcgttactttttcataattgtcgttttgttccaaaccgtgtcgttttgtagtgaacccgatattttgctttcgcagactttttattagtttttactggcgaaacagaagtttgtaaccactggaatgagggcagagttgtaattttcatcaatctgagcctataaaggcctatagatttcaacaacccgagaagacccgatgacccgagaaagagaacccgagtaaaccgcacaacccgatggagccgacctaagaacccgctaaacaaatcttcgtataaaaatggtacgtagagaagatattgcatgccggttaattaaaactttattttttttttattatgatttagttcattacatatttttatggattgttatcctcttaacatataacaaattatcatctctttattttttttttaatattacaattttcattgaatgttaaaattctcattaaattattgagattattaaatttaaaaaattttataataattgtttttgtgttaaattatactttttagattttaatatttattaaattatgccacttgaacttttttttttgtcaaatcatactccatgaatttttatctatgtagacttcttttactaaaatttgacaaaaaaattttaaattcaacaatctcgataatttataaaaaaaaaaattacgaccttgaaaatttagatgacaaaaatcataattagtctattttattttgtaaatttatacttgtatttatattttgttccaacaaattt

SEQ ID NO: 399022 - DNA, 570 bp, Cannabis indica
agagattgttgaaaatgaaataatagagaaaatgataattagttaccttgaaggtttggtgatataataagctaatccaccaacagggacatactcaccactacctgaatattgttcagattctttccaaattcccaaaagatttactagaaaatttccattaaatcttttgtagagcaactgtatatacgcatatggagaataataagaaaatgtaagattggtaaagcaagaaaatagtgtttaatatatcaataaaaatggtgtattagttgttagctttggctaatatttttgtgtgttaaaatgtattaggtgttcgtttcttttagatattaaaacttgagatatttgcggtaaaatttcgtaaatctttacaattgttacacatatgaccttaagtaaaaaagtagcgacaaaaatattttatcttgcgattttattgcggtcgtacactttttttggccatgggttagctagaaacatgtggtgatatattatagaaccacatattaaataagctaaagaaatatatcgccacttgtttctgagctgacacttaacaggctt

SEQ ID NO: 399023 - DNA, 596 bp, Cannabis indica
agggtgtgggaaatggagaaaaataggagagacgaaataggtgggcatgtgggaaatagaaaagaagtaggtgggcacgtgagaaatgtggcgagaagtaggtgacgattttttaatggacccttataggcgaccgtcgcttataagggtccattaaaaaattgtattttattaaaaaaacgtcgcttattttatttactacgattttaaactgtcgggaatactaaattttctcaatgattttaaatagttaaattttttagcggcggtctcttaaaaaatcgtttttaagactgtcgcgaattctgatatttgttatattattttataatataataaagtatagattaaaatgtgataaatatatgtgaataatatatattaggtgtatggtaaatatatgtgtaacctatgattttataacctacacttttgtaacctacatgttgtaacttggagaggagttacaatttgttgtcacttgtaactcatgtgttgatcacacaataaaagagatgttacacaaagatgatgatagaattcaaaattatgatgatatagttgttacaaaatggattaatactcatttatgggag

SEQ ID NO: 399024 - DNA, 516 bp, Cannabis indica
gaaaacttctgctctaagctctacgatacacctgcggatgagatagtgaagccgtatgggttgtggatgaaggctcctaatcgacggcaaaattttttgacagcctcaccgtggctgcgatcggggaagacagctactcaggccagcaatgaggtgcccactgatgaagcaatcaacattaactctccttcccaatttgcgcctgaaccaaagaacaaatcgcatcttatggaatcggatcgtgatatatccgtgaatgaaggtacagtggttattttaaaggaaagtggtattaaattctcttctgacttggaatttgaaatatcagaagggaaaaggaaaagaatggactctctctttaatgggcctattaataataatagtgggccggtggaatcaagtattactcttgctactttgaaaaataccacaaatactgagggcagctcaaaaaacgtttcaatggtgggtactggtgtccaggcccaccaatcattatgaatactctaagttgga

SEQ ID NO: 399025 - DNA, 541 bp, Cannabis indica
acgtaagaatacatcttttccaaaattaaaaaattcttttctttctaccttacgatttttctcagagcaaacagtagggtgttatagagcgatgcaattcggtgcagaacctatcgtacttatacagagactgttttatcctggggatgtcgtggtttctagactgccgtgcacactttctgcaaagccgcgaaacgtcttaaagagagcgacattgtccgcgactcagccagattattctatcggtaattcgttccaattttattgtatttaatttcggtataacaatatcactttggaaaaatgtgatttgtaaatgacataggaatatgttatttaccatgtatgacttgaaggaattgtacttaaattggtattcttaaaattaattgggcctagagaatcaaaccataaacactttggaaaaaggattatgacattttaaattcctagttgacattatcaatttacaacaatactcattagcaccattatatcaactttgtatttttaggccaatttaataattctagcttgtttt

SEQ ID NO: 399026 - DNA, 1113 bp, Cannabis indica
aagaaaaaaaaaataaaaatggcattgttggtgtaaacatctaaatatcttttgcaaatctctcagtgatctatctctatcattttctcttcatattcttaactcttaattgactaataatatcattattaacaaataaaacaaaaggttggtcgaagtggtctcgcattttccaatatcaaaagaaagtaattaaagctaataataaatgataagaaatatacacatacatacttcaagctaatattatttattttgaggtatatgcatataaggggtgttcatccaatttaatccgtactattttatttatagtgcatccgattcgcactaagtaaagattttattctttagatccaatacaatccgcacaataactcaaatctaatccaattcaatccgcaaaagtgcagattgaatcagttattttggattggtcactttttaatattaaattatttaatatttatgaaaaaaaatatatttttttactacataacagcaacaaaataaagcaaattatagttattttatgtctccaataatacattaaaataaataataaaattcaaaagaaagaaaaaaatgtatgtataatagaaattatttaattttattttaaattgtatagtaaaaaaaagaaaattatataataaaaatagaatatacatttgatctattaagttttaaaatatatttgtattatatgtattagatttttaaattactattttttacattaaaatattaattgtatatataattttttaaattttttttataaaaatgtgtggattagattggattggttacttttacaggtcaatcaacatccaacccgcacaagtgtggattttgaaatttccaatctaatccaattcgcacaaagtgcaggtatccgtactttgtgaattggattgtgcagaatattaaattagattggctattttatgaacacccctagacataaccacctcttgcacatggcttcgcccttgtttatagtgatattaaacattactttgccttctagtacttctcctagagcatattcaaggagcacactaaatttagtgtcacactatcattaaatttggtgttacagtagaacct

SEQ ID NO: 399027 - DNA, 1383 bp, Cannabis indica
atgtcaaactagacgctgtaaaagtgtaaaaatgtgcaaggaaaatcctttgagatgcctaagtgattgtttgacaccgcttagtctttttatatgttttggtgaagctagtcacacattctcggagatgttgctattttatggaaacggaagacaaaactttcggcttccgaatgagccaaaattaaagttgtgaatttggtttatctaacttcatggatcattgcacttgtgaaaaacttgacgaacgatcaaaatgacatctgattcagataagtagatcccaaacgaaccaggccatttgttgacctgggcgctagggcctttaaaccaagctttcgagattctatttttgatacttccaaggcttctgaacatgaagacggggtattctccccagattttgaccatgccagattcaatggtcccatcgaatttgacatttgagcaattgaagacagcatcccaggttaattgtgaacctacgcactttacccagcaccaactcaacctagacgctaggcccaccaccaggtcaacctaggtgttgggccctatttctagggactcgagtttgtggttttctccccgagtttacttgaatctttgttattttttatgacggtgaagatgcccagagcactttttgcgaaattaaattagaaatagctcaagttaacaaaatgtcaacatgggcgcatggcaagtcccaggtgtcaacttgggcgatgtttcccccttctaccccttcgaaaattctgttaggtgctttttaatgatatggtacgtttatctttttttttctcattttaatctcttaaaattacttttttaccccaatattattcttatttcttatagttagttttgttaatatatatatatatatattaatttaatagaaaataaaatcttgataatctatttttttttcaataaaattctaagtctataccaaaataaaattagaggtgagaaatttatttattaatatacaagacagatggaggactcggaatgacaaggtccataacaactctttgggtagcttgatatattatattgactctatcttttgttgctacgcagattatggttcctgtttgttcaagtcccttcaagatgatggtagttctgcttagtcgcccccgccggaggattgagtcaaaattaactgcgacgtcagagtcggtggtgattccatgtgtgctgtggcgattgcgagggatcatacggagtcaattttgtgggtggcgacaaacaagcttcactttgctgactctctcatcggggaagcggcagcttgtctattagctctggagacgacgacctcaatgcatcatccttttgttgtggtggagagtgattctgagagtgttatca

SEQ ID NO: 399028 - DNA, 701 bp, Cannabis indica
tggctttagcgacgcgcaaaaagcgtggggattccgctttggtcacacgcgtggcacgtcactataccattttatttataaaaaaaataaaataatatatcagcagccctaaagtaacttcttcccccacaaacttgtatccccacaccctagagctctctcgcacgataccctcaacctgcagacattaaaattttccccagctgaagccggcgcagcagacggagaccggtgcgaggtcctccctctcaggcagagaccggtgcgaggtcctccctcttaggcgcagcagacgaacgcatgtaagaaattttattcactttttcttttattttttttttccattttcagatttttttttttgagagaactttccatttcagatttatatatgactgttgggttttttttttccatttcagattatttttccatttttgttgttttttctattcgaaaatgtgattattttgtatatgattatatatgattttgtatatgattttcagattatatatgattttgcatggagaaagtgtagttgtttttaggttgtgtcttttgtttgttaaaatttggatatattattcaaaactttaatctatgtataatttttttttttaatttcagattagttatgttattgttttttgtttatttatgtttttttttttttgtttattttagtattatattaaaat

SEQ ID NO: 399029 - DNA, 820 bp, Cannabis indica
tactttatctatttttcacaaatgtgcctgaagtagtaggactgttggaggaatcatcctcaatatcttaagctttctttttgcctttatctgcagtattgaagagggacctacttgcaagtgacaatgtccttttataagcacgcaatttatcgtccagcttgtttatgtcaaacgagttccaattgttaatcataaaagatacaacaaattggttaaactcaggtgataagctgttgagaacaaattgaattctttgctctcttgataagacaattcccaacatagttactttctagaattttaagttcatcatgagcaagtgtgaagtgatacctgaccaggagtcatcttcatactttggagttcatttgcaaaggcatataatagatgaggattggggtgagggttgttatttgacactaaaaatatcaataaacacaaataaattacttggttcaaataaactcatacacaaatttagaaaataacaagtatagaaacatgtttgcaaaaattccaagaataaaatatatttaattattttctaaggtttccaccaaaatgaaatacagtgtcccggtaggcgagagtcaaagataacattacataaatagagtagttagctcatctaaaatagataccattctagcaacattttattcgatcaaaataagaatccaatattgtcccggtaggcgagagccaaggttattcttattttatgagcttctagcattgtttcatacttggtaaatttatttctaagtagtcaccgtaggggagagtctaatagaaataaaaacttacaaaatactta

SEQ ID NO: 399030 - DNA, 697 bp, Cannabis indica
catccatttctctagctaaattactccttaggacaccatagaagctttgaggtaagttcttgttgtatttttcccttgatttcctaatagttttgagttagtattggttagcgttctaaatatttcaggggctgtgaaatctattgatattagagtatgattttaggtcagtttatgaggttgtttaagcttgtaatagttagatgtaggggctggttggattgaatgagttaaatgtggtgaagtgagttcaattttcattttagaatgtaattttgagcatattgatgacttttggtgaattagtgatttggatatattatatttgttatattatgatgttttgggaagtttgattaggtttggaggaggtttgggtcaaaattgaagaagagaacccttgaattcttggtctgccaaaactgattgtccggttggttttggtgcaccagaaccggtcaaccggtttccctacaaggggaattctcgggttttcttttgattctgttttggcttggggtgttgcgtagtatctattttaggttggttatgagttgtttgacctattttggagttgttggaagctaggttatgtttcgttttggattagggttttatttcagaattttagtttaaggtatttattgagttttggttgtcgtgacataggactgggattgcctagcttgttttccac

SEQ ID NO: 399031 - DNA, 642 bp, Cannabis indica
gaggaccaacttgccaaaacataatagtttagggacctgctgtacaaataagctaaatataaattgacactttttttacaaaaatacctcttacactatcacttacacaatcagacgatagttgcgcagtggttgctgcgtggttgcgcggtggttgcatcactcaaaagtttcaatcagacgatggttgtagggtggttggccgaaggttgcatcagacgaaggtttcgatccgtagaaaatttctaggtggttgctgggtggttggctgaaggttgcatcagacgaaataactgttagcaaaatgtttatgcaactgttatgaaacattaaaaatcagaacaatgtttccacgtacgcaactctatctacatgtctctttatgatttaatataaacaaattcaccattaaatttagaaaataacaaaaatacaccaggatgtaatttttttggattatactcgagttggattgtttaggaactccagtttaactttttgagatattcctttcatgcatctgaaaattgaagtcaggacattagttttatgcacattaaattggatttccagttgaatttagtttcgtagtagtttttctttaattttttttttctatgaattcgaaacagcccctgtttt

SEQ ID NO: 399032 - DNA, 520 bp, Cannabis indica
tttaaagagcatcgctagccaattacaaggtgcggcacatctagaggtgctacgcaccattaatgtctaatagcaatattcattcgaatatattaaatgttaattatccatgtatacactttgacatgtttttgttgttgcacataaattataattatttaagattacaaaaattatttaaaattatgttcaaatttaaaaaataattaaaataaaaaaaatatttttctttcattttattttttcttttcttcttttctaacctgttttctctacaccacaatcatcataacataaaagaaaaattagaaatattaccaccattaccaaactccatgaacacattaatccccaaattccaaatcaaatttaaaaaaatattcaaactacatgaacacaacctattaagatagttggtttagctaattcagtttgaaattccgtattttaatattcctagtttaattatttaattaagagattaattaaatgcggaataataaaactggtactgaaaaca

SEQ ID NO: 399033 - DNA, 800 bp, Cannabis indica
attccaaatagaagtttaaaggccatcagtagacccaaagtaacataaatcaggtagagcccaattgttatctagccttccggaagaacaatcgcacacctcgccagatgagtttccgtcaagcctagtcagcatacagacaattgtcaatcccgtgggaagggattcccagcgtgtacccagaagccaattttagtttctcatctactactccacacaaaataaagaatgttctcctaaaatcgtggataaagaataatatcttgttagcgatatgtattgcggactggttgttgcaatagatgaaggcatgagctagttgcttcatgtcaagatcctgtaatagatattggatctaagtaatttcacaagttgtggcagctaaggcacaatccctacttcagtagaacttttggaaattattagttgcttctttgtcttccatgaaatgaggcaatctccaataaagatgtagaacctgttgagattttatgccctaaatatgacctattttaatataatctgatctgttatcaatagaagattagaagtcatttatgtttacatgtagttttcatgtttatggtttaatttgtacaatttttgttaagtccagaacatatagttattcacaattacaatgatatcaacaaagtggaaggtaattgtgattatatgcttcaaaagataatgtcccatgattcatcagtacactggatttacattgatgtgatagtcagcgataaagcttacttacaccttggataagtattatgttctttccagaacattggcaaagt

SEQ ID NO: 399034 - DNA, 1302 bp, Cannabis indica
gcgtgcaaactcatgtatcatcctagtagaatgctgagctactgttactaatttcagatgaagaagttcgaaaagctttgttccaaatgcatccagataaattcccagggcctgatggaatgaccccgagtttttttcacaagtgttgacagattgttaaggatgatgtcatcaatatggtgaagcagttttttcttaatggttctcttcctacagaccttaacaacaccattttggtcttaattcctaaaaagaagcagcctatggatataggggatttaagacccattgcgttatgcaatgtgctgtacaagattgtgtccaaagtggttgctaatagacttaagagtgttatgccgtctatcatatctgatactcaaagtgcatttttgcaaggccggttgatctcggataacatcatgattgcttacgagattatgcatcacttaaagaggaaacgaagagggagggatggttatatggcactcaagctagatgttagcaaagcctatgataagcttgagtggggttatctccgggctatgatggtaaggatgggctttgatggtcgctggattaatttagttatgcaatgtgtatgttctgtttcctataccatttcacatggtgggaaggagttggggcccattattgctcaaagagggttgcgccaaggggatcctttatcaccatatctgtttattctttgtgctgaaggtttctctagtttgttgcggagttatgaacaaagtggcttactcacggggtgtaaaattgctcgaggtgcgccggtaatctctcatatgctctttgctgatgacagctacatttactgtaaggcaactgaggaagaagcgtacaatgtgaaggagttgctgcatacttacgaggtggcttcggggcaaagaatcaatttctctaagtcttctgtgtttttcagcaataatactggaattgaggtgcgggattccatttgtgctatgttggaaatttatgaggccgatgaaaatggctattacctgggtctgccgtgttcggttgggagaaataagaatgctatccttggttttcttaaggataagcttcggaagagaattcaagggtgggaagggcgtatcttatctcgtgcgggaaaggaggtcttattgaaatctattgctcaagtcttgccgagttatgctatgaatgttttcctcttgccatctgacacttgcaaggagttagagcggcttatggccaagttctggtggcactcagattcaagtagcgataaaggtattaattggatgagctgggagcggt

SEQ ID NO: 399035 - DNA, 1125 bp, Cannabis indica
attcatgccatcattatcaaagagaacaatctctgaactatgcctatcaaaaatgacatgagctggtactttaaaaaactgttgagactcaaacatagaactaacaagcaaagcctccaacaagcagtcgaaaaaggtaagtttcgggccaaactgttttatacaaacattctgacagttcctagagttgattatgcaaggaatgtttggcatagattgattatgcccaagcatagattcatctactggcaagtgtgcaataatcatctcttaactagagataacttgaggaaattgatgagtgttgcttcggatctttgtccagtttgtgaaaatgagattgagacacatgaccatctgtttgtggactgcctttacacaaagagctgcaactaaccgttggtttggtaacttccagtggccaaaggacatctcggagcttcaaaaagggaccccaaaagctgctttcactttgagaaatcaacttcagaatgttgttttggcaacagtgttgtacttcgtgtggtggaatagaaatctttgtgtttttgaatctaaatgtatgactgtgggtagtgttagcttgatgattaaacagttgattaaatatagaattttgtgttttatagataaaagagacaacaaggcagggcagtatgtaagggtcacggcagagagttgatgacctactgtgttgtctttttgtgcagccggtttggctgggctgttttgttctggtttggtttatgtaataaaattcagtctgttcaaaaaaaaaaaaaattgttcaagggccatttttaacgaccttaaaagtttaaggggcatgatttggtacatgtcaaagttcaggggcaaaaatcctaattagccaatcctttaaaaacaacaattaaaggaatattggctgctaaacttaaatgttacattttgtaacacttaatcacaaaaattaaattttggtggcaaaacctactgaactcctgttttgctctgtacttcttcgtccaaaaatcacaattaagtgccacggtggactatccaagtgtacacacttgtacacatggcaaattttaagtggtccacataatattaattttagaaaataattataactatttttaa

SEQ ID NO: 399036 - DNA, 358 bp, Cannabis indica
tatatatatatatgtatgtatgatatttatacataaaaatgataagtgatacattttatgacttccttcctgtttgccaagttttttgacaactaaatctttttcagagcttaagaaagtaataatggagtaaatagcaaaataaccaataagagatatttacgtggttcaggcattaattattcttagtccacgagtctattttattaggctcattgactggtaacagtttacacaaatagagatacaatggactagaactcccttccaccgtgtttctcttgaagaagatgaaacttagtaggaatattttggatttatcagtagggttatagaaatgtgttttcttaggatgatg

SEQ ID NO: 399037 - DNA, 902 bp, Cannabis indica
cttgccatagccacaataggatgatgaaagtcaagccctagcaaagcaaactcgagagatttttgtaaataatattttctctctttaatattatttaagaataatattatatttaactaattaatatagtttatcaaataaaacaaaatagttaaatactaattacataatttccacaaaattactattttgcccttaacaaattatttctcatagaaattaattctcactcaaaatttgttcatcaaattaaaccttcccctgtacagtgttgtatagaggtgacttggggatcatggacctatattttgaagctccaataaacacgagattattattgaactcatcaattgaataatttagttttttaattctattattactccactataaatatggaattgcactctttgacaatatagaattatatttatagaattcttacttgtagtccattgatataataatataagtagctcgccctctaattattttcataattaaagttgggtcaaaattagcgttttacccttctaattatctcttaatttcttatgtaccattagttcaatgtgaatagttaatctataatataattatagatttgtatccaactgttagcactaccaggattaacactataagggaactaatattcgattattttggaaagcttgtattccattattgtataacatgttctcaaccactcatgttattaagctcccaaatagaagttgtaagaatcatcttctttgagaaactttaatgagtgaatcaaagaactcaatgatcacaaatgggagttcatgtatactcagaattcaaactgatctactaatgattatcattgtgatatgaataactctttcatggtaaacgacacgttaataaaagatgtt

SEQ ID NO: 399038 - DNA, 1109 bp, Cannabis indica
gatttttaatgctttttatctttatttagattctcgtctacttgattcaaagcatccaataaatcctagaaaatagaacaaagtgcaacccttatttaatccaaacaaataataatataacaataaaacaaaaacaaattacagtattctaagtcaatcaaacctcatcactccatatttgattttttaaactctgcacaagttctgataggtcaagctgtatcatttgtgaatcaaaaaatccctttagcgagcatatattgaaaagtcatgatgacaactctaacaacctgccacacattcataccattactaatatgaagatttttttttaaaaaataaacagataacaaacatggtacctagaaatacaacattaaggaaacaaaaaacaaaattcattaagtaggtgtagaattttagtgtaaaaaatgtgcgcacatatcattactcaattttaaaattacgaattcgataactacatgactaaccacaacaaactataaagggatgcgtgattactcaatacatgagaacagactgaaaaataatcgaaacaaaaattgttcctcaccttttccgctgtggagttcttcgcaacatccatgagtcggggaagagctttagaggtagccaaatgctcaatggcgggttcatagtaagataaaagccacacacaaaagcatgtttcatacacaagctgtttcaaagtagtataattaaactcaagtcaaatgcttgtctagataatccatttcattattgtatattgaatttaagtttacctgaattgacggttgaatgaaaggtgggtttataaaagggacgagcaacctaactccattagagtggacaaagaatgctttaaccacaggctccttcagtaaggttgcgagacagcttatcgcagttggagagctacgactaagattggaaggcaaaggcttctttagctgcagctgaaatgttacccacccatatgcttaaaaatgatgaacaagctaagaactcattaaaaataaagtgacaacaaaattttagagagactatatatacctctgcacaaagccagttgactaagcatttcaaaacatcatttgtattaggtg

SEQ ID NO: 399039 - DNA, 1514 bp, Cannabis indica
tttgtatctcaaatatctggatggtattgtagatgatgagaatacaacaccaaagaaatctgacaaagttgaggagattcaacttgggaacgaatccgacccaaaagatgaaagtgatgatacatgccaagactatcgcacttttctggattacttggaaaaagaaggtgaagaaactatggttgaggatgatgatatgataatgtgcaaatacttacaacggatgagaaccctcatgccgtagtatgttctcgtacctaagccatttatgtagtttctactttgtcttatttcttatactaagtgcatgctgaagctgaaattttttagagttagtaattattacaagcatttgagttcattatgtaatttttcacgttaatgacactgatttggctgagatcgaaggtggtgaagttgcccctacaaacttgcattctcacaatggttttgtcttacaggttcatttctcctttaagcaagacagtaaaaccaagagtccaggtaactggctagcggttatggcttcttttgtgaactcatgacattgttaactagtaaacaacccgcgcttcgcggtggatgtttaaaaaattttaaattatatatataataaatcataacttttatttaatgacaactaagtaataaattgtatcaaattttaatataatttatcatataattttatatgaaaaattaggtgtgtacaaacagatagatcaaactcgtatttatcaaatctcgttattataatggaagccagacacaacctgtataacatgatgttagacttgatccctcaaattgttataagaattaataaatttatagaaaactaatcaaataattttaaaaccactcatcatcgtatatcacttgtagttatcattacattcaagggtgttgttattgtcatatatcacctatataacatgatgttaagcttgaccccactatttttgttgtatatataaaacaaatatgaaaaaagtaactcaaagagattacactagagcccagttgaaaaataagtaggatggattgaaaaatgaatggaagctttggaagcaactcaaggaaaaagaaactagtttaggatggagtatgcaaaagaatacagttgatgcatctgaagattggtgaaatagtaaattacaagtacattataatcttgttaaatatttatattaaactaaaagacttttttatatatggtacatttaattaataaaattccttttgtagactcatcctgatgctgcaaagtttcgcattcgtggaattgaaccagaagtagaggaaaaattagatagaattttatgaacgctgttgctacaggagagcatgcttggacaccttcatctggaatacttccatttgagtctgaaaagtcttttaatgatactgaaactttacatgaacaacttgagagtagtgatgatgatctagagatgcctaacattgatagattttctaaagagaaaattagcaagagatcaaccgagccactt

SEQ ID NO: 399040 - DNA, 766 bp, Cannabis indica
cccgcctccttttggggaacctgagattttgtcttaggtgccacgacatggcttgggcatgccgcggcccgcccttgagttttgggcagttttgagttcaaactttgaaaattcataacttttgattctaaactccgatttgggagttcttatatcgttggaaagctcgttccgagatctgtatgattatctgaattttaaataccatgattgaaatttatgagtattgaatcaggggttaaccctatttatgaaatcccagattgtgtgactaggattaccagcacctgatcaggagcacccagggattcggaatctctgctattgcggtacaacaggtaagacagtggttagcacgtagagtatgcgcagtggcgcttatattgaaagtgatatgtatgattgtttagtaaccgggattagggttattaccctaataagaacggtctaatagcctagggttattaccctagtgatatatgtgtgtaaatgccatgccatgttaaatgtaataagattcaaggattatgcgcttaaggcataatcaggctgaacttagtaactataaccgagatgaaccattctaaggccttaatgtatttagacgtgtgagaggaacacgtaggtctgcgccatgtagatataaatagatgtgtgagtgcaacacataggtctacgccatgtagacataaatgggcatgtgagtgcaacatgcaggtctgtgtcacacagactgttgggttttgtgccctaaataaaacccttt

SEQ ID NO: 399041 - DNA, 718 bp, Cannabis indica
ctttgtcgtttgcatcgtgtaaataggcaaaacaagccccaccgatttgatcaacgtagcacgaccagcctttgataacgattttaatttccaccatggagttttgacaccaggttatcaaggatgaagttaaaattcgcatccttctggcgagatctaaaaagcgggagtcccaaatagtttatgttacccatttcacagttcaatcccagagcctgcctgatgcctcgtttcataccatcacttgtgttaccgctaaagaaaatggaggttttgagcttattaattctctgaccagacaaatcacaaaacttttccaggcattgccacataccccttgcttcttcaaggtttgccctgccaacaaggatcagatcatcggcaaagaaaagatgggagagtttggggccctctctgcttagcttaataccacttatggtaccgttatcaagggcgtgctcaaggatgcgcgagaggatttcagcagcccagataaagatgtacggagatagggggtctccttgtctaatgccacactctggggtcaaactgttaaatttccttccattgagaaaaaggttgaaggaagttgttgtgatacactggcgtacccagtggaaaaatttgtcaggggccttgaaactacgcagaacgtggtcaataaattgccaacttagtttgtcgtacgccttaaccaggtcaatcttgattgcaaaaa

SEQ ID NO: 399042 - DNA, 1289 bp, Cannabis indica
gaaactggagtatggaagccagactctagaaaagaaacactgttagaaatattttactaggatctagatttactaacaagtatgttgattcacaatttaaatatgaatatctctaaaacaatgaaattaaacacataagagattaaataaccttacattggttgcagcggaataatatgactccttccgttcaagatctctagcccttgattcctttctatcacagagcattatcaagatctgaacctggatctctttctctcctttgagtttggttaccaccatcttactcactatgattgagtacttaacttgctatgtgtgggcatgacactctttcactaacggttcgaatatgatgaagaacaatgaaggaggtttgaaatcactattgaaggtgtctttcatctactagttgtcaaagaatgataactagatttggtaggtttaatagtgttatcccgattttttcactctaccgtggcaccgcatgaatggtgatacgtggaatccacttcgaacatctgctcgagaagcatagtccgagcaggatgcctcgctggcatgcccagagcaaagcagttaccaatcagcgcagagcaaccaacacttagcagattgagctttcgcattgtgagtcatcaaattgaaaactcccctagtaacccgagggatacaaatttacagagatatggcatacacacgatccccactatcagtgtactccagcctcaatccccacgatctttgtattcagcattgactcccacgatctttctgtgtatacgcattgtgacgagaggggaaactcttcctctccaagcttactagccctataaatagtgatgcatgttcactgggcaataggtcgaaaacagttgagctgagactataccctaagtatattatctaagaattatacattcagagatactgttgtaagagctataagaaaaggaacctttctccttaatcttaagtcaatacaaataacgaggattaggctattacaaaactcctcggggctgaacctttctccttagagatactgtctttatattgctttattatatatctattgctataaatcacttattgcttactaaattcgactcgttgtcgttggctaaaagcgaggtcaacattctggtgctttcattgagagaaggatcacgaatcgctctttattcaacatctaaccacaaattcgatggtacaaactcgcagaggcctgactaatctagcaaattcacagacggtggatgttggaagttattttaccaggaact

SEQ ID NO: 399043 - DNA, 513 bp, Cannabis indica
gaagccttgatcgctggcttaaatatagcccaggccttgaaagttaaaaacctcatttgtcatagtgattcgcaactgatcgtgaactaggtcctcgaggaatactaggccaaaggcttaaaaatggcaaagtatttagagaaagttttgaagaacttggaaagattcgattactttaaaatcgaacaaattctgagagaacaaatctccaatgttgacgccttagcaaagctggcctcgcagaatgacttggatgaattaaatccggttcctgtagaaatgctaagcgagccaagtatatgtgaaactgaagacgtcgagatgatagatagttctctagcatggatgacgcctattattaactatttactcaacgaacaacttccaaatgacaaaaatgaggcacgaaaacttttgtatacagtgcctcgctacacaatgatcgaaagcaaactatatagaagagggtattcaatgcccctacttcggtgtgttcctcctgcagaagcaaac

SEQ ID NO: 399044 - DNA, 423 bp, Cannabis indica
ccacgttaggctatcgtgcaaagcatgtgtatccttgtgtactgaactaaaggatccaacggctagggacgaggaaaatttaaataagagtggccctgaggtgacacgcatccaacacccctctagtacagccagtacgatttgacatccataaaggccacatgggaaatatgccacctaccaatccgacggtagaaattcatcaccataaagatccatctaaggcagctgagcaaggggattggcctataaatacccctgaagaaacacaggagggcgatttcgatcctcttttcgaaccttcaccttcgaagtgaagactcgttcatcataacctcaaacaaacacatattgtaaccctaatattgacttcagaatatttctactaagcttctgttgagaatatttgttggaaattatttt

SEQ ID NO: 399045 - DNA, 704 bp, Cannabis indica
taacaagtttttttaaaataaaaaataatacaataaaaataaaaaacacgtacgaatcaaaccaacaaaaaaaatataacaaactaaattggataggtttaaaaattctcaaaattatttacttatgcttttctaggggagggagtggaaaacattttaattataaactatttttatttttctaaaaaaattaataaacacgaaagtattaactcgtactggtaataaataaaaatacttttatttaagaataaatatataaatatattgttatctgttgtgtattttgattagttattgtatatagtcctttttggtaaaatatttataacatggatctccggaacaaagttttagtatcgttataatgttcgctactagtgtttaattttagtgaagtttttaatattatcacagattttaataattaattaatctattattactataaactagtttatgaaattacacacgtggtgcccctatatattagagtgttacacattgtatggtagtgagtacgtacacatgtggttttttttgttggttaaaaaaaagcatctactttataaaaaattgttaaaaaaacagaaggtgagaaatataagtgttgtgtatatacatgaatgaacttttgtttttgctttaagtttgaaaaaccgtgtttttgcaaatgtcagttgtatataagaaaatataaaaac

SEQ ID NO: 399046 - DNA, 604 bp, Cannabis indica
atttaaacacaaaataaaatacaaagcatatacaaccagcccaaaataaatcctggcaactcaacacgcaggtcggtgaggtcaatatgtacattgctagataagactgtcacctcatggttgatctagcatttttttgcctttacctacaccacatagcacccgtgagtcacaaggactcagcaagaaaagtaataataaaaatcatatagtttattatttaaatattgtcattcatacacaataagaatccaaccatcacacattgttcataagatgaaatccaatcactactagcatctgccatgaataaacataagtgtacagatatttggtaatacaaaattattataccaataaaagaattcatattcatttaatcatataaattatagatatatgttacctcataaactgaccatcttcataacatcacgttgcctaattaggcaagtcgatgctttaatatgataattttgtattgtattgcctaatcaggcaagcccgtgccatagtctggcacccatacatcgtataactgcatcaccttatcaggcgagcttgtgccaaaaacctacactcatatatcatataattgcatcac

SEQ ID NO: 399047 - DNA, 580 bp, Cannabis indica
caatagaaaatgtcatgagaaaacaatctttcttcttttgcctcgagttggtgtgcccatgtgcaagagtctaaattaatacccccaaaatcgcgaaatatagtaaagaaaaactctatagttcaaaataaacatttcaagaaatttgattcaaacgaaaaaaatctattaattaactccgaaaaacaaaaaaaaaatgttaaaaaacaaaataaatatgatcttttatcatataattttattaattatgaagataagaatggaaaaatactgttatttttggtgccattatttttccctgcaaaatagcacacctaattacaaaagtgtgatttttaaattctcaacgtaattagagatgaaaaggagaatgggtcccactgggcgtgccaaaaattatattaagcaaaaatttcacatttagaatattaaaaataaatgcaaaacataatttcacctatgctgaatttatagcataagagtttattaatttaagttcgacccatccaagattataagaataacctcttaattacaatccttttatttaaaggaaataccctttgattccaattacgat

SEQ ID NO: 399048 - DNA, 1113 bp, Cannabis indica
tgaagtaatcgacagcgactacgtcgtattttactcctcatttcccttttggtaattctccaatcaaatctatgccccagaccacgaaaggccagggacttgtgattgaatttacctggcttggtagttttttttacatatgtaactattcgctgacatttgtcgcatttttttagcaaaactagatgcatctgctcgcaatgtcggcgagtagtacccttgccgcattatttttaaagcaagggaattacccccagcatggttgccgcagattccaccatgcacttctcggagcatatactcgcattcggtcccgtcgatacacttgagcagtggctgactaaaacttctacgatagagcttatcgtcataaatgacatatcgagcggctcgatatcgcagttttctggcttctactttatcttatggaatgactcctgttttcaagtattattggggtcatccaggtgacctctttgactgtatcaacctccatcacctcatgtcgactaattattggatgagttaacacatctacaggaattacatcgagtaattctgcttctcttgtcgaggccaaccgggccaaagcatctgcatgagaattgtgagcacgaggtattctagagataactatctttttaaatttttgtagtaactcactagtgagggtgagatatttggcaaaatgacctcctctggcaaggtattccccattcacctagcaaacaacgatctgggagtcgttgtaggcttgtaagtactcgattttaatctcaagagcgagttttaatcctgcgattagagcctcatattcagcttcattattagatgcgggaaattcaaatctaagggcagcatgtaccttgaatttattgggacttatgaggattacaccaccccttgatccttcactgttggatgccccatcaacatacaaagtccatcattgtttggtacgtcaggatcaattggctcttccccgataatggctacttcgtcgcttggaaattcgagtatgaaatctgcaagggcttgtcgcttgattgctgatctattgacaattggactatgattaaaatcagatcattggatctgtcaacaagttaatca

SEQ ID NO: 399049 - DNA, 439 bp, Cannabis indica
taaatgaataggtggttgtagtgatagtccactttttcatgcgtgatggcgacgtggcgagaaactctcgcttaattaataactgctttgattattattattatttatttattatttaataaatgtcttctttaattttttatataatcctactatataattattattctattttcttaaaatttattaaattaaatatttttaaataataaaataatatttggatacattacttttgttatgaataattttaaaattttactatttcaatagtattaaaaatagtgtattaattttttactcatattgttaatttaaaaatcatatctatttaatcaatgagttatattttggacggttttacttttcttatagtatctcttcttaacaatttgtatattttttaaaactatttttttcaccatattttattttattt

SEQ ID NO: 399050 - DNA, 698 bp, Cannabis indica
agcagaaacactaacctgaagtcgttattagagattacagagaatgttatgatcttacaagaatacactatttctttatagtattttctctaatggggaagaagataatacagaaacctgtgcactactacctatttataggctcattatataatgagttttgagtatttataatttgacccattaacaaattataaattaacttataatatttacacattatttccataataatttaaaaccctttcgatactcataacataattgttcacttaattttgtatcacattttataatagcatatacaatatatagatgtgcctacaataaaattttaatccaacattaaaaagtgaagaaaacttttttttttcattactattattgacatattcttttttaaatgaaagtcattttattaaacgaaaatctccgttaccaaactaggcaacaactcaattggaatggtgttcaagttgaacaggcgatcagggtgagatatagaggccatcgcaaaggaataagccgctacatttgctgatcattttacaaaatgaaaagaaacattatgcaaagaacttaacaaaatccgacaatcactaacaactttgccaaataaagaaatcataattatagagctacggacagcttgcacaactgaaaggcaatccgtttctaaagtcacatgaagccatgaa

SEQ ID NO: 399051 - DNA, 489 bp, Cannabis indica
taggtaaaggaaaaagctaagctataggaacactgagctggagctcggcagtgattgtacatattgcggtagtgcaacctggagggttttggtctttcaatgttttatgttgtattttgtggttgcctattatttgtgtaaacaaaaaaaatgtgtgttcagggatttttgtataagaaattgtggttttcaatgtgttttgtaaatcgggatcccgacttttataaataattaattataatattttaaagttaacttttaagtttagtaaattttaaatgcaggcgttacaggtcgactttaacgaacagatttaagaacacaaataatgcaactgaactagaacctaaccatctcaagattgagatcatttgatctaggattaagtaggtgatattgaattgaatagatattacggtaagtttatcatatctagttcaagttcaatatcggtcccttccaatgcatactcttgttggaaatatttta

SEQ ID NO: 399052 - DNA, 867 bp, Cannabis indica
tgatcaaccgacagcaaggtcgtatggatctaatgcttgtcacatgtacacaaatagaatgaaaaagtgataaacacatagattttttggggaggttcggccccctgtgatagtgggtaataacctactctcattttaattgtattaatagtgagggttaacactattcagatcattataggtgggatctaatatagcacccttaaggatacaatgtatgaatcgtgattggcaaatctcaagtgatgagaattcttgtataggcgtgtgagagaggtagtgaaggggagaaaagttatcaaacttaggcttagagcttggaggctagtatcgggcttaaactgggcttaggttttctaggttagagttaaggcctatatataaactgggcttaggttttctaggttagagttaaggcctatatataggaagcctaaatcctagattacaacttgaaatcctagatatttatatatttaatcagttaattaccaaagaccaaaatgccattgaacttagatattattcggctattctattagacatttagggcccaatttgcagcccaaataaagttttccatgtgtagaaatgcacagaaaatcttacagagctcctcatggctggccagccaaggtgtagtccagaggctggccgaccctcacttgatgtttgtctgagtgttagggtctctgttttcttagatgttgacttggcgttcttatttgtgagttatactaccatgtggcactcattttgtccatgtaagcactgtcacgtcacgaggacaaaaattgggataacaataaccattttttgttgttacctaattagggaaccttaatgccctaacctggcatccatata

SEQ ID NO: 399053 - DNA, 996 bp, Cannabis indica
aaaatgaacaatagcggcagacagtaattattaccggtagaatgtctcgccggtaatgggcaatgtggtttgtgcgggaaaattctcgcctttttttttactttgaaaataattagcggcgaacttttaccagcggattccgccactaatagaacaataattttcctatttatactattatcggcagaacccactaataccggcaggtctcctctgataataattttatatgtataaaaaaatccttcaaaccgatcacttcgtcctcttcttcttctctccttcatctttcatcttctcactccatctctttctttctccccatctcaactcatgtataaaaaaaaaattgttgctacagaatgcaattctacagacccaaaacatgaaaagttcatttcttttacattatatatttatatatatgtgtgtgtgtgtgaaacagtgaaagaagagacctttgggatggtgagcaaaagcaagttcttggagagtggatatggttggcaaagaacaaacagtcttcaatagctgaagtggtttctgccacttcatcagatctaaaatttttactggtgtggaagtaccgtccaagctctgtccaagctcccccataccagccaaagctccaataaaatttttcttcaggtatatatattgatatatataaagattaaatttgtatttcatcatctctcaaattgtaaacattatccttaaatttaaacccactaatctctaatatatatcaaatcctcaaatcaaccatattcatatcccatccaaatcagaccggatgtatatgtatatgtatatgtattttaggttaatgtatatgtattttatatttatatataattttaataatatatacgtatttatgtttatatgtatatatttatgtttatttttgaggttacgagaatggtgacggtgatggtgatggtaagatttgggggtttgggtaaggatttggtgtgtgaagtctaggattgg

SEQ ID NO: 399054 - DNA, 798 bp, Cannabis indica
ttggcttctaaagcctgagcaatcgaatcggcagtggctggtagatatgatgaagccattgctactgctttgaattcacttgaactgcgatgataaagagataacgtacaaaataattgaaattaacaaaactataatgattagaaaatagatcgaagaaattttggagtaattggagtaacataactctattttaatattttagctagaaacactatttgtagttaaaacaattccaattcaaattgcctagcttagctacaaacacttcatcatcaacaccaatacatatatgcataatatatataatcatcccaaacgtataaatatatggtaagaacaatacaaatagcatggaaatgggatcgattcacaaatcaaaatcagaaaattatgaaagtttggatagtgagtgaagtaagtacctgaagtaattgtgttaaccggcaattgattgaaacggaattcctactctcctccgatctccgatcagaacgaggttggtgatatttctagggtttacagagagaatcgaagaaaagccagagagagattgagtaagggagagagcaaagaacaatgtgactaagtaactgtgcttgggcttgggcttgggtttgggctttggcgtgggcttcttacagtgggctaatatagagtttaaagggggaagttgaggagtacccttttttgtattagttaaccaaaaatacctctccacattagatttgattgaaatgggaaattttatttacaccccaaaattttctaaaggcaccccattttaataatttttat

SEQ ID NO: 399055 - DNA, 696 bp, Cannabis indica
aagtaactttcaatgatagagcaaataggtccaaattacaattacaataactgaattgaaaagccactaaagctagcttagtagtgagggagggatgggaaaaagggagaggtcataggttcgaactcaggacctttaaactattaagttaatatatgattgtaaaatacgattacgctacacttaaaaaaaaaaaattgatttgaaaatagatcattccaaataatctctctatttaagcctaatgatttcttaactagtttatgtagctaatatattatcattaccttcaaatgtaatttaaggtaaacattaagaaattaaaataaaaatttagttaccaatttgaacatgatccgatctgtccttccattcatgcttgatcttgctaactaaaacttgacaaactaattccattgcttttattggaaagtgtacaactgcacaccaggagaaggttgcttataacgctttggcttaagaatagatgggagttgaggcacctgtaaaatgagaacacaacactgctacaatagctccattactatcaatgacaatagctccaacacccgttttcaaaacttagacatcccaagagaaggtaatctagccatgccaagctcttgccggtgaaatcacaatcagagggagagggactgaatggattctgttgaaagccttgattctgaacatccc

SEQ ID NO: 399056 - DNA, 662 bp, Cannabis indica
tcaaaaatgtcatgtccctgttaatgatgcatgtcctttgtgcattgttgctgcagaaactgtgcatcatgacccttggtggagtgtgagtttgctacagctgcctgaaaatcgcagctgcaacatttagcagttggctactattgttattcggcaggggaggtgtgtgagatggaggaagcggctgtggtgagtttggctatttggcgtgcacgaaatgattttgtttggacgaaaaaagagttgggatgcatcaaatattgttgcatcagcgaaaaacatgcttgatcagtataaatgtgctcaaggtagaaagtgtctttctttgtcttctttgaatgaagggggtgacattctgagcattagaatgcacctatgttacataagatcaaaattaatgttgatgggactttgtttgatcaggagggacgatttggtgtgggttgcgtagctcaggatcatcatggtaatatgttagaagctttcactaaggggaagattggccgtgttcaacctgaaattgcggaaataatagacatcaaagaagctttaacttgaattgcatatcatccatgggaccacgttattttggaaacggatagcttggtctgtgtccaagctatccaaagtaatttttctatggtttctcaatttggtttact

SEQ ID NO: 399057 - DNA, 598 bp, Cannabis indica
ttttaagtaaaaaataacaaaaatttaaaagttagcaaaaatatcttatttctatttaaaataccatgattatagtaatcttattttaaatctaaataaggtcaaattacttaaaatagaatattttataaaaggaatttaatatctgaccttagatttaaaaataagataaaataatcaaaatttttaaaaaataagaaaagaagtaagcaaaaatagatttttacctattttcaaattcaaattacactaatatctaaaattaattttaaaaaatcaaattaatttatttctgataattagatttgaaatatgaaaagtaaaaatcaaaatacaaaactacacaaaaaatcggaagttaattccatgaaatagcatgaaaaatcgaagaaaaacgaaaaaattgtgagctgtacggatcggtatgcaaagcacaccatccaggtgcacattcttgggcgcaaggggctgcttgggcgcacaaagggtgctgccagcagccagccacgcgcacaagggtgtgtcaccacccccgattttttcaaaacttcaaaaaatcataactaattcaaataaaatcgaaattgcttaatttttt

SEQ ID NO: 399058 - DNA, 791 bp, Cannabis indica
ttagtaatttagaaattcacacagttcaaaattttaatcaaataaaaattatatcacttagttgagtattattaggatactcataaatatcttaacatcaaatattaaaataaagatatatttataaatttatttaaaattttaaataaaaaatataaatccactccaaaattattaataaaaagtagtcattcattattcttagtcactcaagctgctataaatataataaaattaaataccaaccttaccttttttatatgtctatctaaaattttcgaaaaatacataaataaaaaattttgctctatatagctttaggctatggcaaaattttaaatgggtgttttattaaaaaaagtaaaatattgtgtttttgaaaattataatttatttctttacaccaatttaggcaatcatttcataaaaatattttaaaaaaccataatatttgaaggaaaaacaaacatatttgtattaaaaattgactaaagtgtcgaataaattcaggttacaaccataattgatgtttatatacgtacctactcaaataaaagtagagatgatttgatttttatatatgataatagtaattataatttttttttttatataagtaaacgatttttattgaaacacaaaaaacggaactacaccaagcaagggattacaaaaggagccacatccccaatacgacccgaatgatttacagagttaattctagcccacttggccaatttatcagcaacaacattgtaacaacctaactagcataggcgtattacgtgatt

SEQ ID NO: 399059 - DNA, 519 bp, Cannabis indica
gtataccttaattgttattttaatgtaaattaaataaaaattacaaaaatacttgaattttgagtaaaaaattttacaatttttactgttatatagaatttttctacaaaaatactatctttttataaaacaaccgtaaaacaacaaaatagaacaaataaaacaacagtgaaaacaacttaaaaaataactgcggaacaacagtgaaaacttaaaacattacgcagtataaattttacacagtaatttttaaaaaaaatatattatttttaaaaaaaaaaatccacctcacaataaaaagttaataaattggaaaatttcagtatgtggtgtaaaaatctaataaaaatataataatggtataaatcattaaatatataatgttcattagttgtacatccaattacacctagtgaaattcctatttcgacccaaatgtgacacattttcttaggggaaatttacactcattactgttttttccatttttttttcatttgtactgtgacacggtggatt

SEQ ID NO: 399060 - DNA, 590 bp, Cannabis indica
gcaggatgcagaatattgaagtatttaaaggtttatatgaaaatcattacttcagatgatgaatttgtaaaattatttgagtattttttcaatgtttagtacaatataaatttgaaaaacaaattatttagtacaatataaatttgaaaaacagattagatccgtttggggaattattattttcattttaataatatttgtttgatggattgtctacttaatttgatttgtcaaagttgtcgcagtatttgtacaatacacatatacatttaagaaaaaaataattaattatagtttttaataccttttttcaacaattttgtagtaacatttataaaatgtcactaattttatttttaaaaaataaaattagattctttcaaaataaaataaaatatttattgacagttgacatttgagggtttagtgaattgggaatatctcagcccagtgttcattggatcacatccaatggatttggactcatccgatccaatccaattatttattggatattggattttgccatccgatccaatccaattgaattgagtcatccgatccgatctgatccaatagatatattggat

SEQ ID NO: 399061 - DNA, 808 bp, Cannabis indica
aaattcgactaccatttcagtgggggacaaatgtcaggataaaagaaatatggatcgatgcaatcattttttatggaataactcattgattacgtaagtatcagagtatacttttgacctgctgactgtaaggtcttatgcaaggaatcaatatacaaaatgttccttaatatattagcgagaaaccatatgtcgctgaatgcaaatagcaaggcatcaagtacattatatataggaagacgaaaacgacacttgtcgactcgaaggccttcagcgtataatgtgcaaactaagtgtgatagtcggagagaccaagtaaacgaggtgcctatctcgctatgggaagacttcctgtaaccttacccatcaaactttagacattttcttagtgaagcttacaatcctgacgagtcagaagctaatattcaaacgagcctcaaagaactctttgtaaacaagaaccgcaatcattacaaagaagcagcaagaggtgcatcgtcgacctcagaagggaaaatggccccagctcgcgattatgatcactagaatcaagcttctgtcgagacattcttgggtacaacaattaaagatgtgtttaaatacacgatcattttgacccggtaaaagcgggaaaatcacagctatatgattttcaaatcgtaaccgtatttgcactacgtgatatataatcaaaccccatgattttaagggatgatcgttgtaaatagattacagtcaactttgtaattaactacccactatgtaattataaatagtggtaagaaagatcaaacaagggaccaaaaaa

SEQ ID NO: 399062 - DNA, 682 bp, Cannabis indica
ttttaaaacacccaaaatgtgagagagctaagaatcgaacccagtatctaccaaccaacataaattccctccaccaattgtgttgtaagaccttttaaaaaaattggtataccaaaatttaatatatacatatattatatttttatttttatgtatataatattaattttaattttttggggcctccaaatttgttgggcatagggcctaggccccggctgccccaccctctggtcggccatgctagtaatccataagatatcgtggaatagggatgttggaagttattttactaggatctaaatttactcatatgtatgttaataattctataagccactaaggctagcttagtggtgagggaggaatgggaaaagggagaggtcatgggttcgaactcaagacctttaagctacaagctattaattgaatgtaaaataccattacggtacactaaaaaaatatgttgataattctataatctaacaccctaaatatgaattcctaaaagaaaataaacacatataaagtttagaaaaacttacattggtggcagcagaatgttatagctccttctgttcagatctctaatccttgttcttttatgtcatagagtaataacaagtcttgaactggatctccttcaggtgttggattcttcacaatcttccacactatgatt

SEQ ID NO: 399063 - DNA, 580 bp, Cannabis indica
atattttgtccgatataacaagttacaaccgacagcaatcgaaatttgggtttcttttgctggccgtttcttcataaaattattgaattcatctagaagcatccagtttacaaacagtgagagaaagaaagaggcgctgcctcgattgacagaaagaaagagagagggaagcatgaatgagaatgagggaggcgtgaatgagctgatattagggtttttttgtattaaagagggagagagagagaagcagtatatactgccttttttattttttttattttgttgcttttttttaaagaaagaaaccgtactttatttttaatttaaatatttgctttttttatttacatattaataatatttacacttttattaaaaacaaagtaaaattatgatatagtggcacgccaagtgcgttgggaaatatttacccagtcatgtttggcatgtcattatagagtaatattttttaaaataataaaaattaaataattttgaattttagtctatagtgacactccatatttttagtgactcacattataagagaccaatctcaaatatttagagtctaattgtg

SEQ ID NO: 399064 - DNA, 525 bp, Cannabis indica
attaatattagagaaatacaagtaaatagctttatttctaattttaattatagttaatatctctttcttttttttttttaaataataaaacaaatgtcatgttttactttttaatatctaaaataccttttattatatacaaagtattataaaaatacattagagtaatatgaatataacatataaatactatatataccttaaagtaatatatatgagtattatgtcttttttatttttttatttttttactgataggtagtattcttttaattttatttttatttctttccttcatgatatatagtataacatacaaatattataccttagagtaatataaatataccacaacaattctatagtcatcaaatagatatataaaaaaaacttaaataaacttccacaagtttttttttctctttctttcatgagataccataacaaataaaaataatataccactctatttatttattaatatatcatagtgttaggatttataaaacacttaagaaatatata

SEQ ID NO: 399065 - DNA, 705 bp, Cannabis indica
ctgggaaattttcccgggaagcgtgcgagtgaggacaaagcacgctggaaacactcgtgttggtctgtagggtcagtcatcagtccaggaagcagccagagtggcgtactcgtgtataagagccatgattttgtgagtgtaaaagcccaatgaaagtttacagcggggacgttacaaaaattattggatgtatttagtattttataatgaaatatatatatatttatttaactaacccaataagaagattaattttgatatacaaataattaaaattgttgatattatagatagtagcatatatagttttggggtagtgtggttaaaagtcttaatctttggtggtgttagtcctccaaagatttctacactcctaattccctcccaataagattaagttaattgtgttgggttaattaattattggaaaatataattaaatattatagagatttacaagaatatatatctcaattagaaagttcatgccccaagaaaaaccttcaaaacttaattaatgaaacaaagccatttataggcacaacaattatttccaataattcacaaattagtggaattatattatgtaattatatatatatggattaattacgtgtctaaactaagtaaaccatacttattaatctcagtggtagtacttgacatatgtgtaagttaattaattacttgtataaagattttata

SEQ ID NO: 399066 - DNA, 1025 bp, Cannabis indica
catttaattaaatgggattttgaggaaataagaaatatttttctggattttcctccctctcacccgaactctctctctccctttaacccgtttgattttcaaatttatttgttgagaaattgcttgaagttgggtgtgatttgaagctttggaattgtggattcttgagcttggagctaggtaatttcttgctgagtttatgtaaagattgttggtgaattctcttgctgaattttaggttggaaaaagcttggttaagtaattgtaatcttggtatgcatgtgttaggttgttcttgatgcatgttaggtgatttggtgttaatcttgtgaaattgagcttctatttattgcttgaattgttgttgagcttgggctgtgattttatggtattcttaggttggaattttatgtgtaaagtaatgttttaatggctggaaaaactgtttgaatagttgaagagaaagctcctgttcttgagcttgagatttgcttaatttgagcatgatattgagtgtttttgagcaatatgaattctgggattttgatgcatgtaatgtgttaaatgagtatctattatgtgctaataatcctatatgttaatttgtgaattggtagtgaaattgcaataaaaagattgagttttgggctgaaaattcgaaggtttgctgctggttttctaggttctgcacccagatgtcgcggccggctcctttgagtggaccagggaattggtcccaggtgtcgcggcatggtctgggcatgccgcggcccgccctcgtgtttttgggcagttttgagttgattttcgaaagttcgtaacttttgattccgaactccgatttgggagttctttatatcgttggaaagctcgttccgagctctgtatgattatctgaattgtaaatgccatgcttgaattttattgagttaaaagtcaggggttaaccctaagtatgaattatcccgaatttgtgtgactaggattaccggcacctgatcaggagcacccggggatttggaatc

SEQ ID NO: 399067 - DNA, 1286 bp, Cannabis indica
gtcagtatccaagcctcaggcgatgggcaagtggaagcaattaataaaaccttaaaggatactatcaagaagaagttacacgctgccaaaggcaggtgggtcgacgagctacctcaagtactctgggctcacaaaactaccgagaagacggcaacgagacacactcctttctcgctagcatttggctcagaagcaatgttgcctattaaagtgaccatgtcgactcatagaagagagttttataatcaagaagaaaaccaggaacttctaaaattgtccatggatctacttgatgaaaaacgagctgagtcacaaatcaccaatgcagcatatcaacaccgagttacaagatacttcaacaaaagagtcaagaaaagactattcaatgttggagacttggtgctaaggcgagtatttgcaaatacaagagatgcgtctgcaggagtgttctacccgaactgggagggtccatatgtcatcaaagcagtagttggaattggagtttataaattggcctactcaacggctcgctaataaagaactactggaacgtggaacatttgcgaccctatatattaccaataaataaatgatgtaacttgcattactgatgtaaaatttaaacttcagttatgaataaagagaatcatttatattaagtaattataaagttttattctttgaaattacttaaggggcagttatgtataattaaccagaattcatctgaaaatacatggtataatgcaaactcgtcatttcaatttttttttttgaaatttaaaggttctcgactaaacctctttgatgaaagaggagtcgaacgttataacttcctaaccaaacctttttgacgagagaggggtcgaagtgttatagcatcttgatcaaacctttttgacgaagaagggatcaaacaactataatttttgattaaaaacctatctgacgggaaaggaaaatcaaaagttataactcgcatataaaattgaatactaacggttcgcgcaagctaggaaagtactaaacgagacattaagacgtcttgataaaagtatttgaacctagaaaatggatagataatctaactattaatgtgagcaaatctgaagtatacaaagtgataaaatcattagaagtatattcaagtttgcttaaggcagattataacggccatagcgagggagaattgacaactgctcgaaaatcaaaaagtttggtagataactaactacttaaataggaggattacgagcaatggaaaaactcaaaagtattgtacattt

SEQ ID NO: 399068 - DNA, 511 bp, Cannabis indica
ccatcaattggaaatgacaaaaatggataaaaaggtgtgggttatgtggaaagtctggtcactccaagaagacatgccccctaagagccacgacttctaatttttaattttttttatggatatgcttatttcaaattactatggttaattaatttatatcaatgtatttgaatattttagtatttttgtgtgtttgctttagttagaactcgattggtttgagttaacttgaccatatgtcgttgagatttttatatatttatcagactttgaacacagggctctactgacaattgttgagctcgacaatttatggttgagatttataattttaaattatattttcaggaaatggctcaactgacgttagttgagctcgactataagtggttgatattagtatagattcaaagtatagggctcgactatatatggttgagatttataattattaatcaaaatttcaaaaaatggctcaattgagagcagttgagctcgactatatgtggtt

SEQ ID NO: 399069 - DNA, 508 bp, Cannabis indica
tgaagatgaaaatcagacactctagtgagctacaggccaaagtctaaagtgccagctaagtatctcaatatgcgtttcacagcaatccaatgtgactgcaatggattgtgcataaactgacatactttgttaacactaaaaggtatgtcaggccgagtgatagttgcatattgcaaggcaccaacaattgatctatatagagaggcatcagcaactggttcacttccatagttggaaagttttaagccattgttcatgggagttcgatgtgtttttgccccttgcatctctgctttacagagaagttcctgcaatatttcttttgagaaaggatcataccagtagcagttggtacagcctttataccaagaaaatagttgagtgtaccgagatctttgagagcaaaacacctgtttaattcagtaacaagagcagaaacttgagtggaatcagaaccagtgatcaaaatatcatcaacatatactaacacatacaaacaactagcaga

SEQ ID NO: 399070 - DNA, 605 bp, Cannabis indica
tttgtagaacaactcaataatggtactccaaactcaccccagggaaattcaactcttttggccgagttctctcaagaatttttcacacaattctcatcttcgagacttgtaccatcatagctagaagaccttgtcaaagtcaagcaacgacaaggagagcctttgaaggactacatctagaggttcatggtcgaggctacaaaagtcaaaggcctcatagaagaaggccgatatacgaccatactggggggcgtactcccattgagtgacttttggaaagacatccaaaggatctcaaccaacaacacgaaggagttccttgatagagctgttggctttaaaaaactaaaagaagccattaataggccctggcggggcatgtcaacaacacgcagtcacaagacatcctgtagtctcataacctactaggcgcacaggtagacaccaataactctggccagaccactagtggcaaaacactagaaacaagcactatgccaatagctctaggaggaacagtgggaaaaaggggaagtttaacacctctcccacaacacaaaagaacaaggaggagcagtacacttgctgttggatatattttacca

SEQ ID NO: 399071 - DNA, 2036 bp, Cannabis indica
actatatatatatataattagcactcatcatatatatatatatatatatatatatatattagattaaaactacgtggaaaatacaaattaatttattttattttagttcttatatataatttggttttgaatgatataacaaacaatcatatataatttaatttattttttctaatttgattgaattttttactataaagtaattaagtttagaaagattaacattatttattagaatatgtaaaatattaagacactagttattataaaaataatatagaatatagaataaataaaaaaaaataagagaagagagaaaataaagagaaaaacataataagagagtgaatgagatctttctcagttatttattctaatacggtaaacttatatttattaaaaaatatgactaaaagaatgaaaaactaaatctatgtaataaagaaaaatacaatcaaacattaatggttacaattaacttagtgatttagatatctatatataatatttcataacactctcccttgcatgttataataactaaaatattaaattattattttttattatgctagtctaaatatgacgtggaaatattagattgcaaagaatatattattattattattattattattattattatatttgatcttgttagaaatcgataagagattgtattagttttaaaatagaagcttaaaagtattagtaaattaaaagcccaacataaaatatagtgagaatttgagttaaagtaaataggaaacttataaaaatattggaatttgagttaacttttataaaaatactgtcacacaaaagttttcaaaattactttgtttctataaaataccagtagaacacaaaacaatacaactcaaaacaacagtagaacaattaaaaaataccagtagaacactagtaaaaacttaacacagtatactgcagtataaaacttataaaaaaacacagtaaaaaagtaaaaaataccgcctaacaatatttttataaaaaaatggcaaaaattaatataccatctaaattttctaagtaaatagatatatgagtataaatggtatatatagtataatgtcttgggccatgcaaattcggccaagacattgatggacaagcccatgcattataagtattattatcatttaattaagtgataatgaatgatatatggcataattgtatcattttatggtgaaagtaaaaattatagtggtggatgtggtgtaaggtgactaagtggaatgaatgcaattttttttagaataattacataagacactattttttgtaaaatatttatatttttatgtctaaagattgttttttttttttacatttttacggctttccaaaaaataacacgaaaaccacataaaatcaacaagaaaattacataaaagtaacatcaaaataacatcaaaataacaacaaaaaataacatacatataacaaaaaatcaacaacaaattaacaaaattacaacataaaaagaccgtattttctgtaaataaaataaaaaaatcgtaaaaatatttaaaattccgtaaaaccgtattttttgtaattattttgttatttttatgtttttgtgaaataatctcttctttttttatatattaattaggttaatgtttatagacatggacatgcatgtggcagtgagcggggtaaatgatgggatagaaaggagagattctagctgagaagtcactacgtggatgtctatgagagataggctcatattatgaaagagtattattattggataccagtgttagagatattattgcaatggaagaaaatcaagatattacaactctattgcaatataatacaaaggaccaaacaatgcatagtatacaatatatatatacactatatatattatatataaaaaaaggtagaagaagatatatatatatatatgtacacacttactcataggcggacccacattgtagcgagggggggcagtcgccccccctgaaaaaaaaaaatcgagaaaaaaatgtata

SEQ ID NO: 399072 - DNA, 896 bp, Cannabis indica
tttatgtagtttactttttcccaggcttgggaatgtacatgatgtctggttttccatctttcactctcttgtctcatgccaaatcaaattttcagaatgttctgcactacgatataatcgtttcagtcgcggaatcaaaggcatgtaccacatcactttttgggggataagtttcctattctccttactcttgtttactttatggcgggataaaccgcaagtcgggcaataattcatgtctgcatattccttacgatataaaatgcaatcgttcggacatgcatgaattttttcatacttcaatcctatagaatttaacgttttttcacttcataagtagattccgggaagcagttggcaaatggtaagatatctttaaaagcagctaaaaattgagtaaaacatttatcgctcactccattttctgcttttatgttgtaaaactttaccattgttggtaatcttagttttttacaaccatcgaacagaggtttatcagcatcacttagaattaagaaattcctcctgtgctttgttaagcaagtccaatggatgattatcgaaattattaccctcaatatcatctacccccgcttttctaatggatatggatcgtcagctaaatgtttgccatgccaataccaagtagtataaattttattaaaacctcgtaaatacacatggtctttaatcattgtaatatttcctttagattcattacaatgatctacacacaaacaataaatatgtttaagatttttagaattctttaaggcaaactctaaaaatgcatcgaatcctacttgaaatcgcagtgtgtctctctcctcacacttccatgatttatccatgacaaatatcctaactaaaaaaattcagtatttagtaactaatta

SEQ ID NO: 399073 - DNA, 1103 bp, Cannabis indica
aaataaaaccggttatataacatgtaagatctcggttgactaagtcaaagaaaaaagaaaagtagtatatatacaataataataataaataataaataaataataaaatgatatgatatatatttatatatatatatgaattctttaaaatttatcagacatcaacgtctctttctctttctctcttttcatctttctctctcttcaagcttcaaataaaacccacaaacaaccatcaccaccacactccggcgacccacctttggccaccgaccagccccatgcgccagaccactcgaacccccaggtgtcggcgacctcaccccccaagcggcgccgcttctttcgccgccgttagcttgggatcgcaagtcaaagtttggtgattcaaactttgaatagatttttcggtcacctccggcgtccgtttgacgagaggtcttcaccactagactcagcttgtcgaggagaacaacctacactaaaccatttttcccggttcgctaatttttccagtgacatttttgtagctccgctccttctcggggacatcgtgtaccgttttgacaaacggttggcatgggtgtgatctactcgtcgaggaggtcattttgatatacactacccctatatatttttggcgacgtttccgatacaccgatttttaccgcgaccgattattaatgtgcactgcttaggtgaggcttcgaaactccaaattttaaatatagtcatattatatgtcgttggacttgatttttaatgtagaatgcgatgatgataatttttaaccatttgatggtataggtgagagtaataggtaagattggactaaataattggagctcgggacttaagaccttaagatcgtcttttgaaaaaagtttaacgacttaggagaggtagggactcaacttgattattggactttgatttttatatgtgttgtataacattggacatatttcaatttttataatttacaaattgtttgaaaaattaaaaacttaatctgcttatttttctggactgttttcgggcactgagtgccaaatatatttttgtacaaatatttatgccagttataatttttggatttattc

SEQ ID NO: 399074 - DNA, 589 bp, Cannabis indica
tatttaaaataaatgtattttttgatgaactatttaagacagagtttagtttaaaagaataaaaatatagtaataaaaatgagaatataaatagaaatatatggaatagaatcaaatttaaaatacaataaaaaaaaatattgataagaaaattattaaatttttctcatcttctattaaaatgatcgttctttccattttaaaatataatagttattccgccaaaataaagaaaaagtcatttattggaatgacattctaatactttaaaatataaccaaacaaagaaatcaaataaaaattatttcttttttatatcattacctcctaccaaaagccacccaaaacaaatataacaaaaaaaaatctatatgatattttttcattaggctaattatgatttttactccctaaactttgacatatgccaaattatgcctcctcaacttttctgaactgttaattaaagttctcctgaactattgagattgttgtatttaaggacttttgtccaatttcattcaattttgtactaaatcatgctttccgaactttgatataccaaatcatgctcatcaaactttgatat

SEQ ID NO: 399075 - DNA, 696 bp, Cannabis indica
caatatcagttctcacaaatttttatttaacatgatttagaaacagctaaccaattattgtatatgtgaatcagtatagtattgagcactttaaaccttaaagtgccacataacaatattaatataaaaaattattttaaaaaataatacaaagattattcataaaaaattaaataaaaaataaaaataaaaaaattattaactaattagtgggtaccacattaatatgacattaaatactttaaggtgctactaataaatataaaaataattagggaaacttacaaaaatactgtttttttaccaaatattttcaaaaatactgggacacggcaaactttacatttttactgtccaatcccatttttatttcttttatactgcccaggcccaatatatttacttttatactgtcaatagtaacaaaacacaaacaacacctctccttcgtggttggggacgaacaaatcaataccagaattatagaaacaccaggaaaaaaccatcaaatctggcaaagagaaaaaattactaaatcaacaacaaattactgttttgtagtgttattttactgttgttttaatatggaaaaaaataccacgtaaatgaaatattatgaaaaatgacaggacatggaatctatactagttctcataaagagcaatggacaatgggaaaaagaacataattatttca

SEQ ID NO: 399076 - DNA, 1125 bp, Cannabis indica
gcaccaaacttttaatacaaaaatagatgttaccaattcaatgtcatgagtaggataccgctgctcatactccttcaattacctagttgcataggcaataactttcccagactgcattagaacacaacctaaccactgttttgaagccttacaataaatcacaaatttctcattactaactggcaaggttaacactggtgcggtaattaacctctgcttcaattccttgaagctagtctcccacttgtcagacaaaacaaaattatagttcttttgagtcaattctgttaagtagaaatcttagaaaaaccttttatgaatcttttatagtatcttgctaatcccatgaaactcttaaccttcgttgcagatttgggtcgaggctaatcccaaaccgcttcaatcttcactggatccaccaagataccatccttgttcatcacatgccctaagaaggttactttggggagccaaaactcacatttcttatatttagcataaagattatgctctcaaagacgttgcaacaccatctgaagatgtctttcatgtacctcctctgaatcagagaaatcagaatgtaatcgatgaagacaattacaaagtcatctaaaaagtcctttaacactttgttcattaaatccatgaatgtcgccgaagtattttttaatccgaaggacatcaccagaaattcataatgtccataacaggtatgaaaatctatcttaggaatatcctcctcccaaatcctcaattggtgataatcagatcgaagatcgatcttggaaaagacagtctttccttgtaattgatcaaacatatcatctatcattggcaaaggatacttgttctttactgtcgatttattcagatcccagtaataaatacacatccataaggttttgtccttctatttcatgaacaaaacttgtgcaccccaaggtgaggtactcggtttagtaaattttaaatccaactgtaatgaccgctttagtaatttagatgagtaaaggcaattagcactaatttatgatatttttataattatttatgaatttaattatttgtgggcctcattgttagaaatgggcattagagttataatttctcaattctggagatttt

SEQ ID NO: 399077 - DNA, 651 bp, Cannabis indica
ggcacaagggacgaatgctcaaacccaacctaaacctggagcgagaagaccacgaggcagacctcatggctcataaaccaggagaaaggaaaatgcccgggaggaacgaccgagggaaaatgagacacccactaaaaatcagaatgaacagccagatgggagacaaccgaaaattgatgaacgagaaattcgtgagccactcaaagacaaagtctatgagtaggacgcgatcggtgagtaagatgaggtctgccaacaattactcccaaccagatcttcgagagcacttgaatcggaagaaacctgaccttcgccaacagcttggtccaaagctagaggatccaatccaattacgaataaacaagctggaagacaagttcaggagatatcaagtgggggaactagggagaaatcttgatacgactcaaacgagaagcttgagccgtatcatccagatattatgaatacccctttcccttcaagattcaaaaacccgcatgtctcatcatatgacggaaccattgatctggtctctcatttgaataactttaacacaataatgcgaacgagtaatgtgatgaacaatttacgctccattttgttccccacctcgcttgttggagcagcgagtagctggtttaataagtttac

SEQ ID NO: 399078 - DNA, 543 bp, Cannabis indica
ctgcccctttttgtgctgagtattgtgtgtgtaatgcattttctttttggaaaataagaaaattaaaagaaaaagcaaattaagagaaaactatctctctctctctctctgagcaccaccaaaccaggaggaaaccagccacctttatcatcatttttctgagttttgagcttagattcaagtgtttttgaagcaaggtaacccctagaactcttaatctttgtttttaaagctttgaatttggtttgagtatgcaattttgtagtttaggggctgttagggttaggttgtgttataatttaatttctaagcttaaaatgagttggaaataagttcttgcagctgtatttgaggttttttgtggtggatgaccaagtttgagtttgaaaactcaaacttgggtcattaatggcatgatttgattatgtatgtttttctagtttctgttgattgagatatattgtggaaggtcattgtaggtgttttggaacgtttggtggcatttggacatgttttgagtaggtttggaattgtttggggaaa

SEQ ID NO: 399079 - DNA, 672 bp, Cannabis indica
ctcttctccccaaatactagtccttctgacaaatcccattttctcacttctcttaacatggaggataaatcattcattgacaaatatctaggagttcctcaatgcctctcccattccaaaaaatcctctttccttttcattctctaaaaagctagtaataagctttctttctggaaccaaaagattttctccaaagctggcaaagaagtcctgctcaaatcggtaatccaagctattccctcttatgtcatgtcatgttaccgacttcctatttctatctataagcactttagcagtctcatggctaatttctggtgggtatccttgggaaataggcataaggctcattggaaaagatgggatcagatttgtaggtcaaaactctatggggtcttgggttttgtcaaataagtcaccataatcaagctatgttggccaagcaggcttggcgtattttcactaaccccaattcattggttgcttctctttaatttgaaagcaagatctttcaaacataatgactttcttcaagcttctattggtaataacccttccttctgttgaagaagtcttttttggggtagaaactttctttccaaagcctgatttggaaaattggggatggtaagtcagttgacatcactagctcgaattagttacctaatagtacgc

SEQ ID NO: 399080 - DNA, 700 bp, Cannabis indica
tttttttttttgaagattacttgttatagtcgtaggggttttgatcaaaaataatggtagatgaagcgggttccctcaaatcgatgaagctaaggattcatatccaatcaggcgacatcaaatctggcgcattcaaattcgagaagtatttgcctttggttttatcaaaatgtgatcttcccccaagacccattcatggaacaaaccctccccaagaatctcaaatccatatgcccaacttcgacgccttcaccttccaagatctccgaacacctaacatcattaaatttctgcgattgagctgcaaattgaaccaatcagacgaatttagatgaggttagtgctaagaaatttgaattttgtcatggaaaattctagaataaaagctgacattccaaatcattggtggcgaaacttgaactattcgagttcttcttgatgtatgtcatccttactgtgatctttattgaagaattgattttccatgtaatggtgatgtgtccgattgaactgttctatttggcttgtagatttgtcccatttttaattctaaaccatttgagccgagtgggtcgaagtacaacagagtcatttggtaagatttattggtccgcttggtcgattcgttcaagtataacacggtgagcagtcgattagtcgaggctcttcaatacgatggagcacaattgctacagttggt

SEQ ID NO: 399081 - DNA, 992 bp, Cannabis indica
cattgcagccttgttccatagctctagttttttgattcccaatccacctgaagttttagtttgacaaatattgtcccaagaaacagcccctgctccatggaaaacagcctgccctttccacaaaaaagccctgcaaacatcttcaatggatttcaaaattctttttggcataatcacaatctgactccaatatgcttgtattgcaataagcacagagttaattaatgtgattcttcccgcaaaagataagttccttgaactccacgtccttattctagctgtcattctttcaaccagaatctcacactctttacctgaaattttccttgcacaaattgggattccaagatatgtaaatggaagctcttgtctcataaacccagaaagttacagaagcttgttcacactcccctgctgcatattactacaatatatagccgttttgctagcattggcctgaagtaccgaggtaagagagaatagcttgagtgcatgtagcatgtataggacacttgtaaaatctccatggctgaaaagtaacacatcatcagcaaaagccaagtgattcaacttaagatccgagcatctatcatggaaatggaaatcttctctccccaatcttccccattaatctagaaaaatattccatacccaggacaaatagtagaggagacatagggtccccttgcctaagtcctctcctagattcaaagaatccatgtaaggatccattgaacataagagagaacttaggagtagtgatgcaattcataataagttgaatgaaccttctagggaaatttaggccagttagcatttcctccaaaaagtcccactcaaccgtgtcataagctttctggagatcaagtttgatcatacaacttggtttgtttgctttcctgtgataatgcctcaccaaatcctgacatatcataatgttgtgccctatgaatcttcctttaataaaacctccttgtgattgagatattatt

SEQ ID NO: 399082 - DNA, 651 bp, Cannabis indica
gtagtcgatgtgcgacatgtttgcaaaaatattttgataacatttgtacaaagtttaaatacgggataccggcttatgtaaatatatatatttacaaagtttaataattttaatcaaagttttaatttggcatgattttcgaggaaaactctttgattagaaaaggtggcacgatagttagaaaatcactgtagcgctcctaagtatcagggtgttacatttcttacctcaagttttgattcaggtatgttggtcgaccttcttggaataggatcgatgatcccaggccctatgtcataacaataagtatttatcttaaaacattgtttaacaattgcaaaggacaacctagggtttcctaccgaaccccgtagttcatatacactaaaataaaatttatattttggctctaaaatatacaccatatggtagagctcatcgcaagcttagaaacgatatatagaacgtccaaaacggacacccgggtgaaaagttatgacaaaaatacgattccagatctcactgaaatttccagaaatggcatgtcgttttggcaaaaacggcatttttaggcacgaaaaactcaaattttgcactcactgaaatgcccccgtatccaaattattccaacacatatataccatatatata

SEQ ID NO: 399083 - DNA, 890 bp, Cannabis indica
tatgccccataaagcttgatcaacaaggacagctgcttgcacatctcttgctaaacctcctccatggaagcaagtcgattgttcaccacctcattcttgacaacctggacatctggaggagcagaactcgaacttccaccagcagcagcagtaacaccagctttaggacccttgggaaaaagctccatcataatacgctgagggttggaatatggtgcaagttaggggaggctcaagtgtttcatgagattgggccacatctttctgagaggacaaaactttatagattaagttaggaaacataagcttatgagttctctttttacctcttcgaaaagaaacaatctgataaaagattgaagaagccagatcaatggatgcctccgaggtgattcgaaaaagaaaggatgccaaatcttgagacaccacggttttgttggaattcgggagccaattgctaagagcaaacctcatgagtgatgcatgagcataggtgagatgtgtaattcgaagactctccccagatttccattcaacccgtgcaccagtaagttcaataagcatcaaatggcgatccatagacatgatcgcattaggcacacctttgggtaattgcaaagccactgcaatttccttgacagtaaaagaaaaccaatgcccccagacataaactttaccaaaaatatcagaattgtcatcaagcatgtcattagtcaaattagcataaaattctttgaaaatattttcaatatacccttcaaaacaagtgagagtattttcccattgatggtattgaataaacttaacaataccatataccctatgagcatgcaaattataattcctttcactttcaaactttcgggtagcataaatattccaatcacgct

SEQ ID NO: 399084 - DNA, 892 bp, Cannabis indica
agtgtaattaccacaaaagtttgctgaaatttttgttgtcatagcattgaactagtattcctttagttcaaatcggtgataacacacactgtaacgtcctaatatatagggacgctacatgtgtgattttataactagtttagtactaatagattaattaattattaaaattcgtgataatattaaaaacttcaccaatgtaaaacactaaaaacggacatcataacgacactaaaactgtgttttggggatccctgttataatggttttaacaaaaatgactatatacaacaacaagtcaaaataagaaatcaaaatacacagcagctaaaacaactcatggcaactcggttcacaggcctataggattgatatgtacattgtggaaaagactgttacctcatggctgctctaacttttccttgtttttacttgcacaacacatcactcgtgagtcataagaactcaacaagaaaagtaacaaaaaagaatacatgaaatagttaattatccatctcactattataaaatgatgaaataataatattcaagagtggataatataaccaatcacatgcatagaaataaaagtgatcatatattgtatttcctaatcaggcaagcccatgtcataatctggcatcatacatatattgatgtatcacctaatcagatgagcctgtgccacaacctggcactaatgtatcgtatcacctaatcagaggagattgtgccacaatctggcaccaatgtattgcatcgcctaatcatatgagcatgtgagacaatctggtaccaatgtatcgcatcgcctaaccaggaaagctcgtgccatagcctgactgttgggttttatgccctaaataaaactcacttcaatataatcagattt

SEQ ID NO: 399085 - DNA, 513 bp, Cannabis indica
tgaatttgagtattcaaattccacaagctaatcaattctaaaacattggtctttcagaaataagtaatgctccacatctaacaaatcatcattaaagcacaacttagctaatttaacatagttggtgatataacatgatcatattggccacaaaattactagtaatagttaagccacaacacataggagactctaaatccattcccaatcaataacagtgatgtgcactagaagttccacactctatcacataaataaaagtagaatcatcacacatttgttcattattaattataatgaaccactgaatataaaaattcctactcgacaatataaataatgcaaagaggttgtatcacactttttgcattttttataattgactgataatgtaatgtattatttaccaagagtagtgtgatatttctagcaacatcaattggattaacatttgcaagactatagatgtaaagaaaaaaaagagattaagttgacttaatttgtatataataa

SEQ ID NO: 399086 - DNA, 508 bp, Cannabis indica
tcatcaaaaatatcagtaaccaaatttggttatagatatttatttaaggaattaaatatgatttaattaattaaaaattaactacaataaatagaagcttgatttgagaaatcagaagaagcttttcacactgtaattttctaaatattgggagaaaaagaaaaattaatttttcttctctaaaatagtacgccattgtttgagactgaggttggatgagtacaagcatccaaaaaaattacattttgttttttttttatttcttttttctattaaaaaaatagaagagagaaatcgtataattctagtagtaagacatagtttgaaacataaatcttatacaaatgtaataacacagaattacatgatttagtcacttttgaatagcgcaatctatcttaaataaaaaataataattggttaaagagagttatcaacttacactacaagaatgtcactttgtgctggcaaaaattgatattgcactggtaaaatagaatttactgtg

SEQ ID NO: 399087 - DNA, 758 bp, Cannabis indica
aaggaaattgatactttttgaccaacaatgatcgaatattcaatggattgtgtcactttgtccatttttctgtcagaggaatcgatctcataggctccttgcctaaaggaaaaggcggtgtccaatatgcgatagtggtcatagattacttccccaaatgggctgaagcagagcccttggctaccttaatattaaagagagtccttgacttggtagtgaagaataacatctgttgctatggactttcacaaaagatagtgtcaaacaacgacacacaattcaataacaaactcattttcgaccgcctgttattgagttgtgcattttcttgtgatttttgatgttatgttgatattgtatgtttaaaaagagtgatatcccttctaaactttatgcaattcttttgagcaattaagttcttgtctaatgtaggtgaattttatttaaataaataaattgaaaattaaattgtaaaatttatttttaatttaaaaaatataaataggaaaatttcagttagaattacataaatttatgttttatttttttactaaagtatcaatacttcatgtataaaaaggctaaaatattttatatttgagagtgaacctgtcaaaacataaatattcatagatgctgcaatatatatatatggttttaattagtaaaaatttaacataaagatttggtactaaaatgaaagaaaaagtatacttttccaaaattaaaaataaaaattctgctaaataatgttaaag

SEQ ID NO: 399088 - DNA, 2786 bp, Cannabis indica
cgggttgggttctaccagtgatgcacttttataactctaattttgccttttaggttccctagtgaaaagaccttataatattttgtaaaatatttttgggatcccgaaatatatcacttttgatggtaatgtttgaagttattacaagttttattttcattctattttagataaaagtttaaatttcccgcgcttatttatctagtaatcccgaattaggggattagggtttctttattggttagcgtagcatgcctaattattagggctttacagtttggtatcagagtgccaaggttttcaaacttcctgtagaccgggagaacatgtacagtcatcgtcagagacaagctcaactcgtggtgtactaagtgttgagagtaaacgctttattgcttatgtgattacttatttaccgctttccattttaggttgtatgtgagcatctagagtatttatgtgatatatgatgtcatgcttagaatgttatatgataaatgtttatttaattgtaatgaaatagtcgagttagggtttaaggcaataagtgcataagtgtggtattggtgcttaactcgctagggctgttaattacaagggtacttgtagaaatgggccctccacaatcatttagaccacaaggcaagcaagtagagcctggtgtagaccagaccaatccaccggcaccacctgcgcctccgcagaatctgggggataatgcgggggttggcaatgctaatccgcctgctgactggcagcagatgtttcaagaaatgcgaggtatcgtacttcatcaagaggaagaactgcattgattaaggcaaccggcaccggctgcccctgttcagcaagtgttaccaccagcttctgtaccagtggtgggtaaccaggggtttatgttgccgcatagagattcagtgtttgagtagtttgtgaagctacaacctccaacttttctaggaggtactgatataattaaagctgagtagtggatgggtacaatcacccatatcattgataatatgggggtgacgggaacagagagagtaaattgtgcagctgttatgttacaagatcatgcccatgtcttgtgggatatagtgggactgactcgtgatgttagtgtgatgactcgagaagagttcaagagtatgtttgaggaaaaattttataacatcgttgtgaggacctcacatatggaggactttgtaaaaatgacttaggggaaaatgtctgtggccgaatacactatggagtttgatcggttgtcccaatttgctagtgatttggtgcctacagatttcaccaggaaacagaaatatgtgagaggactgaatgccacaatcagtcggcacttgaagattaccactactcatgacattttgtacaagaaaatggttgagctagccttaattgctgaggaggctaagcaacatgtaacaaaggatgccgccacgacatcgaatcctcctccaagtggtaatattagtaaggggactgacgacggtaaccctaatcacaaacggaaggctgatgctttcagaacattagggggtaacaaaaagtttggaggaaacagaggtggccgtcaggtccacggatcttcatttcgatcttatcctgagtgttcgaaatgtaagaaacatcatcagggtgaatgtctggccaagacttgtttccagtgtggcatggtgggccagtttattcgagattatcctcaggctaagaaagaggagccgaagaagaatacaactcagaacccgggacaactttttaccatgactaaggctgatgctgatgctagtccgttagtggtaacaggtcagttatctataaatggatgttcctatactgtattgtttgactcgggagctactcattcttatgtgtcgagtagagtaattgaaagtttccataaaccatgtgatatatgctttggggtttgctaccctgttaccttcaggagaccttatagtatccattaggtggattcgatctttgtctttttggattgacggttgtgaattaaccgccaatctgatagagttacagagttacaactgtcttctgattttgacataagcctgggaatggattttctgtctaagtatggggcaacgatcgactgcaagcggaagatggtagtgtttgagcctgatagtactaatccagtagtgtttgtgggtaaagttcaggggacacgcataccaagaataacatttttgaaagctaaagatctgatgaggagaggttgtctgggattcatagtcagcgcagtggataccagccaacctgtgacatatggacctaaaaatacaagattggtatgcgagttccttgacatttttccagaagatttaccgggattgccacctactcgggagattgaatttgtaattgagttagttccgagagcggatcagtatcaaaagcaccgtatcaaatggctccaccggaattgaaagaattaaagatccaattgtaagagttattgaatctagaattcattagaccgagctactctccttggggtgctccggttttatttgtgaagaagaaaaataggtcactccgaatgtgtattgattaccgagagttgaacaagcttaccattaagaacaagtatcctttacctcaaattgacgatcttttttatcaacttaagcggaaaacaatcttctccaagatcgatctttgctcaggtgatcatcaactaaaaattcgagaggaagacatcccaaaaattgcgttccatacttagtgtggacattatgaatttctagtga

SEQ ID NO: 399089 - DNA, 935 bp, Cannabis indica
aagtattttgatggatttaagcaaggcaactggacaaaaagtttcctcatagtcaacaccttctctttgggtataaccctttgctacaagtctagctttaaaaatttcaacttttccaccagcacctcttttcttcttgtagacccatttacacccaattggatgataatcatcagctgcatctacatattatcagactttgtttttcttcatggaatccatctttgaatccatgccgactgaccattgtttctgttatggacttgccattatctgtttataagttaatgggtcatcatcaataccgtcaccaataaccatattgatttcaccatacaagccataacaagatgtctttgtagaggagccgtgatcttttgaataagaacattagtggtagtttccttgattgtgttaacttgcattggctcaaccgagggagtgggattatcctctaattgagtaaaagatgatggaacatttgttggagttaatttcgaaagcatttcctccaatactactttgctttgtggcttgaagtttttaatatagtcatcttcaaggaatgtggcatttgtagaaacaaacactttattattcttgtgactataaaatagtccacccctagtctctttagaattgcctaaaaacatgcaaacctcagttcgcatttctaacttgtcttctttcttacgtaagacatgagcagggcacccctagattctgtaataatgtaaactaggtatacgaccattctctaattctacaggtgtcttagggactgatttaataattataattaattactaaatatattaattagtgataactctatgaaaatagagttatttatatctttttgagcattaaattagctttgttctcaagtatttttagtttattttagtgacttttatttggttttatttagtttt

SEQ ID NO: 399090 - DNA, 667 bp, Cannabis indica
tttttcgttttttttttttacaagaaaattgtaatttcatagatataaatcctttgaaataattgtttgaaaagtagtaaggataagccccccattatagctacgaccaacaaaataacaagcaacagtcaccaaacaattagcagtcttatatcaaaatcatttaataaaaacacaaaaaatattatatatcacaaaaactaggaaacgataataaaaaataattaaacccaaaggagagactatatgagttgaactatgaagagcatcaataatactcttgcagtctgactcaaccacacaacgcgtgagaacccatgttgtttgatctaactgagtgtgtgcgatgcccgtattttatatttactaaacttgaaagttaactttaatatattatatctttgtaaccatatgggtcgggatcgcgaatatcaaaatacaatttaaaagtattttactaatatatacatataataattatttttttttaaaacttgctagcatacaacatcaaaatacagactccaaaatagtaaaagaccgaaaccctccaggttgcactgccgcgatatgtacaatcactgccgagctctatctcactgttcctccagctttgcttttcctttacttacacaaggtagcacactgatgagtcaatagactcagt

SEQ ID NO: 399091 - DNA, 632 bp, Cannabis indica
gcatttattttttgaaattcaaataataataactttcaaagaaaaaaaaaagttgacatattaatttataataatttttattatatatatataattgatcatttttttcttttttaaaaaaatagtctcattagaactttaagaataaactaaataaaaaaatttacaaaaggaaaaagaatgccaagaaacattattaattctgcttacaaaattacagtgataagtctagcgaaatttgaactcttaacctctatcatatatgtaatctagtttaactttaatattatgtttataaatatcatcttttattacaaatatatattgtaactaattaaaatgtatatacatttttttttctatttttttttttcaaaaacagacaactgccccatcgcttctatatgagtccacccttgcaatctaccatacataatgttattcaaaaaaaaaataactaactttaccaatgaatatgacgttccttgagtggtatgtgctgaattttaaaaacattgataatgagaaaagatgtttagtcgcaactctttcttgggcaatatggggtgcccgaaataaaaaagttaatttgaaatcataaaactccaatcgcatcgaacatctatgctttt

SEQ ID NO: 399092 - DNA, 494 bp, Cannabis indica
aaaaaaaaattaagaaaagtagaaatgtaaaaatttatttgtcaaattataaatgtaatgtttgcaaaaaaaagttagtatttggtgtaaattttctacatagaaagaaaccgtaacgtgtgaatgtgaaataaactaaaaaataataaaactaattaagttagaaacaaaaacatgaaatatgggttttgataataggtttacaaaaatatggcatatcaaataccataaaaaatcttaaatgtgaaaaaatgtcatagaagagtggcaaacctataaatgccatatttttgtaacttttttacaaaatcccatatttcatgtaatattcactaaagtaaataattgttattcattgaataagctcaatactaattgggcctaaataaaactatgatatggtgatattacactttagcaacctagtccattaaagtatctagaaataaatgggcttcctatatgcatctaagcccaaaagcaaacatataggc

SEQ ID NO: 399093 - DNA, 778 bp, Cannabis indica
gtttcggattttaatgtttttcaaaacatgatggcttttctatggcaaccgggaatgggaatgtatgtcaaggaactcaatcctaatctatttctttttcaattctatcatgaagttgatatacaaagagtcatcgatggaagcccgtggacttacgataggaaaccttttatttttacaagattaaaggaaggcgagaaccctcggtttgtggagattaaccatgtcgatatgtggatccaactccataatctaaaatccgggaatatgacactcagtgttgttacggccttaggaaattttattggatcgtttgtggaatcggatccgaataattttgtgggtgtttggagggactatttacgtgttcgggttcgattagatgttagaaaaccaatcaagcgtcgtatgaagatcatcaacgaggattcttcgtggtactgggtgaactttaaatacgagaggttgcctaccttctgcttcatatgcggcatcataggccattcggaaaagttctgcccgaggttgtttctgaagccgctacaccttcatgagaagccttacagcttggaattgaaggcaacaactcaacgacgtcaatctacatttggggcgcagtggctccggtcggaagctgcagtacgggacgaagctcggcgtgaaggccaacctagcaaagttgatccctcaacgattctcatccctagaaatccggaggtaatgggggaattagttggtaaattccaagattctacaattactcataatcagccacaaa

SEQ ID NO: 399094 - DNA, 168 bp, Cannabis indica
ttttatgtgccagatgtcgaaatacgagacgacatgatttattaactgtagaggcacatatttttgacaccaatgcagcacatgccacacgtacagcagccatgaaggaaacaagatgtgaagttgtaagtgttaatttcctgaagccttcactatctatttatagca

SEQ ID NO: 399095 - DNA, 555 bp, Cannabis indica
aaaaaacccaaaacaaacactaaaaataacaacaaatactataatctctaaaatagattcaacacaaaaacaagcataaaaaaaaaccctagaagttcatgaagatttaaggaaaattaacagagaaatcaacaaaattaacacaaactcaaacttaaaacaaaaattaactaaatagaacaatgatcaaaaacaccaaaacaccaaacacaccctaaaaacccaaccgatcatcccaaaaacaacaataaacccaaaaaaaacccagccgatcatgcaaaatcatcaagaaaaacaaaaaaaatcaacaaacatctcaattccgaacttaataactaaaactaaacacattacaacaaaatttatgaaagaatttatcacatacctcacttaactttgaagctgatctcgaaaatgactaaaaacagagcacacttcactcacggcaactaaaaatcgaagctaaaaatagagcacacgaacgacaatggaagagacacccagtggagaagaagaaaaagaagaagatgaagaaaatgcaaaccctaaaatgct

SEQ ID NO: 399096 - DNA, 550 bp, Cannabis indica
aaaaaaaaaactgttataaaatggtgatgaaccaacttcaaaccgttggcaacctcaaataatggtagaaatgtggatcaaacttttaaacaaataaaaaaaaatgaaatagaatgttgagaagaataaaactaagaaaaaaatagaaagagaaagaaagacgatgagtgtctcgtgggtgtgtgttattaatagaggtaacatgtatttagtttttgttttaaaaaaatgacccaaactataatagacgtgacccatatcactcacacagtacaaaaaataatttttaaaataaatacaatatttttgaaaaaactatataatatctttatatattaaaagtgcctatctaacgataattcttggtttaacgattttggtttaatgatttctttttttttatttagccttacaccattaatttaacagactgttaatgttaaacgttaacaaataaataaactcaataattaagccaaaaaattaaacaatctttaataaacccaataattaaacccaaaaaattaaataatatttacgattaacttac

SEQ ID NO: 399097 - DNA, 676 bp, Cannabis indica
gcatcaagaaaataaatgtatatctcgagtcttagctaaataatatccttaacttgtaacaataccaaaatattgtattttgtaactaaagcaacttttaacttattttagagaaatagccactatactttaataattatctctactcacactttataaaaaaataaataagacaattattttaacacgattattacctcaataaattttgaataccaattttaatctggatatcacattctaccctccttaaaagaaatttcgtcctcgaaatttaattttccaaacactttgagtactgtctcttcatgtccttttgtctctcaatttattttattggccgaacatacatgtatcgaacgtttgtcttaccggtaaaatcataacacatttaatatatactacttaatttaagaattattatgctactatactttacttaataacaaaacatacttcataataataacttacacatacactttaaatatacaagttttgcaattgcatgctcatgatattataaaagttttcattctcttatgaacatccttacatgccattaagagtaaaaattatttattctcttatgaacatccttacatgtcatcaagagtaaagatatatatatatatatatatgtatttttcctcttatagacatccttacatgccac

SEQ ID NO: 399098 - DNA, 1455 bp, Cannabis indica
caatcagtcgggacttgaaggttgccacttcacatgacactttgtagaagaaagtgatagggctagccttaattgctgaggaggctgagcaatatgtagtaaaagaacagaccgcaaaggatgtcgtcacgacatcgaatcctcctgctagtggtaacatcagtaaggggaccgaccgtggcaaccctgatcacaaacgcaaggctgaggctttcggagtatcagagggtaatagaaagcatcagggaaattgaggtggccgtcaaggttacggatcctctttcaagtcatatcttgaatgtccgaaatgcaagaatcaccatcagggtgaataatgggccaaagctatgtagtatatttgatatggattatatgaatcggacgtttcaggattacctgaatagatgtgtgatcgtgtttatcgatggcatttttgtgtaatttgaatcagataaagaacatgagtttcatctcaaatcggttttgcaacgattacgggaccataagttgtatgctaaattcaaaagtgtgaattctagttatctcgtctcttcttcttggggcacatagtggataaagatgggatcatggcagatccggccaattgaagctgtttgggattggccgacagcagagtcagctactgaagttagaagctttctgggcttagctgggtattatcgtcgattcgttgagggtttttcaaagattgctatacccttaacggagctaacttgaaagaacctgaagtttgtttggactgatcggtgtgagaaaagttttttggagttaaagcagcgcttgattactgctccagtgctaactcttccttctgataaggaaaagttttggtttattgtgatgcctcgagacagggccaaagttttggtttataaataacataaaataactcaaaccagttataattaaaatagaccggttctataacagtgttataatgaataaaaacaaataacacgaaagaactcaaacttgttataactaaaatagaaccggttatataacataatgaatacaaacaagtaatacgcaataactcaaaccgattacaattaaaaacaaagaagaaatcagttcctaaaacaatgaaatataaattaaagacaaaactagtttcataataaaatacttcataacacataatacctcataaaaccggttataatttttttaaaaaaaaaaagtggggatcaaatgtctcggatataataaaaatagaaccggttctataagaaattaataaaaataaataacacaaaataactcaaaccgattataattaaaatataaccggttctgtaacataatgaataaaaacaagtaacacaaaataacttaaaccaattataattaaaatagaattggttctataacagtgttataatgaataaaaatcaataacacgaaataactcaaaaccgattataactaaaa

SEQ ID NO: 399099 - DNA, 818 bp, Cannabis indica
aaaaatacttttggttttgctttggcctttttttttaggggataaatactttatataaatacatataaacttataaaataatataaatattcaatcttgattaatattttaaacttcttattagtcctattaattataaaaaaatttatagaaaactaaaaaaatacatagttgtcatagacgataatattggaaccactttagataattgtttgtaaccagacacatgacatatacataatattataattatatatttaatactgaaaacaatgtatttatatatatatatatatatatgtataacaattaaactatcagaaaaaataaaaaattagtaataatggcattaatctgtaattattttgggtacgtacccacacagggcagtgtgcaaaaaatttaatttataaacattatattattttaaaaatatatgttatatatgttgtttttttttttggttatttttctacgtattttgtacatatacgtatgtgcatggttcataaatcataatttgtacgtacgtagttccgtacgtgcttcaatatttcatgcacctataaatatatgtatgtatatatatagacacttttttttttgaatgaaagtatatatatagacacttatgttgatggatgtgtatacaatatagctggggcctgttctgttgggtgatattatatttttagaaatccaacaaatttaaatttgttatttgtgtttctcttacatttgggcctcacctgcttctccttaaaaataccacttttattaatcaattaatcaaatttacctctaattttatatttatt

SEQ ID NO: 399100 - DNA, 541 bp, Cannabis indica
cgcatgataggggcggagacatgaacccggtgatccagaaattagttttttgcctcctaatggcctcgagaaagctaagaccttactttcaggctctcccaatcaaagtattaaccaaccacccgctccgacaagtcctgcaaaagtcggaggcgtccgaaacagttctcaaatgggctatagagttaagccaatttgatctacattacataccacacacctctataaaaggacaagcgctagcagacttcataacggagtgccatgaggcagaggctaacgcaagcatgcccataccgcaagtcccagcatggaaaatatttgtagatggcacctccaatgaaaatggatccagagcgggggtagcaatgatatccccaaacggacttcaattctagacagccctacggttcgaattcacagcttctaacaatgaggccgaatatgaggccttgatagcagggctgaggttagcaaaggccgtgggggctagaagagtagaagtcttcagtgattcacaactggtagtgaaccaagtatc

SEQ ID NO: 399101 - DNA, 526 bp, Cannabis indica
ctattttaatcttaatctcaaaatcctttttctaactcttttcattaattattgaataattgaataaacatagtcctcgtggattcgacccgtacttgcttttatattgaaataatttaaagtattggaaaaaaatagtaaatttgatacgatatacgacacgcatcagtgcgggtggtgcagtttttgaccattttttcaaaccaacccgcacatgcaatttttctaatttttcaaattgcacccgcaccatgaaactaaaaaaccacagaaatcgcactgcaaaaaatggtgcgatgcggtttctgcaatttttaccgtttgggatatcaccaaataattaaattatcacaattacaacaaaacttaagcaacacatgttaaaaataccataaggcttgaaaattaatatgaaaaaatgttttaagtttcatcaatacaataattagtgggctttaggtttgacctttacatgttggacctaaataatataaaattggtatttttataatatgcagtgcgattt

SEQ ID NO: 399102 - DNA, 533 bp, Cannabis indica
aagggtaaatattattttggatcgtatgttttgctaaaatgaattctgtatttttcaaaattgtaaaaatagaatcttaaattttattttttgacaatttttttttaatataactaatttgaaaataattcttaacaccagtagatacagaaaatataaatttttttgtcataacacacttaaattagattattattaaattttatttttgttaacgcgatttttcattaacgaatttaagaaaatcataaaacgagcaagatgaacacatgcaatagttaatcaaagtaaaccggtttgcaaaagtaaattcaccaaagatgaacacaagaattttatagtggttcatcccctttcagcggtaataggctagtccacttggagtgttattgatctcaatgtttgaggagagttctctagatttatgttctccaagagttcactcctcaagtgagtttttagaatttgagagtgggagctcaagagtatgatctcgtgagtatcaatttcagggtccttttacaagtgatttc

SEQ ID NO: 399103 - DNA, 611 bp, Cannabis indica
ttttaattaaaattaagataaaatagtaataatttaatatgttgtctaataatataacgctacgtgtttttgtattggtattaacaaataaaaaggtatagttgcaacaaaattgtaaaacaaggtatttttgttactacttttttttagataattgttactacttttttaattagggtctatttggaaacaactgtgtaattactatgtagtgtaattactaggggtagtaattacactgtatagtaattacattgtattttaaaatacaaggtgtgtttggatgtcaagtggtaattacatgtgaattcctaatatcatgtttggcatgatagttagtaattacacattcaattaatattataatatttaaaaataaatttaatcaattaataatatataaataaataataatatcttcataaaataaagtcaaaactataacaatttagtagcaaatatttttttaagactatctaattggtcttgcgttccatatattttgagctattatatctctaaaattaaacatatattgcttgtcatcatctgttggcccgtcaccaagttattcatctgaatttgaatcaaaatcaatattgttcaaactt

SEQ ID NO: 399104 - DNA, 500 bp, Cannabis indica
gcaacctgttccagcactccactgatcctggttcaacttcttgaaccatcctacgcggatccactaaacgtagtgggaagcataacatttggcgtcattgctgactctcatgaccgtcattactcggttgaacagagataagtgatcgctggggtccgagtccccgatataagctaccatttcaggcatcttaaagtttttggggaaatctgccttaaaaatgtgtcgggagcacggttcccggtcctcacagttagagtctgagtcatcccctttttgtctcagagagactcgagcaatatccttgcgtagtatggcaagctcagccataattccctcattcagcgttcccgtggagaccgccggtgtatgtttcttttggtctaggtgatcccataggtcaccatgttttccgttgatttgatttcttagatcgacgggagggtatttctggttccttcttcctttctctccgggttcctggtgcacagaaacgcttt

SEQ ID NO: 399105 - DNA, 816 bp, Cannabis indica
aagagaggttagataaagctttattttcttattcttggctccaactttttcccttggctaaattgtataatgtggagatatctacttcggatcactgccccattatcctagctccggaagcatactcctcgggtttgcatactcgctcttttcgttttgagaatgcttggttacgtgagcctatgtgtagagaggttgttaggagtaattgggaagctttgtctgggagggatttagttgataaaattaaaggttgtggcgaagccttggaagtttgggggaaggattttaccgggaatttcaaagaaagattaagtaattgtaaaagggttgttcgaagtttgaagaaaaggagagatgaggcttcggttaagtcacaccgtgagaagcaagaggagttgtttgagattttagcgcaacgagaagtttattggaagcaaagatccaagcagttttggcttcggtctggagacacaaatagcaaatattttcacagtttggctagttcgcggaagaggcaaaatcatattcagcgtcttcaaagagatgatggggtgtgggtggactgggaagccaatttgggaggagtgatgttggactattttaacaaactgtttgaagcctctaatgttgatattagtagtgtaatagatgaagttcaaccatctattacatattctcaaaatgctattcttcttgatatggtggaagaggaagaggttcgggtggcgctttttcaaatgcaccctgacaaatccccttgtccggatggaatgagtccggggttttatcagaaatactgggatattgtgggga

SEQ ID NO: 399106 - DNA, 665 bp, Cannabis indica
aacaaaaaattcataccctaacctaatcgtttccaaactttccagacctgcatattataccccaataaacatattccaagtgatagaacaacaatcaaagctcagaattaattttcaccattaaagcttcaaacttgagttccaaaactgaaagcttgctaaaaacttcaaacaactactaattcatgcttaactcaacataataaatcatattctaactacagaaacatgattcaaacaacaacaataaccacagcagctaccaactcaaaatcatgcaaaaaccatttcttaaaattcaaggaaactagaaagggaagtgctagaaacttaccttggcttggaatcactaagaactttctgaaattaacttgaaatgctgaagaaaaaaccaaaccctagctgctctaggaattttcgagagagagagacagagagagttgaaggagagggtgttttctaattttccaattttccttattttgaataaatgagataaaaaggatggttttgataaatcattctcagccaaaacattaataaaaatcagatttttaactttaattaaaaaccacaaaagacaaaacgaaagtgggcaaaaagaccatttgcccttctacactaaaagggataaaaagacgttaaggggtattttgagaaattct

SEQ ID NO: 399107 - DNA, 964 bp, Cannabis indica
aacaaaaatcaaaacttggaaaacaagtttaaagagagagagagagagttctgctgggtgttacaaaaaccagaaaataaatctctcttttataaataattccatttactataaataatacatgtacgccaaattaccatattgcccctagggccatataacactcttaaaagcattcaaggacaaaatggtcattcaaatcacaaataaactcaaaaaactttcagactattcacacataaacaaaattcaaataattttcctagaattatatttcgggcccgaactcggttcggcccgaaatacccggttgtgactataccgcgccaacttgtcagaacacacctgaaaaaggacacagaagatatattatataataatatagttcataatcacgtaaataaattaaattaatagttttacccttctcgggtcaaaattactaaaatgcccctggctcaccaacggggtcttaacatgtcatttatcatattaattcccataaaataaagtatataataatataattctacaataatactcaattaactagttagggttttactaatccatttccttaatcctagggtattacaaacatagcttcataatcataggccataaaaaacagtgtctgcccagtggctgttttttctattgtgcggtatgaccataatacgtctggtaaatcctctagccagttcccttaagcttcttcaagtcattttttcatgttgtctttaagtgtcttattgactacttcgacctgagcacttgattgggggtgtgccactgtggagaaatctttaggattccatgagtcatacaaaaatctttaaacaactggctgtcaaactgtttggcattattagagagggatttgtgcgggagtctgaaccgacatattatattcttcaccacaatgtccaatagttttttagatgtaattgttgccaaaggctcg

SEQ ID NO: 399108 - DNA, 937 bp, Cannabis indica
tattataacaaataatataacaccatatcctccaaaggaagatggtggttaataaaggaacgattagagtcctgggaggagtagaactaagagtgttaacgcagatttttgttaacgatataagcctattttcatgatagaactagcacaaaaataatagaaaataaaactaagaagaataatgaaaagatcacaccaaggttacgtgattttacagttaaaactctgcatagtccacgagtctatcttattagatttctctgatacaaactagggttcctttctctcaaggattttttatccctttttcagtaattctgcccctatttatagttacatagggtggcagttaattacaatgagattcatatctcataacaatatttccctaaaattgggatttaattacgtcccacgtagaataaatgcggttattatttaaaaaccacatagctgtgatttatctgcttttaacgggtcattgctgatgtggatttaatcacgctgcaaggtgtatctcactgggataggaacaataaccctgacagtgagctggagcttttcccatgtcttttcgaggttgacaatgtaaatctcctcggttatgctattgaagacataatgctccatctgacaatcgcaattcttggtgacaaggtgaactttggcagtcaacatcatttgaatgtcaacttctatctgagagagctgactcaacggagtagtggatctcattgaaagatgtttggagctgattagtgaaggtagcataagtatgccttcctatagcgagatggatgcctcgctattcgttgttcagatttgtccaactgttctgcttattttgtataatgtaaattataatctaagtgttctaacagtcaatcatgtctcgtcaccacctttttatacatagtgaggttggtgcctcgctttg

SEQ ID NO: 399109 - DNA, 592 bp, Cannabis indica
attctccaataattaatttatttatctatctttttcagtcccttttcttccattctcttttcattctccaaactttaagctgaagtctttttattttgaaaaaaaaaattctcaatctaataaacaagatatatatataaatgtacaacgaaaaagatcgaaatacctcaaatattgatctttgagcttctatcctacacgagcttcagatctacacaagaaaaccaattatatgagttactattggaacttattttatcaggatctggatttactaacatgtatgttgattaacacccgaaatatgaattctctaaactaatagaataaacacatataaaatttagaaaaccttacatttattgcagtagaataatatgtctccttcaggttagatctctatcccttgttcctttctgtcgtagagtgataacaagatctaagcctaaatctccttccccttcagtttggttacccaccgtcttccaaactatgattgagtacttgacttgttatgtgtgggcatggtactctatcactaaaggtttgaaatattaatagaagaacatcaagaaggattcgaaatcactat

SEQ ID NO: 399110 - DNA, 527 bp, Cannabis indica
ttattattattattatcatgatggtgaaatttttgttaaaacaaaaaaaataaataaataaataaaggaaaagagtacaaagacagctaaaacgcacaatgagtttgccttacaaaagtcccctcacccaattgtcattttcaattatgacatggcacttgtattttaaatgttgtaagctagattctgggcatctcatctcatctataataataataataataattataataataataagggtaaatactattttggaccctgtgttttacaaaagttatcaattagaccctctgttttattaaatgataaaatggaccctgtattttctaaaatggtacaaataggaccctgaacttaatttttgacaacctttttttttaatataaccaacttgaaaatacgaacagataaaaaaatgtaaatagttttgtcataacacttttagatcggattattattaaattttattttgacaaaaaatcagttcagggtcctatttttaccattttagaaaatacaggatc

SEQ ID NO: 399111 - DNA, 1290 bp, Cannabis indica
ctaggctgtattttcaatgatattctttatgctttatttctaaactccaatatcaatagttattgggctttctagttaggcctcactaacattgacgtgttaaatttttttaaatttcttaaaattttgcaaaatatattaactaattataacgtacataattatgagaaaaaatttgaataaaaaatcatttcaaataccaaaacgaattggaatacattgtacaatttttttaaatatttttaacaaattaattaactttagtttgatccagtacttattgatctataacttcttaagcttcacacaatactaaagtagtttgaattttaagtgacatcattttcgatcatacgagattactattcaatggtacaacaaatattaatacgcaaattaaaaatgaacacggtactttagccatcagaaaattttccattctcatataaatataaatatatctctactatattaagaatgcattttttttggtagttagccaaaatgcaattgacaagtacttttgtgtggttttatttttgggaaattacttcatatatatattttttaaaatttttattttcaaatttaaaatttaggttgcgtccagtggttttttagttgctatacggattttggttccgatttaagttgctctgttagttactataagggttactgcgtgaaattctgcaaaaataaaaataaaaattgttttgaagtgtaaaaactaaataaaaaaaaaaacctattttttatatattatttttaaaattattttcgtacttgctattggcactaaaggtactcaatgtatactgatgtgatacctaataattagtaagtaatttttttcttttgtcattttttctttttatgtgacattttgtagtactaaataccatatcgatgttaaaaaactgtatttttacagaagctaataatttttcaataaaataatagtaaaaacataaatgtaagagtctgcagcagcagaatgtaattctgtcactacagaacacagtattgccaaaacaacccattactagaaataaaataccagaaaataaaatcacttgacacaagacaattgtgttgggttttgtgccctaaagaaaatccagttcaatataataagatttactaattaatagagataagaaattgcttttatgttgcattgttcacatgatttatttcatgataatgtttaatgtatacattctattaagtccaaaacatatgtaaatatgtatatatttgttcctgattatagtgtcgtcagcacag

SEQ ID NO: 399112 - DNA, 516 bp, Cannabis indica
gagagagagagagagagagagagagagcagcgatgcccttaaggcaagaggagagcagctagattacatgggtcatctccagtccagcaacttcatctaacttcaaagctaattttgcaagtttgtgagcaaaagtattagcggtgtgattgacatgagtgattgagccattggggaaatgagataaagctgatttaatttgcttgatgaggtctccaaatagggagatgtcttctttagtagctgctaaagcgtctgtaaccgttttgcaatcagtttcaatttgatgtagagggaagcatgttggaaatattttaccaggatcttaaatttactaacaagtatgttgtttaacatcctaaatatgaacttcaaaaacgataataaataaacacatataaagtatgagaaaccttacagtgattgcagcggaatgtaatgtctccttccactcagatctctaacccttgtatcttttctgtcgcagagtatcaccaagatctgagcccgaatgtc

SEQ ID NO: 399113 - DNA, 1115 bp, Cannabis indica
aaaaattagatatgaaaagaaaggacacgcaaatatttatctatggatctatttgtctttcaatatcttatagctagtttgtgggatataggtgcctatggcacttttccaccttttttttcattaatatatatttttttgggtaaaaattaagaactatgcaagtatacaaaattacttttatagtttattacaatatcattcattatcattcccataaaaactaaatatgaagtaccaatatatattttatttttatttggtaatcaaaattagaatttttgaaaagtaaaataacatatagcaaaattaaatgaagaataataaagaacagtaaactaaattcaaaaatataaatgaaaaattatgagttctaatctcctctgctatctactttattattcaatattgatgatggatattcaaaagcattaattattcggattaaaaaatatacaacttgacctattgtaaattctctatatctctctgagaaatttaaataataggaagcaatgaactcaactcaaaatcgcatagaccaatttcatgctctgattctaaattaaaatctatgtcatttttttatcatattaaaatctcacttttgaggttttagtctgaattcataaatagcatgtaagaggtgcgtaattaattatattcacaataaatacaaatttaatagatcttttaaattttgttattttttttatttaaattaaattataaaatcagaaaaaggatatgaaattatcattttatttgtaaaataacatgaaatttaaaagatagttagcattttttttaaatgatatttaagttagttgaaacctaatttttcaaatttgtaggtttaattttaaatattaatttattttatttaaatttatttaaaaaaccgaaaatatttttatttgttcattattttcgatttttttaaattaattaattaatttaaaattaaataaatcctacatctaactatccaattcaacttgttgcaggagtatgtgttttagcttttgtgtaagttttataaaacctgttattgcttgatctacattggcatggttaacttgttgacagatccaatgatctgattttaacccatg

SEQ ID NO: 399114 - DNA, 450 bp, Cannabis indica
tgttgagtggaagttatgagtaattattaattcaggaaaaaaatattggaagacattcaaataaatcttaagacaaattatgttagtcgataagggtggtattttaatactcttagggtttgtttggtacgccgtattacaccgtattgtattgtctagtattatattgaattgtattttaagcaatatttttatgtaaaactatatatagtattaacttttatgggcacctaaatatataatattttagtataaattaaaatttaacatagtattatataaaaatatgatatatatatataatctaacttaatataatactgtacaatacaatacgacttaatacgacgttccaaacgagcccttagactacaccaaatcagttttttagacttgtattaatgctagaaagtctactatgagatggtgattatgttggaaattatttta

SEQ ID NO: 399115 - DNA, 599 bp, Cannabis indica
tttcaacccaaggtattctgtttattctaaaagatgtttcagagtttcaagaatctcttctatttcagattttacagcatttatgtcaaatagattattaaagacaaagctcaagggtggcttacttgttgttgtgctttcgagttcatccttctccaccttcaatcgcagagcttcagtgctgatcttgtccatcacatgatccgcttcataaagtacttattttaactcgtcaagccaattcctcacgttgttgtctccaagttgtttctcctcggcatcattcaacagtgcattagccgaaagcaacacagttttcaactttttgagcagcaatcgattgagtttttaactggtttcgtaaagcaactaagataaaaactcacacacaaaaactagttaaataaaatagctcaaataaaatacccattcaacatgctccaacccaccaaataattacactcatactatatctacctcaaaaatacgcatgcattatgttatataatcggttctattttagttataaccggtttgagttacttcgtattatttatttttattcattatatatatgtacacatatatgatatatatat

SEQ ID NO: 399116 - DNA, 1679 bp, Cannabis indica
ttatagcaggataaaccacaagttggaaaattgtccatgtctgcatattccttatgatataaaatgatatcgtgctaactctattttttgctttgatgttgtaaaactttatcattgttggtaatcttagatctacatcatttagcaacttattgaatttttcaagatcatcaagaaattccccctgtgtttcgtcaagcaagtgtattggtatatcatcggaatcattaccctcagtataatctaccctcactttccgaatggatatggatcatcagttaaagatttcccatgccaataccatattttataacttctactgaaatctcttaaataaaaataatccttaatcatcataacatttacttttgttccattacaacaatctatgcatggagaatgaatatgtttgagatttctagaattctttagggaaaactctacaaatgcatcaaatctgactttaaattgtggtgtgtatctctcctcaagcattcatgatttatccataatgaaagtactaacaaaaaaatctcaaagcttagcactaaattacaaactagtgatgatgagaggaatttacactacaattaatcaagagatgatgacttagatgatttctaattatcattgcattttccatcaatgttttagttagagttttatgagtcaattgtgttcatggtattttatttttatgagatattttatgggattttttaaattttatgtgtcattttattcatccttaagtgttctaaaacattattttaatataatttttcaggcttacgtctcaagaattacttttgttatttaaatattgtaactaactattaactaatcttactgtaaattactaactagtaactaattgtagtatactaaattaataatagtaactagtcctaattctataaaaattttggcagcataacgactatagttgaacattccccaaaatttaaaactatttataacaacaaaacacaatctaaaaaaatataaaataatcacaataacatttaacaatacaaaaatttgccacccctttgactgcagtatatgtattcgcagaacctacttcactactgatgaatatttaagatattcaaactcatctaacaagcgtgattccacccatccgaccgcagtaaaatatatcgcagaacccacttcactacggataaatatttacgatattcaaactcatctaacatgcatattattctacccatccaactgcagtacaatatatcacataacctacttcagtacggatgaatatgtaagatattcaaactcttctaagcattgataattgattaataacaaaagttagtaaatgtatatcagtagctagctaaaaaccgatcaacaccagataattcagaaccttgcaaattagctcacaacctacaagataatgaaatacaacaaaattaaaggtatatggcacatctgtaatatgaatggaaacttgtcatatgtggtcattgtaaaggtatttggcactctactaatgatagccaaaagaaggaagcaaaacaataatgggtgattcagacagatgggcgaaatacagtaacaaacaaaccaaaagagccaattactgatgcagatggttttcaacaagttaccaaggggagaaaagggaaagataaggttgtgatggagga

SEQ ID NO: 399117 - DNA, 1549 bp, Cannabis indica
cggtccagtagtgaaagtgagttcaaggccttggcaaatgcggcacctgaaatgaaatgtttggtatctctccaatccgagcttcacatctcttctcatcattgtccaatattgtgggttgacaatcaaagtcctcctgctattgctgctaacccggtgttccatgctcggtccaaacatatcgaaattgatctacattttgtaagggatctcataatgacaaagtaattatccattcggtatgttccagctatagaccaagttgccgatgctttaaccaaacctctttcaatagattgatatcactatcttcggtccaaactcaagatgtcggacacacctttttgtttgaggggggatgttagcaacctaattactagtgatatcacttaactgtttttgctaattattttagttgttacactactactgttgaccgaggttcaatttaataatatatatttgaaagctgtaggaagtttaatgcatgatatttttacgtggttggggcattaatgagccttagtccacgagtctttcttatttatgagagtatttattacagagaatgttcttggtagttttctctcttagttgctctctttaattcttatgaacccggaattctcgacccctatctcagtgtatttggggggtatttatagtgtttttttggggtgatccttagaactgaagcacttgtctttctgtgtagtttcagtaggggcacatattcccagcagatacaaagtaggaaatacatgacctataccttaggtatcttaggggttaggtggataaagccttttatcccttcttgattgatgtgatccctcatacagtagtcgtcactagccttattaatcataataactgcataagaggggttacgccgtcagacttattgcttatggcagttcaaatacgttttctcccatgcggcattaaatgcgaggtgactgttcaaatatgtcatgttccccccggaggtcccttggcgttcctctggtctccgggagtacgtggagcttttacctttcctccgggagggaatattcttggtgacaatcttgaagctaagagacttagtcgattgatctaagagttgcgcctcttagatccacgtgtcttcgtcatactggtccacgtattttgggcaaaaataggggctacatttaccccaaagccttgtttggtgtgaagcaaacgaggcttgcttaggtgccttcggctgtctcattgatttcctggcacgtgcttcgggcgcgtgggctgaatttatgataatcatctttatttctttttgtaggcaacgattcgtttcccgtcaattaatgatccgacgcatttaatgggtgtcagacaaatactcaagcgtttccagccgcccttgaagagcattcatcccaaccgttagatctgcagaatacaaatcgattcgattcccaccgttcgatgacgcctgatcatagctgctttgcacccgttctggcctataaaagcatgccttttcccttcatttggttactttgactactttgccattttt

SEQ ID NO: 399118 - DNA, 540 bp, Cannabis indica
attttatgcaatttcaatgcgatgttagtgcgatttaaacatgtttttcatttgcgtctgttttattttgtgattttatgcgattttcgtgcgatttttgtgcgactttactatgttgtttaccaatctgctattttctgcgattttatgcgacatctatgcgatgtttgtgcgactttactatgctgtataccaatctgttattttctgcaattttatgcgacgtatatgcgatgtttgtgcgattattaatattttttttcgcttttcttttttcaaatgtttgtttttcaaattttgtatccgcggaatcgggaggtggactattggaagagcaattgtgagggtgaggtccccacagtggaaatggggttggatgaggtcgaagaaacacaactgccttctctctgcatctccaagctttctcataactcatcttgatgccatattcatcaaacatatccctctgtatgtcttttgccttgtagttagatccatctgatgtgtactagttcttaataatgtgaccaatgacccacg

SEQ ID NO: 399119 - DNA, 1581 bp, Cannabis indica
acaagcttcctgggagaatcttgacaagtatattggatttactgtcctgacagaagacatggaaagtgtttatagggctactcagtcattagccccatacaagaagccgacacccatgaaaaaagatgtcagcaacagagattaccaatttttgtcgttttcatggggattacggccatgacaccgatgaatgcaacaatctgaagcgggaaatcaaattcctaataaggaaaataatcggcacgtacagaagtatgtcaaggtcgatcagaattagaggggcgataacaatcaagacgtgctaccaccaccagtagatggacatctgcaagtcattattggaggttcgcacatagctagagattcaggcgaagcccgagagaggtatgcctgaacagtacagcacgagcaagaagaagtagtcctggccgtagaagggaggaagccgaagatcccacgagcgggggaacccaccataacatttaatgatgaagatactgtcaagatcagattttcgcacaacgacccgttggtcgtggaagtccagatagccaacaagatggtagccagaaccatgatagataatcgagcctcttccaacatcttattcaagaccacatatgaaaagatggggctccaactcaaagatttaacccctgtctttagcccgtgtatggtttcttcggccaaggagtcgcacctctagggcaaattcgcctacccctcactgttggacaagctccaacaagcataactataatggcccaattttttgaattggacattccatcaacctttaacgtcatattaggccgaccagctttgtatgacttaaaggctgttacgttgatattccattcatgccttaagttcctgacaaagaatggggtagggtgtctaagaggaaaccaacagtttgctcaagaatgttataatgttgccataggcaaggataagaaggaagtattgatcccaactatcgaccagttcaacaaaagcgaaggttgttggacatttttgcctggtcaaatgaggatatggtcggaattgatccttctgtaatttcgcacatcctaaatattgatcccaactatcgaccagttcaacaaaagtgaaggttgttggacaaggaacgagctctatccctgaaggaagaggtagagaagctacgaaataacaaattcataattgaatctttctacccgaattcggttgctaatcccatactggcacccaagaggtttgtgtatgtatttcacagacctcaagaaggcgtgccccaaagactgttttccacttccaagaatcgctcagcttgtggacgcaatagcagggcacgaaatattgagcttcatggacgcctattcagggtacatccaaatcaaaatgcatccaccagaccaagatcatacaagttttcgaacagatttggctctatattgctataaagtcatgcgatttgttctcaaaaacgctggggcgacataccaaagattggtaaacaagatgtttaaagaccagatcagacgaaacatggaagtatatgttgatgacatgctcgtcgaatccaggaaggttggg

SEQ ID NO: 399120 - DNA, 804 bp, Cannabis indica
ccaacttcaagaacttaaatatttcatcaaaattccctgctacataacccaaatacaaacacaataaagtccttaaaatcatcttaaaatattaaccaagcatccaacatcaattttctaacccaatcacacatggggtacaaagattaaaccaatatcataatgcatgcatttcaagaacttcaaaaagctcaaaatcacaacattcaacttcaattttagcattttaaatcaagaactaaagttgtaagagctaactcaagcttcaatcaaagattacacctaagcaccaccaagatccaagcttgaatccaagttatttctcaacaaaatcaaacttgggaagatgagtttaaggagagaaaggggtctgtcttagggtgtaagaaaccagaaaaaaatgatttttcttcaattaaaattatccttttgttgcaaataaacaaaatatgcaaaaaattaccaaattgcccttatggccatatctcacacttaaaagcattcaagcacaaaatggtaactttcatcacacaccacatattcaattaatttttagatttctcacatatatataaaatgccaataatttatcgcaggattatatttcggccccgaacctaggtcagtccgaaatacactgctgtgactataccgcgccaacatggcagaacacacttgaaaaaaagacataacaggcatactatataataatatagttgataaagcaaaaaaaataaactaaactcacagctttacccttctcggtcaaaaatactaaaaagaccctcgctcaccaacggggtc

SEQ ID NO: 399121 - DNA, 1064 bp, Cannabis indica
tattcgaagctagagttggaaaggttgtcactggatgaggacggactcgcacagaggcaaggatgatcctcatataagagttgaagtagctcctggtcgatatggtgtttgcctccccaaaattcaccagggttcatctacaacaggtaggacacaagatgagaatttggttggggtaacgaatgggaacaagttggtcataccaaccaggtccaatcaagggatcaaaaataaaaattttgcacagcaatggaattttagtccaaaagttcaaaattttgaattaaggtctgattctcacaaaacccaaaatggataagtgaaaatgagtgtcgttgggttgaaataaaaatgcagttatgatcaggcaacgtgattaagcataatcaagatttctaaatcttaaatctaaaatttctatggttctcctagaacaggttcaagaacaatcaagtttcgcaagcagaaacccaaaaaataaacatgcaaacatataaaaaggaagaaatgaagaacttactcactgaattgaagcttttgatttgctcggacgacatcggacggtgttttctgagaattcttcgaaggaattgggagaaaaaggatttttgctctgattcttcaagagtaaaaatggctaaaagtgattaattaggattttgaaccctatttataggcaaatcgaagaagaagagtaatcatttcaaattttaaaaggtctcaaattccccccaaaagtgtacgttatgcactcgattacttgcaaaataaccatcgtcacaggcaaaatttgaaacttggttcgaggtaaaattttcaattggcattaatgagccaaaaatgaagggacttttagtcagagtcacatcgggtgatcaatcgacacaacggccacatgccacccgttcaaaaaagaattcagaacgagtaaattccacgtgcaaccgagaaggtcctgcccaaacattgggggaaaatgttatccaattttttgcacaatgacgtggcaaaatactcaggtgacacatgtcctgcatttcttgtatctgggcagaggtgaatgt

SEQ ID NO: 399122 - DNA, 672 bp, Cannabis indica
aagatggatctaaaaaaaaagccagagattaatgaaaaatgacaagcttgggccgcccttttatacacaaagttcagtgacaagaaactaaggattgggaaatctaatggttgggagtaggacagaatatgaagagacaattcataatgaccctcaaaattgtacaaccgccaaaatcaaaggacacatttttcaagaagggattttgacgaaaataccctctataattattaaaaagtcttttctttaccgaaaaagaatttttgaaggggcaattattatacccgaaattcggctgccatctcagtggaggacactgtcaagataaagggaatatggattgacgcaatcgctttttatggaatacctcattaattacataagtatctgagtatatttataacctgctgactgtaaagtcttaggcaaagaaccaatatacaaactgatgcttagcatattagcgagaaaccatatgtcgctgaatgggaatagcgaggcatcaaggacagtacacattgtaagacgaaagctacacatatcaattgcgaaagcccttagtgtataaactaagtgtaacatttggatcagatcaaaaccaagtaagtgaggtgcccatctcgctatgggaatgcttcctataactccatccagttacgtcagcgaggctta

SEQ ID NO: 399123 - DNA, 500 bp, Cannabis indica
caagtaagctttttagggcatgttgtaagaaaagatggtatcttggtggacccagtaacgattaaagtggttccggattgaccacgatcgaagtttgcaaccgaagttagaagtttcttaggattagcgggatactacagaaggttcgttgacgggtttgttaaaatttctacacccttaatagaattaactcgaaagaactgtaagtttgtttagagtgacaagtgcaaaagtatcttctaggaattgaagcagaggttaattaccgcaccagtgttaaccttactagtcaataatgaaaaattcgtgatttgttgtgacgcttcaaaataagggttaggttgtgtcttgatgtaatttggcaaagttattgcctatgcgtctaggcaattgaaaagcagtggtatcccacccatgatatggaattgggagtagtagttttcgctttgaaagtttggcgtcattacctgtatggaaaaaagtgtgaaatctacacggat

SEQ ID NO: 399124 - DNA, 471 bp, Cannabis indica
tttttaaaaaaatattgtagaagttttatttttgtactgtatgaattaagttattttcactattgttccacgattgttttttagtttgttccactgttgttttaattaatctgttttgttgttttacggttgctttgagtattttgtaaaaaattctgtatgacagtaaaattataaatttttacccaaaatttaatatttttgtaaagactcaaaaaaaaatatatgatatgttgaataaaataatcttaacctcatgattccatgccacaaatgcctaccttatttagagaatttgacaattgtttgtggagatctgcaattgagttgtccattccaacaatttcttgctttaaattatgatgatgacataaagatcttaatttttctcgcacagatttgaaaatatcatgaacagccacctcagcttcattactgcgtatatataaaaaataaaaaggtaaataccat

SEQ ID NO: 399125 - DNA, 588 bp, Cannabis indica
tttctcatttttattttgagtggatacaatttgattgttgtcaaagtttaggaaacaaagttacgaatttacaacgacacattagcattttaacataataatgtgacagaacctaataaaaggactaaattattgtaaatgtaaaagttgatgagaaatttttaacaatctgtatatattaggagacataattaaatatatcgaaagtttaggggataaaattattaattattctatttttaatgataaaactttcaataataaataaggataaaattaattaatatttatatttataatatataattataaatatagtaatatcatgcataactaattatagaatatgttttatcattatttttataataaattacacattaataattagtactaaattctaaatatctgatctcaaaaaaaaaaaataataataaattctaaatatctacttactaaaaataacccacaattagtcctattaatatcttaggaaaattctacaatgcacccccttaaaatggatatattgatgtacctctatctgttttagcatctgaaataattttttagtcaaattttttctca

SEQ ID NO: 399126 - DNA, 502 bp, Cannabis indica
gagttaatacaaataacgaggatgaagccattaccgaactactcggggctgaacctctataaaattcttgtgtctttatattgctttaccctatttcaatcattataaactacttggcgcttactaaattagactcactgtcgttggctaaaagcggggtcaacattttggtgctttcattgagacttaaactcaagaatcactattcattctaaatttaatcacaagtacgatgcttgtatagactcgtaggggcatggtttatccggcaaatccacaagcggtggatcctacattacagaacccaggaaacacaagggttctgccagttgtaaatcccgagcaactgtcaaatgcggttcatggtgtgacaactcctgtggatgaaatcgcgcctagtgtgcaagagactgggaataccagttcagcacccagccagggaattcataacacagtcgttccgcctgctaccaacatttgaatgaccattggagatgatact

SEQ ID NO: 399127 - DNA, 817 bp, Cannabis indica
aaaaatattttcaggtttggtgaacttgtagactcgattgggggtcaaaaatatcataacgagtttaattgatggaatggattggaatattgtgaaaagttaataatataggtattgggataattaggagtatgtggaatttgacttagcgccttagaaatttagatttcttagtagttaagaaatgataagataactatgaataataaattttttattaatattattattattatatttaatattattatataatactattttatatatatatatatgaaacttatgagtttaatcaataagtttaatatatatatatattaagtttataataagaagaacaaaatagaatgaaatcctcgttattctcctttgacgaatccttctttctttatatctatttttctcaattttcaatctgaaacctagcaatatatgctcgggtagtagcaggatagaaaattctcagagtgagaaagcttaaggtaaggtttattttgttttaagttagaaacgattggttttgtataggggttttgtgaactaagatagttatgaaggttctgaccttataggattgttctcgagtagtcatgggactagctccgatattttcttgtcgaaattgaggtgattttatgttagaaattgactttggaaatttttatagcttaagtccgaacactagtggtgtttgccaattaagggctcgatttttaattctattacgtaagtatgttatatatgtgccttatgaagtttgaagtggtttggacaggttctggtagtgtaacgccctaatgctaaggcacgctac

SEQ ID NO: 399128 - DNA, 523 bp, Cannabis indica
acaaagaattacattatcgcttataaaaatcttcaaaattatatatagtggtgttagagagtatttcttaaaatgaggcaattgggtgaaatgagccattattaattgaaaacaattacattataaaaaaaaattctctaaaacttatatatagtagtgagtagaatttcaccaaagttgtaccaattctagcatgcattccttaaattgaggcaattattataagaatattttctatatatatatggcataaattgtaataaaatgagttattgcatttgatcacaattatatggttaaattgatttactaaatattttaataattaatatggcgtaaatattgatagaataattttcctataaatataaaattttaatatttgagtttttcactcattcaaattttatctaaagaaacttgagagagtttgaaagtctaattttcatagggaattttgattttatatacttaaataattaaaaaaatttattattaaaccaaaaacctaaactctaaaaaa

SEQ ID NO: 399129 - DNA, 857 bp, Cannabis indica
catgtatgttgcttaaacttgctgtagtagtttgttgttgtattcagaggtttatttgagtggattcaagttgattttgttgttagttagtcggatttaacctagtgtaaagctttgaactcaaaactttggtttttaatggtgaaatggtgatttagctgctgtagttgctgttcgagtttgggtttattttctgatgttatattatgataacttaaggtgatttaggcaggttatgatggcttgtttgtgggatgagcaagctttaagttttgaactcaagcttgactcatcaatggtggtttttttttccttgcatgttgtggtgttttattgctttagaaatgatctttggggtctaattagcaggtctggaaagtttaaattggtttggggttgaattggtcgagttatggaattttgaaaaattcctgcactgaaccggaattccagttcagggaggcctgtaggaaccggtctaccggttggcttccaggaattttcccagaactgaaattccggttgaggaaccggtctactggttggggcaaatttggaaccctagttcttcccatttttgtgttgtttagggtattgccatgttatttatcgataggaaaacttctagtttcgaatttaagtccctgggaagtgatttagcgtgtcacttaccagtgttgtgattattatgatttaggagcctgtaattcgccgaacaaattgttccactcaggttgatcggcacacctaaattcggaatcgaggtaagattagtatagtgtcatccatatgcttatacatgtttagcgtacatgtcagttgccaccagattaacatattagatatatgttaggaaa

SEQ ID NO: 399130 - DNA, 540 bp, Cannabis indica
ttttacaccatatagtgaaattttcaatttttttaccttttcactgtagggcagattttttttcaaaaatactgtgtaagctttacgtcttgttgttatgcagttagttttttagttgtttctgttttgttgttttacggttgtttcatagaaaaatagtatttttatataaaaaattcgtgtgacagtaaaattataaatttttactcaaaatccaatatttttgtgaaagctaacaagcgatattggtcccatgtcaatgaaggcccaagaatgcatcatttgaaagcccaatctaggtgggcttagcttaagtttaagtaagaggaaattacattttatacccactctattttatctgttctaatttttacctccattttcatattttttttaaatataccatgatgttcccattagacccttaagttatgtaaattatatggagaaatttgcggtcaaacccctttatgtttatatttgtagacacttaacccccttatgttattttttggtggtaaaactatcttatgtttactt

SEQ ID NO: 399131 - DNA, 783 bp, Cannabis indica
gacgcttgctgatgtagtagacaaggtgttgtatcctcagtgaaggccaagtagatgaatagttcttcaccatctattggtttggataggatgggaagcctggctagatgatgtttgagagcttggaaggcttgctcgcattcaccagcccattcaaacccgttgttgcttactttgagtgaattaaagaagggaacacacttgtcggttgacttggagacgaatgtgctaagtgcaacaattcgtccggttaggctttgcacgtcttttatccacaacgacgacttcatgtcttgcaaggccttgatcttttatggattcgcttcaatccctcttgagttgacgatgaacccaagaaactttcctgactggacgttgaaggcacactatagagggttaagcttcatttgatattcctgcaagatgttgaagcattcctctagatctttgatgcggtcctcaaatttcttcgacttaaccaacatatcatcgacataaacttccatattgttcctaatttggttgtggaacatacgattaactagtttttgataagtagcacttgcattcataagtctgaagggcattactttgttgcaataaagctcgatgtcagttcggaaatagtatgctcttcgactggtgcgtgcatgctgatttggctgtagctggaataggcatccatgaatgtgttgcgtccatcatgtcatcaatcagtggtagagggaaacagtctttagggcatgctttgtttaggtcagtgaagtcgacgcaagttctcca

SEQ ID NO: 399132 - DNA, 478 bp, Cannabis indica
tagatttgacaatgaggcattacttgaagaggcaattgattcactagaaccggttatttcatcattagttgttttttcccctagtctacctattcctttaccagatccaatgttggcaatgtcagcttcagcaatcaccaaccccgacttgaatgagcacacaaaaaggtttgtgattgaatgtatgaaaggcatttttcatttgttatcttctcctttgacaacaacagacaatttaaaacattgtgctgacgtgggtatgcaacttgacatgtcgagtaccctttgcgggcattataaatgtggcttagcagaggttgcatggttaaccgaatctgtcaagaaaagtctctcgcttatgctcaagttgttgagaatgcccttagtcttgatgaatctcttattagggaccttcttcgccgtgatgaggataattcggcagctataggtcgtttgtccatattgttggaaattattt

SEQ ID NO: 399133 - DNA, 573 bp, Cannabis indica
gtaatgaaaataattctgtttctatatttataattgaatgaaaagaagtttacattgaaatagagttttatttagggcacaaagcgtaatattgaccacatcggttgtgtcaatacaacacaggcagtgggaccatcttatttaaaataagatgatataacatatatggaatgtatctcctctactttcctactttcttttcaaatttagtcacattcttagaaaagcagtatttgttgaaataaacactttcttatcttaatgaccataggatggtccacccctaatgactttagaatagctattaaacttgcaaacttaagttaacagttctagcctttcttgagctcaggattaggtcatccatgaatctagtaatagtacacactaagtacataatcattctatcattctgaagttttcttatcactagggtatttccctagtaggatttaggcagttgctagtaactaatcatagaccttacaatttttgtcaatatacaatctaaatttatggggagataagtttggatacattttgatgtttaatttaatgatctttgaactgcat

SEQ ID NO: 399134 - DNA, 567 bp, Cannabis indica
aactgatccaattatcatccaatcaggggcagagctaggattaaattcttgggggggcaactattaaaattttatagttcaaacaaaatatgttttattataatattgcacatcacaaatattatttataaaggcgtgtttgaatataagtgtttaattactagttatattacatagtctagtaactacactattatatttaaaaatacattgtgtgtggtaattatatatgaatttttatagttttatttagctaaataattagtatttacatataaaattaatattatttagtaattaacatttaaaattaaaaaaaaattagtaacaacacaaataattacaataatttttttgtaatatatattattaattaattaattagtcaatatttcttctgtatttaaaaaagaaaagaatcatgtgtaaacgttttagatcattttgtatgaacctacaagataagacttataatttctattaaaaaatagttaataccattttagactctgtgttttataaaagttaccgactgaaccatctgttttgtaaaatgacaaattgaac

SEQ ID NO: 399135 - DNA, 981 bp, Cannabis indica
tgagttttgtattcagtgaccagaacctacttggactattctaaaaatctttgttgtaactagacctaagacattaaatgaccacaaccacataatatatatctatggcattttcatcttgttcatagtggttttgataaggtgattccttacaaagagtaatatgcctatatccacttgaaagtaggatcatctatattcgaatatggatgtacattcaagggtggatatgagttatcgttaaattcttaagatgatcactctagattttaccttatgcaaagaaatttgaaatgtttgagaaatttcatgaatttctaacaatagtgaaaaaaccattaagcagggttgtcttaaatattgtggaggccctgatctaattttaaaaattaggccccttataaaaaaatgaatttttacaaaaatactgcattttgggtaaaagtttacaattttattgtcacacaggattttttaaaaaaatgctgtctttttataaaacaaccgcaaaacagtaaaacagaacaattaaaacaacagtgggacaactaaaaaacaaccgtgaaaacttaacactgtgcacagtataaaacttacacaatatttttgaaaaaaaatacaatacacaatataaaactacctagaccggcctaaataatttgagagccttgagtgaaataatagtttctttctaaaaaaaactatcacattctcaccactaaatatctaatttggcaactaatgaatattagctatacatatttgttttttttatgatcaactagttgtgagaactaaattaatttatattacttaatcacatttttaatagctttctttaatttatattcggtgttatttaatttaatatcttaatgtaagacgtacgttaatatttgtaaccgaaataactataactcaaagggttaatttcacaaatgcacaaaaacaacaaaaaaaataacaaaaatacagtttcac

SEQ ID NO: 399136 - DNA, 578 bp, Cannabis indica
aaaaataaaaaataaaataacaccaagaagaagtagcgatacacatcacactattagtatctttcctggaaatgtaatttagacccgcaaattcgaaaaacccgaacacccgccccgacctgctaccaaaaaaattgaacaattgaaaacccgtgtggtggggttgggtccaacccgaaaataccccacacgggtttcgggttcgggttttaaaaatgtatatttttttagtcgggttttaactcgtaatcagaacaacaataaataaaaaattaaaaaaatatttttttattacataaaaaataataattttaattattaaaatttataacataaaattaaaaaataatgggatttttttaaaaatatacgtaaaatataaaataattacaaatataacttaacaaatctcaattacaataataccttgccacgtcattgaaaaatacctttatttcaaaatattatgcctgaaataaaactaatcccgaaattcgttttttttttttttttaattttcctgcgtttctaaagtaacattttggttacttataatgttgataagaaacctaactttt

SEQ ID NO: 399137 - DNA, 653 bp, Cannabis indica
ctatcttgtggggcagcctgtatcgacacgatgttttttttacctcaaaatccaaggctttcttggccgttatggtcttcatgggctcaacctctgtccactttgtgtaataatccactgctactgtggcatactttacccaaccctttcccgttggtaaggagccaatgcgatctattccccaaactgcaaagggccaggggccagtcatcaaagtaatttcatagggtggggctcttggtatgttcgcgaatcattggcatggatcacactaaaggacgtagtgtacacaatccttcttcattgtaggccaaaaatatccttgtctcagtaatttctttaagggacttagacctccagtgtggtcaccacagaacccctcatggacctcctgcatgatccgtctagtttcaagatctgacacacaccttaagtacgacatgctgagccccctccaataaaggacattgctcatcatcacatatcgattaccctgatactatagctttctgaacatagccctttcttggggcaactctccttttgttatgtacttgatgatggggtccatctagttcggctcttgcttattagtagccaccgtctctttggttttgatgctaggttccataaggtgttcgacaggtaccacc

SEQ ID NO: 399138 - DNA, 784 bp, Cannabis indica
aagtagcttgttatcttaacagctattgttggcaatatcacttcagtccaatgtgtaggagttgttatgtaagtattttactctaactcggtgttatatatgtgtttctaaattttgttagaggctagtcagaggcagaggttggtttatacttgtaataattttcattggaatatattataggattggaattggagtcacgtaaagaggaagaggaagagaaagatgaatacttttctgatccctacgaagatgacttggagaaaagatcatgcaaaattgtctatggtgatggaaaggatgacagcagcaagtctagtaaatctaaaaaacttagaccactacctgaatataatgacatattggattgaatagggtattaaattaggctttgcctcttctcttgtttgtttatgttactgaattagtgctaaatttaaaaataaataatattaataataataacagtagatatttgaccttgagtgttgtttactatttatggttcattttataagcgacgcaataagtaaaaaaatagtattttagcaattgatatgatatttttgaaccgacgtaataaatgttttgtgatagttgtaaaatgccataaacaattttgcgtcatttctaaaccgatgcagaagaaaaattattaaagtgcataatttgcgtcggtttgtaaatgtagacaattgtttttcgcgtcgttttaaaaacttaaaaaccgacgagaattatacttgttgtagtagtgaaacccgaacccagacctagacctggg

SEQ ID NO: 399139 - DNA, 779 bp, Cannabis indica
cgcaacctcctcaaatataataatattaactatcctaaaaagaaattacataatacaatatagattatacgaccatacacttcttctatggtttagttacatgtttataagtgttgtggtttagttatatgtttatatataattaaatatatttgtagaaaattaggtgagtgtaaagaaaaaagatattattactgggtcaactcacaaatttattatgcaatttagtttaattattatatcaaaattaatattatctgatagaaaatattttagatcagctactattgtgtgaaggtttatttataatttatttaccatttgaataattttgttacaaatagaataatcttacattatatcaaaattgatgcaatcaattttgaaaaaattacatagttatttttgataaaaaaatttatatttttatctttaatttttttttacattattacaatattctataaaaatataagaaaacaaaaaaaaaaaaatataaaaaaaccacaataaaataatatacaaataacaaaaaaattaacaataaaataacaaaaatataacataaaaatacatcaaaaattatactttatatacataaaatttttaaaaccataaaaatatttacataaaatgaggaggatttgggatgttaagggagaaagaagtagtctactgatcacaactcgtttggaacaccgtattaggtcgtattgtattgtattgtattatattgaattgcattttatgcaatatttttatgtaaaactatatgtggt

SEQ ID NO: 399140 - DNA, 765 bp, Cannabis indica
aaatgcactattgatgcctaacattttctttgatgtcatacttttattgatgtaattaagtatcggatttcatataatttaagataataacttttaggaatattgttaatcaattgtagaataatacatatagaaagtgatagacagcactggcaccaatattatcaatgctctttcattaaattagtatggaatcttcacatcatttcacacaaaattgtgcaccaaattctacacattaatggtatttgattttaaatttacactaatttggtgtagaactttattattattattattattctaatctttattttaaaagactatcttacattttagtcctcaaataaaaaattatcacaaaagtatttattgatttcaagcactgatatattaaaaaatataaaataataataacaaaaatactaatattaaatgaaattaaaataacataacattaagttataaaattaaaaagaacaatataaataaaaataaacattaagtaaaatgataatttagtagtcaaattgattacttaaatatcttagttttgaaaaatatcaaaatagtataatattttcttgactgacatagacaaaaggatatggatgttcactatgttcttcgaaatgtattaattaaacatgtgtgggaacaccgtaataatttagaaaattaaattatgtaggtgttattttatttgaagttttctctaaaaaaaatgtgtaatgtttagttgatttaataattttttttattaaa

SEQ ID NO: 399141 - DNA, 745 bp, Cannabis indica
gagagagagagaggggtcggttgaggggaagggataaaccagaattttcatttcattttctcaaaatttcatctttaatcaattaacaaaataaaggtcaaaagaccattttgccgcaagggccatataacatgaatttacactcacaagggcataattgacattccatgcataattaaatccagttaaagtttcagatttctcaacaataaacaaaatgccaaatatttcaatcccaatttgcatttcgggcccgaacccggttcggcctgaaatacccggttgtgactatatcacgccaacctatcaaaatacacctgaaaaagacatcacaggcatactatataatatagttctataagcacgtaaataaattaaattcactattttacccttctcgggccaaaattactaaaatgcccctggctcatcaacggggtcttaacatattaaaattcatataatttcacatatactgaactatatattaatataattcctcaattactcataatcatctaattagggttttgctaatccatttcttaattccagggtattacagataatctacaacatagtttacttgcaccttggataagtgttatgttctttccagggcattgattaaagtaaacctagggttaggtgcatggagtatgcatcggaagggactgatattgaactttgaatcagatatgataaacttaccataatatttgtacaattcaatatcacctagttg

SEQ ID NO: 399142 - DNA, 665 bp, Cannabis indica
agcccttgaacccgccccgaccccaacctaggtccctgccctggccccataccccagtctcgatcccaacctcagaccttgtgttagggtttatgctctgaaaaacctgtaaatatattttagtttataaatataagttgaacgttcttatatatgcttgaatattaaattattaagatttaatattgactcatttatatataaatatcgaaaactttcttattcatacatgaggctgtgacttttattttacggagtatgaagatcacttagccatgaataaaacagtcaacaacatattaaagttattgaaatagttgctagtgtgtttcattgatgctcgttattcaatgcaagcaatctcgattcagattgctgatgtagtatgacatttaagtaaaggtattttacataatagaaattatatatgacaatgaccgatatgtaattaagctgcctttatcaaacatatcgtttactataaagatctaactcatatcataaggatgatcaataggagatcggcctaaatcttgagtaatcgtgaactcttgtttatataattagtatctttgattcactcgttaaagtttctcagagaatatgattcttacaacttctgttttgggaatctaataatatacatggatggctgggaatatgat

SEQ ID NO: 399143 - DNA, 517 bp, Cannabis indica
caatatcaaattgtggctctagaattaatttttagatttcacaaggaaataaagaatttgaatatagaacaaggattgaacatgaatatagaacatgagtttaataggaatttaatagaaaaaaagataggccaaaccggattatcctaagctttgataccaaatgatacaaacctcaccaacgactgtggtgaaacttgacattaaatatgatagccactaagaactcaaaactttgggatgttgaatagcgacccaatgcttagttaggcaagaaccttggtatgagaaagacaccataaatggtaatcgaattccgtttgataagtcagattgaacaccacaaggaatacccttgataagtttgaatagactcttcaagaactcaagaagaaaacctctcaaatttttattcatcaaaatctatctttccaaagtgttttcaagcccttatatattcaaaattacatcaaagaaaaaagacctttttgtcctcctaatgaaaaccctaacactc

SEQ ID NO: 399144 - DNA, 711 bp, Cannabis indica
atacacctaatcacaaccctatcctgcattcaatgtgtaccaactctcaaacattcatacgacaaaacctagaatatatttgttgatatttcaatgcaactctatatacacttcaccaatacacaaatatgctaatctgatggctactcatttcctaacatatatttgttggtatctcagtgcaactctatatatgtacacctcattggtacccttatatgttattttggtggcaactgatatgcacactaaacatgtatatatatatgcagctattatactaatcttaccttattttcaaatttaggtgtgtcagtcaacttgagtggaaattgttgccaaacaatttatggcactaattcacaatttatataaattggtaagtgaccggctaaatcacttttaaaggaattatttgcgtgcataatctataataaattggtaacaagtttcctgccaactcatgtcccttaatcataataaaaatcaagctaaatatggtggatggcccaccatgtccactaataggtacattcaactataaggcaacaataaacgattcccaactcaaacccaacatactcaaatatcaatgatataaaagaatctggtgcactggtactaaataatattgttgggctttgtgtcctaaataaaactctattttaatgtaatcttttctattaaaatatcaataaagaaacagattta

SEQ ID NO: 399145 - DNA, 545 bp, Cannabis indica
aaaaaataaaaaataaattaaacaccaccatttattgtattgggcactttaaaatttctaatagcatctaattctttttcaatttattctttaatatatagtactatatattagataatttattatcaagcattttcccctttagtgtattctaacttaacatttttgttaataaatgaagattataagctataagatttaatgactcacttgaattgatgggagtgcataagacttccctgcaaacaaatatcagcgtcgagctccctattctaatacaagagtttagggtcagtggggaccactgcgtcccttttcttgactgccgcgacaaccacctgtgccaatctaacaagagggcttcccccagctttgatcttcttgtaaagcggcgagcctattaggaagattacaatagatattgccatggcagccgtagggatgccaagacccaagccccagccgacgttgtcttggatgtaaacaacgactgttaagtgggtgatgacttggatttccaattagggtaaactttggtaccctaa

SEQ ID NO: 399146 - DNA, 742 bp, Cannabis indica
ggtcctgatctaaagcaccaaaatcccatcagttcagatatggcttctgcaagggagaataatgaagacaaagattcaacatagaagagaaataaataaggagataaaggacatccctgtcgtaaacctcttatcagaatcactcgacctttagggcgcccattgattaagaaagtgtactctggggtcatcacacagtccatgataaccctaacccaaccctcagtaaagctaaactatcgcatcatactggctgggaaccccattccacccggtcatatgctttactcatgtcaagcttgagtgccataaatccccttctcccattatttcttctaaataatgagtgaagtagctcgaaattgaccataatgttgtcatgtatcaaccgtcctgggacaaatacactttggaaagatgatatgagggggccaagaacactgcatcctcagtaatagcactttggcaaaaattttatacattacatcacacaaagcaataggtcgatactctttaacaaatcttggtttttgtacttttggtatcaacaccacgtgatgtcgcccaattagttacactgcggtcgcggtagtaaacgggctatatgtcgtatccacagggaggaaaaatacactcaaaaggacagttagtaattttacgagaataaaataagaaccttgaatgtgatgtgagaatattgagaaaatgattttcaaaaattaaacaagtaattaaaatgaga

SEQ ID NO: 399147 - DNA, 1091 bp, Cannabis indica
cgtcgatccatagtctccttatcttgacacgtgtcctctattgaaatggtagctgaatttgtgtatacagagtataattaataataatattattaaataacataattgaaaatcaggttttaacaaacataaacatctattcaaaaatatccactaactttacaaaatttttgttatttttaacagataataaaattaaatgtctaataaaataaaatgataaattaatatcatttatctaatcttataattcaatttaaataaaataaaataaaaattgaaagttgataaaatatctggttagattttcaaaattttctaaattattttattaaaatatatcttattttaaatttcaaataaggtctttttataaaattaattaaatagtataaaatataaaatatatgactttatatttaaaaataagatcaaataatcaaattttaaaaataagataaccaattaagcaaaaaaaaaaatagattttatccattttcatgttcaaaatctactaatatctaaaattcattaatttcaaactaataattagatttgagatttgaaaaataaaaatctaaatacaaaactacacaaaaaattcgaaattaatcccatgaaaaatcatgaaaaattgaaaaagcgaaaaaaaaaaaaaaactggattttgtaccatccgcgtgcgcaggggatgggcaccagccgagaaaactcaatgtagcctctctacgcgcacaaggccccctgttcagacaaaaatgcccaaatgggtgagagacctcggacaacatgctgtccaaaactccgtgcacccgaggaacacgagtatctgcgcccgtatggagttgtcatcctcttgatttttttttcgatttttcaaaaattcacaagtaattcaaataaaattgaaatcaagttctagtaaaaaaaaaaaaaatacttaatttttcccatactatccaagaaaaataattgaaaaacgagattctaaatgttttacgtaaaatattgtaaaaagcaataaatcattaataaacacatagatcaacatgaatcacatccaaatcatacatacatcgttttaaatccat

SEQ ID NO: 399148 - DNA, 1756 bp, Cannabis indica
taattgaaatgcacttctagtttaatgttagtgtaagtaggagtttgttgggaatttatgccataaataaaacccatgtcaatttaatcttatttgctatcaatagaagattagaagtcatttaagtttacatgtagttttcataattataattttaatatatattttctattaagtccagaacatatagttatttgcaattacaatgatgtcatcacactgaaaagtaattgtgattatacgtttcaaagtctttagtctcatgatttatcagggcactagatctatactgacgtgataatcagtgataaagtttacttacacaatgatatgtggtatgtgttttccagggtattagcaaagtatactagtatcagatgtattgaatatacatcagactcaaccgatgttgacagtggaaaagatatcactaacttaccataatatcttttctaagtcaatatcacttagttaatcttagatcaaaagatcttaatcttgagatggttcgatttacggcttaactttattatttgtgttctttgacttgttcgttaaagctaaccaattggatccacccaatacttacatcttgtgagcatggtagtgcaattgagtgtaagtgctaatcatagacatggaatctatagctttcataactatatagaagtgaaatgctgatttcctttgagcttgacttagtagacataaatggaatagctcttatttcagaaataatattattttactgaaatatcatttatgaaaagctaagtgttttatggatcaaatacattgaagggtagaacgataaatttgtccctacttgatgtaaatcatctacagaggatatttgattatttagattgaaataatgggtaatttatagcgtatctattcttggtgaatagagcattctatgtaattaggagtacgattctgaatctatagtggactcaggaggaattaataagatagagaattcacttggtaaattctagaactacttattgagagcttgattatataggcccatggtccccacactagttgagataatattgtcttgtaaactcaattaattggttttaattaatcaattagaattctgaataagactatgtcttgtttatgaattttcactaagcaagggtttatttgagaagaaaaagaggatttagggattgtttttttaattaagagactttgtaatgtctaattaatgaataagttaaatgagaatttttttttataattaattataattattaaataaatagatttgacatttatagagttagaattaaaatatggtatttgtgaaaagaaaaagataagctttaaataaaatgacaaaattaaaatcttgtagggcccacattagggttcgaccataaggttcaattaacgccatctttttaactttttttttaattccttttaatactaaccataaccctagaagttaccctatcagtagaatattataagctcttattttcataacatgattagactccttttgtcaaataattagaaagtagaaagagcaacctaatattcgaaaccctcttcttctctccctcaaattttcatgccctatagtaattgaggagttgcccacacaattcaaggcaatactcaagatagtgatggagattttgtagaattccaacaactgaaggagaatccaagttcagatcttgatcatactctgtgacaaaaaggatcaagggttagagatctaaacggaagg

SEQ ID NO: 399149 - DNA, 1648 bp, Cannabis indica
caagtagaggaatgatccccttcaaagttccaatgctaaccaagagaaactatgagaatgggagtattaagaattaaaggcactactaggagctcaagatgtgtgggatattgttgagaaaggccataaggagaaagatgacggtgctcgttcccaagctcaatgagaggccttaagggattcaagaaagaaggataagaaagctctctacctcatctattaagcagtggatggagatgcgttcgagaagatctcatatgcaatgacgaccaaagaagcgtaggagaagcttcaaacttacaacaaaggagcgaagcaagtgaaaaaatcaatcttcaagctcttaaaggtgattttgaaactttatttttgaaagatattgaatcttattctgattatttcactagagcattatcaattgtcaatcagttaagaagaactagcgaagaaattagagaagtaaaggttatagaaaaaattctttgtactgtgagtccaacctttaagtacattgctacaatcattgaagagaataaatatttagaatccatgactattgagcaattcatcagttctttaaaagcttattatgaagaaaattaaaataggaaaataaagcggaagaagaaaatggagcaattactaaagctcacctttgaagaagaaaattttgacaactaaaaagatcaaaaaggaagaggatgtgactaagaaagcgaacatggacgtggtcaaggacaatgaagagaaggaaggggtggctataatagcaataatttcaacaatggagaacgaagtcaaaattcacaagcaccaagagggcgtggaagaggcaactcattgtcaaggagtgacaaatctcacatcaagtgatacaattgcaacaaacatggttattatgccttcaaatgtagatcaaggagggttgacgggcgagccaatttcatggaagacaaaggtggagaagaaggaacattattgcttgcatgaaaacagaaagatgaaggtcaagaaaataaatggtatcttgacaccagtgctagcaattacatgtgaagagaaagaagaatatttgtagagctcaatcaaatggtaaaagagaatgtcccttttggagatcaatcaaaaatacttgtggaaggcaaggtaatattcttatacgcttgaaaaatggaggccatcaattcatctcaaaactttactttgtgcccaacgtgaaaaataatattttgagtttgggtgaattacgtattagagaaaggttatgatattcacttaaaaaaataacatattcttaagagatgataaaagtaatttaatcaccaaattttccatgacaaagaatagaatgtttctcttgaatattcaacatgaaagtgtttaaaggcctgctacaatgagtcatcatagttttggcatctacgctttggacatctcaattttggtaaacttaaacttttagagaaggagacggtgagaggcgtttcatgcatcaaccaaccaaatcaactttgtgaaggatgttcgcttggaaagaaatcccgatttttttttttaaaggagtcactataaagagccataaagtcgcttgagctcatacacactgctgtctgtggcccaattaaaccaaactcatttggtaagagta

SEQ ID NO: 399150 - DNA, 718 bp, Cannabis indica
aatgaaatgaacagataatcgaagcacacgtgctatttaaagtcatacttgttacaaaatttgtatataatatagagcacaataataacaaataattaagtatgcgtacctgattagttcataacaattacaacaatttaatagtacaatactattaactaagtttttctcactagatctctaaattagaaccagttttcattttatatgattattaaaagtatacaattatgttgagataatatatatttatagagttatgtagggaacttagctacataacctagttggactgaacctgctcatcaaatgtttcagttaactagaaaagcccacacttctccttcaaatagagactttacacacagatgcaaagctcatcaactaataatcactaacaatatgggttaatacaacaaaaaattatccaatcaactaaagttttactaaaacctgttgaccgatatttttggcaaccgattaaatgaaagaatgggaagagctatatggaagctttaatgcaggtgatttttacgtggttcgggcattaatgaaccgtagtccacgagtcttttatatttatgagagtgttattacagagaaggttcttggtgaatctctctctctctctcttctttactcccctcgattccttatttgatcgatcgaccccttttacgttctatgtttggggttttttgttgggttttatacccta

SEQ ID NO: 399151 - DNA, 502 bp, Cannabis indica
caatagactctctttatagtaaagatatatagggccgcctagctaatgcacgctaaaggtgagaagtggaatgaagtgggcaacacgttaggaagatcttgcccgttgaattttatcatgttgagttgtactcgtcgtgctaacaagtgaggttttgaatataataaaagggttaaacaggagataggggtgttaaattaaaagaaaaaaaatacatataaatcagaaaaaaaatatcatagttaaatagaaaaatatgttaaacacgaattcctagaaaaattgaagcagaggaatcagcctgtaaacttggacgctaatgcacaattttacagcgacaaacctgctagatcggttcctaaggagttgaataatttggacacttaattaagcactccatataatcctataattattaaattacacacttaaggatgtaagattgagtctcgtaaggcaaaaagaaccaaatcttcgacatttgtcaaggatgtaagttggg

SEQ ID NO: 399152 - DNA, 817 bp, Cannabis indica
gataaaattgtattgattaaatcgtactttatggaccaaatatgtacaatttgaaaatatgaggtaccaattaagtattattgaaaacataagatactgaatatgtttttcatgaaaacataaggtactaaatgagtatattccctattttttaagatatacacacttttataaataatttctccattagacccgttaagttaatgtaaattatattctagacttaagtagagagtgatggtatatttgagcaacccactcataaaagttggtatatttttataaaatataatatgagagtatttttgattaatggatgcaaaaaagtggtattcctcaacttatctcgtattttattgagataattatcaagggatcatttttttgtaaaaaaatatatttttatgtttaaagatttttttttttacaatttttcatagaaacaacacgaaaacaataagaaaactaaaatcaaattaacaaaaaataacaacaagaaaattactatgtatcatgaaaataacatctaaataatatcaagacaacaacaaaaaatagcatatagataacaaaaaattaacaagagtacaacataaaaagaccttattctctataactaaaataaaataaaaatcgtccattaattaattgttgaataggaggggttcaagagcagtcaaattaatacattgtacataactatttttaccaaatcacaacataaagctcattgacattaaaaaaaatagaaaaagaaccttatttgggaagttttggtttatttttttatgacaaaccaaacaaatgaatagattca

SEQ ID NO: 399153 - DNA, 530 bp, Cannabis indica
tcgggtttgggtttagcaactggccctgatcctagttcggttctagttctatttccaattctaagttcgagtttgggtttgagttcgggttggagtttgagtcatggtcgtagtttgggtttgggtccggatttcagtctaggtccaaatcaggctctggatgtgggttcgcgtcctgggtcttgatctaggttgggtccgagtcccaagttccaatcccgatctgagtctggattaagttctgggtcttagtccttggttttaatccttgtctcaattcgagtttgggtccgcgtccgggtttagctttgggtctgattctaggtgtgggtgtttgagtttgggtccgagtttgtgtccgggtttgtgtccaggtctgaccctgatttggatctaggttcgggtcgaggtccaagttcaggtcccgagtgcgggtcctagtttgggtctgggtagggttctcggtcctgatctaggtcgagcattttgatcccagtctgggtcttggttcagcttccaggtcccatttc

SEQ ID NO: 399154 - DNA, 976 bp, Cannabis indica
aagataattagggctgtttggagaagagactcaaatataggaaaattttaaaactcttatcaaatttcgaattttgatatatttaataacatgattaattattctactaaaattaggaatataatatggagacatagtattttaaaataattctattctattttattttattttatttatcatttttttatatatttttaagtagtattaaatatatattaattaatttaaaaagggtaaataccattttagatcttatattctgtaaaagttatcaattggactctctattttgttaaatgataaaattaaccttatattttctaaaatggtaaaaataggaccttgagttcaattttcaacaattttattttttaatataactaactttaagacaatttttaacacgaacagatacagaaaatgtaattagttttgtcataacatttctagattagattattattaaaatttattttgacaaaaaatcagttcagggtcctatttgtacaatttaagaaaatacaagatctattttgtcatttaacaaaacagaggtaacttttacaaaaaacacaaaggtctaaaatagtattcacccttaaaaaacaatatttttaaaaatgataacttctcattcttattttattctcatattatcaattaataacgagagatataagacggtgacatgacgctctaaaatcactctaattatattatatctctattctctcctaaattttttttattttataattatttagtacttttataaaattaatataaattttccttattttagaaatataatcactcacgtgaaggttgattttctctaataggcttcattttttttttataaatttattattaataataatagaaatacaagcatatatatacactaggtgattgttacgtgccaagccacgtagtgttagttttatttaatattttagttttttatttcaat

SEQ ID NO: 399155 - DNA, 611 bp, Cannabis indica
ggggactctgatataagcatagggctggtagaagagttataagatgtagagatagacccacatattgaccaggataattaaaataggtcaaagtttacccagcaaaacaaaatcctctttgatcaaatttctaagggaaaaccttgatgtatttgcctggttccctgatgacatggttggaatctgtccatctataatctgtcatgccgtaaacatcggcactcgtaatttttggcctgttcgacaaaaaaggagattgcttgacaaagaaagagcctgagctcttaaagaaccagtgaaaaagctcttaaccaaaacaatcatcaaagaggcattttatcccatttgaatatcaaatccaatggtagttcgaaagcctaacaaaaagtggagagagtgcatagacttcaatgatttgaacaaggcatgcccaataatttcttcccacttcccaggattgactagttggtagctgcaattgtcagacatgaaatcctaagcttcatggatgcttactcaggctacaaccagattaagatgcacccatccaaccaagagcatacaagcttccgcatagatgttggcttatattgctacaaagtaatgtcgtt

SEQ ID NO: 399156 - DNA, 514 bp, Cannabis indica
aaataaaagctggactaccataacgaaaagaacaactgtggatggtttttttatagttgtttttattattgttttgtgtatgttataattaaattgttgaaatactttcaaaatattataggacatggaatctctaccagctctcttgaagagcaataggtactggcaagaaggaaaaaattatgtcaattatgaggctagtagagaattcatactaaaagattgcaagtatgaacaatgaacaatttgtacagattctcctatcttcattggcgtgcgaacccaaccctgcaaatccagtaccaagcaaaagatggaataccaccgattaaaatacttaacgatgcaagcctcttcttttacttgcaactaaagattaaagaaactaatttcaccgtatatccattgtgcgtcaacacactaaacaacaacacaaaagttgctgcaatacgtatattcgaatcaagaacaaaacaagttcaacaaaatgtgggaatgcttaagaacaacacaa

SEQ ID NO: 399157 - DNA, 608 bp, Cannabis indica
acgaaagtttgtagatcaagagcttgttgttggaattgaagttggtggcggagagattgaattgtgtgagtgaagcatcagtgattgtgaatttgggctcttgaggaagaaatatgatggatgagatcacgaacagggtgaccagaaagcagaagagacaacacacgcgggagccccattcgcccatggctgctatatctaaaagaaaataataaatttagatcatgatcaacaaattaaaggtagaaatattcaatgtagtgatttatagttatattatatgagcatccattatttctttttttaatttgcattaatttaatatatatattttgtcaaaccaaaaacaaaattctctatatatacagctctctctctctcaaacaaaaagtaggaacgtattaacaattattattagttaattaagattttttttcctaacttaaatattatcaaattatgctttttgaatttttaaggtcgttaaaaatactctttaaccattgagattgttgaatttaagcacttttgtctaaatttagtaaaaaaattctaacataaaggaaagttcatggggcataatttgatatcaaagtctgggtagcatg

SEQ ID NO: 399158 - DNA, 968 bp, Cannabis indica
aaagatatcaatctttaaaaatatttataaaaacaaaaaaatttaaaatatcatattcatttttttgatacatataacctaatttttttgcgatattagaaattttttttataactattcactactgcaatgtggatttttagaggctgttttttcaaccaaaattataaaaagggaagctaaaaggtgtgaaaatactcgcctagttcgaaattaacatttaaaagcagttttttgataaaaaccgtaggtatacaatttataatacctatgtcgtcgattgggagttgaaaatatttcagcctactttattacacctatgacatcggttattagggaaataactgacgccataggtgcacatgtgtcagtaaaccgtacagctatggcgttggttatttcctaataaccgacaccatagagtgtatatataaacactctgtcttcttcactttcatcttcttcctcatacgcgatataccagcatccatagcagaaccatacccacgccaaaaccctcgccaaccaccgttaaaataccatcattctctctcatttctttaccattttaccccatttttattttaaaatattcgattttcaatacttaagcctatactgtaaaaaaaataatttttttctctctttcattatagttgaacctattaaaaaaaagtggtggtataactccggtcatcgattttggtgtagaaaacgttgaatctcaatgttcattaaggtatatataagatgatctattcattttattaatatacattgttttattttcgttgttgtaaattttttttgggatataagcattttattaacattatgttattgtgtctgaatggtggttggatttttatcgcaattggtcttcggattgtgtttataagataaatatttattaacttgatatataatatatatacattgtattttattgaatatgtgtttatatatat

SEQ ID NO: 399159 - DNA, 674 bp, Cannabis indica
ccagataccaaaactggacacacataaggataacggaccccgttctagataccaaatgtacgaccgagacccaatactcgaactgaattcgaatttggacctagacctagacttaaatgtaagacttgaccagtcggggacccagacccaaacctagaaccaggtctgggactcgaaaccgaaccctggtctcgaacgtagaccaagatttaggacccgtactgggacttgggacttaaaccggaactagactaggactcaaaactggcattcaaatatggactcaggattcgggactcgagacccggagcttggacccgactcgtagtcggtatttggatttgggagtcataaccaaacccgaacccagcgttgtcccgtttaggcgagagtcaaggctattctatcttatgagcttctaccattgtttgatattttgcaagtcaaatatggtcgccaccattagggtgatctataccatataaaacacttataaagcttcttatctttcgagattaaacagtgcgaaattgctaatgaacgttcctctgttagggaggattactcactaaaacaaatgcgatgtaaaaccaacaatggagatcgaatatcttaataataataaagcttattctttaaaatatattttcttattattttaataaaatatattc

SEQ ID NO: 399160 - DNA, 870 bp, Cannabis indica
cactaattgagacttatactgttcaatatacccatcagatttggtctgtattttatacacccaacgagaaccaataacatgtttatcagaaggcaaaagtaccaaatcccaagtatgagtcttttgcaaagtaaagagttcctcattcatagcacgctgccaaaaggagtcaataagtgattctttataggacaaaggatcagaaagacaatgaataaatgctaaaaaaaagtaaaagaaacagaataagatgagtatgtaaaatttggttggcaagtagacttacgaatatgttaaggataatgaagaggagggtccacaatctagagggtctggaacagctgcaggaggagggggaggagcgatttcaggttgtaaagtaccagtatctaatggaagaatgattttaggttgtaaagtaccggtatataattcttgagacctttcaacacgatgcatgcgagagtaatggagaggagaaggagctgtagcggtagtggatgattcagactcagagaatgggtcaatgtgaataagatctaattttgtcaaattataaggagcattaaaaatagtaaaaaaaaaatatatctcaagaaaaacaacatgatgagatacatacaatttttgaaaaactggatcaaaacaacgatagcccttttttcctcccatataaccaagaaacacacaaagagtaaagcgtgacaataactttgtatgctctatactaagacgaaacacaaaacaagtagaaccaaagactcttaaagaagattaatcaagaatacaaccatatagtttttcaaaaggagacaaacctaaatgatagaagacagaatcatataaattaggtgaattgcagttagaact

SEQ ID NO: 399161 - DNA, 559 bp, Cannabis indica
ggaacgtccgtccaaaacccccaatacctagtagttcaaacaagcagtaaaaaatctaataacaacgacaaacaaggcaatgggaaaaagggaaagttcgcacgcaaagctgaacagacccctagagagaatccttccaagttcactggtttctctgttctgagtgacgacttggagaccatctacatgaccactcagtcagtagttccgtacaagaaacctgcttccatgaaaaaggacataagtaaacgggacatgtccaaattttaccgttttcatgaagattttggccatgacactaatgaatgcaacaatctgaagcgggaaattgaattcctgataagaaaaaataacctggatgggcaaaaatatgtcaaggccgaccagaatcaaagggctgcccaaacagtgaataatcaagacatgttactgccaccaccggtggacaggcatttacaatcgggggcccacatatagctggagattccggcaaagctcgggaaaggtatgcccaaaccttacaacacgaacaaaaagaagtggttctggccatagagga

SEQ ID NO: 399162 - DNA, 866 bp, Cannabis indica
tttttttttttttatctttttgtgaatgggctatttgttgggggggggggggtttgcctatctttttcaacttaacttccacttttagtttaggctttatatttcaatttcactataacttgttgttattttgccagggaatgaagagggtgagttcacagttaagcatatacacggggtacatggttttccccatttggaaatagaagatatgagggagggtcttaggagtattttgatcactatgaaattgaaggttttacaaaacttgatttggaggacatggcaagaagctttcaatataggtttccttttggtttcctatacaagccctatgggaagcatttaaacatgggttttatggttgtaaacaatgtttcaattcaactcatgttgaaggatttgacaggtataattttaaagtttttttacatatgttagttgtttgttgtcataggttttatggttgttgttgtccttatttggtagctagaaataatgcaaaggctaacgtatatctggtgccaccagatccacaactaacattggaatgggaggaggatgctgaagctgttaagatacaaaaaccagagcaatcttcaaaagtttagaagtgtaagattggaagctacctgaagggtgtactgttgttcctgatgtttttgtgaatcccccagggcatgtcaatgtggatgaaaaattttaaaatttctttgtcaagtggggtgagtttatggctgcagttacaacaaaggaggtgatttcaaaagaattacaagaagcaattgagattagttcctcatctgattctgaggttgcaccacaatttctcccagaaagtgaggattcaaatgaggttgaagagg

SEQ ID NO: 399163 - DNA, 656 bp, Cannabis indica
gttggttctttgctccaataccagacatcttcaatggaattgctattaagaggaatctggagaatgatctgtgcttctcttgagttgaaaaggtcatataacacttcagaatcccactctttaacatcagtcttcattagttgatagactttgcaggagtgcagagaaggatgatcagattccacacgaggagacgtatctgatgggagccaaggagtattgaggacattagtatctagacccgaaccaatacgaattctagcacatgttttaattagatcttgtgactcaaagatgctcttccaaatgaagcttgggttgcttccaagtgaggaagtaaggaaatttccttgaagataatatctcgctttatacacacgtcccacaagagtatgatcattaagaagaaggcgccagccttgtttgccgagtaaagaaagattgtagtcatgaaggctacgaaatcccatacctccatcacttttactcttcgtaagcctcttatcaactcatccaggtgctaccatgggtgtcttgagaagtagtattccaccaatatttagacatcatactttccaaagcagagcaagtgtctaaaggcaacaaaaagaccgacatggcatagctaggaagagcttgagcaactgttttaagta

SEQ ID NO: 399164 - DNA, 542 bp, Cannabis indica
tgatgctcggctccgcaaggtgtttaatgggtactacccctagtctttctatctcactgtccgatgccaacttggccaaacaatctgcatgagcgttcttctctctgggaattctttcactttgtactctatgaaatcatggagcagttcccgcacaatagctacgtacgcgaccattttctctccacacatttggtattctcctgagacttgattcaccacaagttgcgaatcgctgaagacttctactcttgcggcccctacggctttttccaacttcaatctgtaaatagggcttcatattcagcttcgttgttagaatctgggaatgcaaaacgtaaggctgcctggagccgaagtccatatggcgatatcattgctatcccagcaccggatccgttttttttttacgcctcatcaacgaataccttccacactagggtccgcgatactggcactattgaactagcttctgcttcattacactctgttatgaagtttgctagggcttttccttttatggaaatgcgtggaacgtagtg

SEQ ID NO: 399165 - DNA, 683 bp, Cannabis indica
tgaatccttaattataacttgttttatttggtgtatagtttcggaagatatagcttttcgatttaattagaatttcacttatttttgcctaattctccggctttaatatataagttcgttctttctaatagagctaaagtgagtgttttgaatttatagtcttagatgatttgtgtttattactagctgttgtacacactactacacaaatgatatttcttgacgttttttaaatagtcgtttaaaatattttcgtcagtttttataactgtcgcctatacgaccatcgttaatgtagacttctcgacggtttaaaaccgttgcctataacaggcctaggatataggcgacggttgtaaaccgtgccctatactataggcgacggttttaaactgtcgcctatagtatagggcacggtttaaaatcgtcgcatataccctaattaagcctgttatagacgacagttttaaactgtcgaaaatgaaaaaaaaaatacagatttttttaccattaatagaacatagaaaaatagaagcaatttaatataatagaaactaaaaattatcattcattaatgaaattaaaaactcatgtctcgggttttgaaataacttttaacttaaaaaaattactcgaaactagacattataatcaaaagcatagtaaatagtaagagtttaagg

SEQ ID NO: 399166 - DNA, 712 bp, Cannabis indica
aacttttctgtctactttgggcgatgagcatttgtaatgtccccgcttcaagcctccattgggcccttacacccacggaataatgactcttatacacgagtacatcactctgactgcttcatggacctaaatagcgtctttcccaaacttcatcccagtgaagcggtgatctacattttgtccatacaacatctcatatggcaccatttttattgttgcttgacaactattattgaaggagaattctattagaggtaaatacttactccacgaaccagtgaagtctagtgcacatgctcgaagcatatcctctagtatttggatggtgcgttcagattgtccatccgtttcggatgaaatgccgtactaagttttaatctcgtcccattgctttatgtagactctcccaaaacttggaggtgaatactgaatctctatcagagactatcgtctttggaactccatgcaacctcaatatctcttgaacgtacaagtcagcatactgctctgcattgtaagtagactttactggaacaaagtgtgctgactttgtgagtctgtctataattacccaaactgagtcatgttgcttggttgttcgttgtagtcctatcacaaaatccatggctacatcttcccacttccattcagggatttccaggggttttaacgtccctactggtctctgatgttcaaccttaacttgttgaca

SEQ ID NO: 399167 - DNA, 612 bp, Cannabis indica
gactcacaaatctcccagctatctgttacaatctcataacaaagaggttccctcaaccacgcattttcaaaccgaaactgcttaacataattgtgacccgcagcaggaaccatgaccataagaatcggagcatggtctgaagttgaaatttcaagattatggagcttagcagaagtgaacatgttcaaccaagcaaaattagcaagccccctatccaaccgcacttctatccaatgattagtaccccgcccacgctcccaagtaaacgataaccacataactccatgtcttgaagtccactatcaaccaaagactgttgaaaaccttggatcaaaaagttaggatacctattaccgccccttttgtcgtcatgagataaaacattgttaagatcacgcatcacacaccatggtagattagaccgattagccagagtacgtaacaaattccaagtagaagcacgcctactcctatttggttccccatacacaccagtgaaacgccattcctacacaccttaagaagcaactctcacatctatgtaagcatcaaaaaacccaagcaaagacacttcttcctcatttttctataataacgcaatacctccactcc

SEQ ID NO: 399168 - DNA, 529 bp, Cannabis indica
gcatgcaaatagttggcgcatctcgaggtcaatttatagagcataattagtcgaaaattgaaggaactcttggtcaggatcacatcagatcaccaataagcacatcagacacgtgccacccgttcagatacagtcttgagatgagtgaagtctacatgcgacatcggaagtcccgtacagacttgggggcaaatgttatcccattttttgcactataacatgacaacacatactggtgacacatggctcctatttcctatatcttattgaagggatattctaaacaaagctcagcatacatctgcacggatagagtctgcctgaccgaccagggcaagggtagacgatctgaacaatgtatcaagacttagaagttttgatacttgcattgtgaagcactaaagcaattcctataatctagggatcgtatcaaagggatatggcaagctgtctaaatctcccaatctatgtattctaaatatgtaatgtgtgttcttactaattatagatattgtaagcaaaagggaaa

SEQ ID NO: 399169 - DNA, 523 bp, Cannabis indica
ccatgagaaagcatgaaaaaatcgaaaaaaattgaaaaaaacattgcatttggctcggatggtatgcattacatacccatcccgcgccccatgcaacagggtgggctaggcatgttttacccgcacacgaaggcttccagcatcattttcgcacgcgaaatgggggggaattcaaacatcttgggcgtgttccttcggacatgccctgtctgaatgcgtgcgacacccgagtgatcactgtgtccgcgcgcgtatgtggtgcacctgattcctgattttttttttaattttcaaaaaatcataactaattcaaataaaatcaaaattaagttctgtaaaaaaatgacttgcttaatctttttaatactatccaataaaaataattctagaatgaaaatccaagtatttttttgtgtaaaaaattgcaaaaatcaatcaatcatcaatgaacacatagatcaacatgaatcacatccaaatcacacaaacatcattttaaatctatattacttgaaagcatttc

SEQ ID NO: 399170 - DNA, 580 bp, Cannabis indica
aaagaggaatgtacaatataacaccaccactccaaataatctttaatctttaattttgttgaatctttaatcaagcatcataataaagaaaaaaaaattatgaaaaatacctccctctgtggacgcttatcatccaaatcaaatctatagtttggtagagatatcttactaacaacaagaactcttgcatatagatggctgccaagtgtaaccatcaatcagattttcaatccctactcttgtacaaaaacatgaaattcaaaagataacaaacatattattacctatagagtcccactttgctcgccaaagcagatatggttgaagatgattttgattttcatctctcaccttcttcctcgtcattttgaacttcatgcgatatacagtggcttcatgtgatataaattggggattctatgagttggcatgctataaactgtgtttgagatttgaaaaaagaaaattatagataaaaataaattggggatttaaccccgttaacctcagccaaaaaaaattgttattttttaatagaaaactttaatctatatacagtttgttagagagatatgcggtt

SEQ ID NO: 399171 - DNA, 926 bp, Cannabis indica
gaactttgtcgccaaatcagtccatgttgcaatagagttcggtggcaaggagatcagccaactcttagctcgctctctcagcgagaatgggaaaagtctcaagcggattgcatcatcactgactccattgactttgaaagtctgacataactccatgaaatttgacaagtgcagattggggtcttcagaggggagtccaccgaactgaactgaggattgcaccatttggagtatggcaggctttatttcaaagttattggcatctacggcgggtggtcttatacaagactgaacccccgtcaaagttggaagaatgtagtccctcagactacgaccatttgcttgatcttcaatggcaccaccgttattaccgttgttgcctccattgttaccgccattggcattatcagccatgatttcttctgtttcagcagttgctgaaactctttcttgcctcttgtttcttctatttcttctacaggtcttctcaatttcaagatcaaccggcagtatgacaccttgtccttgacgtcgcatacacctttaattcctgaaatagacaatctaaaagaaacagattagcaataagcagaaagaattaaccaaagtagaatttaatctaatttttgtaatatcaatttttaaacaattccccggcaacggcgccaaaaacttgttacgaaaattatgaacaatacgcaagtgcacgtaatcaagtagtaaactcacgcaggtgaggtcgaaccacagggaattgaactgaataccactaaattagacttatgattctatttggtagataaataattttgatagattttgaaataaagaaaaacaagaaaattaaagaaagcaataaaggtgtttaatcaaggatgagaaattagggaaaagaatcctgttgatttaattacccaattgttaat

SEQ ID NO: 399172 - DNA, 695 bp, Cannabis indica
caaaaagtcaagccgatgacttttgaaaaaccgagatttattacaattgccaatatttcttacagaaatatagtaaatataaaaatgtatacgtctgcagcaacagaatgtaattctgttactgcaaagacaaactagaagttgcagaatataaaaataattgtagaaaattcaatcacttgacacaagagatttgtacttggtatcagttttctttcaaacactactagtccacggggccacacccagcgaatgaaatcatttagtaaagtatcaaagattacaaaagtaattgacttaaacaaatttagtgtagcgccgtaatgctaaggcactctacagtgctgtctttgctaatcaaagatttttctcaaaaaatgtgtcaaattaaaacttttatattacatattaaactttatgatttacaaaactatttacaagtatcgagatcctgtttttaaacttttatacaaaatatacaaaaatacataaccggtcgcacaacgactacaaaataatatccccagacgtctcgagacagaacactccaggtcgcgccaccatgacgtgtacaacctcatcccagcctaggctcacacctgtttaactttcgcctttcttttacctgcacatggaagaaaaattgtgagtcgacaaactcagtaagaaaaacatatagcatatcatataatacc

SEQ ID NO: 399173 - DNA, 617 bp, Cannabis indica
acattatcgggctgacccggtagcgcgtctaagaagctgctagagtttaacaggtacgttcccattggcttgtcggtatgccacttggacgggatgcggcctaaacctccaagagaaattgtggtgcaccttgtccacgagtctcaacacgagatgacatgggtagtcattcgtgggctagtttgcatacgcggatgggatggatgcaccatgctggaatggaacagaggtctaatgtatgcaactagtttggcagcttgtctcgagggcctgcgaacatgcatggaggcatggcgccttaaggattgttccatggacatatgggagtccttcggcgatgagggagactgttcgaacagtatcgaatggggcatgatagaagtgttggcacgtcagcttggcgttggcatcttgccacacattctaccttggtcacgagtgacaagtgttgagttttatgccctaaataaaaactctttacaatctgattagttatcaatataagaaatttgaagtgattgatgtttgcatgaattttccatgctagtgggttaacatgtttattacatttacacacagaatcagttaaatccagatcatatgtttattcacaatta

SEQ ID NO: 399174 - DNA, 1120 bp, Cannabis indica
gatctggtgcagactcacagcattgagttccagcacccctgtccacacacctctgcccaaaatggacgtgttgaacgcaagcaccgtcacattgttgagatgggacttaccttgctcgcacaagcaagtatatgcccctcaaatattggtgtgatgcatttcacacttcagtctatttaatcaataggcttcccacacctttactgcaccagaaatcaccctatgaaattctgtttcctcgaaaacccgattatgcctttctgaaaacttttggtgcagcgtgttttctgtgccttcgtccttaccaatcccacaagttctagttccactctatcaaatgcgtcaatctcggttatagtgactcctataaaggctataaatgtcttagttccactgtccgcatctacatctcttgcgatgtagttttcaacgaattagagtttcccttcaaaaccggttttctgaacaattataccactccacaacctgtcataattcactccacttcctggtccacccttcccactcattaccccactccatcgtccacacaagttgactcttctcccactgatacatcacctaaagcctctcctgtagcattatctagcagcctccgtgctcgcccttcagttgttaattttgactcacctagttctgtttcaggtcctgacagggacaatgatctatatgcccatgacctgcaacatgaacacaatctgcaacaaccagtttcggcttgtgttgagcctactggtactgaaactggttaagatgtacctgctgaacccaatgttcctttaccttcacaccctatgattaccagaggtaaagccggtatattcaagcctcgaacttttatgagtcaaatacaatctgaatctgccattatagaaccggttagtgttgctgaagctataaaacatccaggctggtttaaagcaatgaatgtggagttctatgctctaaaatccaaaggaacatggattcttgtacctccttcagatgcatacaacttagttggaaataaatgggtgtatagaatcaagttgaatgttgatggtactgtaaatcgtctcaaagccagacttgttgctaagggattccatcaaaggcctgg

SEQ ID NO: 399175 - DNA, 518 bp, Cannabis indica
gttgtgttagtagcacctggtgtaggaattttgtgaccaagagagctataaaaaaagctatgttgtaatgtttgatctggcgtagaaatgccagatttggttgctaattttgggccagaaatgggtagaatttctggtgtgggagctgctggtataggagctatagttcttgaatcagctgaagtatttgaaggatctgtgtttcctgaagtggcagtagtgtgtgcaccagaaagtggtgcaaattgaggatcagggacagtgtatatattgttcacaggttggtgaaaatttgtttgctgcactggttttatggtgggaagtactatatcaggaaacaagttctttatctcagaagaagatgtatgtagcgccctgaccctcagggacgccacgtgtgtacttttaaaaacttattatcactaatctataaattttggaaaagtgtggtttaatttaaacctttaattaaattcaaaataaagactttcattttaaatactgtcgtaatataggga

SEQ ID NO: 399176 - DNA, 807 bp, Cannabis indica
cactggtttcaatgggtacattgaaaacatagttaaggatttctatgctaatctaactgatgattttcttgatgagaattctagactttttcgaagagtttatgttaggggacattggttttccttttctgaaaaagacattgctcaagccttgcaacttccagagaatgtctccaatgcagttatgtctatggatcgtgaattgatgctctctgaactcactggtgcacgttctgaattgaaatcggggtagagtcttcggattacacatctcacatttgctcatgcctctcttatgcggtttgctcttagcaactgggttccaaaactccaacaagaccgtggggtctcaagatgttgcctcattcttacaccgcatcacctctggagcttcaattgactttgcctcccacatcttgaaccaaattgtttcatttcgaagaggtaaaaagccaacctttaagcttgtatttccaaatctaatctttaaggttttatcctctcagaaaaatgtggcacaatctcatgaaactcctgagccttcgatcactggacccacattccaaccctcggagtattttgatggtgtgtttcaaaagaggcctaaagctggtgctgctgctgctgcagaaatccaggaagtcaagaatgaggttcagcttgtcaacaatagtcttgctgccatggaggaacttcagcaagagatgtccaagcagtttacttccttggtcgagctttacagagactaagtttttatctttttcttgctttgcttttgattggacatattactatattttcttattt

SEQ ID NO: 399177 - DNA, 570 bp, Cannabis indica
ctggaacatccgcccaacatccccactacccaagtaaatcgagctcacgtggtaagcgttctagcaataaacacaagcaagggaatgggaagaaaggaaagttcactggaaaatccgaacaagctccccgggagagtcatgccaagtacactgcattcactatattgactgaagatatagaaagtgtttacatggcaactcagtcgctggccccatataagaagcccgggcatgaagaaaaatgccaacaagagggacatcacaaaattttgtcggttccatggagactacggccacgacactaatgaatgctataacttgaagcgggaaattgaattcctaataaggaaaaataatccacacctgcaaaagtatgttaagacccatcaaggtcagaggaacgacaacaaccaagatttgctacctccatctgtagatggacatctgcaagtcattgatggaggcctacacattgctacagattcgggcaaagctcgggagagctatgcccgaacaatgtagcacgagcaagaagaagttatcctggccgtggaagaaaggaagcccaaa

SEQ ID NO: 399178 - DNA, 1214 bp, Cannabis indica
atgacccactgaacttcaaagtggataaagagagttgagaaatttaacaaatacttcagcattgctccaatcactagcttctggtgggctgtcaaatttttccccattaactctttcttttcaaaatacttagtgtagtatgcatccccttccatatacttaaaactactcttgtactttaatgttgcttcaagcatcatgtatgtggagtttcattttgtcaccacatctaaacatagcaaggcttttgacatttgcttccttacaagcttctctaaactgcttcaaccgacctagagaagatctaaaataccttaccgcattctttatgctagatatggcataagacatatcttttaaaccatcattaacaaccaagttcaagatatgcgcacaacaatgcatatgaaacatctctccatccaacactaaagctttatctttttttgttaaatattcctttacttttctcaaagctacatcgtttgacgaggcattatcaactgtgatagagaaaagttgagtaataccccactgattgagacaattgattagttcttttgccaccatatctcctttatggctaggaacttgaatgaaactaatgattcttttttgcatcttccaactatcatcaatccaatgagcagtcaaacacatataactaatattttgtatggaagtccaacaatcagtagttaaagacaacctacgattgacaaaagcctttctcaattttttcttctcttccaaaaacaattggtagatatcttgagcaattgtaacccttgaatgaaactcaaatgtaggaaaaaatgactaacaagtaagcagaaccctttacctttgttgacttcgcttttagccaacgacaatgagtctttttgataagcgataaacgataagtcgtaatgagaatatatataagaaagcaataataagacacagaaattttatagaggttcagccccgagcagttcggtaatagcctaatcctcgttatttgtattgacttaagaacaaggaagaagtttccttttcttatagctcttacaacagtatctctaaatatataattcttagataatagtatagccttagcttagctgtgtattggcttataatttctccctcctttgcccagcgaacatttttcactatttatagggctgggaaacttgaggaggaagagtttcctctctcgttacaatgcg

SEQ ID NO: 399179 - DNA, 863 bp, Cannabis indica
atatcatcaagtcccaatttacctctgtgagattccactcttcagcttcgaccctcggctcacattcagttggggcctgaattgaaaaaccctaaaaaaatgcagagaaaattgcatcagttgaaagtgatggtccccactcacctatgaattttgggagccgaatgctctaagcttggcttttggagaaccagatttttcaaccaaaatttttaatttttaaaaataaatatatatatatatacctgaatatatagggttattttgtggaagcttggcctaagcgaaaacgacaatgttaggggttgagcttggctcgaacggagaagagagcgggagcgggaggagagctaggatcgaggtggagtgttgcgtcgatgaccagaacttagagaagagggatcggggtaagcatcggggttcgaggcgagctttgatcgccattcatggggtttggggcaagctttgatcgccattcatggggtgtggggttagggcagagagagagagagagagagcagcgaaatgtgtttttgcaaaatgaaactttgaatataattagggattttgtaaatatttaataagtttgcatcaattaataaaatatgctcacttttattgcgtcggttagtaatagttgaataaaataaacatgtttttttaaaaaaaattacatttgtcgtcagtttacattttagcgtcgaatatacaatcgacgcaaactactaattgtttgcgtctgttaaaaactgacgcaataactcagcatctatattttgcgtcggtcctcgatgttgaccgtcatgttgaccgacgcaaattatgatttttgtagtagtgaatagcaatcctatcactagagc

SEQ ID NO: 399180 - DNA, 628 bp, Cannabis indica
gtaatttgaagcatcaaatgagattaagctcaatggaagatacaatttagttagttgttacaatgtctaattggacctaaaattggtaaccatccaattggctgtagaaattgtcaatgccatctatttttctttcttatgtatttttgtattgttaatttgttattaaggctttaaacaaaattttattgtacatcaatgccagtggttaataacaactacattacattaaatttttttaaaataaatagtctcactaaaatctcgagtaaattcaaaaaaaaaaaaaaaactcaacaaggaaaaagaatattaggagaatttcgttaatcaataatagtgtgactgagatataatctgagtagcgagaccgctaaacataatgatcagacatagacaaagttaattttgccattaattaataactacatttaattaattaattgtaaaaacaacttgtgagtactatataaggattatgaaagacttgttgtgacaacaaaaataaaatgaactcatttcttcttaaaacgatgatcaatataaaacataacaaattaatggataatttggtatcaaaacaaagaaaaagattgaaacaatgtatagtaataataataatgaaaaa

SEQ ID NO: 399181 - DNA, 966 bp, Cannabis indica
attaataaaacaatcaacttagttatctaataagataactaatattcacttgtcacttgataaagtaaccaaatatcctttgttgtctgctgagacaatcgcattaatcctacaatgagttcagagagtaatagctctatcattctcaatgttacttaataaagtaacccaacatttttggtcgtctaataagaaaacccatacatatattttactctctatattcactagagaaattgacctcacttacaggagataatcaattctttaacaggtaataatgtacctcattctcttaacaatacattacatggtccaatatcctaccatgaaataaatttaaactcaatccccctctataggaaatcatctttcatttttaaacattcaggtaagcttataaaccttacttctgctggaaatattttaccaggatctagatttactaacaactgtgttgattaacatcctaaatatgaatatttctaaaacaatgaaattaaacatataagggtttaagaaaaccttacatcggttgtagcagaatataatgattcctttcgctcagatctctaactgttgttcttttttgtcgcagagtattattaagatctgagcctggatctctttctctccttcgggtttggttgccactgtcttactcactatgattgagtacttcacttgctatgtgtgggcatggcaccctttcactcaaggtttcgaatatgatgaagaacaatgaaggaggtgaaatcactatagaaggaactctctcatctactagttgtctgatagagaaatctaggtttgatttagttgaaggtatcaagtggatgagtgagagcatcatgttccttttagagtgtttcaactagggcttagggctaaattatatggattaaaaaaaataaaatattgggcaaaaataacacactaaggaccggccataaaggaccaatctct

SEQ ID NO: 399182 - DNA, 968 bp, Cannabis indica
ccaatttttatttttacatttttgagatatttaatgtataatttatggaggattgaacgagttttaaatttttttacgactacacaaaaatattagaattataattttgataataattaattattgtgagagtagtcctttattattttttttgagtaaaacaagtgtttgtgcatgcatgatatttgatcttaatttaagtatggaaatgaaataatcacaaaacattttggatctaattgagcacttaactattttaattaatatagagtttatacaattttaggtccttagagaataattaaaaaataacaatgagaaagactctaatctattaatattgggttggagtacttactatttttttccctattcttttctaatttacgaaacaaattaattaagagtacttttctcttgtttgtaattactctacgattaaaattgtattattattagggtaaatactatatatattatttttattattttattctaaggaaattttatataatttttatttaattttttgtcataaaatttaaaatataatttatttttaattgtttcaataggtatattttttaagaatatgaattggaagaaaaaaattaaaaaaattagtacaattaaagatatacattttatataaaataaaaattattaaaatggggtatctttagacatttttggggtataaataaaatttctcttattattattattgttgttgttattattattattggtgattattatagttcttaatttgttaattaattcaattaattaataaataatttagaagtatttattggaccacattcaatatttttaagctaattatttatgttcgattaaattatgtattagatgttaaatttagttaaacattatgatttaattagtttcattcaacatttgaaccgatgttggatttgatcaattttggatgtattttatgtata

SEQ ID NO: 399183 - DNA, 768 bp, Cannabis indica
ttattttgtatttgttaaagggcaggcttggagattaacgagttggacatgtaattgcgagcctttatttccttaaactcgtaacccacctataaagtagacgggtcagacccgacctgtgagtatcttcacaagtttacgggtacatgaggatagtacaagttcgggtatcccgatttaaagatatggaaagaaggggaatccttgtcgtagaccacactataaaaaattattacttttagtgtacaattttttagtcacaacataaattttttgtgactaaatatgactttagtcccaataaaaattatttgtgactaaaacatagtatttagatacaaattgtcattaatttagttttaatcacaataagtattgtgactaaaaatacatttagtcacaataaattgtaattttgtgattaatacttttagccacacagatcttttagtcacaacacaataataatttataattaactacaacttttttttttatctttagtcacaaattttattgtgactaaaagtaaaaaaaatttacattgccacgcgtggtgttgaattgcttaagggtgtcaataaaaattttcttaccacgaaaattcatcttagtagggaaacaatgtaaatcgttcgccaaataaaatctcaattttggggaacttttagttgtcataatttcttccaaaaatcccatatatatctaccgaaactaatacatatgaaactagatatttaataaaaactttaatttttttttaaaaaa

SEQ ID NO: 399184 - DNA, 577 bp, Cannabis indica
cttctacccccctcgttgattttcaagcgttggaccaatgatgtgaagcttacaacgctaaccacaagcaatgaagttggttccactgaacaagacgagctcatacaaatggtaaggtatggctcccttaattcggacactaacttgttgaacttttatgcttcgaaactagacaactcttttgcatatgtaaaaaatgagatagcacgcctcactgcatactgtaagaatgctttcgatcaaacctcatcaaaccaagatggacaagcgtcagaatcatctcgtggacatcaagacaatccaaacattgtgagggatccgataaatgtgaaaaccaaaggcatgggaaattaacaatgtaatatatattcctgacatatgaacacaaccatttaacaatttgttttgaattttggttttgcttaataaaactttataataaaaaaaggatgaaaacaatagaaaattatgagtgacaattcttgttattgtgtcatttataggttaactgtttaattagtcaaccttaatccgatctactatactaaaaaaaaatcttatgttagtcacaaatcac

SEQ ID NO: 399185 - DNA, 895 bp, Cannabis indica
aaaaaaaaaaaaaaagagattttgacacacgaaaaataaataaatgagggggttaaatatattaaaattaaaatataaggaagtttcgtcacttttacaaattaaatgttgattgacttgtaaaaataactgattaaacatatttatatatattttaaaatatatatacacaattattattttaatatataaaaaaacataatttaaaaatttaatacctatatgatagaaatatatgttaaaacatagatgaattatgcataaaatataatttttaaaaaaataaacattttttccacgtacaatttttaatttctttgattttgttatttgtcattttatttatttttatttattattaaagatataaaataataataattttttttagttgtgtaaacaatatattttcttagtaaacattaaataattaaatattaaaaaataactaatttaaaataattaattgaattggactaaatttatattatacagattaaattagatctaatatataaaattctcattcagtacaaattaaatattctgtgagtaaaataaaatagataaaattagatgaacacgattaatctaatcctccatagataaattatattatatggtacgttaagagactcaatctattacattttcctttatttggatataaaaaagtcagattttgttgtggtgggagtttaattaaagcagacagaataaggagcaagtaaattatatttaggctaattagtaatttttccctgccgaactttgacatatactaaatcatgtcccctgaatttttttggccgttaaaaattcccccctgaactattaagattgttaaattttaaggacttttatctaattttagtaaaaaaattctaacatggat

SEQ ID NO: 399186 - DNA, 544 bp, Cannabis indica
caagattggtatgcgagtttcttaacgtctttcccaaagatctaccgagattgccacctatccaggagattgaatttgtaattgagtttgttccaggagcgcaatcagtatcaaaggcaccgtatcaaattgctccagcaaaattaaaagaattggagatacaactgcaagaattactgaatttgggattcattagaccgagttactctccttgggttgctccggtattatttgtgaagaagaaagatgggtctctgtgaatgtgtatagattatcgagagttgaacaagcttaccatcaagaacaagtatcctttacctcgaattgatgatcttttcgatcaactgagcactcggggtaccctttacctcgttccaagcttacaatcaagaacaagtatcctttacctcgttccaagctctatgtgaatttctgtagcttaaatgacaattttataatttgtggaaatggatttagggattaaccatatacttgtgtatctcagaattgtgactaggactaccgacacttggtcaagagcacc

SEQ ID NO: 399187 - DNA, 564 bp, Cannabis indica
atttaaaatttctttttctagattatggtaactattacaaatttttcatttgtttaatttttataaacaatttgctaatagcagtgtaacactagtattatcataatttaacatcaataatagctcaaacaatatctattctatataaaatgtgactatataacagaatttttagtttatgaaaaattattaggtgactttttttttttaaaaaaaaaaaataacaaatttctccccaatgatctgatatccttaaatgccatatgagaaatatgccacctaccaatccaatggtcaaatttctccccaatgattatacatccaaagcagcacatgcaaataagttggcctataaatacccagaaaagcacagaggggagattttttttttttttttttttttcttacatttttgggattgaagacttattcttcctcatcttaagaaaacacattttttgtaaccctactatcaactccagaatattcctattaagcttcctcttcttcaagaggtacacggtggaaggaagttttagtccattgtatctctacttgtataaa

SEQ ID NO: 399188 - DNA, 786 bp, Cannabis indica
ttcatagccagttcggacaaccacactgcagttcaccagattattattaaaagagctcccagagccgattggggtcatcctatttaggaaattttgtcatctaatcttctcaatgggtgtatgggaatttggtttgtcaatagggactgtaataaggtagctcactctttagctaagtgggctttaaagcaaagatgtaattctttttggtaagaggttttaccctcttgcgctgctgctattttaaatgcagaaaagcctgaccttttgtagttcttttgttggttgaataaaatgttttgaccttacaaaaaaaaaaaaaaaaaaagtaaggccaaacaaaccaaattgtttttaaaaataattttttgttttttaaaaacaaaaaaaagtttttagttatgatgccaaacatgcacttaacattgcctcctctgttcaaataaaacaaaaaaaaaaaggcattgcctcctctgtaagtagtttcaaaggcaaaaagattttgaaatttatatggttaaataaaactaattagctaacaaattaagtctttttatttaaaacttatcattacacactaaatgctgcctcttaatttaaatttctacctattatgttaaaaactaaaattattacacacaaacatgaatttaaaatcaaaataataagaaaaagtgagatcaaacaaaaccttgatgatcactgttaagcaaaaatttcacatttagaatattaaaaataaatgcaaaacacaatttcacctaaacacaatttcacctatgccaa

SEQ ID NO: 399189 - DNA, 968 bp, Cannabis indica
cacctgatatcgatcttatttcacacatgggctcccttacgcgaatggcatgttcaacaggcctaggcggggccgaaagtttcttcttcctctttagtggagtcacctactcttcctcagcttcatcttcaggattcaaaggctcctgagcatactgcttggcccttgcaccttccttcaacttagcttcgtgcttaagttgaatgagatcattctactatgagctcgttcggcccgtccagcaccagatttcctcttcttccccgtcacggacttaggaataaagtccttgggatagagcctgtacttcacaaaattatcctcggaggtcaagtggataatattccagtcttcccccgatagtcaagcaagcttttaagctctatccctgagaccaagagtgaggggagggcggtgatatgtcaaaatctactagaacagagtgcgagtgatgcccgtgccatcctccatgaagtactcatcaacaaagcgcccaatcttgttgatggccaaatcgcccatgcccgccaaccacttaaagcctggttgagagaaatagaagtacctcgaccttccttgcttggggtggacttcaaatcaaagaaccaggcaacttcgtaaggagaaggcatacccaatttctgggaagcgtagaggacgaagagggcagacagatatttgatgccctgaggagtaaactggcaagttgatgctttaatctgataatcaggcaagtcgatgcttaatcaggcaagtcgatgctttaatctgataatcttgtattgcatcgcttaatcaggcaagcccgtgtcatagcctggcacccaaatatcacataactgcttcaccaaatcaagtgagtctgtgccaaaaccctgcacccatgtatcatataattgcatcacctaatcaggtgagcccatgccacaatctggcaccaatatatcgcatcatctaattagacgagc

SEQ ID NO: 399190 - DNA, 716 bp, Cannabis indica
ctagacccgttgccacatcactcctcacatcggcccatcaatatcttcaaagtcgttctttttaattcgaattaatattaattagatatgattaagaattatttggaaataccaaaatattataaaaaaaaactctattttacgaatttatattttttaatggattttttttacaagaaaatagacttgttgttttttggttgttctaaaaaatgttgtttacacattgttgtaatgttgccataatattatactatatttgttgtattgtcaatattgtacttcatctagaatctaactatatttgttatcttattcttgtttagatctgtttcatcatcaactatttgtgcttgaaaagtatgttttttttatcgatccagcttgggtcaagtttatgattgcaagataatgtgccataggaatgagaatcaattttaaatgttattgctactgctagcactttctttctagaactagtttccattgatgagtgcctttcaatgtaattttgattaaagattcgggctcaaggctgaatggtatttcattatgtacaggggaaaaatgttaaagttccaatattccttgtcccagctacccaaaaggtttgtctcctaaatgcaatgctaaaataattagttgctaaagttgtccataagaggagaaaaatttgtctaacacatcctaatctacaggtgtgggtggacttatat

SEQ ID NO: 399191 - DNA, 680 bp, Cannabis indica
cgtagtggcagatgcacttagcctgaaaggtccagggcaagtctacaagttgaaggaaatctctccaagattggtcgaggatatggccaaggtcgagattgagttcgtagtcaggaagttggcaaacattacgttgcattctaatttactggaaaggataaagattggccaacagaattgtaacaccctaacaaataggcacgctacgacaaccagtattataacttaatctcgctaatccgagattactagaaaataaaagcgggaaattttaaactttaattataatggaataaagtttaaaatattacaagaaatccaaaaagacaacatgtttcgggatcccacaaaatttttcgaaaaatattacaagttaatttacatgctgacttatgcggcaaaaaccgagatttcaaatacattttttggtagacccaactaactcgcttggtctagtatggctcgaacatgtacagtccatcgccaagctctcgaactaatggctgattacagacagatttaccctttcctgcacagtacagcacctgtgagccaagcccagtaaaaaagtataaatatcaatatacataataagacatatcacatatatattaatgtcattacacttattgtctatttgacatagacttgcgtgttacgctcacacgcctatttatgtc

SEQ ID NO: 399192 - DNA, 664 bp, Cannabis indica
acattatgatagtgtagtatgcccattcttccatgtcttcaagatctaccttcttcaacttgtcagtcagttcttccttaggtttcaaagctttggcaactttttgatgaacaagtattccctttaagctttctctccatatgccaaaatcccttgtcccattgaacttctcaagtttgaatcttgttgctcctatcatgattggttgcagatgagtctatagatcgaatcttgattctttacttcctttgttggatcttgaacccgagctctgattttgttctaaattcagcaacaacaataacaagattctacactaacatctgcactaaaacaattaacaagaacaaaaataacaagtaaacacaatgaacaacacaaagcaatatgacaaaaataaacaaggaaggagacaacaagattaatcctagttccggtcctagagatcaatttgacccctgaccatactccagctgagaaacaccatcaaagctttcattaatatggagaataagacagtttgtacaatcaccaatactagagcaaacaatgctcttccgcactcgaaaaacacacaagagaaacagtctcagtttctccattccttcccgagtacacccttggttcttgacctctccaagaacatgattttacagcttagaaa

SEQ ID NO: 399193 - DNA, 562 bp, Cannabis indica
agagagagagaactttactttttctcgtaatttcccttatctattttcttaatgaactaaatcatacaatcaacataaatcaaaacttaggagtttctactaatttcaccacaagacaaaatttcaataaatggcaaattctaattttgccccttgcttcacacttaagtaacctatacgtctaggggtaaattggtccaaaactataaccttgcctaaccctaatactctaaatatcaatatgtgaataccttactaaataaaaggttctaaactcacccatgtgactctattgatcatccgtcgcatttttcatcgtaaccgagcaaaaatcataaaaattataaattttgcatataacataaataatacccttagggcccgtttggtacgcatggctggattggattagatagactaatttgtccaatccagtgtttgaacatgttagaagtctggataactaatccaactaatctcatttgtctggaattatttatcccatttagtaaggtgggataaataatcccatgtaggtgagattttttttatcgttttttaa

SEQ ID NO: 399194 - DNA, 567 bp, Cannabis indica
gttcttttgttgagatatgagttttcttgatcaatcattggtgcacattctctcttatcaaataataatctatttcatttacttttttatctcttgggaaataggttttgcagcaatatgttgtatttccttgttgtcatagttcattataattggttccttatgttcgatccttaattctttgagcatggacagaagccaaataatttctaatgtgatgttggccatatctctatactcagcttcagctgaggatttggaaattgtatgtttctttttggcttttccttgaaattagagaactttcaaggaatatacaaaagcatgtagtggatcttcttgtgtctcgacaagcagcccaattcgagtcagtataggcctctagtttcactttagattatattagacagaagagttctttaatatgaagtaatcaagtgctaggaatgtaattgagcattgttttggattattgaaaatgtgatgggatattctcagaagtccatccttttatgacatgaaaacacaacgacttataatcatcgtttgttgtatgctgcataattt

SEQ ID NO: 399195 - DNA, 626 bp, Cannabis indica
acaagttgtcaattacgtataatatgtttacaatttctatcttaaaattaaaataataataagaaaaataaataattaaagaaagacttgttgaattaattttattaaaattaatcaatcggttgttttgtattcaccaacctcttttatattctctctttgtgtttgttataacttatatgtcaataaattttaaacaataggattgataatacaaatggaaatgtgaaagcacatatttatatctttatctatttataaacataagtaagaatatttgtgaaagtgtattgcatgtatactaaaaacaatcaataaccaacaaaattatataaaaatatatataacaaaaatcagcatcatttttgcttctaccgtataccataagtagacgcgttttccattttcagtatacatggaaaaattatataactcaattaatttaaaatgataatatatacatcagttgtagtaagcatctttctgtttttttggatgtattagcataattttatattgccaaaattagaattcgaaaaatcagttgcaggtaatttatatttttataatttgcatacaaatgactaatattatgaacttggttttttttttttagggaaataaaa

SEQ ID NO: 399196 - DNA, 1144 bp, Cannabis indica
tctcatcccttttttgtgttttttcttaaattcctgggtttgatcattatttttataatctacttttttgccattccatttggttttagtgattttggtttaaaattgtctgggtaattttttaagatttaggcaaagtgcagatttttaggtttctcatattcgtaagtttttggtttgataaactttcatccaggaattgggattgcccttttttgtttttgtaaaaatgtcccaatttgattcaaaagtttatcccccagaattcttagaaatcgagtgtcctagtgaacttgccatcccatacaaaccaagaacttcaaaatccaagtccaaattagaaataaatgatgcaaaaattagagaccatttaataaaaatgcaccatgatgatattgctagtcgtcatagacgcttcttgcatgaaataacagagggtaaacatcatttcttgcgagatgctacttggtctgaacctccaaatttatcatctattcctttagctaagcccttatttcagagtcacaattgctttttcaccaggtgacatggacttcgaaattatgacttccaagcctcgtaaatcaaagactccctaagaccccaatgttacctttgaggctaaacttatcgagtcgagagtacgagccatcggagactatgtaggtagcatcctaagtacttgtggcattgaccaaaaacaaaaatgtcaggtaagatttgtatcccctggtgagtttagctgttacccaccaaaacgacttactcgcgaggcacccgaggggaccaatggcaaggcgagtactagtggctcgtcgaggataggcgcttggagcctcgagcatatcagggctagagaaatccttcctctgtgagattattttaaggacttactcaactatctcggaattgtcccattccagttggttcctatttcctacagaatccttctaagcttaagggttctatacaaaattttaggatgggagtgccccactccactggagatagtctatttttactcagttaaggtagtccctgcaaggaagaatgttgcagggggcttttattatcttaggactcacataggcgtgttaggttttatgccctaaataaaactccatttcaatgtaatctattttat

SEQ ID NO: 399197 - DNA, 976 bp, Cannabis indica
tttaggttccgtctgatgtcacattccaaactccaatctctagtaccagtaggcaacatctgaattctataaagtttcacctccaaatctttgataacctcatcaattttcccaaattgcgttctcttccactgaaagagcgccactcttgtagctcctatctttttaaaaactcgggcgggagcccaaagatggcgcacagaatcccaagcgttggccacaacaagattacttctaacatccctcgtccaactttcctcaaacttgaagtacttcttaaacttgggcacagtcccaaccgtatcaagacacaacggtctatgatcagaagtactcgtctggatcgagcagaaaatagctttggggaaaagatgaatccaagcttcattcataatgcctttatccaaggccgacttcacatggccctctcccgaccggtggttgtcccaagtcatcatgtcccctttgatgtgcatattgattaggccacgagactctaccaggtttgatatgaaagggataaaggggtctctacccgacgaccccctccctctcagaaggattaaggacaaaattggtatcaccaaatatcaaccaaggacccccaaatctatcccctaacgccatgatctcactccataaatgcttctttgcatggttgtagggcggaccatacacacacgagagaagccaagggttggttggggggtccgaatagactatgcccgaaatatgattacgagagcaagcgatacattcaaagcaaaatccaaccttccaggctaaaattattcccccggtattaccaatgagcggcacagagatatgaaaataaaagtgaaaagctttcagaatacgtaccaggggattgacatccaccttgagcttagtcaaaaacacaaaatctggagagcgcgatctgagcagggacttcagctcctgaactgtagaggtctaccccaaccctctacagttc

SEQ ID NO: 399198 - DNA, 838 bp, Cannabis indica
attaattcaaaaatatatttctataagagaaaagtataaattttttattggggcatgtgagaatgaaaacaattttttttatataaaattaatataaaaatatgtaaaataaaggtaaaatttatatatttacaaaaataaaaatgaaattttttattttgtagaagcaaatatgaaaacatataaaaaaaatgaaaagttctgttctatgaaatcaaatataaaaatataggaaaattctacaatgcacccccttaaaacggatatattaatgcactcctatctgttttagcatccgaaataattttttagtcaaattttttctatggtcatgtacgttatagttatttaagacattctgcaaaattttaagaaattcggaaaagtttaatacgccaaaaactacgttcaaacagtgtgttgcacgagtgactattttattttatacgcgtgtaaaatagactgtttgaacattattttctatattgtaaattattctgaattttttaaaattttgtaagatatcttaaatagatatagcgtacatgaatatgaaaaaaaaattagactaaaaaattcttctggatgccgaaacaagttaagggtgcatcaatacatcctttttaaggggtacattgtagaatcacccaaaaatatatataacaaaaagaaaaaacaaaagttaatttaattaaaaattgaagtgagataattcgccatacatgaccccactttcctctagcccctagatatacaggtttgaactgctgttgtttgatgctactgttattggtagcagtgttgttgggtaaagccgcctgctgggaagtctgaagat

SEQ ID NO: 399199 - DNA, 938 bp, Cannabis indica
ttacttttaactttattcatgttatttattcaaaatttatctaagttaactttggctaaattttatattaggatactatatcaatggctcgtacaacataatcgccaacaattgtttcaatttgttaatccgaatgaagtagccactcgttttacatcgcttgatgcacgtgtctcttctttgtatagacgtatcaaaaaaatgtcaaataatcagcagtacatggtcactccttggattgatgggtaaatttaaatttagttttatgtatgataaataaaattgtgatctaatactcaatctaattaactttgttttgtttttttttttggattatatagtgagcattggatgttgatattattagtgcccgactcttattggttatgtttcatggatcctaaaaactcacacttgagtaatcgacctgatattagagagacggtcacattggcatttcaaacttactacagggcgataaggaaagaaattccaccgaagctaaaagttcgacgcccaactgtacgtattcttttttttaaatttcaattatattttattaagatttttattaatttaaagaaaaatctttagtgtccacatcaaccggaagacaccgaatgtggatattatgtaatgaagatgatgaaagatttaattcaagcttcgaaccggaaacactttttggccgaggtacataacatacaaactatataaatatgtcatacattattattattattattattattattattattattattattattattattattattattattaagaatgcatatgatgataactttaattaaaatattatttatctttaaattttgtagttaagtgatgcaaattatacagaagaagaaattgatgaagtgaaagagcattgggcaagtgagatgttatcgattattcaaacttaccga

SEQ ID NO: 399200 - DNA, 788 bp, Cannabis indica
aacttcttgtttccttttaaaatttgaaaaactctttgaacgtatcagaggatcgcgatataaagcgattcaaagcaatgactttacctataaggctttggacttcttttggtttggtctgagatcgcatttccaccaaagctttaattttcgctgggttagcctcgattcctccctggttcaccataaagccaaggaactttcctgatccgactctaaagacacatttaagagggttgagtcgcaatttaaaccgtcgcagtatcttgaacactgcttgcaggtgggtgacatggtccctcgcatgttgagattttacgagcatatcgtcaacatatacttccatagtctccccaatcagatttgcgaacatcaggtttactaacctctgatacgttgctcctgcatttatcaaaccaaaaggcattaccttgtacaatacaaacctcgatctgtgatgaaagaggtatgttcttggtccagttcatacattggaatttggttatatcctgagtatgcgtccatgaaactgagaagttcatgacctacagtggcatcgacaagttggttaatgctaggtagtggaaaactgtcctttggacatgatttatttaaatcagtgaaatcaacgcatgtccgccatgagccgttaggcttgggcactagtacgggatttgctaaccagtttgggtagaatgactcccttatgaagccacatgccaaaatgcgatctacttcctcttttagagcttggtacctcacggggtccattttccgacccttttgcc

SEQ ID NO: 399201 - DNA, 775 bp, Cannabis indica
aaattgcttttcttgtagtgaataagcaacttactcacacatgatggttctagttgggatgtggaggtaattgacgacctctttgttgacagagacaagcatttgatcatgttcattccgttgcaagtgaataatatggacgatcattatgtttggtctaaggagacttcgagtctttacagtgtgaagagtgcatataatttactccaaaagcttaaagggggatggtatgatattaatgactcaagtttctggggtaaactttggaatttaaagttgcctcccaagattaaaatctgatgtggcgcgctgcattaggttgtctaacaattatgattcaacttcgaagcaaggatgtggaggtaagccccatctgtcctctctgtcgtgctgaagatgagactataacacattgtttattagtcactttccatgtgattaaaacatgctggaatagggtggggattggtactataaatgcacaaggttcctctttctttgactggtgtaattcggttttcagcaagataaaaacagaaaataaatctcttgtggctgttgtgtgttgggccatttggagtgcacacaatgaagttgtttggaaaggaaagacaactcgtgttgatgacattgttgggttgttaaaaactaccttaaatcaatggaataatgctcaaaaattctgtccttggctcatcatgttttgactatcaggtgcatgatgttgcagagcattggtcccctccacttgttaatagaattaaggttaatgtag

SEQ ID NO: 399202 - DNA, 944 bp, Cannabis indica
aaggtttgccttcctaaaaacctaggaggggttggctttcgggaaggtaagaaatggaacaaagctcttttggctaaacatctttgggctcttgctcaaaagaggattgcttatgggtgaaatggatcaattcaatctacttgaaagaccaaaaaatatgggattggccaaagaaggaagatctaagttggtatttcaagaaaatcctgagcctaagagattctttggatgaaacaacgctaagacaagcaactagaggcaataaatttagtgctaagaggtgttataacttgtttgtggaagaaaaccaagctgtcaatgcaggtgccatatgggataagcttgttgttcctaaacataggttcatatattggcagattttcaacaaacaattgcttacaagggattacttacagcagattttagtcattccgagcaatctctgcccagtttgtgactcggctttggaaactcatgatcatttgttttttacttgctcctatgcaattcaggtgtttacagcagtcaataaatggatgggaaatttccaatggcctcggtcgattgaagaaatgaatcgtggctgctgcaacttaaagaagaacttgactgtccgaattatcaacacagttttggctgcgactctgtactttctctggaagaacaggaacaaatgcatatttgatcttagttgtttgactcctagttgcttgagtttgggaattaaagacactgttaggtggaggcttattagcaagggtccttttaaggattgtaaaagaaacaagtatttacttaatgtaataagtaagtggtagttgtctttttttgggctgtagctgctggtttctgcagcagcagccgctggtcttgttggctcttgccttgtatttgttttgtttgtcttttgaataaagctttccctttttccaaaaaaaaaaaaa

SEQ ID NO: 399203 - DNA, 1025 bp, Cannabis indica
cattgaatctttcatgtaactcaaaccaaatctctgctgcgttatcaagatacatgatactgtcagcaatctctccagaaattgcatgaagtatccaagaaattacagtattgttacatctacaccaagcaacgtaatcttcatgttcctcatctggctgtggaagcttgccattgacgaactttattttatttctagcaacaagagcaatcatcatggatcttctacaggtactgtaattttcgctccctgtcaaaatctttggcacaagaatcgcagctggattatcaccattcgagagaaagaaaggattcgataaatcgtttgcagtgctggatcttgaattttcaccaagaacagagtacctgttcgaatcatttgatgcattagcagtatctcgattatttcgagtttgagctccaccaccacgtgccattgaagaagaaacaaggaatcaatgagacagaaacaagaaagaagatgaagacaaaggccaaccaacaatggtggctctgataccatatcacaaatccataactgagaaagaataagaaacagaggagaaaactgaatttgttattcaatgctcaagaaatgaatacagatacaatcttgctacttatagtagcacatgttagttacatctgttataactaactctcaattcctataactaactgataactaaccaaactgaatctaacaacttaacaattattgttgatttctcttcaagagtagaattgatatcaattagattatttgtgatctttattcttttgaatataaattatttttaagatttgtatattatttgtggctttgatattacaagtacattgatatatatatatatgtatatttttgatataatgcaaataaaatatgattcatgataaagattattattactattatgtatggatatttatatgcatacaaataggatgtcatgatctgtaacaccctaattagcataggcgtattacgtgattttaaacatactgtgcaactcgttgctaatc

SEQ ID NO: 399204 - DNA, 1507 bp, Cannabis indica
cttagaattttcttgagagcataacttttgaaatgtgcaatctattcatgtattttgcttaggcatgctatcatcttctccccccgagcctcgtactccccagatacatgatttaccactgactgtgagtcactacagatcttaatatgtttgacttgtaattctcgagcaagttttaggccggtgataagggcttcatattcagcttcattattggatgccttaaacccgaatttgactacgccgtgctggtgctgccccctcggtgtgacaagggcgattcctgcgtcggatagttgatccgtagccgacccatctacatgtagcttccaggttggttatctttactattgctcgactgaggtacttgtactggctctgggttactttctgaaatgctctattctttacctgtacattcaaccataaaatttgctaaggcctgacctttaatcgtcgatcggggttgaaagataatttcatactggcccaactccactgcccatttgagcaaccatctagaggcgtctggtttttgcaatacttgacgtaatggttggtcagtgtatacccgaacaggatgagcctaaaatagggccttagctttcttgttgctaggattaggcaataggtgagcttttctatcaatgggtaccgaccttcagcttcaatgagtcttttcctgatatagtagaccggatgttggacattgttctcttccctgatcagtatagcacttacagcatgttccgtgacaaccaagtatattcctaactcttttccgttcagaggttttgagagtacgggaggtttcacgagttgcatttttagctcttgaaaggcttttttgcattcctccgaccactcaaattgcttatttcctcgcaggatgttgaagaacggaacacacatgtctattcactttgaaacaaatctattgagtgcggtaatccaaccagccaaactttaaactttcttggtttttgttggcgacttcatatccaggagggcttgaattttctctggattggcttcgattcctcgggcattgacgataaagcttagaaacttacccgagctgactctgaaggagcactttaggggattgagtttcatgttgtatttcctaaggactttgaagtatttgtccaggtcatctatatgccccccaaccttcctggatttgacgagcatgtcatccacatacacttccatgtttcgtccgatctggtccttgaacattttatttaccaatctttggtatgtagctctggcattcttgagaccaaatggcatgactttataacattatagacccatatctatttggaaacttgtatgttcttggtctggtgcatgcatcttgatttgattgtaccccgaataggcgtccatgaagcttaaaatctcgtgccctgctgttgcatccacaagttgatctatcctcggaagtggagagcagtctttggggcacgccttattgaggtcagtgaagtcaatacatact

SEQ ID NO: 399205 - DNA, 730 bp, Cannabis indica
agtggttcaagaggttggcgcctgggtccatcacatcttgaaaatagttcactgatgaattccttgcccaacaccatgcgtccaaggactatactatcccaagaaccagcttggcaaatattaaacaattaaggagtggccaaaagcctcaggagctacatctagtgtttcgatgctaaagcagctagagtggggaggctgacgaaggatgaacacaaaatggccatcgtggcaggcgtctgtccaaagagtaagttgtggaacaacatgctgaagagagaactagaggacctggaggactatttggaactttattttaccaagatctagatttactaatatgtatttttgattaacaccctaaatacgaattttctaaaacaataaaattaacacaggagagtttagaagaccttacattgatggcagcaaaataatatgactccttctactcagatctgtaactcttgtccatttatgtcgtagagtaataacaagatctgagcttggatctccttctctcctttgatttggttaaccaccgtcttctgcactatgattgagtacttgaattgctatgcgtgggcatggtactctatcactaaaggcttgaagatgatgaagaataacaagagggtcaaaatcactatagaaggagtttctcatctactagttgtctgacaaagtttttggttagttgaaagagttgaatgagaatgagagcatcatg

SEQ ID NO: 399206 - DNA, 653 bp, Cannabis indica
aaatataattagtgggaactacagaaagagaataaagtgttgggttgattaaaaatggacaagtataaatgtcttctattaagatatatatatatatatatacatattaatacaaaatagaatatggtggaattttgctatagtgtacctggttactagacctatgttattagacctaaaaagaataatattaattcaaataataatttaaagtcaaattgatcatttgtgattaattttaataacgacgaatatcaaaatattgacaatatagactttaagtattttgaaaatatttacaatcttgagatgtttgatattgttagagaatttttttttacataatcatttgttgcttattttaaaaatgatcgcatataatacaattggatcattatagaactttaaaagttttttttttaaaaaaaaaatgtagtgtttaaattgatttaataaatattatattttattaaattattttaagattttaaattcttactaatagttttgaattgatataattcttattaattatctaataaattaattattttgattattaatgtaaataatataaaatgcgagatctgttgagtaaaatatatttacttggtaaaatatttgatgtgatatttaggtggcatttagtaaca

SEQ ID NO: 399207 - DNA, 1005 bp, Cannabis indica
aaaggtggtaaaccgaaaggttttggtgaagatgggtagatgtgcgttaaagagcataatagaaagttcacaaccaaattgacctacttacaatggctatgaagagagatctgccatgtgttgctccccgactctctggaataaattttagagtgccacaatacttgaacgacataaattcttatggtgagtataatttcaaatgctttacctaccagagcggttatcgaaacttgttttcatgttgaggacacttcttgtccattgtgtggttgtgaagagaagactatggaccacatgtttctctattgtaattttgcttatcattttggagatcctctccttggggtctcattcctatcagagaaaatggtgcccaggtgtgggatttgataaagttcatttggggccttgaccgtcatggtgtgaacacaagtgaagtgttccttttgcttctattattgtggacaccatttggcatgctagaaatgatcaagttcacaataataatgtgcagagaatcccacactacattggctcaatcttaaactttttttttttttttttattatgtccaatcttttttgtgtcaggtacctagtaatcctactcaaatcaactggtgccctctcatggatgactggatcaagatcaattgtgaagtagcagttgagtgggattctatggtaatagggaaaaaatgatttgggtcaagactagaaggcttttctttttagatcctatcgtaggagaggtagttgcttgccttttggaattagaaactattattgctaatactaggggtgtgcagaaagtcatccaatccaatcccaaccgaccgatccaatcccaaccgatccaatagaatcggatatccaatcataattggatcggatcggatgcaaattttaaaaatccaattagatcggatcggatgttggatgagacatccgatccaatggataaccgaaccgatccaatccaatatcatccaatgtccatcca

SEQ ID NO: 399208 - DNA, 796 bp, Cannabis indica
acatgtctttacatgtttcctaaaccttataataatcccaagaagatcagcctaaaaggataagaaagcttgagtcatatcttgaggattgtcaattgttccatgttgtttatgtctagcattgaattcgttgttagaaataatagagagattacaatggaagaataaaataagatgaataaaagattaagacaattacaactctaaacaaaatattacaaggacaatatattaaataaagagttacaatcccaaagcacaaaatacaaataaaagaaaagagttacaactcaaaactcaaagatacaagtaaatgtaaactatataaaagcatatatataatagtgtatatatatatgatatagaatatatatatatataatagagtatatatatatgatatagaatatatatataatagatgatatatagtagagaaataaagagtgtatatatagtatgtatatataatatatatagtactatatagtcaatatataaatatatgatagtatatatataggagtgtttagaggagaacaagaaaacaatataaaacttgagaatagaacaaaaaaaaagaaagaagaacaaacacccaaagtggagatggggatcaccaaaagcttgaacaaagtttctacacctttgtccaagaagattatttccccctctatgaaacacttagggctttgtggaaatacttctaggaattatcaagccttagaactctctagctttgtgtttgaaagatagaagagaagagtgtgtctcaaagggtgaaccaagacctcta

SEQ ID NO: 399209 - DNA, 687 bp, Cannabis indica
tcacatgcaaatgcctccaagtatgatcatcatctaacgattgcagaatctgccccccccccccccccccccccttggtctccacatgcatgcctcatgacacgcgtgtagcaactgaagcattccatgtctatcccaatttgaacaacctcagtcatcaactctcaaccactatcgtgactaacaagaatttgatggcccctgcaatacttccacacccctgccaacaagcttccttttcaacaaaagaccctctttcagcttctgatgtcactcaggcaaacttggcttagtgtaccaagcataaagtatggaatacccaatcaaccttgtactatgctaatgagttttaaacattttgttgtgcctctctacaattgcacatggtagttgtctttctagcatccttccacatgcctacatcccctctaggatagaccaaccaggttcccctcccactaagatgaacttggctctgataccaactgtcacgagctcactttttcaggcaacaaaacacccttgcgacaccttgacttctctaagccaaggtcagccttccaaccatccaggtaacaatgggctcatttttcacgcgaccgtgtgcctcgtgcacactctcgtctctcgtataactcctacagagtcatgctcgcaagcatcgatgagtgcatccaggcattgagg

SEQ ID NO: 399210 - DNA, 538 bp, Cannabis indica
gagcaaccaagtcgagaaacaagttgaagtacaaaaaattggtgcttggtgctataacgtagggtgtaggcgctatagcgcaggactaggaaaaaatattgcaaggaaaaaaagataatttcagcacgtgattattttgggatatttctcttaggcgctataacgcagggtgtaggcgttatagcgcaacacttatcttttttaaaaataaatcctaattctaaggggattcatctatcttttgttggcctatataaagaatgatgtaaattggattgagggacgactgaagagatagaaacaagcaactctgagattagaaaacacattgaagaacaagagagaagagattcgaagtgattatcatcaactttcatcattaagagtttttttttcttcttcttcttctttattctgttgtttagttatttaattatgaacatgattatcgtggttattatatttgtgattatgaactaaatattagactttttatttgggcttacattaacttttattggttttattaaaacttggg

SEQ ID NO: 399211 - DNA, 746 bp, Cannabis indica
agctaaccttttttcccaagccggaagggaaatacttcttaaagcaatcatccaagccatgcctacttacgttatgagttgcttccgtcttccgaaggagttaataaaggatatacattcaatgatggcccggttttggtgggggtcttcggattccaaacataaaattcattgggggaaatggaataaattatgcaagccaaaggagaaaggaggcatgggttttaaaaacttggaaaaatttaaccaagctttattggcaaagcaaggttggaaaatcattaataatcctcattccatgatggctcgggttctcaaagcttgttacttcactaataatagctttttagaggctaaaattggaggctatggttcctttgtttggagaagtatattatggggcagggaaataatagaaaaaggaacaagatggagggttctctcaggtaaggacatccgaattaatgaagataaatggcttccccgccccctaactttctcattacggactcaagcaaaggttccaaagggcacaacgatggataaactcaaagatgaaaagggagattggaaacaaaaaatcattgaagattgcttccacaaggatgatattcctcttatactaggcatggccccttgtgctagaaatttacaagacgacatggtgtggcattacaacccggatggtatgtacacagtaaaaagtggttatgatgtagcagaaaaaaacattctaaatgcaggta

SEQ ID NO: 399212 - DNA, 515 bp, Cannabis indica
cttcttcttcttctttgtaataaagaaaattataaatcattattttaattatagagaattatctcatacattattttttaatttttttaaatttataatttaggttgctccagtggtttctacgtgggttgttatgtagattttggttacgatttaagttgctttattagttggtatgtgagttattatgtaaatttctataaaaatatataaaaaaaactgctttaaagtataaaaatgaaaaattcattttattattgtttattaatttttttattattttaaagaattaaatgatttttaaaaaatattttttttttgagaagaaaatgcattttatattaaataaacagtcataatacaaaagcatttaacgggggagcatttcctccaaccaagaacaaatagagtccgccgagagagcatatttggcaagtagatgagccgccgcattggcagatctgtatacatgaccgatttgtactccagggaagaaggacactagatgcataatg

SEQ ID NO: 399213 - DNA, 555 bp, Cannabis indica
ccagccccgacctggcccttgaccccgacccgaatctgaacccggaccctcacccgcccccggaccctaactcggactcgaattcgaaccgtaaactgccttcggaccctagttcagacccaaactccggctcaaacccctgacttggccgggacaaatatgaggagagagaaagtgatgagagagaaaatgaggagagagaaaataatgtgagaaaatgaagagagacaaagtgatgagagagaaagtgtgagaaaataatgtgaaaaaatgatgagagagaaaattatgtgaaaaaatgatgagtgagatagcgatgagagagaaaataatatgaaaaaataatgagtataatgatgtgagataagtaaaaagaatattgaccaaaagtaaattttttagaacaaaaaataacattttgttgttctcaaaattcttgtattttataattttaatatctgaaaactgtttctaaaaaataaagccaaacacgcttaattatttttaagaaaataattttttatttttttttaaaaattaattttttagttatga

SEQ ID NO: 399214 - DNA, 827 bp, Cannabis indica
ctctctctctctctctctaacagatacatatcaaagtgtggggagtatgatttagggcataaacaatcatcgaattggtaaagttgaatgaaattagacaaatatccttaaatctaataatctcaatagttagggagaatttttaacggtcataaatattcagggggcatgatttcgtacatgttaacatttaggggacaaaaattctaataaatcttttattaatatatataaataataatttcatcattaattttattatgtaattatttactgagatttttaaaaaattaaatataataaaataagaatttagaaaataaattaaatagatgaaaaatgagatgaagaattttaagtaattcgaatattaatgatttctaatccacaagttaattattgtattgggttgaatagttccactatagcgcctcccttcttaagacctcttttttataaggaggttttacaccatataatgaaatttttaatttttttacttttctactatagggcataatttttttcaaaaatattgtgtaaattttatactgtgtactgtgttaactttttacggttattttttagttgtttcactgttgttttaattgttctattttgtatttttaattattttataaaaagacagtatttttgtaaaaaattccatgtgacagtaaaataaaacaacttttttatagggataagttgaaaaagacctctttcttgtatctattaatcaaaatacccgcatattattttttattaaaatatactcacttttttaaacttggatttgcctaatatacccgcactctctacttaag

SEQ ID NO: 399215 - DNA, 531 bp, Cannabis indica
gaagaatgaaaacataagaatggcaatgagatcaatggaaatataaataggaataaaatagaataaaatttaaaaaggaaattacccaatatacaagaatttagaaacttttttagttttacgatttatttatctcttttttattttatacattttgttattttaatatttatgtttatgttaaatttttaattctatttttacgactcctcatttatgcatgaattgactattttcttagctcatcactgaaaaaaaaaaattcactcttttacatgcagcttagtatagaacctaattatcccaatgccacgagaattcctaaaccaacatagttaaacattgaagggctcgtttggaatgccgtattaggtcgtattgtattgtattgtattgtattatattgaattgtattttatacaatatttttatgtaaaactatacgtggcattaacttttatggacacctaaatatataatattttagtataaattaaagtttaatatagtattatataaaaatatgatata

SEQ ID NO: 399216 - DNA, 1270 bp, Cannabis indica
catctccttgtaatactcatcaaaactcttataaccttgatgaagaccttgcaacttgaggtgcaagtctcgataatagtgagatggtacaaaacgctgccgcatcaccctcttcatagcctcccaagtgtcaatctcacgttctccattccgcctcctattgatgcacaattgatcccactaaataatagcatagtcagtaaattcaatagcagcaagttttacctttttaatttcaaagtagttgtgacaatcaaactaattctatctttttcttccactcaaggtatgcttcaggatcactctttccttgaaaagcgagaattttcatctttatatttcccaaataattatttacctggttcctagcttctctatcctgaccatacctcctatggttacccgctgacatccaatcaaactcttcatcagaaactaccccttccccatctacttcattatcatccctttggtgaaccctgttcctccttggcctctattgtgttctctcttctacccaatctaaccttgcatatatatgttcacactcctctctcatcatcttcctcatcttccccattaaagctttatttgtagatttagaatcgtaggtggtgtagtttcattgccagtattttgttctagattttgtgtcatgattgaattctgcaaaaataaagttagaatagatatagaaagacctcaccacactccctcacgtgtttcactcaaaaactaatttatcgctctaattcactagtgtttcactcaaatttgatggcttttaccctcaaataagctcacacctctgccttttttctactcgtattcttctttaagttctttaaatactattcaaatggtacaagagaggattcaagtagcaattctaaccaaacaaaccaaacgaacatcgatgaaaactgaaaaaaaaatgatgatttttggaacattgtgtggggttttggaaaacaagcctcatggagactaagaaaataaaaaaatttcaagagaagtttccagactcttttgttttctctcggtttccttttcttttcctttctcttctttttttttttcaagaaaacaaatcaccaagttcgaaaattcttactagctaatgacacaaaagaaaaaaaaaagaaactaattagacaagctttgtgaaacaattatggaaactgtagaaacaagattggtgaaactaaataaggaaactaatttgtgacacaaatagggaaacaaagaattcagcaataacaaattagag

SEQ ID NO: 399217 - DNA, 811 bp, Cannabis indica
ttcatcatttaaaatttctttttttgcaacattagaagcaatacgtttacctctatcaaatgtggactttcgtttgtctttttgcttgatttgttgattcaactcaaaggtatgcaaggaccccatcaactcctctaccttcatctttctaaaatcttttgcttcttccatagccaataacttagcgctgaatttgttaagaaggactctcataatttttctatcactgattcatcaagtttttttcccaaggcaagaaattcattagcaatatcagataatctttcataaaatttagacaaagattcattatcaaacattctatgatcattaaaccttgtttgaagcattataaatttagatcggttaacatcagttgttccttcaaattgggtttgaagaattttcccagcatctttagcaaattcataagaagatataagcttaataaaactttcacctactccattaaatatagcatgtaaagctttactattttaagcagataacttatcatctttagtagaccattcaagttcaagttttaatttagaattacctttagaatctaccattctaaaagagttattctccatactttctcattttgagacttgataaatgcccttattctaaccttctaataaggatagttagaatcattaaggagtagtggacaaaaatgaaacttctttctgcaaagggaaacataatgcaaaaatgcaaggaaatattaaaggatcacactaagagtttagtttcttttgatactaattgaaaaattcagcatttgtaaataccaataatttta

SEQ ID NO: 399218 - DNA, 925 bp, Cannabis indica
gtgccggttgctgttttactctaccaacgtcacattatttcttctcctttatgtcctatgtgtaataattccccagaaactgttatgcatgctttgctagagtgctctagagctcggaaagcttggaaggcttctgattttgctcaattttacttacaaaataaccatttggatattatgcattttttctctaatgtgttctcaagtttagataaaggttctgcagatttattgatgtgttttatgtggaccatttggaatcaaaggaataatgtgttttttaatagatttgctcttcatccaaaggatatgtttgcttggtgtcaaagctttcttttgcagtacttggatgcgaaacagacaagatttattcccacatttcagggtgatcagagtcccttggatttggatcggtgtccaccaggcaggtacaaggttttcacagatgcagctattgatactgggaagcaggtttttagccttagtgtggtggtgaagaatgattcagatcaagtggtggctgggttggtgaaaccagttactgggataattcctccagttatagctgaagctaaagctgtttctcttgcagtagcttggactaaaatgatcaatttacctgttcatgttcttttttcggattgtaagattgtggtggataagattaataaatgtaattggaataatagtgtttgtgatgatgtattaattgatgtttacaactctttgtccttcaatcctagacctaaagttgtgtttattaggagagatgagaatactcatgctcataatttagctaagttaggtttaggattagacagggagttattatggaatggttctttaccttccttgtaaggacttgtttgctttgtacctctttttctatcaatgaagcttcaagttccattcaaaaaaaaaaaaa

SEQ ID NO: 399219 - DNA, 801 bp, Cannabis indica
ttgtgtgtgtttgtgttcttgtgactttcgggtttggtatgattcagccgtgagttagtagtattttttggggttgattatttcgggtagaagaagcttgaaaagattagaaccatagaaaccctaaccctaggtgtgcggctgtagcaagaagaagagaagaatataaccccataaccctagctgccattacagtgagaagaagaagaagagagcttgaagaaacccctaatactaggtgtggctgtaaagaaggaaaagagaagataaatcttagaaacccctaaccctagaatattattttatgttactgccatttttgtgttaaagagagaaaagagtttagtaaagtttttaaatatttaaaccaaaatctgtagtattttgtttttgtccaacattataattaggtaattttttttttactatttaataattagaggatctagtaaaatacttgttaaatatttacgagaactgatcaggatctaaagtaatatttagataaatgacaacccactaattcttattataaaataaaaaaaaaaaaaaacctatatttaattaggagcgatactattcataacttcaaatatgtgcagatatagaaaatgatgatttagtaacacttacatatctcgatgttttatatgagtatagtactaaaatattttctagctttagttcgtaactaatatttgccgtgtaaagaaagtgccaaataacaataaagacaaagtgtattagtattcagtaatgtatttactatttagtttcggaagttatatctatatttttttt

SEQ ID NO: 399220 - DNA, 848 bp, Cannabis indica
gaggtacttcataacacccctattacaatattgtaataaaaatatcatgccatcacaaacttttgaatttgctagcacccaagtattgtacttgaggtgaccttaagcttatccaaacactgagtcggatgaaattattatacatggtttcctagtccacaatagagacaattttcttacatttgttctcatgttgacacttggcaccatctttcaccataaatatactgccatgtgctactttacacgtaagctacaccacttttcagtctgatccacaaccacaacatataagccagggttaaacaagcttgacacgtgtcaggatcaacatgaatacaaaaagggtgtaagaaacggaaattatatagatagaaatcgcttaaacctaaaatttagttgagacaatttgtgttgtcctattatattgtttttattatttaagttgatatgtttaattagtcaattttaattggtatatattttgtgttaaaaaatttctaactctatatatttatgttacaatacattttaatcaacaatttttggtattgtatttttttttttgacaaagtgattagaattattcatgaatttacgatgtagatgtctgccatcggcgctggaaccttttcaaaccaggataactcatcgtctaactgcagagcatgctttgccaaaccatgggtcgctaacttctcaaagcgagccacataggacaaaactgcccccgaaaatttagacaataaaattataacatcttcaaacaacgctcttagctcattgaaatacacctgaaaaaatagcagaaaaccaaaataaaacttttattagaaaattatcaaatt

SEQ ID NO: 399221 - DNA, 995 bp, Cannabis indica
acaagattatagtaaggagattatttttgtttctataagaatattttttttagtatatgtggaaaaaattaatccaaaattttctatataatgacatattataattatagtatccatcccatcagattttaaaaaatgtaaggtattgaaaataaggttcatataagcaattgcaggtgtgctaatttttaatttttttatggtactaaataacattttgaaccttgtgttttgtaaaagctattaattggacgttctgttgtacttaaatgacaaaatggacctgtattttttaaaattgtacatgtaggatagtgaactaattttctgtcaaaataaaatttaataataatccgatttagaaatgttacgacaaaactaattatattttctgtatctgttcgtattagaaattatcttaaagttagttatatttaaaaataaaattgttaaattgagcttaaagtcctatttttaccattttcaaaaatacaagatatatctattttatcatttgacaaaagagaaggtttaaaataatattcatccttttttaatatatgcacgcagttgataattttgggctataattttgacatagtaaaagtagaatgtgtaatattatattgtaatcatgtacattaaaatataaaaaaaattaaattataatttgtttatatactgaaaacagaaacgtttctaccaatgaatacaaaaatgatggttaatttaaaattttccaatatataccatttaatactataatacaaaatttttacttttagtaacattaataaaatttaattattacttaaaagtacccgattaaaagtgttataatctattaattaggttgggttagtcatggtattctatctcatggagaaattaattgaaaaatatattgaaaaagccttttacaaaaataaaaataaattaaaaaagtagaaagaaaaaaaagaaaaaacgacaacttacgaatgaagcctttaaag

SEQ ID NO: 399222 - DNA, 700 bp, Cannabis indica
ctcgagtgacggaattaatgtccgcaaaatgtcgttttattttatgtccaacaagaataattgtcgtttttatttgatcttaaattggtaaaagttgcttccttttttgcttagatagataaatattattgtctactctgtgttttgcaaaagttattgattggaccctctattttattaaatgataaaatagaccttgtattttctaaaatagtaacaataagaccctgagtttaatttttgacaattttttttttaatatgactaacttgaagacaattcttaacacgaacagatataaaaaaaatataattacagttttattagggctgagcatcggtcggtttggtcggtttttttctatataaaaattcaaaatttggttttcggtctggattggtgcaatccaaaaaccgaccgaccaatccagaacttattttaaaaccgaccattttgaatctcggtttaaaccgcccaaaccgaacttttattttaaaaaaaaatgatccaatttattctataaatacattattctatattttacaactacaaacatacaaattaattgttcaaaaactaattatcttaatcttttaactttaatattaataaaaaaaatatattattttatatattattagtaattataatacatgcaaaaaaaaatgtaatacccggtaaaaatatacatatattttaa

SEQ ID NO: 399223 - DNA, 551 bp, Cannabis indica
atacaagcatttatggtgacttttctccacacaaaaatagggggaaacagcgtcattcaagaatttctaccatttcatctcttcatttgaaaatacatttaaatggaaagataaaatcactacaaagtacaaactaggagagaatcccgtctttcaacaatattagaggatatattgccaaagttgaaaaatcagagtcaaaattgtcacagcttaaatatttctccaaatgcgacaatatctcttttctgaattgtaaaaattagtcaaaatggtcacagcttcaatattcaccaaatgtgaaaattctcaattctcaacttttaaaattaggagattatggatattagtaaagcagaattgcacccctgagtacgggaacatgcacaactttctatcctcgaatgttaaaagggcaggaatggggatagcaccccaccccaacagggacccatttaattttttatttattttataatattattttcaattattatatttttttttttttgaaaaagagaaagaggcctgttagaatttgaggaataaga

SEQ ID NO: 399224 - DNA, 1000 bp, Cannabis indica
ctaatgaagggtttgcttctgcaccagcctgagttatcccaaacaccctcactggtatgggtttcgctgtagtctttggtgcctcggtcttgagttggggataattcctgttgtaatgccctagcagacaacactgaaaacatccctgccctctacactctcccagatgatgctttttacaactggagcactctgggtaagtgtatcaggtctcagagctaccctaacgactgcctcgtccctggttcccctggaacctcttgttctgacttcagccaccagatgcagttggtgcctttcttttctggtcagtggccgagcaactacctcccttactaaagccttaggtaggaggagtagaagccctaccaacgaccagagtccctcgagactcttgggtgcactccactacgccctcagctcgtaatgcctttcccaccatatcaccataggtggtgttatcatcagtagtgatcattaggtcatgtctaatcttcgaattaaacccttccaggtatttttctttctaggtcagctgagtaaattcttttctttttgcacttctagttgcttcattatagtactttgcattgaataattcatagaacttttctcaggtcatcgtagtaacatcacaagtcaaggacaccatgtcccactatactagagcgtcttcttgaaattggaacgtggcacaggccactttttcattaccggtgacgcccatgaaattcagaattctggtaataactattagccattgctcggctttcataacatcgggacctcccaaaaagactagaggtgcctatttagggaacctttcatacagtggttccatccgattcactgcaacgactggtcctacctgcacagcaggggcaggagcagaagctacctgcatttctagagtagggattgcaagagcgccctgttgtctcaaacatctaatttcttattcttgctcattaattttggcttgcatttttgcaagcttatt

SEQ ID NO: 399225 - DNA, 1049 bp, Cannabis indica
gaaaaacatgaacaaaaaaacaaaaaatgaaacaaaaacaattaaaaaacaaaaattaataaactagcacaaaacaataataaaacagtaaagaaactgaaaatcaccttgttcaacggtaaataaaaaatcttgtccttcaagtctctaaaagttggatttttggtcccaacattattggtccaattcagaattcttggaatcctggatgaaactcttttgcaaaaggtgtttaccatagcaggacaacattcataaaaccaaacaataaacacccaaggacagcccaacgctctataccaaccatcataggattgacctctcttctcctcttttttatttttattttaatctcatgctctattctttctttgaaagaatcaatagtcaattcaaacgactccctatcccaacaatactcatcccaacaaccgctatcaacgacatctagattaaacctagaaacttccttatctggagtattgctaagaaggaaatattggatgaaatacaaaatagatagtttcaaacctagggactcatcctgtccccacctacttcccaagaaagcatcctatatagctttatgatgtatggtttttacgccacgaaaacaaacctcaattaattgggttgattcctaggaaaataatcagtttgttgcaatcaccaaagcaatcaataccagtgattaagtaaaagtcctcaacactgaactgtatacaacggccaacaaccttagcccaaaattcgtttggattgggatggtatacttccctcaaaagtaggctatggacaacttgggggtgaaaaataaagtcagttatatccaaaaaattaccaaactgggtgtcacggaacatagataacaaattgacagacaaagtattctcaatgttatcaatgacagagaaattactcgtacatacacatttcgatctatagaaattagagggattgtatttttaacccagtcctgcaatttaacaaacaaagcaaatataatcaaataacatatgcaagtagcaaaactataataaaactacaaa

SEQ ID NO: 399226 - DNA, 924 bp, Cannabis indica
gcacgcgatgtgggaatatgagcgaaagcgcgacgtggatatggagcgtgcattcaggaggacaacgccacgatttgagcctaagttcccgcaattccctcagcacgttctcgacccgtgggctgaaccatcagcttcgaatacggaggagccctacgaggactccaagtagagggagtttcctaatacctaagctaatttctatttttctgttatgtgtcgtttttagtttgtattgtgctaattgtgtgttgtcttttgtgttttaaaacttttatgtcatgtcatttatgtggttgttagtttgacattgagagatttatgagtttttatgtggcctagtgttctgctcgatgatgatatgttccgctaattccatttatgtgctgcctaattttatatgttgcatttgcatgttaaaattgttggatatcatggatgcttctccttagtctctcctcaatagttaatacttttattttcccaccacactttgcatttttcatacgattgctgcatatatacttttagcatctagaattggttagtgcatctccttgaagcgaaatcctagttagacttgtcccttagaaatgatttaggccatctttggacgtttgagcctttctaaccttccctataaaataaatttttccctagtcacccaagtttgagccgtttagcctattcttgttgtgcaacccaatcatacatatcacaccaatcctaatttgcatttccacacatgtcctaacttaattgctcacttgtcaagagccaagtttcacattaagtttggggtgagtgcggtgagtgtaacttgtggcgagctaattcaagattatacttttagccacattggggacaatgttgggttgtaagtttggggtgggggaattagctcacaaagtatattagtatgca

SEQ ID NO: 399227 - DNA, 1268 bp, Cannabis indica
cctaaatgtcaatttcgaacatagcgggtattttcacaccctttagcttccctttttagtaaatggggttgaaaaaaactgcctctaaagggtaacattgtagtagtgggtggaggtgtggatatggcaggctgagtgaaggtgactgaagcctgagcaggacgagaaacgggacttgaagtagggggatccacgtggaggaattggtcaactgcttgttgcaaaccttggtcatcgttgcgggtgcggatgcgaggaaaaaactcctcaaaagggatggagttagaaatttcaaacggattccttttatgttgagaagaggaggaagcacggagagaatccttatactccaggataggaggaacgggaaaattatcacatcgaagaagatatttgggacacttgttgtaggtgtggtcaacaaaactgcagaagtaacagaaattagggagattttcgtactaaaaactgatccagtttgggtcgggaataccacggaaacgaatagtcataccccgacgtaatggcttagtaatgtcaagaaggactcgaagacggaggtaaggaccaaagttttccattaaagaaagtgggaatatttcaatgagatcaccaatctcatcagcaatgaattgcgccaattgagggcttttccgaccaaacgggatcctatgggcctggatccaaaaagggacataccgaacagattcgggagtaggagtaggggacacgtcaggatgggtaaagaccatgaggaacttatcgaaatgccatggctgctccttaagaacacgacgtcggtctccgtcgcattgaaaagaggccaagaacaatccagagtgatattcagagatttggacaggaaatctaagggtctaagcttcagacatagctttctcaatccaagagggtttggcagatttgggggacaacagtttgaagaacagacagaaagagttgacatcattaggagattggatggaaatgtgatcaaactcatgaatgagactgtcttcatcatcaagagcagtaatagggttagggtttctggaagaggacgccattgttatcagagaaaaagggaagacagaggtggtagacgaaggaggagatgatggtgtggaaagacaatagaacgaagcatataaatacacaattaaagaaacaaaccacagaagagagtacctggagaagaagggcgctcgagagggacacgttgtctgagccatctcttcaaaagcctggtgagactgtctggattcggagaa

SEQ ID NO: 399228 - DNA, 530 bp, Cannabis indica
ggggagtgtcatatagagagttttattgaaatcgccatgaaaaaaggcattattgatatcaagttggtacagagaccgattgttaatggccgtaatggcaagcagaagttttaaggtattaaactttgcaacatggacaaaggtgtgaaagtaatcaataccttatttttgattgaagcttttggcaaccaatcgtgctttgaaacgatcaactaagccatcaacattgtatttgattatgtatacccatttacaaccaatgcatggtgtccattagggagactgacgactaggggtgttcgtggtgcgggtggtgcggtttttaaccattttttcaaaccaacccgcacatgcggtttttctaattttccaaaccgcacccgcatcgcgatgctaaaaaaccgcaaaaaccgcaccgcaaaaaaagatgcggtgcggtgcggtttttgcggtttgaactatcacaatttttttttttgaaattatcataaaataattaaactatcattaatataattattccaaaacac

SEQ ID NO: 399229 - DNA, 810 bp, Cannabis indica
aaaagcgaatgctcaaaaaaaaatacagagctaaggaaaaagctaacgctcaagaaaaatatagagcaaacaaaaagcaaatgctaaaaaaagtagagctaaggaaaaaaaaggcaaacgctaaagaaaaacataataagcaaagcagaaagctaaaagcttaggaaaattgagcacaaagaaaaagaaaacgctcgaaaaaataagcaaagcaaaaagctaaaacttagaaaaattgagcacaacaaaaaaaagctaatgctcaagaaaaaaaattgggcaaagctaaaagcaaagcccaacaaaaaaaaagaagtgaaagctcaaagaaaaagagaacagcaaaaagctcaaaattcaaagcagaaatcgagaactaaaggcaaaaggccatggcgcaaagcaagaagctaagatgcatttggaagcatgaagcttaagcatggaataaagaagcacaaaaaaaaaactcaaagtgtttcttcgaactacgataagcttgatcccgtcaagggtacgtaggcaatctaaataataatagatgcagccaccaaattaaaagtttaaactggtctccctaagctcagatttgtcttttcaaatgagagtgataaaagaagaaatctagaaggagagatagaaaattcaagtatcaaattctcaaagtcgctcgatcattacacgtgtccatataaattcccacgcgcatgctcgagggggcatctgttagatgcgtttttttcttcttcttttatttattattaaaataaaaaaataataataaaaaaaagagaaagaatcgttcaattg

SEQ ID NO: 399230 - DNA, 631 bp, Cannabis indica
ttattatcaaaaaacacaattttctaatcactttatagcatatataatgttgtgtcagttttataataataataataataagtgattttgttttacatattaatatgtcaatacatatggtgagaatagaaggaatttttagtaatttaattgattaaggatcaaaaatattaccatttttattaaggtaatagatatatattatctcctcatacatatagtttcactatagaaaaataattatttttagagaataaatttttaatcacaatataatttttttataattaaatatgatttttgattacaataaaaagttacttgtgactaaaatttagttttaaatacaagttgtcacgaatttgcttttaatatattatgattaaaaacacatttagttacaataaattgtaatttttgtgactaatatctttagaaacgaatctttttatcacactataaaaataataatttataattagtcacaattttttttatttttagtcataaaatttgtacgactaaaaataattttttttgtatagtatgtgcgtttggaaagccacaatgtaattggatttgtgtgtaattggaggtaattacacaatttgatgttggattttatgcccta

SEQ ID NO: 399231 - DNA, 1792 bp, Cannabis indica
ctttcagtcaaatttgtcaaagtcttttctctctctatttttgaatcattctctctctctttctcttcaattttcaagtctcatagtgataggttaaatgcccacacatagcaagtcaagtactcaatcatagtgtgtcagactgtgaagaatccaaacacctaaaggagaatcgagctcagatcttgataatactttgggacagaaaagaacaagggttagagatctgagtagaaggagacatttaattctgctgtaatcaatgtaaggtttcttaactctatatgtatttaaattctattattttagatgattcatatttagaatgttaaacaacatacatggtagtaaatctagatcatgataaaataatccccaacaatagcagggacaactcgagaccaacttgccaactttgtggaatgttttgtcagtcaacatctgtgtgctacttcagatacaatgataattacatgggccagccaccacaaggtgacagtcatcaaggccaagataaaaactcccagatgacagcattggttgctactcctcaaaccctaaacgatgatgcctagtatgctgacaatggagctataaattatctcactccagaatttgagaagatgatcaacaaaacagagtatcatggtaaagatcaaatgataataggtgatggcagcaagcttgcaatcgctcatgttggtactggttcattaaataccacaaactctacttttcttgttctaaaagatttacttcatgttccatctattacaaaaaacttgattagcatttcaaaactaaccaatcacaacaatattgttgaaattctatgccctaaataaaatttatttcaatataattttatttactattaataaaagattaaaaaatatttaggtttacatgtagtttttgtgattatggttttaatatgaaaattctttcaaatcccgaacatattgtcattcatgattatagtgttgtctacacagtagaaaataatcacgagtatatgcttcaaactatttagtcccataatttatcagtgcactgaatttacaatgatgtgatgatcaacgataaagtttacttacgcagtgatatgtggaatgtcccttctagggcattagcaaagtatactagtatcagatgtattggctatacatcatactggacttatattgatagtggaaaatatatcataaacttaccgtaatatcttttctaagacaataccacttagatgatctttgatcaaagttcttaatcctaaaatgattaagttttagcttaaatatattacatgtgttctttaacttgttcgttatagctgaccatttggatcagcctaatacttgcatcttaagagtatggtagttcaattgagtgggagcgctaatcatagatctagaagttatagcttctataactagttagaagtgaaatgatgattttcttagagcttggcttaacgacataaatgaaagagctcttatttcattaattatattagtttactgaaatatcatttataagaagctaagtggtttaatgataaaattcattggaggataaaacagtaaatttattcatactcaatgtaaaacatctatagaggatctttgattatttagattgaaataatgaataatttatagcgtatctattcttagtgaatagtgttgggttttatgccctaaataaaacttcatttcaatgtaatctttatcttttaaatatcaataaagaaacagaagtattttcatcactttgtgtgtcatttggttca

SEQ ID NO: 399232 - DNA, 880 bp, Cannabis indica
atcagggacctcattatcttttagtataattacaatcatccaatccaaaactatgttgagaattcacactgcatgcattctttcaagtcaacctcaacactaatttatgtattacagtgtattctcaactcataagatagatactttaattaagatagggttgatcacaatctcacaccacatatacagtgttgggcgtgtgagatgaggagagagagagtgagtggtgtgagaatagagagaatgaggaagtgaaaaatcaattcttattttctctcttattaccgtaataaaatcttttaattaatcctttaaaaaaaagaaaataatttaatttaaattcagaattgtaattcaaatataaatatatctaataactgataaacaaatatcagttaaacattttattttattattatttttactatattttcaactaccaaattttattggtagcaaataatagccttttgctaccaaattagtaacaaaagtttttagtagtcaatacaaagcaaataagacaaaatatttctgctgccaaattaattagtaggcaaatgttctttttagctactaatgagttttagtagcaaaatatttgtatttagctaccaatttgactacaatttttttagtggcaaaagatcttttattttttagctaccaattgtattcagtagcaaaataatattttcaactaccaatttttactaccatttttttttataagaaattatgaatttttagatataggcattttgctatattatttttagtaaaaatatatcttctcacaatcaatactcaactattattttctcttgtataaaaattatttggcacttttctcttcaatatttaataaaaaaataatatt

SEQ ID NO: 399233 - DNA, 712 bp, Cannabis indica
tttcttaatttttgaaatcaaaatcaataaactaggttttattactttaaaaaaaaaaattaatattcagattatataaacttaatttaaacccacaaaaagacaaatcataaattggaaaaatgaccatttttccttttccacactaaaagtcataaaaggccacttaggggtattttaatcacttcgaaatttttgactattctcaaaatttccaatgtctaactatattgccccgctatactaaaaatactaggatgtgattctaatagccaaacaccgcgttccaatgttgtcgggcacaaaacatgtaaaatcatatgaaatcccatatacgacatataaaatgcattttgaattcaaataactctccgtaaattaataattcaaaactaataagcaagtttcataattaaaccctaatatttactaatttctaaattgaagttaagcggtctttacaattagcccccccttaaaaggattttttcctcaaaatctaacctgaacaactctaaatattgagctctcatgtcgaattctaactcccaggtggcttcctccaccttgctgtttctcgagagtactttgaccaaagctatggtcttgttccgatggaccttatcctttctttctagaatctgaactggttgttcttcatatgataagtctgattgcagctcaagattttcataacttagtacatgagcag

SEQ ID NO: 399234 - DNA, 531 bp, Cannabis indica
agtggcctgactccctatagccgatttttataacctgattgtacaaatttacatgtcaggaaaataatttttaactgagttttctatatttatctaataaaatatatttttgaggggtattaaagtaaatgtatttttttggtgggatgtattttcactaaagtgatatgttttgagattgataaatgatgtattttaaaattttagcatttttataagaatatgtttccctattaattaatgtatattgtttctgatgattagtaccaaaataataccattaaataggattaaaataggattaaaatgttttcgaatttttattttaattgcccagcatacagtataatacataaatatgcttataatatgtttcactttgcatgttaaaatattattttgttagatcatcccaaggagcacattaaatttggtgtcatactatcaccaaatttgatattaaaaattattttcacttcaatcacaacactaaaaattacactaaaaaaatattatttattattatattat

SEQ ID NO: 399235 - DNA, 1973 bp, Cannabis indica
tgcttgacatagggttttcgcggtctagtgtaccgtggggagctccggtattatttaataagaagaaagatgggtctttgcatatgggcattgactaccgcgaattgaataagctaacaatcaagaataaatatcctttacctaagatcaacgatctttttgatcaacttcaggggatgacgatcttttcaaagattgatctccgattgagctttcatcagttgagaatacgagaggaggacattccaaagacagctttccgcactaggtatggacattatgaatttctggttatgtcttttggactgacaaatgctcccgcagctttcatggatctgatgaatagggcattcaaggatttcctcgatacttgtgttattgtatttatcgacgacatccttgtgtactctgaatcagaaacattatctctggatggttctgcatcgacttcgagagcataagttgtatgccaagttcaagaagtgcaaattttggctatctcagttgtccttccttgggcacattgttagcaaagacgggttcaaggtggatctaggaaagatagaatctgtcagagattggtcgagaccaaaaacagtgacaaaagttacaagcttcttgggtctggctgttattatcgtcggttcgttgaagggatttctaaaatttcaatacccttaatcgagctcaccaaaaagaatcagcgttttatttggtcagataagtgcgaagctagttttcaggagctgaaacagaggttgattaccgctccagtgctagctttgccttcagacaaggagaagttcgtagtttattgtgacgcatccaaacagggtttggggtgtgtattgatgcaagccgatcgggttatcgcttatgcctcccgtcagttaaaggattatgaacagcgatacccgactcatgatctagagttggccgcagtggtttttgcattgaagatttggcggcattacctttacggggaaaagtgtgagatctataccgaccataaaagtctcaagtatttctttactcagaaggatttgaatatgagacaaaggcgttggttggaattagtgaaagattacgattgtgagatcctctatcaccccggaaaagccaatgtagtggccgatgccctgagcagaaagggtcccgggcaagtagctagtatggttcagatctcacctcagctagcagaggatatggttagatccagcattgagtttgtggtaggtcagcttcacaacttaacgctgcaatctgatctgttggaaagaataaaagtcgctcagatgacagatccagagttagtgaagatccgagatgaggtgttggctggtcaagccaaggacttttcagtgtcagacagtgggatgcttttgtataaagccagggtttgtgttccgaatagtgtggaacttaggaatgagatctttgaggaggctcattctaccccgtattctctgcatcccggcaccactaagatgtaccaagatttgaaaccgtacttctggtggagcggtatgaagaagaatttggtagaattcgtatcgagatgcctcacttgtcagcagattaaggctgaacatcagagaccagcagggttgttgcagcctctaaccctaccagaatggaaatgggaagatatcacgatggattttgtggtcgggttacctaggaccacgggtttgatttgattccatctgggtagtggtggatcgatttacgaaatctgctcattttctgccggttagaacaacatttacagtggatcagttggcagagattgtatgtcagagagatagtaagacttcacggggtaccgaagtctatagtttcggacagggatccgaagttcacctccaaattttggcaaagtttgcaacgagcaatgggtacaaagctgaaattcagtacagcattccatcctcagacagatggtcagtccgaaaggacaattcagatatggt

SEQ ID NO: 399236 - DNA, 780 bp, Cannabis indica
ataaaaataaataaagtaaattatatataaaaaatcacaatccttactaatctgttataattttgatgtctctttttttatagcgaccttcaacaatttcaatatcaccgacaccacacaggcattcaataatatctatatataatataaaataataaaaggatggaatattataaagatgaacagttaaataaatttcttaaatatcaataaaagttaataattaaatgaatacctgagagtattgtgttatcattaacacgtaaatgagtcaaatttggagttatgaattgaaacccattgatcggaatgttaactatttctccttcatatcaagacttatcaattctccattttttttagtattaagagactcccacattctacaaactctaatctttatgctccaactatctgtatcagtatttaagtcactaaaaaaagaacactccatcatgagagaagaagagagaatataagagaaaagagagaaggtaagtagtaaattgaaatatgaaattaagagaaataagttagaatatatatagagatttgtgataaaaaaaaattataaaaataaagtaaaaattacttttttcaatttagagttataatgatattttttaaatataagtttttaaaaaataataataaaatagtaagaaaatagaacaataggtgtatgatatttttaaatatcactttttaaaaaaaaaaaaaaaaaaaaaccaaacaccacgtatagtgtgattttttatttttcttttttatttttgtaac

SEQ ID NO: 399237 - DNA, 545 bp, Cannabis indica
tttctatttttcaaagatcatccacagttccacgctagagctgtacagtaaatatggggtgtgacatgtaatgagtccggaaggtatctacacgacctgtcatttaaaaatataaatttcagtatgacacggtatgatgctacaaattgatataatacgtcacgaaaaaaatgaacttaaacatgatacgataagacaagcctaaaaatataacacataagcacaaataaactatcccaaaaccacaaaacgttaaaaattcttataattggataataataataaaaataaaatacatatatatttattaataaatatttaaattttaatcattctaaaataatttttatatatagtaatgtgtaaaatattgttgaaaaattatataataaaaataattagaattataaaaaatacatataatttagtgattaacttatcaattattaaaaaaaaaaagctaataaggatttttacttcacgaattttgacatgtaccaaatcatgctccctgaatttttttagccgttaaaaatttttcctga

SEQ ID NO: 399238 - DNA, 757 bp, Cannabis indica
cataaagtaattggggatactctgtaataccaagccaaccaaggttgttctgcctgcttgagacaaacattttgcttttcaccctccaaacgggcaacaattttttccctaaggaattggaaatcccttctctttctagcaatgaaaaagaaagggttcccaaggtacttttcattgtgacctagcggattcatctctaacatattctttatttcttccttactcctcagctgagtatttagagaaaaaaccaactcgcttttctgtttattaaccatttccattttttcgtactttgtaatacagtccgtgaaagccacaacattttgaagattagccttacagaagaatgtggcgtcgtcagcataaaacagatgtgtgataggaattgcattccgagagaccttcacaacagtcaaattcccctacttttggcttttataataagtttttacaacacttcgctgcacaaaataaaaagggacggtgatagcagatcaccttgcctcaagccacgcttaggattgaagggagctaacggatgttgggttttgtgccctaaataaaacccatttcaatataatcagatttacttattaataaagatcataaataatattttatgttgcatggttcacatgatttatttcatgattatatatatgatgtatgaattctatttaagttcagaacatatgaatttgttaatgtttatagtgttgtcaacacagtggaatataatcttaattatatgttc

SEQ ID NO: 399239 - DNA, 947 bp, Cannabis indica
attattagtattaatgaaccgtcttttaaccttgtacctcattcccaactattggatttcctaaccctttggccttaccgttactgggttctaagtataaaaaggtggctcagtctagccatatttcgtaaaattctggtttttggtgagttacatccagaaattggattgtcattctcttgctaagatgtcccatccaaactcagaaaattatccctccaaatctgtaccaccggaatataccaactacttttcctctccacacgttcccaaaggcttcaatccttagtttaaattagaaacaaaggattccaagactaaagatcgttcggttaatccaaacccagtaggtattgttaatcgttacaggcgatccccacaagagatttctaagggtaagcatcatcctctgttaaactgttgccttactgatctcttatctttgtctctacaaatggacgtagattttgagagcgaattcagaggtcctcctcagactaacaagggatccaggaagaaggtaatcccagttggcgagatcatgggttctactaaagaacccaaatggatcaagacaaaggtttgcacaaggaagtctccaaaccagccaatcactggtgtttataaatttctcgaggctgggaatgaggtctcggccgcagggaatgagatctctgctacaggaaatgggatcttttggtgtgagaaatggaggtcttctactgcagagaatgaggtctatgcagaggttgagtccttttacgtgtagacaacctttgtcaagctacgtgtagatggtctttctcaggctatgtgtagatggtctttctcgagctctcatgtcgtctataaataatcttgtagttttttatttaggaaaatagcctaatagtttgcccctagtggaatttttgtacgaactgttggaagttattttaccaggaact

SEQ ID NO: 399240 - DNA, 679 bp, Cannabis indica
ggggaattggatttacttgttgcagatatacattgattgattatggaatttagtatcatagatgcatttttcttgttcgaatgaagtgacacattttataattaaggataatttattgtaaaaagtctagtttttagaatggagatgttcctttaaggcatgtcaaaaagattcatttagttggagtgggtcggagctccgatccaacggatcacttctgatttgaaacattcagatatttattggatctcaaatcaaattcgctctgtcctgcctaatttttttctggatcggatctgatctgattcggtttcaatatattaaaaaaaactcaatttaagactcggaccccggacctagacttggaccggacctgaacccgcctagacccagacccagacccgaacccgcttagacccagacccggacccggatccaaacttgggactggacccagacctgagacttggacccgaacccggacttaggcccgggacctagacccaagacccgaaacctgggacccaaacccagacccaaactcaaaactcggacccaaacccagactcaggacccagtcccagacttgtactcggatccggaacccgaacccgaacccaaacctgaacttggactcagacgcggacccgaaccccgaacctgtagttagtgttgggtc

SEQ ID NO: 399241 - DNA, 531 bp, Cannabis indica
agaagtgtttatatacattgttggcaactactctggaggaggagttgtgtttaactcaggggagttggttgctttgtttgtgatttgtgcacttttccatttaaaaagttactttatttgtggtttgtcaacttttccgtttaaaaagttattttgtttgtggtttataaacttttccgtttataaagttattttgttttatgtgttagagtactttcatgcagggggagtattttctatactgttttgtttttgtttctaacacttgatgtaggttttctccaaataaaatattttgtcaatcaaaatgccaaagggagagattgttaattccatttttggcatatttaattgacaaaaatattttattatttattattaatttcggctggagtatttaaattggtgtctatattttgtgtatctaaattttgaaggaaagttgtctagcttttctagttttggaaaataagataaaaagggtaagtttggttactcatttcttttttacctaaccagctgttatactct

SEQ ID NO: 399242 - DNA, 615 bp, Cannabis indica
ctagatcccaaccacgagtccaagtcttgtttcgattcatgtcctaggtcccagtttgggtttgggtctagatctaggaccaagactagggtccagttatgggtcacgatcccagttctagctcccgagtcatgttcaatgtttgggtctgagtttaggtctgggttagggtcccaagtcccggtttgggtttggattcaggttttggatccaatcctagggtgggtctgtgtccgagttcgggtcctggcccggttacagttttgggtctgggtccaggtcttagtcctggtcctgttcttgggtccccatccgattctagttttggttctagtttcaagtcacggggtacgggttggggttgagttttggtccgagtctgggtttgggtcctgatttgggtctggggcgtctttgaggttcgagtttcggtctcggttaggatccgaaggtgggtccagttccaggttcgggtctaagcccaagtcccggtcccgttctaagatcttgctccagttccagttcaagattttgttttggttcccgagtgtgggtctgggtcttggtatgtgtccgggtcctggtttgagttcgagtttgggttcgggttctggt

SEQ ID NO: 399243 - DNA, 550 bp, Cannabis indica
ctggaggtgcctgtttgcggaacttttcatatagtagttacattcaaatcactgtaggaattggccccatctacacagcaggggcaggagccacctgcatctctagaacatgcattgcaggagcaccctgctgccttagccgtctaatttcttcatcctgctctttatcctggcttgcattgttgcaagcctatcttcccaatcctaggcagcctacaacgggttaacatctccccgaccgcgtgccatgcctctgccttggccacgcatattaaggggaatctgaactccctgaccgccactagatccaaccaagttaccttagctcctagtgtttcgcctgacgtccattttaatagaacaacctgcgaaactaagagccagcatggtcagatcgcgatcaagaataatttactaattaccgcttgttttagaaattaaaacatgtgcgtattcaactatcaggctactaacatgcttcctattaggcttaacatactaataaaataggaatattggcggctaaaccacctgaactttacggtttgta

SEQ ID NO: 399244 - DNA, 665 bp, Cannabis indica
ttatactccattatttttaaagtaagctactgtagcttactttatgcatgcagctgagctcactcagtactcattagtcattaccttaccgagattttcttctacttcaatcaatcatacatttcgttcatatctcctcattttcgttttatattctcttagcttagggtttgcattttatcctttctttctttctttctttctttcttcttcttcaatttttgagttccatttctgtttgattgaagttgtgggtgctgctgccgtgtgtgcttattcttcgtctgattcctttttcgagcaagctctcttggtttaacagaagtatttgttcatttccttgttagtttttgttgtaatttgtttagtttagtgattagagtgttttattttgaggttcgttatttttttattattcatgttatttttggcatgatcggtggtatttttaggttgttttaggtatttttgttgcgtgttctgtgtaattttgacaaaatttgttggttgattattgttttatttagtttatttttgtattaagtttgtgtttatgttcattttttttttggttttgcaattaataagtgtttaaatcttcatgatttttctaggtttttttttttttttttttttttttttttttttacttttttgtttgtgtt

SEQ ID NO: 399245 - DNA, 600 bp, Cannabis indica
gaaagggtagataatgagttatcataagagtttgtagctcattgacccacatacacgtgagtatgttcaaagactaaatacaacaccttcaacatgatgcacctcgcaattttattggtgtgaaaaatatctcgcatgtgtctcactcaacattaatagaagagcatgaagaatattgcaacatatacttagacgctagcttacgataaggtgtcaaaaagaattatcacactacaaggagtttgaagcataatcaacataattgtttgtggaataagttaaaagtgtgtttatgggaagttacttctaattatctcatgtgcataaatttgaaacgtgaggattgtccatgattcacgaacggttacaagtgataagatcccaaatagggacagagtatgagatttttcttaatctcagggacattgtcctaacctgttagagttcagtcaaactacctcctggcaactcaatcttcacaaatcccattccaatcactaggcaagttttattatctccaagcttaactattccactctcaatttccttgtagctacaaaactgagatatgtcaagggtatccatttcataccaccataa

SEQ ID NO: 399246 - DNA, 899 bp, Cannabis indica
catgaaaagaaatttttaggtcatttagcttttaaaaattacataggagattgcatatattttttctggcacggttattttacagaatataaactatgtttttaactactgatagtattttcggaggtggtcgcattccaggccctaggcattgtggatccatccattctttttagcttataggtgccagagtagatttcatcctcgatttcgtatggctcttcctaatttggcccaagtacccccactctgggttcttgggtggccagaaagaccaatggtaggactagttcgctaatggtgaattttttatctttgaccttggcgttgaagtatttagccacctttcgttgataagctgccatccgtatctgagactcatcccggagctcgtctattttgatccaacgcttcttgtaataaggctttgtttgttgccagatcatacgttgcccttctatgagatgggagcaaggtttccaccggtaccatagcttcacatctgtacaccattgagaatggggagtgttcggttgtggttcttggagtggtccggtaggcccataatactcgtggcagtttttccggctagttatttttgcaggccagcagctttttctttagggtgacctttattattttgttgacggcctttgtctatccatttgtttacggccttgcaaccgcagagaagcttttgatgactccatgttggttgcagaagtttttgaattcttcacagtcaaactactttccattgtctgagactattttgtgaggcaagccatatcgagacacaatgtttttgataacaaagactaaggctttcttagcagttatgctctttataggctcgacctctgtccatttgtgaagtaatctactgccactatggcata

SEQ ID NO: 399247 - DNA, 584 bp, Cannabis indica
aattttagttagacattaaattaaaagagaaatatatataaaatgaatctctggtacctaccaataatttcttttctcgacggtgtattaaattgggattttttcatatatagccttattagggtcaaattttacatttttattactataagagaaaataaaccaaattagaaaaactaaagttttttttttcaaaaatacgggagtcttcttccccaaaaaacttctccttcttaaaagagcaaaataaagtgagttgttcttcattggaggcaacactccacccaaacaatcaagtgatggagatctgaaattaacagccaccaaagatgtaaaagttttttgtgatctccatgaatgcccactaggaactttgggttgatctccattaacgccggcgataagcttttcttcgatattctgccatggcagtcggatcaccgtagggagatctccatgaagccgacgagaaaggatcaacaatcgaggaggagatctaatgaaatcattgaatatcaacgattgagggagatctccttggattttcatatacccacacattttgggtttctttaaaaaaaaaa

SEQ ID NO: 399248 - DNA, 511 bp, Cannabis indica
tgactcatggtgatcctcaaaaatacgctgagcaaataattggttggatttcaagtttctatgactctgttgattgaacgaaggagctagtaaagaaaagtttggctatgagtgaggagggggtttctaactactctgcttctcaaagggatccttttataatcaatggatccactttgctggtagatgccgctgtcttaaaggaatctaagttatttggtgtttgagccattattatgtcagcaaatcatacagtaatggctgcattaagcgaaccattacgaggttagtattgtaaattaattttaagatttctatttcatatagtgaacaatagcaattctaaaagtttgaggattttgacaatttaattatactacccaaaggattctaagtacagaagtatggattaggtgtgtctccttgctcagtttgtacacaaatgataactttgttagttactaaccaaagtgtaggactttggttagtagggggtgtttagttttgtttt

SEQ ID NO: 399249 - DNA, 700 bp, Cannabis indica
atcttctactcaaaatgttgtgacctataggttatactttgaagctatatttaaagtgctatgacgaaccatatagcatacctaaatagttttttatatataaaataatactgcacgtgatacattaatattgcaaaccaagtcataaatctaactcgtcatgactcaataactaaattgcaagtaatttggatccattattgctccctgtcttttgctcataatggtatgatctatataggttacttactttgtagctgtatgtatagtgagtgctatatatggtatacctcctttatttgatcaatgattatgctataaaatatatttttcggtaattagtaatttttttcattcaattttgacatgtactaaattgtgcttcttatttttttggtcgttaaaatttttttccgaactattgagattgttaagtttcaggacttttgtctaatttcattcaattttactggttcagtgattgtttatgtactaaatcatgctccccagactttgatatatctaccgaatcatgatcctcaaattttgatatgtactaaatcatgtcccttgaacttttatccatgttagaaattttttactaaaagtagacaaaagtccttaaatttaacaatctcaatagttcggggagaatttttaacggccaaaaaacttgagaaaacacaatttaatacttatc

SEQ ID NO: 399250 - DNA, 684 bp, Cannabis indica
tatatatatatatatgtttttatgaatttaccgtttttatttttttttacagttttacaaaatttaattttgtttttacaaaaggtgatgtttgattggaggtaatgaaattgattggaaaggaaatgaaataatcttcattttgttgcatattaaagtgttggaatgtaattctaatggaatggcctttccactattttagtggaataacaattctattttaaaatggaaagaaagaccattcctgatgagaaaaaatttaataatttttgattaatttatttttatccattttaaattttattcaattcctatacttagttgtcttttcttattttcatgttgctgctgcaaaattagtaatctgattttaagtgctatttaattttttaattattattattattattgttaggatttactcctaactaacaaggtaacttattatagctcacaaaaaaaatatttaacttttaactcaggaaagtaatctaattatttacaaccaactctttttacttctaagttttcgaaagggtagttttccttgtcacctaacctcatttatttaggccatctccaatgggagattaaaacaccaaatatagtgtagttttacactatatttactctaacaggacactaaatctatcctcataaatggctttgtctacagtgtcccac

SEQ ID NO: 399251 - DNA, 810 bp, Cannabis indica
aaaaaaacagcatttttgtaagtttcccaagcttttccagtgcacaacaaaggtggaacacggtccccttcaatagccaaattagtcatcgtggcctacgtacctgacgctggcaacagaagcacgacacatgtcctacttgtccctctttcccactccgcctgacgcaaatgggacattttgtcccccacttttctcagctttttgtgccatttatcccactaaatggtacacgaaaataccattttgaagagcaaatttgcactataaataggacccaaattcattgtaaaagcatcagattttactagagttattataccaaaattgtgtcttttctttccttcttctttattttgctttattaattttggtgtaaagacaatgccttttctaggctaatttctttggcaagactcaagtgtaagttcatgcaatttttattcttctaatatattgattctctttgttcttcattttcacatttgttatattaaatttctcttcttcttaattgcactttaaatttaatagtaccttttatataagttcagtcatgcttttcttatgtaagttaggctattaattattagagtgtttattatattatatgatttttactgcattctgccagtggtattttgtcgatttaaattatataatatgatagtatttttagaagtagtattaatttaattagagaacatatttttctagtgagcttaatcatacacattttccaactataattaatggtgtagaattatagttgaggttaaagaatcaattttattaggaaaatataattgc

SEQ ID NO: 399252 - DNA, 1119 bp, Cannabis indica
ccaagtttgagaagattttgagcactccaaatactgcgccacacaaagctggggttggagccaaggtcggcactgaggaaatctgagtggggaaagtattttgctttatagacccgactaacaagagagttaggattgcataagagacgccaaccttgtttagcaagcatagcaagattgaaatcacttaaatgacgaaatcccattcccccgaggtgtttatgtgtagccattctctcccaagacatccatataatcccatttcctttgcttgaactagttttccaccaaaacgaggccataagcttttcaatctcatcacaagtaccagtaggaatgaggaaaacactcatggcgtaagtaggaagtgattggataaccgttttgagaagaatctccttgccagctctagagagatacttatcatgccaactattcaaacggtttatgactttgttctttaaaaaccccaaaatagcattcttgtttcggccaatgatgttagggagtcccaagtagtgactgccttcggaagcttcgaccatgcccaggatactacaaatgctttcacaaatagaggagcttgtattcggactgaagaaaatattagacttagaagtattgactttctgacctgaagcattctcgaaagagtgaagcaaatggagaagattggtggcagcatcggtggtagcttgacaaaacaaatagctatcatcggtaaagagcatgtgggtaatagacggggcgcggttagcaacacgaataccacgaagactagctcttgattcaacttgttgtatcaaggaggagaatccctcaacacaaatgataaagagataagtggaaagagggtcgccttgacggattcctcgggaaggaacaataggtccaatgattcatccattgtgcacaacagaataacgaaccgaagacacacattgcatgatcaaatttatccatctgtcagcaaaccccatcttagacaagatagcctgaagatagccccattcaacacgatcataggctttactcatgtccaatttaattgccataaaactttttttttcctttctatctttctttttaagtcagtgcatgacttcaaaggcaaccatg

SEQ ID NO: 399253 - DNA, 911 bp, Cannabis indica
caatttgtcttaaatattttatcgataacacatattaaatacaaaaaaaaaaaaaacatatataaaagtgtgggtgggtgtttacaaaatttagtttgccattttgtgggcttctttaagggagagataagaggaaattacactctatacccttttttatattgtcctcttgtatttttactctcttttctaaaatttatcatttttacctctttttttaaatattgtactaattttgcctctgtcacttcaagatactctccatgtgactttcttatgtcagggtattttgagtaccatacatataaaaagaggtatgtttcaattaaatataaaattaaaggtaaatttaattaattgattaataaaagtggtatttttcaacttaccccgagaaataaaccattaatgggccagtgagagagaatctagacatacattttcttttttggtttttacaaaaatactgaattttgggcaaaagtttataatttattgttacacgattttttttacaaaaatactttttttataacacaacttagaaacaacaaaatagaacaattaacgtgaaacaatagtgaaaacttaacatagtacacaatatttttaaaaaaattctaccccacaataaaaaaagtaaaaaaattaaaaaatttcagtatgtagtatgtggtattaatttttttttttttgaaattatcatgtataatttttggcccaagagatatatttttgttttagttattatattataaaataggggtttattgaaaaatacctcttttatttatcaattaactaaatttgcctctaattttatatttaattgaaagcatacctctttttatatgtactgtatccaaaaatccctgacataagagagtcacatagagagtatattgaggtga

SEQ ID NO: 399254 - DNA, 826 bp, Cannabis indica
acaaaacaaaactagtcatactagccatacaaattaaaacaaccatacaaacaaacaaaaccatacataccattctcaatttatagtagtttgtttatacccatattttcaaaacagaaatagcagctcatgacacgtagtaaaacaaagggaataaagttaactcggtgaattcaagaggaggtataatagcatcctcgcaatatgaagctcatgcacattcttctcggagtaaactgatatctacaacattaaatgcgaagacactcaacatgttcctaaggatgctaagcttgtcatggcatttaggaatattcctggtgttgacattgttaacgatgagaggcttaatttgctcctattcatcacctcggaaatacaattagtatgttatccgaggaatatgtacccgaggcatgcatccaaaggttgatgaatctcccaagaaccctcaatcaaaacaatcaagttcctcgatcaccatacgttatagagaataaagatcaagtcaaatttgacagttatattatttaaaataaaagcaattccatgttatttcatattagataaaatatatgaaacatgggaaatgcccatgtttcataaactgttgtttagattaaataaaataattgttatcctactcctataaatagcagtgatcacattgtaaaaaacgagggccaattttctaagttagagaaaattttgccagatggtatctgtaaccaaagaacataagaaataagatatactcatggattatgtagattttaactacataatcacgtaaaaaatcctcttcatataataaaggctaattagc

SEQ ID NO: 399255 - DNA, 1329 bp, Cannabis indica
aaagttagcaatgccattaatgattaaacacaagaatttaagtaaataaatttgaaacacaccaaattctttccaataggtgtaagatagtcttttggccatgctacataacattttatagcttgacctactattgtcaatgaatcatcggctatgggacacgggagcagtgcattctccacattggcttcttcgataaatacctgatgataatttttgtgtaggtattcatccatgttaatggaaaactttccatttttcaaatatttctccttaacaatgtggcccgaagcaaccttcaatacaatcccactaggctccaacagacagtgcagccaacacggtaaggtctgtaaatccaaaacaaacaagaaaaaattcaatttgtaagtttaccatatttataatattgcattagattaattcgtaaaataacattaagattacctcttctgaactactaccagtaggtggcggtgctgctgctggagcaatttcctctctaaaacgcgatggtgatggaggagagacattggcagcacccgaggttatgctatgggatctggtgcagagtagacattggtaaaacccagtggtcgtgctactgaattggaggcaaggtcaacatgggattgttcatttgatgctccatcaacactggaggcaaacgcaacgctgctaggctgggaactaataagacaaatgagctcatctactttatcctacagctgttgctttcctctgtctcacgcacgcgtctctccaaatcagatgatgcctggtttgacccatcgacgttttcccttttagggcgtggtgtgttaaaatctttggttcgggtgacaccaaaacccatggctcgaactcggccaccatgctcatctatcccgagcgccagggtcagcacgtcccttttaccttccacttgtacaacaccctcttccacttgcttacgtaattcgtcttataaacaaaacaaatagagttagaaataaataatgaagcataaaaattaatacaaatgaaattaaactttaaacttacaatccatctaatgatttctgcagctgggccctccaccttgcctttcgtgtttatgtgaagtcttctctagatttcagatctatcaaattaagtaatttggtggttggcctatttctccatctgttattaaaccatccttacacctactcgtccggtgtgatggttgtaaatattacaagccctactcttttgggccttctttctcttcacctcaacatctggacttaatctcgaggccacaaactctctccattcttgcaaatcaattattttttcataaagttt

SEQ ID NO: 399256 - DNA, 1304 bp, Cannabis indica
ctaatcgccttcacagagccataattgcttagagcgctagcgccaaaaactttctttttgaatgtaaatttcagccaaattcttctttgcttcagcatattgtatagtagattcggagtcaaaaagcagcttaagtctgttgatttcttccttgcatctcctaatctgctccttaaaatttccggtgtaatcacgacctcaactaaaaaggttatcgccataagttttattttcaccataatgtcacaattagcacacatttcccacatgtgttgaacaacttggacgcaaagaggctcctagagccaagcattttcaaaacaaaattgcttaaccttggagacaaattttatggctgaaagatttaggaggattgggaaatgttcagaaactgacacctccaaattaaatagttgagcaaagttaaaatagccaaccaactatcactataaccaaagctcgatccaaagaacctcagtccaatttgcactgcctttacctctttcttatgtgtatggataacccgtaagaggcaaatcatgcaaagaacaatccaacaaagtttgattaaaactatcaatcaaccaactaggatatggattatcacccacatcattacaattaattatatgaaaatttaattttttttttgaatggatatgaaaatttaatttaatttagtactttatgctataatctttattaattaataaaagataaatgttaagggacacttggtgtcaaacattataatgagtggtatattactattggtgcaaaatactatagattctcacatattttgatttaataaataatataaaaaattattaactatagataatgcacaatattatggtgttaggtactataaaatgtcaaataacactacaaaaatttttacttttagtcacagtaaaatttgtgattaaaaataaaaaaattgtggataattataaattatcattattgtgttgtgattaaaaggtacgtgactaaaagtatatattattagttacaaaaattacaatttgttgtgactaaatgtgtttttagtcataatatttgttgtgactaaaactaaattagtgacaacttgtaactaaatactatgttttagtcacaagtgactttttgttgtgactaaaagtcacatttagttacacaaaaaatttatattgtgactaaaaggttgtgattaaaagtaacattttttcgtagtgtaacaatactctttaataaaagttgaataatatagtagtcataggtatactttcacatgtcttctcatataaataaagtct

SEQ ID NO: 399257 - DNA, 1175 bp, Cannabis indica
caaataactcatattacattcacgtatttcaaataaatatttgtaattaacaaattacgcttatatattcacttatcgagtcttcaagattctcgaacctgaaaaatatttttattccacatatagctcatataacattcacacatgctatattaatctccgtaattaacaaattacgcttatttactcacttatagcaaaatttaaattttttaatgaaatacattagtaggatcataatctcacttattacctgattaacccgtaatataaatataaaccttaattatttactattaagcttatcgggatattacaaccatcccctccttatagaaatttcgtcctcaaaatttatttaaacaattcgggatattacccccatatttatgattctaactctcaaattgctgattctatcttgctatttttctatagcaccttcttaactagtgagattgtcttatttcataatacttcctttttctagtccaaaagcctggacaagatatttttcccatataataaatttgtctgaagtttaacatcgtcacaactgaaaaatatgggtcgagtttgatacatattttcttagcatggagacatgaaacacattatatacttcaaacaacgtaggagttaaggctagctaataggctacctggcctacttattccagtgaacaggtgtctaatatttctctcgtaccacactaattaaggtacctaactaatggtacatttaattatcacttttacataaacacctcgccagggaagagattattctaagataatctaacctttatcaaatacgcttacaacatgtttctaatatttggtggatcttttcaggttacccacctttcaagaataaaatattatactatttttgctttaacctccttcgttcttaataaccttctttaattcttaacatcatagccaaagatatcaaccttggaatttcacaagattagactattccttcgtatgaattccataacctcatttattgtataaattgtctacactaatacacaacatattaacttagtatgtcaaaccgttactactcagccaaaatcataagatcccacagtacataattcgtaattatatttttctactccttctatgagatctcctaagctgatctactgacttaacttagta

SEQ ID NO: 399258 - DNA, 613 bp, Cannabis indica
atattgggaatttggagagatgaatgaaaaccaattaaattcaattcatgtagtgcagcaaagtaaaaccaggaatcactagtaataacaagtatcaaaacacacaagaattaacgaggttcgaacaagataatggtaaattaccttgcctacatcctcggccagaaacagccacaattatgactttgagagactttattgatcgagtttaagagattacaacttataccaactgcacaaccaggaagcttaacttctgcaattgtttactatgatggtgatgaacacaaacacagtgtcaccccaattacaacactcaaggctactcactttctctctctctttctttaaactctctctctctctccctgtctatctctctatctgttcagaagtctatgtatcaatgaatgtaaggccctttaaatactgatgttgcagctgagttcaaagtgctcgatcaccaactgtcataacagacagttggttaatatggttaagtttggtaagggcactttaggaatttgatatttggccaactactttaacaattatccaccttggacatatatcaaaaaaattgcagcagtatagagatgaattgcagctgttc

SEQ ID NO: 399259 - DNA, 2087 bp, Cannabis indica
ataacttgcatcttttcccaaaatgtctgatccctttcatttgagacacccgtaggaacacaatatctcctacatgaaattccagatttctgcgctttggatctgcataactcttttacctactctgagaggtaagcattctagccttaatcttttctatggcctcattagtccgttgcactgattctggacctaagtatctcttttctcccgtttcatcccaatgaataggagacctacacttcctaccattcaaaaactcatagggagccatccctattatactctggtaactattattgagagagaattctatcagtggcaggtacttgctccaggagccttcgaaatccactactctagctcataacatgtcttccagtatctgaatatattgttctttcggactgtccattagtatgaggatggaaagctatattgaattttagtttggtacccatagcccgctgaagactctgccagaatttcgaattaaatttcgattctctatccgatataatagactttggaacgccatgtaacctcactatctctttaacatacaaatctgcatactgatccactttaaaggttatttttatcggtagaaaatgtgtagacttcgtgaatcgatctaccacaacccaaattgagtcgtacattcttgtggttctaggtaatccaatcacaaagtacatggtgatgtcctcccacttccactcaggaagtgtcagtggttgcaataaacttgccagtctctgatgttcaaccttgatctgttgacaagttaagcaccgtgatacaaattctaccacatctttcttcattctgtacctcaagtagtagggtttaagatctgtatacatcttggtagttcccggatgtaacgaatatggagtggtatgagcttcctcgagaatctcatttctatgttttgcactacttagaatgcaaacccttgttttaaataatagcattccactatttgaaaccataaaatctttggcttgatcagctaaaacctcttctcgaatcttcactaattccaaatcagcagagtagctttaatttgttctaacagatcagattgcagtgtcaaattataaagtttgcctacaacaaacttgatgctagatctaaccatgttttctgctagctgaggtgaaatattaatcatattagttatctgcccgggatccttcctactcagggcatcagccacaatattggccttcccaagatggtaaaggatttcacagtcataatccttaactagatccagccaatgcctctatctcatattcaaatccttataggtaaagaaatacttgaggctcttgtggttagtataaatctcacatttctctccgtagagataatgccgccaaatcttcaaagcaaataccaccgtggcgagttctaaatcatgagttggatatcgttgctaatattctttcaactatcgataggcataagcgatgactcgattagcctgcatcagtacacaccccagaccttgtctggatgtgtcacagtacactatgaacttttccttatcagaaggtagggcgaaggcgggagccgtgattaatctctatttcagctcttgaaagcttatttcacacttgtctatccacaaaaattgctaattcttcttagtgagttcggttaagggtgttgaaatcttagagaatctctaggaactagtctagcttaaaaagttcttctcaggacatggtgttgttcctggaatggacaaagcgctgcttttactttgtgacaacactggtgcaatcgccaatagtaaagagcctcaaagccacaagagaagcaaacacatagagtggaaataccacatcatcaatgaaaatgtggcaagaggaaatgtactggtggagaaagttgatactaaagacaacttagttgatccattcaccaaagttttcactgtaacaacatttgaaaagcacagactgaatctgggattaataatgtaacgattatttatgttagtgcaagtgggagtttgttgggctttgtgccctaataaaaactcatttcaatgtaatcttttatattcatttatc

SEQ ID NO: 399260 - DNA, 983 bp, Cannabis indica
attgagcaccattttgaacaactcttcaccagccaaaaccctgagcaagaaatcattaataatgtcctttctggcctcaccaattgcctctctgaagccgaatttaattctctcagtcttccttataatgattctgaaattaagagagcagctttccaacttgctagtgacaaagctcctgggtctgatggctacaatggctctttcttccaaaaaaactggcatattgtgggcactgatgtccttgaagctgccaaagggtttttaaatggagatgctaacattgaggccattaaccacacggtcatagtgctcattcccaaactctcccaccctcaaatggtgactgattatcgacccatcagcctctgttcgactctctacaaaattatctctagagtccttgtcaaccgtcttaaacctatccttagccgcattatttcccccgcccaaagtgctttcctccctcaccgcttaatctcagataacattatcatcgggcaggaaatcttccatgctttatctcatcggacatctgggcgacatggttggatggccatcaagttggatatggctaaagccttcgatcgcgttgaatggaatttcatcaagcagatcatgaccaagttaaactttcctcatcgcttcatcaatttggtaatggcctgcatttcaacagtttctttctcattttctattaatcagcaggtcctaggcagagtaactccttctagaggcatccgtcaaggcgaccctctttcaccctatctcttccttctctgctcagaaggtctttcgtctctcatctcccagaagactttagccactaactctcgtaacaatggtctaggtctcaagattgctcgcaatgcaccaattatttcccaccttttcttcgctgacgacagtctcctcttcagtccagcctcatccagatccgctaacactatcaaggaagttttgcatgcttattgttcggcatc

SEQ ID NO: 399261 - DNA, 1136 bp, Cannabis indica
ttcctaacttaatttataaaattctgtcctctcataaagatgtggcctactctcatgagacacttgagcctcccctcactggcaccatcttccaaccctcgaagtactttgatggagcttttcccaagcgtcctaaagctggtgctgctggtgccagttcgagttctgctcctgcagatgtccaggaggtcaagcatgaggttcaacaggtgaacaatcgtcttgctgccatggaggaggttcagcaagagatgtccaagcagttgtcctcattaatcaagatctatggggcataagtttctctttcattttcatattttttggttgggcatattctcatgtttttaatttcttgcttctcaactctttttccagagggagttgcgtttgatacttgtgattaactttggattaaaagttagcttgtttttttgttatttcggttttcgattgtgtttctcagggggagtttttgtttgttcttgctaacttttctttgtaggtacttctttgttaaaaaaatatattgattatctaaagtgtcaaagggggagattgtaaagtcttttcttggcaatttagataccaaaatattttttatttatggtgaaatttatttgtgctttcaatccaattttattacctttattattcggttttattactcttttttatcttaggaaagattgattttttagttggctttttcttgtatggaaacttcttgtaagagaagaaattctcttatagaaagttggtttttaaaggaaactttgactattattattttccttagtaagtttgattgtgtcttgataagatcagatcatatactcgttttatggtaggtattaagacccactacaagatcagaatcgtttttggcaaatttccttttctggtctgatttgctgtgtcagaatctagttctgatgctgcaaatcaagtttttcttaggaaagtttggtacaactgtagattcgactttgtggctgtctctagggtgtctttgttctataaatagaacatagagagcagccattcgaatcaactcatctagatttcattttttgcatttttcttatttgtgaagagagagttatttttgtgagaacctaattgttcatctaggttct

SEQ ID NO: 399262 - DNA, 500 bp, Cannabis indica
ttgctactgcaacgggacaacgtcttaattttgggaagtgttctgtcttttttagcactaatacttcatcccatttgcggcaagccatctgtactactctgggcatccatgaagtgactgagcacagtatgtatttggggctctcgagtactattggctggaataaaaatgtcatcttcggctatttgcgggacaaagttcagaagcggatctagccttgggacaataaatttctatctcgtgtaggaaaggaagttcttattaaatcagttgttcaatctctcccagcctatacaatgaatgtgtttctcattcctatcggaatttgtcaggacattgagcgagctattgccaagttttggtggaggtcaaacaagaataaaggcatacactggctaagctgggacaagctcacgaaacacaagagcaatgggggtatgggatttcgagatttaagggacttcattttagctctactagctaagcaaggatggaggctt

SEQ ID NO: 399263 - DNA, 1574 bp, Cannabis indica
ttgtaaaataaaaataactaattgataatgttaaaaaatagagctttttgatatatgccctagggtcttctctttatgtaaataacttatattcgaaaaatttataattctcttactattaaatagaacgatttaattttctaaaaaaataaaaataaaaggatttaatggtaactaatcaagaaaaccaatgatatttttgtattttactttaagaaagcccaaaaataacattctctctttttatagttatatatagattatatattatagagtaatttgaggcataaatacttaagtttaactcccagttgtaaataaatacctaagtttaatttttggcggtaataatacttaagttataattctggaacttttgtaggtacatgactgttaattgttaagtaaattgccacgtggcaattcctaattggtccaagtcattaaaattttatttttttttaaataaattaattaaaatataccaataagaaaatgacacgtggataatgacgtaatattttaacggttaggttataaataaaaaattttagttgtttgatcccttcttcgtcaaaaaggtttgataaagtgttataacgattcgacccctctctcgttaaaaaggtttggtcagggagttataacggttcgactccactttcgtcaaagaggtttagtcgagaaccgttgaatttcaaaaagaatttgaaatgacgggtttgcattagacaatgtattttcagatgaatttcggttaatcatacataaatatcccttaagtaatttttaaagaataaaactttgtaattacttagtatagatgattctctttattcataactgaagtttaaagtttacatctataatgcgagttacatcatttatttattgatagtagggtcgcaaatgttctacgttccagtagttctttattaacgagccatcaagtcgatccaatttacaaactttgactccaactactgcttcgatgacatatgtaccctcccaattcgggttgaacactcctgcagatgcgtctcttgtatttgcaaagcttcttgatagtatcctttaaggctttattaacggcttctacttgtccatttgtctgaggtctggatactgacgagaagcttttgataattttattcctctcgcagaattcagtgaacaagtcgccatcaaattggttccatttctggatactatcttcatgggaattccaaacctacagacaattttcttgacaacaaagtcaagaactttcttgtaggttatggagatgaggggctcggccttcgtccatttagtgaagaagtcgactgctactatcgcatacttagctcctcctcgcccaatgggtaatgccccaattaggtcgatcccccatatagcaaatgggtaggtcgagatcatcattctaagttctgttggcggtacgcgaggtatatgtgaaaaagtctacacttatcacatttcttaacaaactcgtgtgtgtccttatttatcgttagccagtaatatccttgcctaatgatctttttagacagactttgccaacccacatgatc

SEQ ID NO: 399264 - DNA, 786 bp, Cannabis indica
ataaccatcaaaggcaatgcctgcatcacctctttcctttcccttctctctgttcaattttgccttcagtgccctacattcatctctgaaatgtccttctttcttgcagtagtaacactattttctttgcttggattttgtctttgatttgtacccttgattgtgtccattattctgattgttcttataatttgtcttgttgtatccacccttagagtcttttgattcatttcagcctttgacaaataggctgtctagaacaccatgatcacatcattcttttctgtatctccttggaattgagtgctgccttgacctctgtcatggtcaaggtctctttgccatagaggatagtgtccacaaagtgttcatatataggatttaggtagtgagatgagcaacaagataccttgatcctcatcttctattttcacacctatgttgctgagatccaagatgattcggttgaactcatcaagattctttctgagttctcttgaattccatcttgagagagtatagtttcttctgcaaatagagtttgttagcaagggatgtcttcaagtaaatcgaggcaagtttctcccataatcccgaagctatttcctcatttgacacttctctcaacacttcatctcccaagctcagcaggatggcactatgtgcatttgttttgatttctttaatcttcttcttgtcatctcccaactccttcaatttcttccttgtcaatggcttgtatacaccctgaggaaccagaaatgctttcatcttaatcctccacag

SEQ ID NO: 399265 - DNA, 693 bp, Cannabis indica
actaatgcagcttatcaacattgaagcacaaggtactttaacaaaagagtcaagaaaaggctctttaatgttggagatttggtgttaagatgtgtatttgcaaacacgcgagatccgattgcaggtgtatttaccccaaactggaaaggtccttatgttattaatgaagtagtgggaatcagggtttataaattagctcggcttagcagctcgctaataaagaactattggaatagtgaatatttgtgaccttattaccaataaatacaaaatgtaaatgctgtatttatctctgtaatagttaaattcttattatgaataaagttgaagttttttcaagtaattacaaagtttatcttcttcaaaattacttggaggcatactaactagaattcatctagaaatacatattatgttgcaaacccaaaaaactaattttttttccacaaaagaaaggataattgattaaaattgtccatggacaataaaaagtcaaagaattgaaaaaccttttctttagaaaggaaagtaaaaaatagcagttgtaaacgagatcaaatcataaaataacataaagttatgtgcaagttgaatacttaacgactcgcattatattggcatgtattatgaacgaggcacaagaataccttgaaaaataatacttaagctaaaatatgaatagaagacctaact

SEQ ID NO: 399266 - DNA, 781 bp, Cannabis indica
gagattaaatatagggaaaaaaagaagaagaatatgccgctaaaaatatttatctatatctatacatcactcttaatgggtattacccattcatgagtaatattgtgaaattttaagtttttatacttatttttctatctaataaaaaaaattcttatttttacattatatgagttagagttgttccatcggctggaaaaaaattaagaaaaaaagttttttgacaaaaaaaatattgagcttgacttaagtattttgtatataaacatattttttatatagtataaaaatgacatttttttgatttttttaattaagtagctaaattaaggatagaaatttaaatttcttttttattattcatcatttgatcaaaatctaataatctaatattttgaaaattaatattttagttaaattgtttagtaaccatgaatgggtaatatccatttagaagtattccatacatataaaggagaagtataaggcggtgacgtggcggtctaaaatctctctaaaattatttttttcttctctccttaattctctcattttaaatattttattatagcataaatctacaaattgatattttacaattattttaataaattttccataaaaaaatatctagcataaattaagtattttttttaaaaaaaaatactattgttgaccgaggtttttagcaaccagttaaatattatatagggctattttcaaaaatatgggaaaattattaaggttatgataaatatggcataaaaagtaaatgccacta

SEQ ID NO: 399267 - DNA, 998 bp, Cannabis indica
atgtttattttaatctataggtaactctttaagcttgcatatattcaccactaccaaaggaaaatcttatggttgtatgtatctttctcctctagttcactgtttcggaattaaaatgagcaacaaaatcaaagattactataataaaatcttttataaagacaagtgagactaattctccttgtaattgattccttcttcaagatgaacctctttgcaatgagtcttgttttatatctttatgtttctctatgttacctagtgagtatttatttgtgaaaagctttgcgtaatgttctccacccccattaggaaactttactgaaaatagaattcattgctctgtaggatatttatttctttattcatggaaaattgtaccacaattttaattctttacattccacattttaatttgtgtcgcaaactattgttgtagttgaactcttattgtacataatgtaatcactaaaaattattgattttgttgttctaataagtcatcttaaggatgaatcaacaaactctcttaaagaataaatgattcaacatgtatgttgtttagcaatttgtaagcaactactaaagaatctgatctattagaatgttatcaatgacatgtggattttcaattattaactgtggattctcaataactattaaatttaagggttgttgtgaatcatagtcaatctaatacttcaggtaaaactttaaaaatatgaataatatttttcaaaaaatatgttcctagattgatcactcccattaatcaagtcaatttttatgtgacagtcagtagtctcgtgatccgtaaggggaaatactgggtaacttgtgcaatcccacatcgcctacggaaggtcaagtgtgatgattttgagactgtgtagatatgagactacacagttgaagatgacttatatgaattgattggtactacctatatcaacaaggtgcattttgttttctggtagctgttgcgaaaattattaatt

SEQ ID NO: 399268 - DNA, 1650 bp, Cannabis indica
tttttacttttttcttttttgaaatttgcaacttcattagaaatcaacattaagtacaaattacataacactcaaatttggaatacaacaataaagccctcctagcaagattataagcttatacatttgaatctctagaaatatggaagagggaaacattaggaaaaatttgcttatccgattctgatgccgtccgtctagtttttcataataacaaagatttataaagtcagagaagttaaatttacaactttgcatttttcattttccgcttactcggaaattataaagagtttcgagtctctcatttctgcaaaatagcaatatctccaaaaactagtgaccagttttgcctgaacacagaaactgattaagtgatgtcaaaatattacttaggcatcttaaagtatatctcttagacgtttttacacttacccagcgtccaggttaacgtcatatgtcagcctgagcgctgggtcatgaactgcctttagtaaaatagctataaatcactcaattttgatccgattcacgcgattcagcttatgttttgaagctaattcaatgctttatcaagtcatgtctcacacttcaatcgtaattttgaagctatcattgtcaaaatttacccccaagagagttacgaaaataagctctaggctacccgtagtgggacccgctccgaaaaatggccatcaccaccaagagctaatttttaccgttagatcatcacaacggtcaaaaatatcttacttatattttttcctattttttgggcttccttcacctttaaaaggagagctccataagctcattttacacattcagaaaactacccactaggtgagagcttctctcttgtttttctctccgaaaattggagcttttgacacttagcttttttctgtaattaccatatcccatgagaaataaaaaagttgaagtagatgtagctccattactgtcgcgatacagggagtgaactactataaatttattgtgtctcttataattacttaactacttattcattctcgtcaatctaacgagcgactgtgattaaaagtttagtctaaatttttgagtcaacaaatattactaatttttgtaaacttacatttcatttagttttagacatactttatttagttttttaagtataatataaatttgagttttataatatagttcagattatatttgttgatctcgcttttagccaacgacaatgagtcaaaataaagcgattaagaataattaaataacaaaaaataaatagtttaaagtaaagaaaataggggttttttcattagtgtacaacaaaaacaattatattacaaaaaatgtacaaaaaaacacaattttaaaaatgtacacatttgaaaatatatttacaaaaattcatacatatttttaattaaattataatagatgtattaatgattcaactttctatatttagatttgtataactattttttatgactaattgatatggtattaatgagtaagcctactaattaacaaaatttatatattaataattaaaaaacataataagattctaattataaacaataatatttaaaatatacagatgtaatattttaaatataagataaaaaaataattaacgattaaaaataataa

SEQ ID NO: 399269 - DNA, 1153 bp, Cannabis indica
ttttttttttttttgatgtttataagaaatgtttgattgattgattttaattagtctaactttgaactagaaaaaaaaaatatcacttggaaaaaaatacttaatttcaatgtaggtaatacttagggataaaatatatgctatatgtatacctaacaataatgtgtgatgtttgccaaaatatgaaaatacaataatatctcaattaattagtacctacaaagtcaatgcatttggttttgtaaatataaataaaatagcgtgtttacacattcggtaccctgtattttatttaaatacaaatttagtaccttgtatttttaataatacttatttagtactttgtattttaaaatcgtacctatttatttagtaccataaattcaattttttctgataaaattttattaatacaattaacagtctaaaatttaattttgaattcaaatttaattatttgattatatataagtgagaattgtttggttaaattgataaaattgtattaattaaattttattttagggtaacaaatatgtaaaatttaaaaatatgaggtatcaattaagtattattaaaaatacaaggtaccaaatatatttttcataaaaacataaggtactaaatgagtatattcccatataaatatatttatgtatgtatatcaaaattagattacaaaatggagtaaaataaattctatttttattagagaaacacttaaaattaatagacattgaagggtatatgaaaataggtttcattccatttattcaattgttcttcttcttttcatcaaaatatattcaatgttattttattttatttatttatttttgttattagtaatttattgaagggggcatcactaaatattagattaaaaaaattcttctaaggaaagagtccgtaaaaatataaaaagaaaagggaatttttacaccacatactgaaacttttaatttttttactttttcaatgtgggacggaatttttttcaaaaatactgtgttttctttttcaaaaatactgtgtaatgtgttaaattttcacggttgttccaatattgttttaattattctgtttcgttgttttattgttgttttataaaaagacagtatttttgtaaaaaaattcgtgtgacagtaaaatt

SEQ ID NO: 399270 - DNA, 861 bp, Cannabis indica
tgtaactcggaatagaactacccgaataattacgattatcatataaccatgaagtttgagcaaaaggatgagcaacacgattggcagatatttgagatagcaacattaattgatttttggtaacttatacaaaaaaaaaaaaaattgattttgggtaaaaattgtaaaatttgaaaaaaaaattctactttgattttcttttttatttaaattttaacatgtaccaattatgttttctgaacttggcagacttcttaaaattttcctaaataatcgaaaattttgaatttaaagatttatgttcaattccattaaaattttaaaataaaaatctaatatagtgattgtccatttattaaattgtgccaattgaactttgatatttaccaataattcttaaattttgatatctattaaattgtgcgatccaaactttcgtccacatcagacacccattagtaaaatagaacagaagttattacatccaacaatagttcgaagagaaattttaatctttttgtaaaacaatcgtaaaacaaccaaatagaataattaaaaacaacagtaaaacaactaaaaataatagtggaataacaacgaaaacttacacagtacacagtataaaaaatacatagtatttttgaaaaaaatttcacaccacaataaaaaaaaaaaaaaaatgagaaattttagtacatagtgtaaaaactctaatttttaatgacctaaaatatttaagagacacaatttcatacatgtaaaagtttagaggtacaaattctaattaatctttaaaaaattactaattatacctatataacatattattttaaactttatttttgacactaaaaattattt

SEQ ID NO: 399271 - DNA, 544 bp, Cannabis indica
ctcgatagtattaattagtcttttagttgtcatgtttggctctacatttactgattatcgatgggttctccggaaggtctctataagtattgattgcagttgttcaaagattatagaaattaatgataatttcttttatttatgtatgattgattatcgacatattatcgataggttctcgatagtattaattagtcttttagttgtcatgtttggccctacgtttactgattatcgatgggttctcgacaggttctctataagtattgattgcagttgttcaaaggttatggaaattaatgataatatcttttaatttatgtatgcttgattattgatatattgtcgataggttctcgatagtattaattagtcttttagttgtcatgtttggtcagtatttactaattatcgatgggttctcggcgggttcttgaaaggatttagtattttttatcatgttttctcttacgttttttttaattattgtattgtttatcttttacagatggctccaaagcttattatgttgggttttatgccc

SEQ ID NO: 399272 - DNA, 505 bp, Cannabis indica
cgtcactagatgaagatgggtcatcacggaggtggggatgatcttcgtacaaaatttgaagcaagtcctggttaatatgatgcttgcctccccagaaatcactagggttcatctacaaaaggtgggagacaagagaataagagttggtcggggtaacgaatgaaaacatattgcatatgccgacgaggcctgattaagaatcaaaataaacgatttcacccagagttggagtttccagtcctagaagttctaaactccaattggaacctgatatttgtcgaaaccttatgagcgaaggggaatgaacaatttatggccaaaatcgaagcacagtcagataattaggcgtcatggttaaacatcggttaaatttccaaaccctaaaactagttgatctacaattaaccaatgacagttcaagaacaggcaaatctataataaagaattcggaaataatgcatacactacattggaatcatctaaaagaaagggagactgacttact

SEQ ID NO: 399273 - DNA, 909 bp, Cannabis indica
gaggttatattattattattttgaaataatagttattggatggattcacttatggcgcgtttatcaaactttagctagaattataataattaataggacaaatgaattgatttaaaatagaaaataatcggaaacaatattttattatactatttactacactgtttagaaaaaaaaaacctaaaatcatattattttgtttacataactaaaaaagtaatcataatgttttaatttgacaaaaattgtcattattagaacatgtaaacaagaatcatattatttctatttatagatttttaaaggataaatttatcttttttatttttaattaataaaattaaaattaaaataaactaagacagacaagaaaaaaatattccctaaaaaaatgggggagaacttttttttttttgttttcttccctaatttgtgtgggccacactacctttttcgtttctaaaattttataaacaattgtttgaatcaatatcatatcattaattctcatttcctttaattaaacatgccattaattatggcattgaagcatcatttggttcaccattatatatgaacattgctattaggcaccagtggtacctagtaccttctcgacatgtcgctagcgattagctagcgatattccctaaaaactattatattaaatatgggacatgatacttagttggaccaataacgatattaacatgtaggaaggtgctaggcaccactggtgccctttagcatttctcattatatatttgttaattatttactacgttgttgatttcttacatatattagacactttatgataggttttttttgaaagaacagattgttcattaagcgaaaaaggtgatgggaatcacagggggattgccctccccttgatacaaaacagcc

SEQ ID NO: 399274 - DNA, 1202 bp, Cannabis indica
ttttatatatcgcgaggggttatccacttctctttatcttcttgttttgtagatattttgtggagcattttgatatgttaatgagttggtgtgtagcttttaatgttacaaggtaaagatccagttttttggtatgctgtttgacaacgttataactttattgtctaaattttcgggggcagtttgtctcatgttgctcgcttactttagcagttcatggtttgacaagcatgcctttcggttagacgatgagctatcttggttcgaagaggttcctgcacagtttgcagatatctatatcgtaaattcatgtgtgattctaatcactacgtaaaaaaaaaaatatatatataaaaacataataaaaaagtaatttaattaattgaaaaataaacaaatataaatattaaaattaaaaaaaaatcaaaactttttcagcttaaaacaaacaaatttttttaatatttatatttatatcgtacgtgataatgtgaaactaatatatatggatttatttcttcccaatctcagtaatttggtagcgttatgagtatggatcttggataatctttgttggcggggtaacgattttgattgagagagcacttaaggaaatgagaagaaaaataagtctgcatatttattttttactaattttatttactataaaggtaaataaccattaaaaaaagttatggagatgatggatgataccaatcgatgagaaagaaatagatagatttgacacgtgggtgtgtaatattataaaaaataaaaatacattgataatatttaattttaattttcatacataatggagcatcttacagttagtgatggcaaaaaactccctatcactcataatttttctttaccctcgaataccactcctgttcaattaaattatgtcagcaaagttcttaaaataataaaaaatcttgttagtgtgtgtcaacttactaaagataattatttttgggaaatttgattttttatgcttacatttggttaaatttttttttctaaacaaataataactaatatttgtaagatatgacaacttttatgatattcctaaaatacccctatttacatcaccccatttacaccatcggaccacccatcggaccaccccatcgggccaccatcggaccacccatcgggccacctatcgggccacccatcggacccatcggaccacc

SEQ ID NO: 399275 - DNA, 690 bp, Cannabis indica
caaataaaagaggttatttttcaacatatccctaaatagactaggtctgtacctagggcctgcctagccctagcccaaggaaaccaaaaaaaactcccttagtaaaattatgttatttttcttacttaaattttaaaaactaacacattttttttttaataggagctcaaaaaataattttttttcctatatctcactaaatttcagtgccgtccctattcaaatatgtcataatttcataatattagttctaaataatcagtaatggcagatgatattgttctcaacatataaagaaagaaaaaattttcctttaataaatgaagccagccaggctgtgttgaaagcctaaatagccatggtgaaattttagccacatttaagcttgttctttttcctttttcttttatgttaataatcttctcatttttgcacatgaacatttatttcagtgtatgaacttcacatgggtcttaaagagtataccctgcacccaactgtgccatattcaatgcactcagataaaaagacatggacactaaatggagaagtttgaactcactactgttatggattcatatgtcacttttgttatgaattataagaataaggtaaataaacaattctgagttactttgaaaatattcttggaagaaaaaacatgtggtattggttaatggtcatgttttg

SEQ ID NO: 399276 - DNA, 879 bp, Cannabis indica
agtaaagtaaactagcatcagatttattagctatacatctgactagaccgatatttacagcggaagagatatcgtaaacttaccataacatcttttgtaggtaaagctctaatagttgatcttagatcaatgatattaattctgagataattaggttttgtcttaattgtattattcttgttctttaatttttttgaagcctaccagtagatttggctcaatacttacatcttgagaatagggtagtacaattgagtgggagcgctagtcattgatacagaatctataacttctataagtacatagaagtgaaatggtagttttcttagagcttggctaaatacatttaaatgattgagtcctcattttggtaattatattagtttcctaaaatatcatttacaagtagctaagtgttttaaggatgaaatacattgaaggataaaatggtataagtccctactcaatgtagacctatagaggatgattgattatttaaatttaaataatgaataactaatagcgtatatattcctagagaatagagcattttatgtaatcgggagtgtaattttgaatctatagtggagtatgaggaattaataagttagaaaatttactcagtaaatttcaagatctacttattaagagcttggttacatagtccatggtccccatactgtctgagataatatcatcttatagacactacaaaaaatcttacttttagtcacaacaaaatttgtgactaaaagtaaaaaagttgcgactaattataaattattattcctatgttgtgactaaaaggtccgtagctaaaggtattagtcacatgcaaaaattacaatttgttgtgactaaatgtatttttagtcacaa

SEQ ID NO: 399277 - DNA, 794 bp, Cannabis indica
aatatgtggccctcccaaaataattaggatgtcctctccttcacaggaatagcttgtaacctttggttgtttaggttattaggctgacggggttggttgtatccctggcactgtcttttcacatactgcttaaaatggcctcgagcgatgagaatctctatctcatctttcaattggcaacattcgtcggtcgtatgcccattatctttatgaaatttacaatatttgttaggatctcttttgctccttgaattcctcataggctcgggtttgccaaaggctaccttcacctcatgtgcgaggtaaatattttcttgagttttattaagcttggtataaatagtatacagtggcacgtatttgtcatgcttcttttgtttctttctatccttcgaaagttctcaaattctgtcttttcttttcgaaccaaaagcccccgagttatcaattctcgtggaagcagtccctgttgagacattgctgggtttacctcccgagcttgtttttaagaagttcatttccttccaggcttctaccttccacacaaacacttgagccctcttgttgaactcagtgatgtttgttatcgggcgtccttgtaaatcatcccacaactcgcccccagcggttaatggataagtggagatccttgcctgaaggactgtaagttgtgtgttgtcatccaagtttctaaccctagcgacagccgtgctaaaatgacttaaatatgccttaagtgtctcgtcaagctgctgctttatgttggttagtgaggctgcttcgggtcgcctatc

SEQ ID NO: 399278 - DNA, 901 bp, Cannabis indica
ggccgacctgaacggaaagtctcttgttggatggataccctaatcacatgatgaaatcggctaaatcacatcctcgaaaccttaatccgggaaacccaaacctataaatctaggctctgttatatttactaaggatttacactaactcagaaaaatagggaaacacccaactaaggcactgaaatgatcgagaattgagaaaaatgagttgctcggggaatctgccaaaatcggctaaccggttttacaggccctggcaaaccagttagccggtttgcaccaagttttccccaacaactcatttcttgctcaaaactcttccaaatgccaccaaaccttctagagtacctaaacaatgcatatacaacataatccaaccactaattcacagaaaaactcaatgaaactcaacataccattaatgacctaaactttgagttcaaagctcaaacttgagcaattccatccccatacaccaaaactaacatccacagcttaaaatcaactcaaataaagcttacaattcgaaccataatctactctaaccctaacagccctaatttccaaaatcacaagttaacatcaaactttaaagctcaaacactactaaacaaaggtactaaggcttaccttggcttcaagaacacttgaatccctgctgaatttccagaaaaatgggtgaagcttgattatttcccctggttttctagttggttgaacaaagagagagagaagggaaaaagatgaactttctaattttggttttctttgatttttctcaaaatggaaaaatcgattttctaacttagtccttgctgaaaaaaataaaaggccaagtgtcacactctagggcagcaaccaaaccatctcccttggcaaaagactaaaatgccctttaatt

SEQ ID NO: 399279 - DNA, 1118 bp, Cannabis indica
tttccacattcggggatgtccagttgaggcaatgccttataggtcacatgaaaataaattcgactccaaaatagttagcaaatacttcattggttattttgagcgatctaggggctataagttttatgataccactgttataaatatttttgagacgagaactacaacattttttgaggatgttgaatttgggggagaaataaggttagagacatttcttttgaggaggaattaaattcaaactcagttcctactatcattctagacaatgttaaggcttccacacctatcattgatcaagaaatgaatctcgaacttaaacaacacaatattgaataactcacaaataaagatgaggctattgttccagaagaacaaattcaacaccctaaagatcaagagccattaaggaggtccacaagagagagaagaaatgctatttcagatgactattttgtatttcttcaagaacatgcggatgaaatttgaatgatggaagatgatacaatcaacttgcattaggccatgaaaatttataactctcaaaagtggattgatgcaatgaatgaagagaatatgtctatgcaaggcaataaagtttggggagttgtcccattaccagaaggtgtaaaaccaattggtcgcaaatggatacttaaaaccaagaaggacgaatatggtaatgtggtgtgatttcaggcacgtcttgtagcaaaaggctatactccatgtttatttagatagacgcttgtctattctttccttttgtttctcataaggctccttgtatactggctcccgctgaaggctagtgttctcgggaattagcttatgttctcccagtttggcagtcgtacatagcaatcgcccatcgcgatcttgaacaggcaagctacctagaacttcaccaatttctctgggagtagggtctcgaacaggtcgagctggcctatctacaatcaataaaaagcaaacataagcgaccttgcaagctaataaaaatatactaagtgttgagatacgcgacgtactaggtcgacgattgaagtgttggatatattttcccaggatctagatttactaacaagtatgtttcattaaacatcctaatatgaatt

SEQ ID NO: 399280 - DNA, 813 bp, Cannabis indica
tttacttgctaactgaatcattaatgtccatcagttatgatatgttttattattagagttagtcccacattactaacatgtgaaaataaattaccgatgaatgaggtactcttcccattatcaattggttttgagattgtaccttattccaaattcgtgatccaaattctaaaagttatgaaatgggagaaagcaaaaaatttgacaaccttaaatttgaacttttattgttgagaatgaatcgaaatattttcttgctcaggccacgtgaacagcaactgcatgtagataattttatacactaaagaatgcttattttaggtcatgttgctcatacagcttttttatgatcctatcctttttgtctgtgtattgttaccggagtttacatccttcgcttgaccattttcatatgtgttttcttaggtctgttgattcactagactcaggcatttatgcagagatcaggacgaggataccagagacaatatcatgggattacaattttgaacctacagggagcacaccactcacgtttactgttaaggtgcatcttccttttctgaatatgtagtggtcacctagacaaactaattttgtttgtcttaaaatcagactgaaaacatgttaggcattaggattagtggggtgtgctagcatatagtaaataataagggtatatgagtctttgtttgggaggaagtattgagtgaaaaattactatatatattaaagtaatgtttgaaagagagtatgaaatgaattgagtaaaactctttgcatcaatgcctgagtctagtgaatcaacagacc

SEQ ID NO: 399281 - DNA, 648 bp, Cannabis indica
aaaaaaaaaaaaaaagaactacttaataacatttgttaatattcttttttttggataactattagcttccgaagaaaatggtaagagtgtataagtaaatgttcttcagcctactacaatggtgggctcaaatccaatgctgaccgttaagcccggtagtgatcgcttggattttggttaggatatgaatgtttgggcttaaataatgtttggcatttaaaaagggataattagaccaagtattgaaatttttaattgttttacttttatattgtggggtaaatttttttttcaaaaatactgtattttttatttttttcaaaaatactgtataagtttatactgtgtactgtgttaagttttcactgttgttctactgttatttttagtcgttctgtattgtgttctactgatgttttataaaaacatagtatttttgaaaagatttccgtgtgacagtatttttgtgaaaaattactccaaattctaatatttttataagggtgcgtttggaagtaactgtgtaattactaggtagggtaattactagggtagtaattatacagtgtagtaattacactatattttaaaatgtaaagtgtgtttggatatgaggtggtaattacatatgaattcctaatatcttgt

SEQ ID NO: 399282 - DNA, 655 bp, Cannabis indica
agagtttggtagaactctcgaaggtgctttggcatttctgagctagggtttgctcagcttgccttgtttttgttcaaagcagaacgacaaatcattttggctaaaacaatttgtcgtgcaggaggaaacgacttgagttcttggtcatttagttaattccgtgtattaatttttctgggacagttttgttcctgtcgttttttatcattattgagttggtgtaggggcattcttggaaatcacaagaaaaatcctacagctctcatggatggtatgggaggtatgtgttttattgcctttgatgctctaaataaatactagattttggctataatgattatggattattatttggtttatgcttttaaatgctcataattgtttttcaacaacatgaatattcccaaacactcttttattggctaaacaagacaagttgaaaacatgtgataggctacataagattgggatagcaatgtcccccaaatttgtttgatttgtgaacttgacagtgaggatgtgagtcatctctttttttttcttgagcttataatagccatacttatataagccaaatcaatataaggattaagatcgaacctaaccatatcaagattaagatcgaagcttgtgataggcttaactaacaaatcaa

SEQ ID NO: 399283 - DNA, 744 bp, Cannabis indica
aaaggacaaggccaagctattgcgatcgcgtgttgaggaattgactcgcaatcttgagactgaaagagagaatgagaagaaacagtacgatcatgatgtttctgactacatttacatgacttttatccaagttgcctgaattcgacttcacagtccttggagcggaagccgctgaaatagccgagggttctcgtgctatgtcgcctaccccaactcacagatgtgggggaaacattttcccttaggaggccgagaatgcggatgcagaggaagtcgatgatggtgctgcaagcaaggtcgcagacgattccatgactctagcttctttaatttcctaagtattattttgctattatcaaactttaatttttttttgttagcggtacacgggtactcacgcataatttcaagatattttacttttgcaaacttattaagcggtacatgggtactcgcataatttaagcttgtcttttgatatttgtctctaccgtttctattcgcaatatttttatcattacagcttggtgtaataacttagaagtataaaacttgtgaagaagataaaaatttctaaaaactttgaaaatttcattattataataatcaatagtacaatataaggttatacccctatacttagtacatttattgaaataaattgactaagtataaatatatgcgagtactattgaaagtaatactttaagctttcgccattccaagctctcttgatcattgtac

SEQ ID NO: 399284 - DNA, 928 bp, Cannabis indica
acactcgcaacccagaccaggatgtagacactaacaaggactcgaacctaaacccagacaaagatagggatggagtcctggacctgaacccagaccgcgacctggactaaaaccaagactcaggacctgaacccgaacttggaaccagactaggacctaggaaccggacttggatggggcacgtagaccaaggacctaggccccgaaacccagaccttgatctaaattcgagacttcaacctgaacaaggacctgacctggatcgtggaatatgaagtcggaccaagacctggacatgaaatctgccccggacccaaactaggacaggaacctggacacgaacacataccaggaccaaacccaaaaccgaaccaaaactcagacacagacccagaatcagacccaaacatagacctgcaccaggacccgaactcgaacccagaccaggatcagaacccaggacttagaccaagaactaaactcagactcagatcgagatcaaaacctgggactcggaccagaaccttgaccaagacccaggaccctaacccactcccggagcctgattcagacctagaccgagatctggacccaaacacaaactcaaactaggactcgaaccctgacccaaactcgaacccaaactcaaactcggaatcgcaactggaactggaactggactaggactaggaccaggaccaagattaagacacagaccagagcccaaacccgaccgagacttaagcccgaacctcgactaggacccaaacccgaacatagaatgggacccaaatcgggacctggacccagaatcgagatacggacttgggccttaaaataatgacaaaaatcaactttaaatacactcaataggtggtcgaccatacctttaatggattgggccttgcttttgcaattttgcaatttt

SEQ ID NO: 399285 - DNA, 577 bp, Cannabis indica
aatttaattttttgatatgtttgtttttcttagtaaataggtattctaatacaatttattttctggttgttattttgagacctttcaggtagttattcagtgttacaaagctaaatctctagcttttctggtatgttgtttgaggacgttatagttttatcatctaaattcccgaggcaatttcgccccatgtttttgctcacttattgttagcaattcatggtttagcaaagtgcccttcggttagacgaaaagttatcttggttcgatgagagtcctgcgcgaagtttgcaaatagatgcatcgtaaattcttgagtgatactaatcactatgtaaaaaaaaaaaaatagggtgtaattgtagttgtgtggaattctactaatatattattaggatagttttattaatttgtaccttaaaaatttataaaagatactctatttatttaataattatgattatatataaaatataaatctttactttataatagttttttatttattattttttaattcttaaaaaatgtacctataaataaaaaaaaatgtaaatttttaatattatgacaaaaa

SEQ ID NO: 399286 - DNA, 1755 bp, Cannabis indica
tggaggcagtaacaagtcttggtgattgttttcctgagcgaccctctgattctggtcggccatgacatatttttgcacatgcaggttattttttcttatttgaaattcaatttcccgctacagattgttgcattcattagtgtcatggtcgtaatctccatgaaaatggaaaattttggacatgtcccgtttacttatgtccttttaatggaagcaggtttcttgtacggaactgctgactgagtggccatgtagatggtctccaggtcgtcagtcaggacagagaaagcagtgaacttggaaggattctctctgggggtcagttcggctttgcctgcgaactttccctttttcctattgccttgtatgtcgttgttgttagatcttttaccgcctaaatttgaactactagggtactaggggttttggatggacggttctagctgaaggagcttgtggttggcccgatatgggcttgacatctgctcgctgaatggcttcttcgagcttgatgaaaccatctgcgcggtttaggaaatcactcatagagtctacaggaccgctcttcttgatgtctttccacaactctccaagaatctcgatgccccccagtctggcggctaacttcccttcttcagttaaacgtgccacttttgttgccttcatcatgaatctgcttatgtaagctcggagaggctctcctggtatttgcttcacttcgaccaggtcttctagatgcaatggaagttgacgagaagaagagaattgtgcatgaaactctgatgagaaggctttccaagagttgaacctttctgtgccaacttgaagtaccattgttgtgcggcttctgacagtgtggtaggaaaaactctgcaacacacatcttcttataccccttgcaaatccatttgcatttccaaatacttgagatgtgataagggatcttctttccctgtatacatcttccaggttagcatcttgaacttgagggataattttagaacattgatctcaggagtaaatggggatccgcgtgctcggtccaactcgagatcattgagcttttgacaggccaggccttggaacatatttttcagttcatccaactgtgcttgcatggatggatgaacttgttcggccttttggccgatcagtgccaggtcaggatctctttgaactagatcttgaatgtggatttcgagctgagtggctggttgaacatattgttcgtctaaccctgtccttctattcaggtcatccatgagatcatgagttgttgtcagtctgttgaatactaaaacaccaggttgtctcagtggctggttggtttggccaagcacttggtcagaaccactagtatgagtggaattattggatataactccacctgatgaatttccaaataaggtctggctgcctaccacttggcccataggtggaacctgtgactggggattggacagttgaccgtttaaattttgggcagtatgcccagcaggaatttcttttgagctgaccagggggatgctagcgtaggttcttggttagcaacttggtaggctcttcgtataaatacggtggtctgtcttgttcggtcgtcgatggctgcctgttgagccttcaacgtttccatctctttatccctccatttggcgaactgacgcctttgctcttcgaacacaaggttcaatgcagcacggagctcttcctgatcatgatgcaaggtagtatgaccttgcatgagcccaagagcat

SEQ ID NO: 399287 - DNA, 680 bp, Cannabis indica
ctggtggtaaatcatgtatccaaggaatacgaggggagaaaggatgatagcgtatttgagcaaaatacatgacatgctcgaacaatttaaaagttacgggctctgacaaattccaaaggaagaaaacacaactgcagacgagttagctcgattggcaagcagtaatgtaagtgataaggcgaacttggttcctatccagttcctcgaagagccttgcatcactagcacgtaagaagtcaaaatgattaatacttccctaaactggatgacaccgatagccgcctacctcaaaactagggaactcccagataatcagaatgaagctcaaaagatgagaaggaaggatgcacggtatatcatagtagagggaattatgtacagaagaggattcttggtgccattgctcagatgtgttactcaagaagaagttgcacgactcctatctgaggtgcacgacagattctgctgaaatcataccgctgggcaaagtttatctaagaaaattctaaggcaatgttatttctggccaacgatgaatgaagattcaaaagcatatgttaagaaatgtgacaaatgccagagattttcaaagatacctattgctccgcctaatgagttaactgagatgtaaagtctgtggccctttgccatttggggaattgacctaatcggacaattac

SEQ ID NO: 399288 - DNA, 503 bp, Cannabis indica
caaccgctactcattaatatctttcaacaagttctaaaaaaattgcaatttatggcgaaatttctttatattttaatttttttatacacttaactctctttctattttttttgtggcaaaactcatttatgttttaatttttatacacttaaaacatttatcttttttttgtggcgaaatccccttatgttttaattgttatacacttaactcccttatttttttttttggtggaaaaacactcttatgtttatttttttttttgcgaatttgacaagccagttaaatattaccgttaaatatcagctggatgaccactgtactatatacacctgtgtatatataacagtaaaacctcaaagtcaatacagtagtaatccaattagtatttagcggtaatatttaactaaaactttaaatttacatagaaaagtaaacttacgggggttttgccaccaaaataaaaaataaagaggataaatgtataaaaattaaaacataaa

SEQ ID NO: 399289 - DNA, 568 bp, Cannabis indica
aaaaaaaagtatatcaatgttgaaagtgacgtgggtgttaaccaaatgttatttcttttaacaatattatattaaatttatatttgactagtttaatattatattttaaatgttgaccaaccaataatattattctttttaatattttaccattttttaaatgattttttttataattagctttatgtttcttttatttttttaggattattgatatgttgattttaatttattattattttttgtaagttgatgtctgaatttgtatattaattaaagaggagttgttatccgttgtttgtttgttgttatatagttgttcaaacatgtattaagattgtttgtatgatgtttaattttattatttatttatgtattcaaaagataacattttaaatttatttgatttgtggcaatatatttaagaagtttattttcgttattttatatttttattttgagtttgacgctatattttgataggagttgttatccttttgtttgtttattgttatttagttgttcaagcatgtattaatggtgtttgtgtgttgtgtttatgttgtta

SEQ ID NO: 399290 - DNA, 869 bp, Cannabis indica
catttaacgacatattagcgatactttatcgacatgccaccaaagactcagaaacataatttttcgacattaaacgacatgttagcgatgttgtatcgacatgtaagtaaaaattttaaaattgaacacttttcgatattaaaacgacatattagcgacaattatcgacatataaaactgtacagatttaaaaacaactatgcaactatgtttgtacaattgtaatggagttctgaaaatacaaaaaaattacaacccttgtagctattttaccacgttaagttttgataaaacaagtctacacaccaccgatctctgaacattctcatgttatcatctttaatgttctccaacgatcgattcagcatgaggtgttcgatgtactcaagggcatatagcccgcaatcaccactgaaaaattaacaacaaacacatttagagactaaaatacatttagagagtaatggcaaaggaaataataatatactatattaataattaccttgttttactttggggaaccacctcacttggcatgcgtttagcatgcattgatctgagttggctactgtcccctaagtccacattcagaatgtagttgttcacttgatcgtaatagccagttgacctcagcagatgtggaaacagctgagtccaaggtagcatgatggcatcaaactctgcgttggtggtgcacgataaatcattatcgtacacccgaatctgccacatattatcaacatctacctcaacagcaacccaatgtttttgtcgttggaagtgcaggacgaagtatatgaagttctgatccttccaacatggcatgtaacggctctccatacccagatagtactggttcactgcatctg

SEQ ID NO: 399291 - DNA, 512 bp, Cannabis indica
aaaaaaaaaagaaaaatttataaagatctttcacaagaaatgaaagaaacaatttgttgaagaaaaagagaaatatatgttcaaaaaaaaattgcaacaaataatgtagtttctatggatgaatcatcatcaagcatccaaaatcaatttcatgaggctaataataatacaatgagaacgaagaaagttactaatgtcatgagtaatatttgtgaaacgtctacacaactatcaataatgaatggaggtaattaatttttatttacatacaaagtatttaagtttatatactaagtttttatttgttagtaacgttttcttttttattgtaaattatttagatttagaagataagagtatagaaaagcaaaaaagaaaattgtacaaagatttaccaaagaaaaaaatagataataagtatttattttataatattctttttttgtgtgtgtatgtgtgtataaacagatccaaacaccaaatcatatcccaactcaaaaattagaaaattt

SEQ ID NO: 399292 - DNA, 592 bp, Cannabis indica
aaaatggaaaaaaaaaaaggaaacaacaaatcctcacaaaatctaaaaaataaattctccaatcaaatctgaaaatgccaccttaaaggaaaccgacaaaataattaattaaatgaaaacaagtttcctaaaacaccacaaaaaaataaaagtaaatccccaataaaaattaagaaaacacgatacataaaatacaataaaatcatgtttccataaatgaaaaaataaaagaaaaaaacaacccaaaaaatgaaaaaattacgccctcctttttcttgaattttttcaaaataagccccccatttttatttgcaaagaatgaacaagacaacacacataaagcaccaatcaacactttaaagcaaaaatagtgtctaaaaaaataatgaaacataatacgaaaaataacaaaaattttaagaaagctcaattgacaatgtcggtcacacatatttttcattattttttttaaaaaaaaattccttcatatttttcccaacaaaaagtacagaatgtccgcttgtctttgttcctgattaaaaattaaactcataagaatagtcagaaattattttatcaagctaatgaacta

SEQ ID NO: 399293 - DNA, 555 bp, Cannabis indica
gaagagagcccaacatctaaaatgtcgcaagagtcgatactccagggttgttgaggaggactgccctcaactgagagaggtagattgatatctggagggtgagaggctatgatttggcgattcatctccaaatccaattcttcgtgagaggaggaggcactggaatccatggacaacatggtggaagggtgatgattctccattgaaagagaagtaagtcgtgaatctcccatttcaattcaattccttggagggttttattgctggcggagtcggcggcgggtatatcattgcaattccaaaaataattcaagtaaacaaccttataaacaccttcaacatcaatccccactgtatctcccctccatcaaaagcctagatttacaatcaaataataaatttctcacacccacatcaaaatccagaacaatgaaacaaaatcattataaattggtattataagaacgtaaatgaaagagatccatagagaaagaataattaaactttaaaattaaaaaacaaagtatcgaagaagtagatatcattaaatcaaat

SEQ ID NO: 399294 - DNA, 743 bp, Cannabis indica
gttaaaaggggaagtatcaaaaacgactaaccctgaggagctccttcaaagctccgcccaccaacgcatccagagatgagtcgtcagaaccagccagttgctcaccgacctcaggaaccagccgattcatgtaatgagccatcacccccttgcccttcttggcctcaggcagcacgggcacgggtggagttggtgcctgcacccgctcaggaatcctcctgaccagttcagacccagatgttggtggcccaaactccttagacttggcagatttgggagtggaaggattcacaacagtcagctcctcggaaaggtcaataacctctccaaaaggcctcttctctgaagacccctctccgcccttagacttcttggccggaggggaggcgctagagcttccgctcatcctcttccctaaagcatcgatcatctaccgagacatgtctgcacagaacaaaaacaacgtggttagcacaaaccagcaaaaaatagcatgaaagttaagaagctgaaaaagaagtaaagcgcagaatgactgcccgcccagaaagtcagaagtccatcatgttggatatacattttaccaggatctagatttactaacaagtatgtttcattaacaccctaattcactcaaggatttcgaaaattaagaagaaaagaagagggaagtggtttcgactatagagaataggaggctcaatttcattgacaaagttaaagtgtgaatgagagccatcact

SEQ ID NO: 399295 - DNA, 362 bp, Cannabis indica
attgcatgttatctttcttaaccgtctttgtaggaagaaatgtttaagtgttaggttacaatgcatctcatggttctcctttgctgttttaaaaggtatttgcgaggtggttacttccatatgttaaaagcaaggtgaataaacgttgaagttgtttccattccttaagcatactcacaagtatgtgaatcaatgagctgcaagctcttactcacgattatgtaaatcaatgagctgcaagctttttgtttactcgttctgaacaactgttattgtgtattctatttttcccgagagtataatctaaaaaaatacatcaatactatagtaaaatatttatcctggtgtatttttgttgtttt

SEQ ID NO: 399296 - DNA, 532 bp, Cannabis indica
tgaaaaatagacaatttgtaatatttcactttttatatttgaatgttaatagaattacgtctagttttctttccatttatttattactctcaactcattattgatgattaattagtgattatttaactcctagtcaattggctatttttttccatcgccattgctattatatagaaacaagagactcaaaactacttggttttcaagtaatccccagaaaaagtgaaaatataaaattgtgaatttgaccattttgacttcaaggctctcaattatgaaaaactagataaacggtcaagacaatatcggaatcgaataaacagaaccttgtgcaccaaaccatttgtcaacatgcgcatcgggtgcttattttggagtttccaggatgttgttttggcacctctaaggttcttgaacttgaggacgaggtcttctgccctatttttttttaccattttggagagaatgctcagagtataattgacatttgaatgatcaaaaccagctagtaggttgattgtcaacctaggcg

SEQ ID NO: 399297 - DNA, 595 bp, Cannabis indica
ggaattggtatcaattggaaaacaagctttactcgctgaacaagcttggcaaattttttcagaaccaacctctctcctaagccgtgttctcaagccaagatatttcaagcataataattttttagatgctgaaattggaacttatccatccttaacttcgagaggcatcatatggcgaaaagaggtcctaatacaaggattgagatggaaggttggtgatggtcacaacatttgttgtgcaaccgatccatggatacctggtttcacttactttaaacctcttattttcaaaggagatgacagagaaatgaaagttttgaacttgatttcagacaatagacgatgggatactgttagaatttattttaccaggatcttagattcactaacaagtatgttgtttaacatcctaaatatgaacttctaaaacgattataaacacatataaagtttaggaaactttacattggttgcaggggaataatatgtctccttccactcagatatctaaccctggaacccttccggccgcagagtatcaccaagatctgagtccaaatgtccttctcttaaatttggattcttcacgatcttc

SEQ ID NO: 399298 - DNA, 605 bp, Cannabis indica
attgtccattgctctttatgagaacttggaatagattccatgtcctgtcatttttcacatatttcatttacgtgaccttttttcatattaaacaacagtaaaatacactacaaacagtattagttgttgatttagtaattttttactcttttgccagattttatggttttttccttatgtttctatgattctagtgttgatttgtccatctctaaccacgaaggagaggtgtcgtttgtgttttgttgctgtttacagtataaaagtaaatatattgggcctgggcagtataaaaaaataaaaataggtttggacagtaaaaatgtaaaatttgccgtgtcccagtatttttttaaagcatttggtaaaaaaacattacttttataagtttccctttaagtatcacatgtaaaattgcttaattactggttttcgttagaatgcaacatttcattacttactagttactaaattggttccattttatgcttcatatttatgtctagctatgccaattaatatatattaatcattcaaaaatatatatactccaataaaacttccaacaaaatttagtgatggcacttacaaggacgatcagaagt

SEQ ID NO: 399299 - DNA, 850 bp, Cannabis indica
tttatttatttttgtaaaaataactaccaaaacgatgatgtgaaaagtgatgcctcatcaaagtttttaataaatttgatgcaaacttattgatgatatatcatagtaatagcgtaacctaactttcatgtcagcatttttttttggcataacatttttagcctctaaaatgaaattttcatgggaagttttcattgcatcaaacacacatcattgatgtagcatcattttcaacctccaaaatcaagtttttatagcaccaaacgctaaccattgaattagcttcattgtttgcttaaaagacgtttctataagactatcgcaaattgtcgtttcggcaatgtttttgttcttaaaaaataagtcttcatttggacaagtgtaaaccatcattttgcatcattttttgcctaaaactttttccgataagattatcgcaaactaccgtttttcgtaattaatgtttttggcttgaaaaaaggtttttgtgggatcatcgcaaactattgatttcatgtcgttttggtttgaaatttgcaatttttagattttagaaatgcaactaaagctagaaaagatcttgtacaaaagtttttggaatccatgaattcgtatcttctatgaatattgtcttcgattttagttgtaatttggattgaattaatcagaaaaatatagggagcgtttagtatgaggtgttcaaaataatttgattataggaaatattatgaaggagaatatggttaaaggaaaatgtgtaaattgtgtttggctgtgtagggtgatgtaatcgtaatactgttaattaaattacactgtttggttgagtatagaaatcttatatattatt

SEQ ID NO: 399300 - DNA, 540 bp, Cannabis indica
tgaaggtgggccgagtgctttcattgacccaatccatgtgaaatgcttgaaccaaggaaatgtgaaaattgcaactattggagataaaagtggggatgctgggcctgttgctattgggacgtgcgtgagtaaaggtgggctggccgcctctcttgtggacaaagaaactagcccaatgctccttgatgtgaatatgggtaatattgttagtgggccttctctcattaataataatactaccctctcgtgtgggcctactttggtggactctcaaatgttatctaatcctagcagtgagtctatggggccggctatgatgggttttaatgctaatggtgttgagccaattatttctaatgggctgaattttaatgaggctcctttaattgaatgtggtaaggatattaataccatgtctaatggaaaggaggcagagaagaattttgaagaaaagaaggccttgtctcaattttttaaagctcaagaagagttacttcatgatttgaaacattttggcaatttggacttgtatgagatcaa

SEQ ID NO: 399301 - DNA, 508 bp, Cannabis indica
tgcttaatcgcaccaggcgctcgaacaagaagctgcatccgcgcgcgccaaagggacaagcttctgtctgaagcacggacgcacacacacgttcagacacgatcccgtgtttggaccctataattgcccgtgcgtgaccctgcatccgccgggctttcccgcacatccattccacgcgcgtttgtggctgcgtgcagccttcctgggctgcacgtacaaccttcctggactgcacgtgcagccctcctgccagccccctccaaattgcgatttttgtgggattttcccgaatttcgatttttccaattttcaaaccctaaaattaaaataaaatattatttttaaatatatttaaacttaaatgtcattttttaaattaataatatttattttttaatagattattattaattatgatattttcaggtttaaattgaaaaattgattattttatgtttttaatttatggccagatttaaaaatttgttaatttctttaataattatat

SEQ ID NO: 399302 - DNA, 692 bp, Cannabis indica
gctcagactcaaccttatccaagacataatactactacaaaagttagaattcgcgacagtcctaaaaatattttttttggactatcgctaaaaaaattaagtaactgtttaaaatcgtcgggaaaacttagtattccaaacgatttataacagtaattacaggaatatgcgacgattttaattgaaattcgtaaaatttattgggaccttagaggggacggttttaaacagtacttctcgtcatatttcctacgtgcccacctacttcttttctatttcccacatgcccacctattttttctccatttaccacaccctaaaatgaaaatcttaactctccaaaaccccacccacgcatccgcaccatcggcctcctctctcgccgtcttcctccctctctcgatctccctttcttctcgtctctcttgtccatcgatctccacccacccctcctcccgtcggtcttcttttcctctctgtcgcatacgacggaccaccactacctctttggtgtccctctcatctccctctcatacgtcggaccaccaccacctcccgtccgtctccctctctctcttctctctcttcgagctcagtacaaatacatttatttattatatatatttattttattattgtataaatttaatgtgttttaaagttagttcttattgtaataaaattaattagtt

SEQ ID NO: 399303 - DNA, 529 bp, Cannabis indica
acatttacaaaatattattacaactccttttctttcagccgacctaggcgacaaaatagagtctcaaaaatgcaacactggtagaccccaaccctcttggtctgatatggcttggacatgtacattcttcgtccagctcctgtagtcatggctgatcaacaagagtcttaccctttcctgcacagtagagcacccgtcagcaaagcccagcaaagacagtataaaacatatcaataatatgctcatcatataatataaacagtaatgccatttaaatctgtctgtatgacacagacctgcatgttgggctcacatgcctgtttatgtttacgtgacataaacctatgtgttactttcacatgtatatatatgtctacgtgccgtaaacctacgtgttgctctcacacgtctaaagacaataaggcccttgactggttcatctcggttatggttacctagtccaacccgattatgccttgaacgcataacccttaaatctcaatattattatatacttagcatggcatag

SEQ ID NO: 399304 - DNA, 642 bp, Cannabis indica
aagtctataatgtacttggtttgagagagaaacataccctttgaatctcgatagatctcaacaccaaagaaaatagtggacatcacccatgtttttgagagaaaactgattatttagatcagtaataagctttgtaataagtgtctggtttggccccgtgaccagtatgtcatcgacatacacaagaagaataatcacattgtcaccagacccataaacaaagagagacgtgtctgacttcgaagctttgaatccccactgaagtaaactaaccctgagcttgtcattccaagctctaggagcttgtttgagtccgtagagagccttatgaagtaaacaaacatgatctggtttattttgatcaatgaaaccagggggttggctcataaaaacagtttcagacagctcaccatttagaaaagcattactcacatctaattgagtaactggccaattataagtaacagctaaggaaaggacagtgcgaaccgtgactggtttaacaactggagaaaaagtctcagcataatcaatccccggagcctgcaagtaacccctagcaaccaacctagatttgaatctgtccaacgacccatctgcattgagcttgatgcggtgaacccatttatttccaatgatgtg

SEQ ID NO: 399305 - DNA, 819 bp, Cannabis indica
ttcttaatttcgggtattacaatctaattaagagtagatgtttgagcatcgtgtacttaaaggggggtcatcagaccttgtacacttactggtagtattttctcaaatgttctccgttccaataccttggtactagaacgagttccatctttttttcataccgaccaagtttgtatgcttagagtctgtgactgcaattacttgatatggaccttccctgttaggttcgattatgccagccatgcagtcttttgtgttcaagaacactcttctaaaggtcatatctcccacaaagaatttccttgccgtcacttgcttgttaaagtattgagccaccttctgcagatgatctactagcttaaggtctgctgaggctcttttttctttaatttcatcaagtgattctgctaggagggcatgattagcttcttgattataggttagtctcctgggcaacagaggttctaactctacgggcaatattacttcatcaccataagccatagagaatggtgtttgtcaggttgttgttctttttgttattctgtacgaccacaatactttaggtagttcttctgacagatttcctttagctccttcaagccattttttcatggtctctttgactgtcttgttgattactttgacttgcccatttgtttgaggatgtggcactacggagaaatgttttatgattccatatgctgcacagaaatctctgaacatcaggctattaaactattttccattgtccgagacaacattgtgcaaaagcccaaaccaacatatgatgttttttactacaaaatccaacacttt

SEQ ID NO: 399306 - DNA, 809 bp, Cannabis indica
tagataagagaactacatacttataattacataaaacataaaattttataaaatttttatatttttacgataatctataaaaatacataaaaataataagaaaatcacatcaaaacaataataaaataacatcaaaataacatataaataagagaaatttgcggtaaactctctcatgttttaatttttatacttaaccctcttatctttttttttagtggtaaatcctccttaagtttactttttttttttttattttgtaaatttgaggtgtcagttagatattaccgttaaataccaactagattactactatattaattttgaagttttactgttacatatacacaggtgtatacagtggtcatccagttgatatttaacggtaatatttaactgacgtgtcaaatttacaaagaaaaataaacttaaaggagttttgcaaaaaaaaaataataaagggattaagtgtataaaaattaaaatttaaagagatttcgccgctctaaaaataatatacaaataacaaaaaccaacaacaaaataacaaatattacataaaagtagataaaaagaccgtatttcatctaaataaaatttaaaaaccgtaaaaatattaaaaaattcataaatatcgtacttttctaattgttttttgttatttttgtatttgttttttaaattatccctacacaattctcccaccaccagcaataggagttaaaacaagaaaggttatttacaaaaatatgggaaaataaagataagttttgatatatatggcataaaaacttaattacactaaatat

SEQ ID NO: 399307 - DNA, 1059 bp, Cannabis indica
tgaaaggatatgttgatgttgatcatgcatcaagcaagggtcttagaagcactttcaactacagaggcagaattcatggcgaccatagaggcattcaaagaagcaatttggctacaaggaattctgaaggagttgaagcttctagttggaaaggcaggggtatattctgacagccaatcctcgattcatttgtgcaagaatccagtttatcacgagaagacaaaacacattgacattcgattgttttggataagggagaagatagaagaagaagaagtaatcgagctggacaaagtgaagtcagaagagaaccctgctgatattggcactaaggtgttacctgttagtaagttcaagcattgcttggacttactcaaccttagttgctaagtagctacacatgaaagcattaccacctccattggaccgatatgtttagcttgttggggcttgaggaaataaggtggaatttgtagtattattccttaaatcccccaacaactaagattcgattagttagttagtctttaactaacttaactatcaaaaaggacaacttgcatattgggtcccttggcctatataaagagaactactcctctcatttcataataagtggaaaagaagtcaaacacaagagagagagacacaatacagaaagagagagaagttagagtgagaaatggagagagatatctgagaaagagagggctgggattgggaaattgtattgagcaacattgttgattatgttggctcgggttagtgagttgatgagtgttgagggattacaccatggatgacttgctgtgattatttccttgtagctcttgagattgatatctcttgttctcattatcaataaagattggtggcaatgctttcaaactggagtatgaccaagttcacattgaacttaggatcagaaccagtataaatctctgtgttattgtgtctgacaactatttagattcatctgttgttatatttttttggtttatgtgtttgctgatttttgttcttgatttgtttgttttgatttaacttttgtttgtttaa

SEQ ID NO: 399308 - DNA, 771 bp, Cannabis indica
ttttttttttttacatgttttataaataataatatctttaaaataaagaaatgcttgaaacattaagacaaaaaaatagaaatgaaaaaaaaaaacattagacttaagttaatttataattaaattttgatcttttcttatatatattttttttaataatatatagtaataaattaaattaattaaataaaaattttaaaaataataaagaatcttatacaattatataaataatataatatattattatatattatacataacattaataatcacttaaattttttataaaaaaactactatgattatttttttaaaaaaaaaaattatcaaatagaataagattaatttaatcaattaatcaatgaaaaaaaatatataaattttgagacaaactaaaatgaacaaaagaaaaaaaattacttttaaatgtgagattattaaaaaaaaaaaaactaaatttagttaaataatatattttcttagtatattactctcaaagaattaaaaaaaatacaaagaaaaacttatgtaaagccactcacactttttatatacttcctttatattaatatgtaaatatagaaaatatatatatatatatactatagaaaagtacctacactcagtattgatttccagttgaaatgagacatagataaaagaaaaattggacccttactataaatataaatagtatttttaaaaagggtaaatactattttggaccctctattttgcaaaagttaccaattggaccctgtgttttgt

SEQ ID NO: 399309 - DNA, 1234 bp, Cannabis indica
taggcttcaaaaatgggcctacttggaataggtctatacttggcaaattcatttgggctatcatggataagcatgatattctttgggtcaaatgggtcaataatatctatatgaaaggaattgatttttgggagtatgatttaaagggtgatgttagttggtagtagagaaaaatatgccacttgaggaagagatacactaggttgaatgtgatagctgctgtcaaaaaggggaaatttagcagctcggctatatatggggacaattcaacgaagcattgataacttcttcaagtcggtttggtgcaatgtttcgttgcccaagcaccgattcattttgtcgtaggtggttcatggtaacttgcttactagagacaactttgctaagttacatattgctcttgattcttgtctttgcccggtgtgtggcttggaagaagaaagccatagccatattttcttcaattgcaggttgtctaaggaggtgttacaggaggtttccagctggtgtggggctgaattatggccttcggacttcactagatggaaggtttggttggccaactcgaaagcaggtgtgaggattcatttagctgctgccactgtgtatatgttgtagaaaaataggaacttttgtgtgcataataattgttgttataccaagttgagaattgtaaataacattaaagaaatagtcaagtatagattgtatagtttaaagaattggaggaagatacatgctgaaaaaagccttggttatgaggcttattgagtagtttctacaggttttttgagcaggttttgtgtggagccggttggttatggcttgggtttgtattggttcagttttgattaatgaatttcacttctttagtcaaaaaaaaaaagtaacgtagtaagaatattatttataaccttcatagataaaaccaaaacagtttttaaacaatgtgggacttttaatttgtatgtgtggtttggtttttaaacaaaataggaaattgtgttagaaaataggaaaaataagaagaaaaaattataaaataacacataaactcttcttgtgctttcctttatatacatatagggacatgattttgtcccgtgattgtactttcattgaatgtattccgtgatgtacagcagccgttagatgagggagttatttgatctgagggctgagattgatctaggagtaattagggttaaaaaaatagtaacgtaccctgacactc

SEQ ID NO: 399310 - DNA, 504 bp, Cannabis indica
caagtttgttcccgtaaaattaagttttgataaaaatttattttttaatatattttacttttcatatttaaatgaatttttcaatgaaaaataaataattttttaaatcgctaaattaattttacaattttaatttcttttttaattttctttatcattcaaaatgattattttttcaagatataaattatttttataagattactaaaaaaaatattgaatatttctcatttttattttaagggaatatgatttgatagttgtcaaaatttaggggtaaaattgctaatttataaagacacgcattaacatttaaacgtaatcatgtagtagaacttaacataagaattaaatttctgtgaatgtaaaagttcaaggaattcttaacaagtattgtaagaagtttaggaaacaaaattactaattaatcttatataatatactagtaaaaaattacgtgcgaggcacgtatactaaattttatgctagtttttttctatgtta

SEQ ID NO: 399311 - DNA, 650 bp, Cannabis indica
atacaggaagtcagatcatttggtggtcgtagggtattaagattctgatttcgctggatgccaagatagtataaggtctacattaggctacatttttctgttagctggaggagctatatcttggaaaagtgtcaaacaaacacttatagcttccactatggcaacagaatttgtagcatgttataaggcatcaaatcaggcaatatggttgaaaaactttgtcactagcctgcgtattttggagaatgttgaaagaccactcaagatattttgtgacaataaatcggtagtaatgtattccaataacaataggagctcatccaagttaaagaaaattgacataaagttcctagttttgaaagaaatggtgcagagtggacagatatccatagagcacattgggacaaactccatgatttagtgggagtttgtattttctttgctttatgtttgtttaagacatttatgtatttggttattttctgatcagaaataaatttttcagttcattcactctgttttgttatgtttaaatttgacctcacttttgtttaaggaggaccaattggaaataggcatgtttggttcacattgcatgtaatttccatgctacacatctatgattgatctatgtcatttggctatatttg

SEQ ID NO: 399312 - DNA, 858 bp, Cannabis indica
ataggtttgatagttggtgcccagaattctacgtctaaattagttgtactgacttgaattatgggatagccgagcagtgtgggaccatgctggataggacaggtcatatagatgcaagttgggatttagaaccaattaactcctatgacatattcaggataacaggatgtagagactttattgaatattatagtcctcctaccttgtcttcttatgattatggtaaatcccttaggcgagaaattgtgttccaacttccccttttacttcttttcaaacaaatattaacacattgttttgtcttgcataaatgaatctcgagaacctctttcaatcttcaagcaagaagggaaataaaaggttgactacggccgccacacatactgatgaggccattcccaaagcgaatcaagttgctgcctcttcgagccaagcacttaagactctgcctgcagaagctgggagttcgtgctcgaagtacacaggggagtttggtgcagcttgttggcatcatttcaagtccttccttcacaatgaatgggactttatcaacaatgggaacctggagaagatgcttgagaggagtgtcgcccatggtctctcggtaaattcctttatccttctcttcttactccctttttaacatccttcaaaaatattcacgtatttttgtttattggttttcaacaaactttcatctcctttgtcgcccaaaggcgacgtatggacagaattaagtacatggagagcgagatccagaaggtgataggtcagcgcgaggctatgaccaaggaatggaatgactccaaggcggaggtcactggcctaaccaaagaagctgaggaggtgaagaggacc

SEQ ID NO: 399313 - DNA, 525 bp, Cannabis indica
tattgacttccatcattaaaagttggagggtccaatgccttaaactcatcttctcttgtcatctgcagagcagcaaaacaattaagagacttagagccttttgaattatcattcatcaccttgccctccgtttgtctcactgctttcctcttgggtgtaacccaatctttgctagcttgaattttgtcttgttcttgccttctagcattctccttaaccacaggcattataccattatcattttctgcattgttatcttttaattcagcatcttccccagttacacaaacttctttttccttctccttctttgcccctatctctgcttctggttttctcttccaaacaaattttttctctctgttgcagttagcaagaatgtgacccaaattggcacaagctgaacatttcgaaggcagccactcatattctaccccttgttccaccaattgcttcttttcattaatgtaagagatagttttagggggattatcagttatctccatatccacaagaacccgagca

SEQ ID NO: 399314 - DNA, 571 bp, Cannabis indica
tttctttacgtcaagctgaagtatggttgcacttgacttaaaggcaggtttagtaccttatactaagcattaaaatttctctacataagttctctatgctagttagatgcattgtacagtgtgggtgcctcccaagtgagcctgtagacttatggtctcttggtcacttgtaattcaccaaggttcataaacctttcttgggaattttccagggttaaatgtattcctagatttatcagtacacagggtttatcagttctctaaacaagattgtgtgattaaatatattcttagatttatcaatacacagggtttaactgatatgataatttacaacgtagtttacttgcaccttggataagtgctatgtcgtttccagggcattggttaaagtaagcttgggtttgatgtatggagtatgcatcagaagggaccaatattgaatttggattagatatgataatcttaccgtaatatctattcaattcaatatcacctagttgatcctagatcaaatgatctcaattctgagatggttaggttcgatcttaagagtgttatttgtgttctt

SEQ ID NO: 399315 - DNA, 554 bp, Cannabis indica
aacaatttgggctgtgtggttggaaaggaatgctagaatttttgaaggggttgggaattcggtagaggacgtgtgggagaaagttaaattttggacagctacttggctttttaaaatcaagttttttgaggacttgtctttcttagatttatgtagagattggaactcattgttgtagggaagttattcaatatctctattgttttttcagcacctttggtgtgctaattttcctaaatgtttctctgtaatatggttttcctccgccataagcgaggcttcttaatataattctggaagggtcctgcctatgacttatggaccctttctcttttaaaaaaaaaaatgttgtttaagagtacctgatttgtttatgccttgttggattggttttgttttaaattttttttaaatagtaattgtaatcacggtattcctctgcacaagtgaggttatctttatataatgggaaggggtcagtcaaagacaaaaacctctttctctttttcaaaaaaaaaaaaaaattactcatttttgtcagatccttcaaatgt

SEQ ID NO: 399316 - DNA, 599 bp, Cannabis indica
aaaacatgggggatgggaactaccagcaccacggctagacagctcaaagatcaactaaataaatgtggtgtggttcttaatgattggaataagacccgaaagaaggaaatgaatagaagaatcaaggaatatgaagataaaattgcagccttatccacccaaacagaccataaaagctggaatcatttgaaagaaatagagaaatcgtacaatgtgtatttggacaaagaggagaaattttggaaacaaaggagtcgtgctctatggctaaaggaaggggaccgcaataccaaatttttccacagaaaagcgaactcaaggaagaagaaaaacgcaattacggggctgcttgatcataatgctcgctgggtttatggaaataaaatggtgggaaaggtcgcttatctctatttccagcagttgtttactgcccagccagccactatagaagagttaaaagagttccaacgcatagtgccacacaaaatctcccgggaaatcaatgagtatcttgtctctccatttacgaaggatgaagtactacaagccatgcgagatatcagtccacacaaagccccgggcaatgatggaatgccggg

SEQ ID NO: 399317 - DNA, 468 bp, Cannabis indica
attttactacttactaagtttagttttttttttttttgttttttttttttttttgtattttttatacaaatcaacatagaaaaatagctacagaccgtttagcaaaagaaacaaaaatactcacattttcctttgttttactttatattaataaaatgacatagaaatgggacaccaaaatggaacaaaaaatttggctctgtttggaaagcttaaaattagatttgagttaaatggaaatgattacataattaattttttttttctcatgaattacatataaattgaaaaggtaaaacatgtacccatgagcaaatctcgtagtgaacgttatatattctagaaaagttgtacttagtgagtgaattcttgacttaattagattgccatctaatttagacacaataatatataatattatttatttttatataatatatgtacagtagaacctctattaaagaatac

SEQ ID NO: 399318 - DNA, 698 bp, Cannabis indica
aacccatcttccttgtgtaacaaattataggcgtccttcactttatacacaccagaagaattgagagaccaataccagaaatcagaagaagctgaagaaatagggagcttacaaatcagatctcgatcacgggtgttgaacaaatcattcagcacttctaaatcccaccttctatcatgactctccatcaggctagccactttacagtcatctaaacccaccagctgagtcgttacaaagggattggatgcatcaggtaaccagggatcccgttgaatattaattgaagttccagaaccaatattgcaacgcacccccgataagacaagcttctgagtatcaaagatgctcttccagataaaacttggattgtgaccaagttcagcattaaagaaagaacctcgaggaaaataccgagccttgtataaacgactaacaagagaagtctcattaacaattaatcgccaagcttgcttacccaacatggagagattaaaatcccgtaagtctctaaaccccagaccaccaaaatgcttatgctttgtcagttgttgccaactcttccaatgaacaccatgtgactttgaactgtcagaccgccaccagaacttggccatcatcccttcaagtttgttgcaggtatcaataggaagaaaaaccgacatagcatatgagggaagagcctgagcaactgtctt

SEQ ID NO: 399319 - DNA, 792 bp, Cannabis indica
cgatccccttccaatttttctcatgagtatttatagagattgataaggatggttcaaaagggataacttgtctttgagtgccagcaatgtaggagcacaagttcccaaaagatacaaaatagggcatgcataacctacattgtaggtatcttagggattaggtgagattgatctttatccttccttgattgatgtgattcttcataatggagccgtcactaactcctttgattatcgtgtaatcacagtaagtgaggcttacgttgtctgacatgtcctcttatgggcgttcctagacgctttccccatgttgcattatatgcgaggtgattgttcgaatatgtcctcctcctcctcttggagatgctttatcatatctctagctcccggagaggatgaacatgctttttgtacttctccgggggctcactctccgaactacactcgttcgtctgtatacgactcagctgattctcgggtgaggtgtccttttggttcacgtgtcatacgtagctgtgaccacgtattttgggaaaaatccggggcaacaggtgactacttaatggttacatttttattgtaacaataatgcttacaatatttttgttgacttgtaatagcaggttaccaacatataaaaatttcttatttagaattaaataactaataattaactattttattaaaataattaatctttaatataaatatttaataagaccctttttataaatttatatcaataattttattttcatatttaagtctctattatattttttttaacagtta

SEQ ID NO: 399320 - DNA, 533 bp, Cannabis indica
tcttcttcaaataccacatctctgcttatgaaaacttttggtgattgccactctctatgctccatagtttatatcccttcactccttctggatatccaagaaaaacacacttccttgcccttggttccagcttgtcttgcttgatgtgagcatatgcaatacacccaaaggttcttagttttccatagtctgcagaatgaccagttcttgcctcaactggtgtcttaaatcctattgcagatgaaggacatctatttatcaaatagcaggctgtaacagctgcttcagcccagaaatttctaggtaaccctgagtgtatcaacatctgaccctctccattatggtcctattcattctctctgcaagaccattttgttgagggttcctggggacagtgagatgcttggcaatcccttgttgtttgcagtattccttgaagaaatctgaacagaattccaagccattatctgttctcaacttctttagcttcctaccagtttggttttcaagtaatactctccattccttaaact

SEQ ID NO: 399321 - DNA, 584 bp, Cannabis indica
aatttttgagaatttcaaaataatctaatacattgagaataatttcaatagtttaaataatttgctagaaagcattcttcgactacaaaatagacaatttaaactctactttcctttagaatttacaaaaaaaaaaaaaagaaataataagaaaaaaaaatttactttctctattataaattgtctcaaaatttctctaaaaaatttacaaaatatcttcactaattaaaatatagatcatcattaaaaaaatcattaagataataattttttacaaatcaaaaaatagcaagtgatatatttttattggggatacacatttttctcatagtgatggccccatggggacccgcccctaatgggcggggacggaaattattttttattctcgaatgttaaatggggcgggggcagagacgacactccctgtcccgatggaaacccgtttggtattttattttatgtttctaataataatttataatttatgtttatattttactagtatattattataatgaattttaagttgtgttttagataataattagtttattgaataataattaatgtgtaatatttaa

SEQ ID NO: 399322 - DNA, 519 bp, Cannabis indica
gtagaaatttgaaaaagcttaatatttcgacatgtaatttagaaaaatatcatttacttattattttattcttaaattaataattccctaaccatatctattttaaaatttatttatttaattattttaattttattaaattataagatcagaaaataatataaaaaatatctagttggttatttcatatcatttatcttattagatatttaatttaatttgatagaataattcaaataaaacctaaatattttaaaattagtttaaattttaaattttgaaaagatattttaggttgtttttaacaaccctaaattttcaaaattagttggttatttaagtgataatttaattataaaattaataaatatctcaattcaaatttcttacatgttattatttatttatgtaattgttaattcaaaactttttttaacaaacctattatttttttaatttaaattgctacgattaacttgttgacaaatccaatgatctgattttaatcatagtccaatt

SEQ ID NO: 399323 - DNA, 806 bp, Cannabis indica
aaccttacccatacgggaactgatttaatcatctgagaagtatccatgtcttctgaccaatgtctaagaacctacaggttttttatcaaattgaataacctcattttctaagattatgtcccttgtaacttcatctttgaaactcgccaaaataaaaccatagtgcattctaacaatacctttccactcccaagttcccccaaattctcttaataaagccttcaaacactttgaatggtggattggccccctaaacaatacaaaaatcgaggatctccaataagaagcctcaacttcaacttcttctaaatcgagcttagcaaccacctgatctctgatttccaaaggctcagtaaaattcagttgggaagaaagagttctcacctgattaaccttgaatttgctccatgccaccttggccgactcttggaaatcaattgcttttgcctcatctgcccaactcgttatagtaggggttgacttcacaaggccaggttccatctccttccattctggttctagttcttcacaggggcccaaaaaaaaacctctgtaggagtagaggcttcttcttcttggattaaaggaagcaaatgactcactctcagaatggttacactcttcaaaactaggcttcaaaacgccttttctcctctacgccgtgggaggaaaaaaaagagcaacacacgccctccaatacaaataaataaataaaatatattttaaaaatattctaatttaagttgttctaaaattaataaatttcttatttaaatataattttttatttaattaaatatataaaa

SEQ ID NO: 399324 - DNA, 1002 bp, Cannabis indica
tatcggaacaacaatttgcccatctctttctttacacttcaaaatatgaacgagttcatccaaacaccacctcgaagatgcataattctttgagaaaacaacaatagaaagctttgattcctctattgctttcacaagagctgaagaaatctcttcacctctctcgagcctcttatctatgtaaacttgtaaacttttatcagacaatgctttttcgagatggctagtgaaattgttacgagtgtcctcacctctaaagcttaatgaaaacgtcgtatttaatatttggtagtcatattagatattgatagaatcatatacactacaaactttacattacaatagaattaataatgagcaaaactacataaattttcataccaaatttatagtaaatattagactatatatatacttacctttagaacttggtggtcttgtagagtattttcttggaaattttgtggatgatgagatgaagaagaagctatagacaccacttaatatctctcgttttttctttggtcaatttaaaatcaataatagaggctataggaccccactagagggtaaaaactataggtgactatatgaatagagcaccaaccgccacaatgtttgcccttattgagtaattgcattattgactaatattttgtctatggaatatgtacataaatatatgaagaaaagttccttgaaatttatagtgggacaaattacaattcattttttattcttgatggttgaaatcaaatttaaaaaagcctaacattacatatcactagaccaagcaatttgcactattgatattgttatattccctttattatataataatcttcatctattatatatatagggccggctcaagttctttcagcactttgggcaaaaaatgaaaaatggcaagaaaaaaatacaaaataaataacaagcataaaaaaaaaaaaaaattaaactaggaaacctaaatgaactttttttttttgtgaatagaag

SEQ ID NO: 399325 - DNA, 813 bp, Cannabis indica
tcatgaaaagttggaccagatttgtattgaactgattctatcaaagagtgtcaacaacatattaaggatggtatttttagtttgaggattgggtttttgggtgagtattctaaattaggataaattctcaatgaattgaagaataagagtgatggcagttctaaggattctgaatgtttttcatcccctataagagaggtaactagtttgtttgctttgtgttatttgattataggtttgttgtttttggtgttattatagtttatttttatcaatttgttgaaacaagtttctgtattggatgtgtgattgtatgatttttgacagttagttgaaactggaatctgtattgggttgggttgagatacatttttttttcaatttcttgaaattggtttctggtttgggttttaggtatctgttgttgtgttattttctgtattaaaccagtttctatatttatgtttgaaaattggttttcaattaatttattgttcaggcatactatcaggatatatcggatgatggtggtgggttacagttgtccgtacatactggtcaagctgaggtacaagcttcttacatttatttttcgcttgttcaaattttattgttttttctaactatttttccttcaattttttaggaggaaaatgacactttgaattttgaaaatatgtttatcgatcctgattttcttaagggtgtggttgatagcactgttaatagtgctttgaagacagatgatgtttcgtttcatgatgatagtgataagccgagtttggttttgtacgatgaatcatatttgtctcc

SEQ ID NO: 399326 - DNA, 872 bp, Cannabis indica
aaaagtctctaaatccaacaatgagaaatttttaatgacttaaaagtttaggatcatgcataatttagtacatgtcaaaagctaaagggcaaaaatcctaattagctaaatatatataacataatctaattaaagctgtggatttaggtaaaagaatgcacaaaaattttaacgtggttcatgctataaataaagggaaatttacatggtatactaactttcccatttttttaaaaaatattgtcaggcggaattttttactttttactatgtttttttataagtttcatactgcagtatactgtgttaagttttcactggtgttctactggtgttttttaggtgttctactgtttttttgagctgttctgctttgtgttttactggtgttttataaaaacacagtatttttgaaaagatttccgtgcgacaatatttttgtaaaagttaacccaaattccagtatttttgaaaatttccctaaataaatgtcatctccaagaaattttggcagtgtgtatgtatatacttcctccaacaagtggtgccctagtcttatgggccttactttaagtgggctgaaagtttataaccaatagttttttattcacaagaaactcataaagtaggacttttttgcataaaggactcgtatcttgctaatatgagaatttctaaaagttcagcatgtgaattgacaatatatcataaaatgggaacaagaatcagatcttccctgaccattgtaagagggaagaccacgcatccataaagatcaataaagacgttatataagaggagaaaagttgcctcatatgtacatgttatttgacattttatgcttaaaaatgactaatggtgtttaattatac

SEQ ID NO: 399327 - DNA, 684 bp, Cannabis indica
aaaaaaaaaaaaacaattgtaacaaatacgaattgtgcatagtgaccacataggcgggtagagtagcgtaaggtttccaccacagcatgaaaataacaagcgtgccaaacccagggaccactctctttcttcacttttggttttcttttcttatcatgtggacaccacatgccacctcatgggtatattttctggagtggtgtggcggtgtcgcaaactctctctcagctcttctgccttatctccttatctgctttgtatttgtttgccccagttacacatatatttatataattattgtcaatttattttacatatatttcgaaactatccagcctagctagctagtttcaaagatataccccacagttacaaatatatatatttctatacatcttgttgctgaaacgaaattattagtagttatcgttgatatacacagtttgaaaaatgaccagataaatacattaatggcacatatatatatatatggagaataacaaaattaattggattgatcgacaactcttagctacttataaggaacacatacggttagttgaattggaccagacgtttctgtcgctagccgctatttgcttgttgcaagcacgtacaatcaagaagcttcaactaacctaacagaattcatttgactccgttattggtcgaccacactccaaa

SEQ ID NO: 399328 - DNA, 540 bp, Cannabis indica
tgatagtacacaacttactgcccctcaggtggagatcacaacttatctatccaccgctgggggcgaattatgggacgacttacagggtcgtccggtgaagaacatcactgagttcaacgagagggctcaggtgcttgttcgaaaagaggaaggtcgaaaagagatgaacttgttgaaatctggctcgggaggcgaacccaacaatgtttcaacaagtactatctcaactagagttgataactcaggggcctctggctcaaagagaaaagacgattctaaggagtcgtcaaaggacgaaaagaaacaaaagaagatggagctagaaacgaccaatttgaggccttgcatggtaaatctgtgcagattcactggcgacagtatcgcaagtcagggcacaatcgaggtcgcattgaccttgggagaggcacctctatccgccacagttatgcaagacattctggtagtcgacctaccatcggctttcaatatattattgggtcacccaacattgatcggactaggggcagttagctcgatcaa

SEQ ID NO: 399329 - DNA, 1079 bp, Cannabis indica
tcgtcgaaaccaccacgaaccacgacaaaccgtcgccgccaccactacccgtgctcgtcgaaatcaaacagaggccatcaccaccacaaccacgaaccgtcgccaccaccaccaagctcagtcaaaggtaatgttttttttgaaaaaaaaataattttttcgtcaatttggatgccaattattgcatgttgttgacattaggggaatttttgaagattttgtgctctttcttgtgataggttgtagatgttggatatgttcccatggtgtctgtgttttttacagtgttatcgatgaaatatcgataggatgtcgatttatttggatgtctgtttgaccattagaattttctgtgttgttattgtatgtcgataggatatcgtatgtgtgtcgataggatgtcgatatttgattaagtttatttttgacctagattgtcgacatcttatcgacagtatgtcgataagttgtcgacaacgagatgtagtccttgaatgtgatagctaactttgatcttgtcgaccagttgtcgacatgatgttgacattttgtcaacaattttgatttatcagttggtgtgatcctttttcttggattgtcgacatcatgtcggtagtatgttgatatgttgtcgataatgttatgttcttgcttcatgtttgataatatcgactgaatgtcgacaggatgtcaatattatgtcgacaaaattatgtaattgtttactgtttgattatatcgatagaatatcgacatcatgtcgatgttatgttatgtcgaccattttttaattttttgacagtaatattgctttgttatttattttttcagatggctcctagacttataatttcagcatccgagcattttactagtcgcgtgacatatagaggcaccagaacttttgtaaaaatcaaggcttgatttgaggagtacaatttgaataacacggcgaaggaaagtcgtttcagcaacttttggaatgtcgtacccctgacattctcctgagtcttatttcaccaacttatgttgcacaagatgaaggttgatgtttatgaggagttgaaaatgcggttcta

SEQ ID NO: 399330 - DNA, 626 bp, Cannabis indica
ggagatcctggcctcttctatcaattctctagttgaacagcattataagattgctagcctctcgattgtcgcgatctaactctgcttgatgagatcgaaagatatactcctggtcatccatccatctcagaaatttgcatctctattgatcaaaaacatcgcaatcagtagcgcatggttcttaatttaggctttcaaggcttacagcttccttgagttgggctaactcaagatctttcctaagtccagattggtctcgcctatgatggacttgccaattcttgggcttgtctcgccagcatagaaccacagacgagacccatttgttgttctaggggactgtcacccctgggtcctcccttcagtcttaggtgccaatggtggatctactcttgttggcaagggcctgccacttggatccactaggtgctggtattagtttgtccaactatggtggccagacttgtggtgctgtggtgacaagattcaccacatctatagtgttcatggggattctagttgtgactggaacctgtgtacctggatctgcagtctatgggtcttgagggagaccaacagacgtagaggtgaaactgttgggttttatgccctaaataaaactcttt

SEQ ID NO: 399331 - DNA, 523 bp, Cannabis indica
tatatgagagactatttggtattgaatttagagttactaccctaagattctatatgttttgttatctattgaatacatacatatatttcaagagttatgtgcataagacataacttggttagacctagtatattactaggataaaaccactgaatgaacgtaatttatggattacgtaaatatgtatgaatagggttatgcgagcaaggcataaccaggttagactcggtaattataatcaagataaaccttagtaaggccttattgtaaatagacgtgtgagcgtaacacgtaggtctatgctatatagacatatatagacgtgtgggagcaacacgtaggtctatgctacatagacatatatagacgtgtgagcgtaacacgcaggtctatagcaaatagacaaatagtgcagtggcaccaataattatgtgataaatatatatgttgagactagggttatgcgcttaggcataccaggttggactcgtacaagaccgagatgaactgatctaaggcctta

SEQ ID NO: 399332 - DNA, 527 bp, Cannabis indica
caagatctgagtccgaatctccttctcttgaaacttgattcttcacagccctacacactatgattgagtacaactcgatgtgtgtgggcactcattcttttcactatatggcttcggttttgaagagaggaagagagagagagaaggtttcgaatagggagagtgaaggtggcttaaaattttactgaaggaatgagttgcatcatcttttcctttgaagtcatcactacctatttataggaaactacctagggttaggttagatttaattagcattaaaataatgaaaaataaagtggaaaattgcttcccaagtggccgaccatggatagtgggacccactttgcaatttttctaatttttcatcttattttctcaaaaatgtcagttatccaatttaacaacttaaatgccaaatctaattatttaataattaaaattaattattaaataatattcccatttattatattcattaattagacttaacaaaatctcttaattaacaaataaaccctagaatctct

SEQ ID NO: 399333 - DNA, 876 bp, Cannabis indica
attgatcttagtacttcggacatggccgtgagcatagtaacaaccccttgctcaaaccttttctgacgctgttgatctagtgcataagcatgagccaagtttcaaacctcagaaagcagtttgacttaccaatgagcagagggcaagcgagaagtgggtgatgagctcacttgaggaatttctgatccagcaggggcagcagggtcagatgtggtaaaggcaatcacagatggaggaatgggcttgccaaacactggttgaaatgtcttgcctatggagggcacaggcactgtaacatcctgctcaaggatagctggattacctcttaagaccaacctctgaatcagactaggataagaaagtgtgtgcttaacccctttagccttagcataatccaacattcgggtgtagatcagtgatggtaaatcaatagatacaccagtaccaaaggcatataaaaagcgagcagtgttatagttgatggtagatgtatgcgaattggcccaccaatttgataaagtaattttatgaagaacccgataaaactcagagaggatagtaacaggaaactcctttccattccacacaaaattaggttgaccagtaagttcagcaccaacatccttaaacaatggtttatactcatcagtgtaagtggggtgagctagtctaggtattttcagtataaggctaatggtagacggagcacacctaaaccaagacccacaaatatacgcctgatatttgtgttgacttttttcattgacaatactttcatctagattagcataaaactcacggacaaggttcacattgggcgattgaaggggtgtgactgtgcgttcccattttctagactgaacaatctcatgaacc

SEQ ID NO: 399334 - DNA, 886 bp, Cannabis indica
agtctattaattgtgaatttgtacaaatacaaaccgtgggataaagtactttgaatgtagcgtatgatacgcttgagagcttgcatattctcattttttgaaacatgcacatgaagataaagagtaactatacatgtgatttaggttgctccgtaagttgtactgtataattctttaaaaatagaaaaaaaaattttgaaatgtacaaataaagaattcctttttcttttgttgtttgttttctttctgattttttttttgttttatttatataaagagataaaatgtattaatttatataataaaaaaaatagtacattcaaatcttatattttttcagataaataaaatttaacccaaatttaacttcgatgtgtatcatgcatatttaaaggagttttttatttttacactttaaaataatttttttttgtatttttacagaaattcacatagaaacttacatagcaactaacggagcaatttaaaccgcaatcaaaattcacataacaatctaataaaaactattagagtaactaccggaataactcaaattgtaaatttgaaaaaaaaattaaaaaataatatatagagtaatttctctaaatttaaaaactattatatatttaaaaaaaaaattctattatatattttttaatagagaaacaatcaaaacaatattaccacggttcatatataattagtataagagaaatgctaaagggtatagtggtatctagcatcctcttatgtctcaacatcgctattggttaaattaagtataaggtctcatataatttaatataataaattttagagaatattgttaactaatcgcaaaatgatatatttatgggtaaataccatttttggaccctgtgttttg

SEQ ID NO: 399335 - DNA, 1458 bp, Cannabis indica
tgatttatctttgctcatgatgaccatatcatccacacagagcaataagaacacggttgtaaattgctctagattcttaaaatatagacagtgatcgtatgcggatcatctgaacccaatttgatgcatatacgtattgaatctcttattccattgtcgtggggattattccaaaccatataaagacttgttaagcttgcacgctaatttaactcctttcccttccacctgaaacctaggtggttgcttcatatagatctcttcatccaagaacccattcagaaaagcagtcttgaaatcaagttattcaactgccaactccaaatgtgttgctaaggacaacatcaaccttattgttttgtattttaccataggtgagaagatttcagtatagtctataccttccacctgagtaaaactcttagccactgacttggctttgaacctcactggttcattctcactgattctctctttcactttgagaatcaatttacactccacaatctttttgttctttgtctttggcacaactacaatcttgttctttctcaaagagtctatatcatggagccatttagacttgtttccacctgaaattgcctcttcatagcttccatgctcttcaattttagttttttgaactactgccagtgcaaatgctattatgtctacttctgcaaatcttgctggaggttgaatctctctccgggttctatctcaagccaactgttaaccttccagacctgtttatctgaatccttttggtacctctgtttggtcttcattatcttgttcttctagctccacaacagcttccgaatgtgcatagtcttctagttccattctatcttccacctgtgatccttctttcgggatcttcgttccgtactctacttccatacttatgttgtctttgtttcctatttttcctgtaacacacgaagacacactacccttttcagaggtcaagtgaggatattctaactcattaaaaaaaatatttctagcaatcacaacctttggtttgcccttcctggaaatgtagattctatgccccttggctcctaaggcataacctaagaaagttcccttcacggacttgggttccagcttatcaatagattggtgtacatgtatgtagtacacctaaatgtatgcattaggttgggggttctgttgtaccacatttcataaggtgtcttaaggtctataactctatttaggctcatgttaacaagataagttgcggttactaaggcttccccccaaaatggtttttctaacccaaaactgaacagtaaacatctaactttgctcaacaaggttcggttcatccttttagcaacaccattctgctccgaggtcttcactacggttagtgatcctaaactctagacacatcttgtcaaatttggagttaacaaactccaatccattatcagtcctaacgttctt

SEQ ID NO: 399336 - DNA, 600 bp, Cannabis indica
atctgctcctgatggtggtgactaaaggattcttggttcttgtgctcctctggtctcttattccagcagtgattgattatgatcatcgagggggagttgttttaccttttgataaactttgtacacagtgttattttttttgggtttgtgttaatattttgaatactgcttgtgtatctttttgattgcggtttgtctaaacttttggtggtttcaatgtggtttgtcgttgatcataatttgccaagggggagattgtaagtgtctgttttgtgtggcaaattagataatacttttgttcagtatttctgcaacagtatttgtttttctaacatcttttctgtagttagttgcatctgttttcactaatttcattttagtgccatgtcagctttctgcaagtttgttagtttgtgccagctggactttgctggttggttagttagtcaggtttattatcttcagtatataaattctgtcagaaccgtggtgctaactaactctcttctgttagaatcttcttcttgattcttgctctgctagggcaacatttttttgtgtttggttcatgtttgtgcagatagaaattccgatgatctt

SEQ ID NO: 399337 - DNA, 1269 bp, Cannabis indica
ttgtgcttgaatcttttgagtttattttaggttaggtttggaaagaattttaaggattatacttgtatttttattctgttattgagctctaaaaattatttgtttgaagcatgaattcttgacttgattgtgtaagaatataagaaaggattatgtggaattttgctctttgttggagctcaatctttatgttaattaatatgagttttgagagttttattgatggatttgatgcatgaaatttttattttaactctttaatatttattggcaactcttctatgtgattatagagtttgattaagctttgagttgaattttttgggtcttaggggctgaatatcgaaatttgcctgctggttttctgggtttgaaacccaggtgccacggcatggcttttgcatgtcgcggccagcccctatgaagaaaacttaggacttggccccaggtatcgcgacatagcttttgcatgccgcagcccgaccttgtgtttctaggcagattcgaatgcaagctttgaaagtgcataactttgtgatccaaactctgttttgggagttctatataccgttggaaagctcatttcaagttctatgtgattatatgtattttaaatgccatttatattttgggattttatgccctaaataaaacccattgcaatctaatctgatttgttatcaatagaagatcagaaatcaattttgtttacatgttgtttttcatgtttatggtttaatatatacaaaatctgttaagtccagaacatatagtcatttacaattacagtgatgtcaacacagtggatgtgattgtgattatatgcttcgaaagacaaagtccctgtttcatcagtgcactggatttacactgatgtcataatcagcgatgaagtgtacttacgctttgcataagtgttatgttttttccagaacattggcaaagtatactagtttcgaatgtatggagtatacattcgactggatcgatattgatcttggttaagatattataatcttaccattgtatctttctaagtcaatatcactagttgatcttagataaaaaaaacctaatcgtgatatgcttaggttcaatctcgggagagctattcatgtgtctttgatttgttagttaacctagtttctggtcagggtgatacgtacaattttggggaacatggtagtatgattgagttggagcgctcttctataggtatttagaagtgaaacgatgatttccttcgagttcaattccaagttctatgag

SEQ ID NO: 399338 - DNA, 1131 bp, Cannabis indica
gcaagaaaatactcatggcatacataggaaatgactgagcgacggttttaatcataactttttttccagcataaagaagcctcccatcccaatcttgaacccttttctgtattccatcctttaagaagttcaagatcacaaacttagaacgacccaaggtattaggcaaaccaataagataagtaatgtgtttagaagcttctgccatttgtagaacattgcaaagatccaatcgacttggccccaccacattggcactaaaaaagacattagattttgccaaattaacttgctgacctgatgtctcctcaaacttatgaagcaactctaaaactcttgttacatcttcagggaaagctttgcaaaagatataacgatcatctgcaaaaaatataaataagagataacacgagcttgcctgcaaactttgattcatctaatctacttctgagattcatagacttgaataaatgaggaaagaccctcggtacatattataaataaaattaaagacaatggatctccttgtctgatcccacgagttggaaagataggccccatctctttaccactgtttacaatagtataagacactgaagtggcacaagtaagaatcaaatcaactcatctctttgtgaatcccatttgaagcaaaattacacaaagataatcccattctactctgtcatacaccttactcatatccaacttaagagccatactaccctcctgacctctcctttttctttccaagtagtgcatgacttcaaagagaccatgatattgtcagagattagacaacacaaaataaatacactttgagtatcagacacaacaacatccaataacccttttattctattagcaatcaccttagaaatcattttgaccaacacattatacaaagaaataggctacaaatctcccatcacagagggttcttcttcttgggaatgaataccattagtttcattaagaccctccaggagaacaccatgtgacagtcaatagtctcgggatctgtaagggcatataccgggtaatctgtgcaatcccaccccgcctagggaaggtcaagtgagatgattctgagattgtgtaggtatgggactacacagttgaagagagctt

SEQ ID NO: 399339 - DNA, 1246 bp, Cannabis indica
tataaacacattattagtgtttttaggggtttttagagactaaaaaattagaaactcttaagtagaggcaactcaaaagaaaattcaaaagcaatcaaggagtacgaattttggagaggaaaattgatattgaaggctttctcaccagggttttcgaacatgagtagctaaataattcattagggtttagatggatattgtttgactattaaattttttagttttaatatgtatttaacttcccctcaatttctatatatttttattttattcaatacttaatttcttttaattgtctggccaaatagaaccaaactttgatataggacgagatttacctattttggtttggattagtttataggtattttttgtatttaatgcaattttacacgtttaatttatcacgatagtagaaaatttacatgtatttgatgtttatatatctgagaagactgtagattaccttagtaaacctgctattgcatagaattcggtaatagaaatataatcatgttaaaccataatcaatagatgcaattgaaaatcgaaagccctaacttttattcatagttaatttccttattaatttacatgcttcttattttaattttctcttaaattttatatagtcaaatcgaagtaaaaatttaattttaaagtatttaattacaatcattgtgggatcgacctcactctttgtgagtctattactggttaacgatacgtataattacgttttgaaaataccacaacagtatcaccaaaataaatttataatattcacatacatttttcattaaactgctatcttttaataatatataaacaaaattattcatttgttgaaaaaaaaaataattcaccaatatatataaataacctatatttcttaataaaaatatttgtaaattttttaccttataatatatatactagtataaattaaaaaaaaaaaaaacttacaaaaatactgttttttttactaaatattttcaaaaaatactgggacacggcaaactttatatttttactgtccaagcccattttttatttttttttatactgtccaggcccaatatatttacttttatactataaacagtaaaaaaacacaaacaacacctctcctttgtggttggggacggacaaatcaacaccggaatcatataaacaccaggaaaaaaccataaaatctggaaaagagaaaaaattactaaatcaacaacaaattactgttttgtag

SEQ ID NO: 399340 - DNA, 704 bp, Cannabis indica
ttttttaagggataattacataatgcattatattttgtaaaatttttacatttttacgttcattttttttttaatatatatttttatagtatttcataaaaacaataagaaaactacataaaaataataggaacatctaagcaacaataaaaaataacatacaaataacaaaatattaacaacaaatgaataagagtacaacataaaacgtattttctataaataaaatcataaaaatagtatgtttaaaattccgtacaaccgcatttttgtaatttttttgctatttttgtgtatttgtaaaataatcctttttttaatggtattttaatcaaaagtactattactttttcattattttataaaattaatttatatttaataaattcaaattgtaaaacattattaaaataattaaatactaactaaataaagagtatgattagagcaacaacaataaaaatagctttctattttaactttttaactattttagcttaaaaaaaaggatattggcggctaaaccacctgaactttacagtttgtaagacttaaccacaaaaactgaatttttggcggctaaactacctaaaccctggttccgttttgctctgcacacctccgtctaaaaatcacacttaagtgccacggtggactgtccacgtgtacacacttatacacgtggcaaatttttagtggtccac

SEQ ID NO: 399341 - DNA, 601 bp, Cannabis indica
ttagtgggtgtcaaaaaaacctaataattagaaatttagaaatttagaattttagtgggtgtcaaaaaaacctacttcatgcaatctctatatttatgtataaagaataatataaaataaattttgtcattggtgtttaagaaatatgaatctctcagtttagcgattattttaatttattctaagaattttaatgtaatctattactcctctcgagtgatgatagaattaacttaattaattaacaatatagctctatttaatgttaatcaattaagcaataatacaacaatatgattctctttaaatgaaacttatagaattaatggaatatcttaatctcacattttttctatgtcatgcagctctaagtctaattttaaattatctctctcaagtgtaaaatctaaaatctatatactaattaataggaatcaaacattaaaaagatgataattaacacaaaattgcatcaacaaatagcaacaagaacagatatggaaataatctcaaaactttaattcataatctaaaatagttccatcaacactctagaaagagtatttagttcataatcgcaaatataataaccacaataatc

SEQ ID NO: 399342 - DNA, 720 bp, Cannabis indica
ttttaagttatgaagccaaacaaactcttagtttttacatatttctcttcatgttttttaagttagtattaaaatttacatatgtaaaaggatatttgttaacgcagattttcattaaccaaatatgagcctaaccgtgataatctcacacagaaaaaataaaagcgataaaataaaaagtatgaacacatagggtttttacatggttttgcagttaaagttctgcatagtccacgagtcaatcttattcagatttcttattattttctcagggcccccctttttttgatcttacttgccactatttataatcatatagtgagcaattcattacaaagttgactgtaatcttttttcgatgatcatcccctagaatcatgggatttgattacaaataacgctaagttaatgcggtttttatttaaatttcacatagctgtgaatattccacttttattgggccaaaatgaatgcatattaaagatatacggtaagccttatcccattgggatgcctcgctgggaatggagctgagttaactttgatggcgagctggagctcgtcatatgtcttctcgtcgttgatattgcattatttcctccattttagaaagtttgagaaactcttaagcttttctgccaagaatcaccattgcgtttgtcttaggacttgcatgccatctctgtccttgacattttttctacgagtttcctccgactt

SEQ ID NO: 399343 - DNA, 639 bp, Cannabis indica
ttcaatatactcttactttctgcttaagtttagtatataattttcatttacaagggctataataagaacatctttaaaaataggtatatcttaaaaaaaaaaatatataaaaataaaagtaaaaaataaaacaaataaaataaaatgaatatacaatactatctaatttcctctaataaataagaattgttaaaaattaggaagcatctcctctaccctcgtatggaagccttgggcctaagtccggccgtgagtcattagtatatgtataattgaaaagaattgcatttgttgttattatattttttcaacttaaatttccatcaatatataataacaaacaattgtatagtttctcttaggaaaagagtgcctaattattgttattgataaggaatctgctataaagatgttacaattttggtgagatacgtaggctgccaaacgtgttcatttatgggtgactattcaatggttacatttttattgtaaccatatggttacatttttctttaacctgtaatagcaggttactaataggtagactttccttttttagatttaattaattataattaactattttcttaaaataattaattaaatagtagacattccttttttagaattatttaatta

SEQ ID NO: 399344 - DNA, 979 bp, Cannabis indica
ctccaagcacctcactgaattttcttgttgagaattaacacaacaatacactcaaaatacattcaagtatgaatctcggtactcatacagaaacttacgtaaaaatgcgtaacacataagccaatttcacttgaatgccacactattcataataatttattattttgattcccacaagcaaattttctgtacccatatgaacatttttaacgtaaaataaacgtgaaaaattactaaaatattatatatttattaattaaatatgccattaggtaattatttaccaaattcagaagatatcatgttctttaaccaattatatagatcataaaatatatccaatctgcatagaaatatgtgtgaaatactaccgtgattatgtaaaaatttatatgttaaaaataaataaaatcctaaataattactcaaaaatagcaaaaatctcaatattgtctcaaattaattccagacactataattatactttagcattacattgaaggttccccaaagattgaacacaatttttactatttattctttttaaaacccaattaaatagttaattagtcataaataattataataaatactatagcaactattaaattatataatccttttttttcatatcatagataataaataacattacaaaaatatattttactattttagaatcactaaactattttttataattattttaagtattaaataaataaattcatgaaaaatataaaaataatcaaaaactaattttaattattctaacacagtttatagtcaataccaagcgacaaataatttacgttgaatgtttggagcaaactaggtattttttataattgaattaagaaataacacaaataatctataaaaaatacaaaattgactgaaatttaaatctatcaattttgttacagtatatatctcataactaatcatataaataaacttagatttttctgagtaatct

SEQ ID NO: 399345 - DNA, 566 bp, Cannabis indica
taatgaataatttatttatgtttattaataatttagtttaactttgagacaatattgtattaggattaatgttaaagttatttactttgagacatttttaaattattaataaattttagtgaattattataattatattaattggaattttatttattatatatttatatataaataattatttatatatttaatattaggaaaatattttatttttgtttttataccttttagcggcggagcattagcggcgggacccgctaataatattaatagctccggaccccattttcggccgctaataatattaatagcggtcaagcattagcggcggaccaatagcggccgatttccgcagctgataccctatagcggcgaagagagagggtattagcggcggatttgtcccccgctaatgctatcaaatgttgtagtgactaagtatgaggcctcaagctagtcaatcgataacaaaatttgtatatctatccatcaatctatatatctatatatcgatataattttaattttctaacatctcattttttctccttttaaacttaata

SEQ ID NO: 399346 - DNA, 768 bp, Cannabis indica
gcattggcatttcagtgcctaatttctcgtttcttactctaggatagtcaaagattcatttcccccactggactagttccactttactctacactttctctttgctttcgcattccatccatcaaccaatatggaccatactcaaataatgtaatgattggcttgtctctaccatctaagattgttgaattgaaactctcacataaattattcaacaacatgtcatactgaacagaagtcctagagtgggatttggtccatctgttggtgattttttggatagccaatcaaatgcgttttcattagtcccttttaacacatccaactttctcttgaatttctccacagtaattgccctagcacaagcccatagttgttgcttcaacaataatcctaaaaactccttcttgaagttggcataaagatgcctaacacaaaatcgaacctcagatccttcatacactgtccccataaccttttccaatcccttttatctatatgaaataaaggtgagttttacagtgtcctccatatctaagtcctctttcagtagttcagcaaaccatactaaaaagttgaaaaggacactaagggtattttgggaaattctaaattcccgactaatctcgacattcccaatgtctaactatacaacctcgctatactaaaatactaagatgtgattctactgagccatacactgcgttccaatattgtcgagcactgaacatgcaaaattatgaaatttctatatatgacatataaaat

SEQ ID NO: 399347 - DNA, 1514 bp, Cannabis indica
ttagatctgtctgtcttcattcatggttttcacatagacctcgtatctgagtaactctcagattgactactcctttgaatgactcatactttctcgatcattacaatgtcgaggtcctaccccctcctcatgtagatcgactgtgatctcgagatcttatacgtctcgtgctaaaacttgcctcatcacgtacatgtttcctccttagggaaaggtttgatacatcgcccatgctggggtgtgtataggcctcttccctatcactgcgagaaggaagttgccggtgtctcagtggtaatccacttgtcctaggttgagtctcagggtttctcttgttacaacgagggatctcctggtccctagtcttgtgctgtcttccattctcgtttctacgagaagactctggaatatctttgtttttattcccttgggttgtgaatctatgagttctctgaggcacttcttgacgagatgcctgattatttggttgttcctcttctggaacatccacagttcccccaggttgttcctcctgagtgttctaggggttttcctgagctgtctcctgcctcctagttcttaagccccgagctctacctcgtggccttctcactccaagatcaggttggttctgtgtgttattttcttgagtcgccctggctgcggctacctccctctctaactcaatgtttcgttggtttgcttcagccagacgttgttggagttggcaattttccaactcaaccaacggtacgtatctagtgggatcataggcaccctcactcaaggtatagaaccaccaacattagtgttggtttcctcattcccaatttctcagttttgatcattatcatgttggtttcttcttgaacgtgttgaacgcgttgttcgtgaattgggtggcctccgtgaacccattggctcttttctaggacgacgattgggctcttcaggaggactgttgtcgttttccccattatcatccatggagaaaaaattccttcttctttggttaggagggattttttttgagcttttatcacgtaggctctcaatgaaagcaccaaactgttaacacatattttcgttaacaattatgagcctattttcgtaataaatttggcagaaaaattatgagagattttagaagaataatagaaataataataacaccaggttttgcgtggttttacagttaactctgcatagtccacgagtctatcttattcagattattctggatacaaaaatagggttttacaatcagtaaagttcttctctctctgagctctttcatccctttttttatatgatctgcccctatttacagtaatataggtgggaaattaattacatttaaatttgaatcccgtaacaatattctcgaaattgtgggctataattacgttacatttaaatacgtgaagatatcattagagaatcacgcagctgtgatttaaccgtttttaaggcgtttaatgctgacatggataggaacacgttgccaaatgtat

SEQ ID NO: 399348 - DNA, 594 bp, Cannabis indica
ctcacaaaaggatgatatatataataaagaacattgtgcaagaaaataaagctggaacttcaagcctaaattcaactatcttttgattatattttggaaaaagtcaaaacataaaagttctagatctctcttttatctttccggaatatcttgaatcgtctaattctgaataatattgagagagttgtggccaaaatactatcagtcaacgcagtagaaaaatcatcgtcgaagcgaagccacgtagtgaaactccaactcgggccgcggcccagcccttgtggggccgtgggccggccccctagactgcacaaaaatcgtccttttctctcacgtgggtttcggtagtttcccaattcgaataggcatttaacatgtgcgtttttatatctctttaatccctgaaagcctatataaagggtgaactggaattgatttcagggaagatattcagaaggaaacaagaatacaaattttagtgaccgaagtcaatctggaggcattctacagagggttttcaacattgttttattctctatcttcttctctttcttaaagttaatatgtgtgattttgcttccatgaacatgtgta

SEQ ID NO: 399349 - DNA, 874 bp, Cannabis indica
tttcagcattctaaaattgtccaaaagggattcctttcatcctatcaattaattcttcatgttttttaaacttttgaatgattgtagtgaatattccactccctctatctgtcacacgacctgaaaagtgggctaaaatgggaacattaagctctagagccatctgtaaaagataaacaatcgatttgtcatcgagaacccatcaataactatgtaagagaaaacatgataaaaaacactaaattctattgagaacctgctgagaactcatcgataatcagtaaacaatcgccaaacatgacaactaaaaaactaattaatcctatcgagaacctattgataatatgtcgataatcaagcaacaataaccaacatgacaaccaaaaattgtagttgttatcctaccaaaattttggtagcataacgactataatttaacattcctaaaaattttaaacttactataaacaataaaaaacattacataacaataaaaaaaaaccacccatccgaccacaatataaataattgcagaacctactttgctagggatgaatattcaagatattcaaactcatcaaacatgcatattaatccacccatccaactgcaaagtaaataattgcataacttacttcactatggatgaatatctaagatattcaaactcttctaatgttgatcatatattaaataaataatttagaattgtagaataatacctagataatccaataaagttgatttgggttctttaatcaccaaatatcaagcatacctacaaaaacaacaagatcaaaaataaaattgtattagttgatgagcatttattcatattgaaaactccatcgataatctattaataataaccaaa

SEQ ID NO: 399350 - DNA, 551 bp, Cannabis indica
tttggaaaattactatgtaattggattgattgttatccagactaattataagcagaaaaaacatttacgataacactcaaaaagtgtaatgaaatgcattttataatattttgacaacgcttaagacaactcatataattaaaagtattgattttgattacattttttacatgttattaaatagtatattataacattattttgatgttatatgttataaatagttaacaataatttagtgttatgtttcattacattttcaaaatgtaattatataatatttgttgacctaggttttcggcaaccaataaaataatataagattagagaactgtaagaaattaagagaaggatttttacgtggttagggcgttaatgagccttagtccacgagtcagtgtatttatgagtgtattaaatacagagaatattcttggtgagtattttctcttcttgccttatgcaacaccaaattctcgaccccatttaatgagctttgagggagtatttatagtgtttttggtggagtgattcccaggattattgtacat

SEQ ID NO: 399351 - DNA, 553 bp, Cannabis indica
actaatatgcagcagctagcaaataatatcagcaaaaacaaagcagtaccgactgctaggaggagcattttgagaacaattcttgctgggctggtatatcacatctggaaagccagaaatgatgtgttttggcatcaaaaactgtggcatacaaaggtcatcatacaacagatacaacaggaatgtaaactcaggattttgggggtgtcaaccaagcttactgaagaggataaacaatggttgttaggaagttaattgtaatagatttgtaaataccgactgtagcattgtaatgctgagttgttgagattaattctaaatgtaagtagttagtgtagagcactaagtgacatgagaaaagtggattgaggaaagtggatgtaaactgtaaagttttggttgaggaatgcaatgattcttattcatagaaaaaaaagtcttactaatagtcgccaccattagggtgatccatactaaaaataaaatacttacaaataatacttatctttcgagattctacggcgtcaaattgctaatgaacgttcttccatta

SEQ ID NO: 399352 - DNA, 1005 bp, Cannabis indica
atttggtggagcatttgagggttaaacttgggtttgaaggcgactttttagtcgatgcttcagcaaggaaatgaggcttggctttgttttggaaaatttcagaagaagctaatctcaccaaatcatattgatgttgaagtttgtataaggggcatgtcgacatggcgcttaactggcttctacggtgaaccaaacagaagacaacgtgatcgaacatggactcttcttttttcattgcacagtgagtcgtctctcccatggtgtatcatcggtgattttaacaatatttcaacccaatctaacaagagaggcgggcatccgtgcccaacttctcttattgatggtttcaagtcggttcttgatgactgtaaccttattgatctggaccttcacgactatcctttcacctgggatcctgggcgaggtacagactattgtgtagaaattcagctcgataaagcaattgtctctcttagtagacacctttactgaagctactctcactaacattggtttttctagctccaatcactcccctttttttacaatctaatgcccatcatagtactatcactgctcctcattttttatatgagaacgcttggtctcgagagcccatttgtgcacaaattgtaaaacactgctgggatatgcaaaggcacctatccctctttgataaaataaaaatttatggggataatttgacaaaatggggttcggatctcactggtaatttcaagggtcgtatttctaccagtaaaaagaaaatggcacaactgaagcaacaccataattttcccctgaatgtcgagtttgttaatgagcaaaataattactttgaactcttagctcaacaagagatctattggaaacagaggtcgaagcaattttggttacacaacgggaacaaaaacaccaaatactttcatgccactgctagtgccagaaaaaggaataatcaaatttttcacttaaaaaattttgatggagcttggaccgattggg

SEQ ID NO: 399353 - DNA, 532 bp, Cannabis indica
gtcaacttgggccatttctaacagaaattcagacaattcttatgggcatattcttcattttcatcaataattgagatatgggtgctttcgggaaacaaatggagccatctaagagtcagaattgggacccagcgcccaggttgacatattgtcaacctgagccatctcaaaatgtttctcctaaaaattcttccaggcatattctctgttttcataaataattgagatacaagtgtttctcggaataaaatggaagcatctagtgggcaaaattaggactcagcgcccagattgatctgatacatgggcccagcacccaggttgacattttgtcaacctgtggcagttccaagtgttttctcagaaagtatttcgggtatcttttcagtttttagaaataacaaagatacaagtgatctcaaggagcaaacaagatcctttgggagccaaaacagggccccaacacctaggttaacatgggtgctgggccctacgccaaggttgacgtatggcctgttggaaattattttac

SEQ ID NO: 399354 - DNA, 778 bp, Cannabis indica
gttaaatccccaatttatttttaaatgatttatcgcaaaacttccttccactttccttctctccctcgcgtctcactttcccaaatggaacccaacgaaccaaagcttcctttcactttccctctctcccttgcgtctcaacacccctcttggtgcgactcaacagccgaaggtttttgtacatcagctgttctctaaacgacgagttgatgtgatggtggggacaaacgatggtgagcgtgttttaccgagtgagaaatcgactgggtttgagcgattgaggtgggttctttggtatttctttcctttaatcaactttcagttagattggatgtttattttgctctgtaagtttatttttttccatttctttctgtcatgtcctgttgaatttaatatgtatatatgttaggtattttctactttatttaaaagtgatacaattaattcaatttttcccaatcgttgccgtcggatattgggaaagagtttgggtatcttgatttgatcgatgcttgggataacgatggttggtgggtgggagtaattactgggagtaaagataacggcgattactttgtttacttcgaaatctccaatgatgagattgcttatcctatttcgagattgatggttcatcttgattgggtttggcggcgtcgaatctcgcaaagaccacatgtagccttctctgaccgtccaacgaagcaccaaatcaaaatttcaattcgacaatgaggtcataaacaatgggagttcatagaggcgacaacaacga

SEQ ID NO: 399355 - DNA, 476 bp, Cannabis indica
gtattcggagatttggacagggaaacggagggtccaggcctcagacatagccttttcaatccaggcgggcttagcaattcaaggggataaagttttgaagataaggcagaaagagttggggtcagaggaagaagagagcgagatatgatcaaagtcatggatgaggttttcttcttcagagaggggggtgagaatgttagggttggtggaagaggatgccattgcaaaagtagaagaagttagggctacaatggtgagaaaaagaggaaaaggtgccgaacaacacaaagcttgaaggattaaatagacagaggaagtaggagaaagagatagaagatacctggatagagaaagacgcgtcgaaggaagagagtagctctgaaccatcgcttcgattcctggagtggctatctgcagaggcggaagaggaatgattacaaaggagtaaatgtttgaggcgacggataagatggttt

SEQ ID NO: 399356 - DNA, 554 bp, Cannabis indica
aaaaaaaagaaagaaaaaccatttctggttacaccacaagtggttcagcattattttttcttttttcttttttaagaattagtgattatgtcttatcttgtttgtagtatccaaaaaagactacattgtatactaattaatataaatgaattttaaagatattaggaaaaaaaagaattttaaagtttgtaaattgtaaaaatagatgtacaccacccctaactattactttactcatccttttatgataattactaattagtataatgcattaggattagtggtgaattcatataacattactatttactataatcacctcccaattcttcactccttgtgcattcataatcaaaacataattgttgataggttcaaattgaaaaatcatatttaaggttgcgtttagttggaagtaataaaatgaaatggaatagaaataaaacaagttttataattttattccattcctttgttggttagattagtattggaatatcattctaatggaatgacctttccaccattttagtagaataattattccattttaa

SEQ ID NO: 399357 - DNA, 522 bp, Cannabis indica
ttttatttgttttatcattttttagctataatataagtggacttcaatagttttgtgagaagcaattcagagggaaaaaggagtacggatttcagagaccaaagtcaataactaaggcattctatagagggttttcagcattattttattctctatcttcttctctttcttaaagttaatatgtgtgattttgcttccatgaatatgtgtagctaaattcttgattagggttagatgaatattatttgacattactttatggttttaatatgatttattttgctcttaatttctatgtattctatttcattcgtacttaattacttttaattatctggccatcaattaactattttatgatttcgatacgagatctgagaaatgagtgtcgattatgttataatgaaatggaactgaattttgatataggacgagagtacctgtatggtttagatagcttatagggtttctgtgtttaatgtgattaagatttatatatctgagaagactataaattacctt

SEQ ID NO: 399358 - DNA, 531 bp, Cannabis indica
acaaaaacccaaaaaataagtatgaacaatgaacacaactataaaacaaattcaaaaaattggaatgagcctaaaagaaaacttacgcacaaatttaaaaatattttggcactaaacctcatcacaccataatatattttggcactaaaattacactatcccatccttatcttcttctcctttttttttttgaacaatatcttcttctccatcttagattgacttggaaccctaaaataaaaacatgaattagaacccagaaaaaaaaaattgatttcatgttcttcaaaatcacactcatccccattcttcatcatttttaaaatcaaactaatctctaactcaaatctcagaaagctcaataatcattagccataacaaattaatcaataccaattcttttcaaaatataccattcaaacccattactcattaattattcaaaaaaaaaaaaaaaatacccattactcattactacaccatacatttttttctccatatttatcatctaatggaattgagagcataaaa

SEQ ID NO: 399359 - DNA, 1247 bp, Cannabis indica
ggattcgttgttagtcatactttctcaagaacgttcttgacttaagggttatggttaggtgtatgggcgcctgattataatctgggctattgctatgttattatttatgcttttctactgagtctgtcgactcacatatattgtttgcatgtgtaggtaagggcaaggctaaggttgagcagccgtgagaacgagcagattgagattgtacatatcgggcggttaggcctggagcatacagtttttcggacagcagggcttattttgtataatcgctaggcgataaacttttgtaacttgcactatgaaacatttgtaaatattttataaaatgggatctcggttaatacaattatgttattttgtatttataattagttaaataaagttttaattattcacgatttttaataaactcgttgattaacaacgagctgcacagttaagttaaaaatcacgttaacacgcctaaactagtagggtgttacacactcagtcactttttactcttatcccttagacggtaattgctaacttggaaggttgtatctcgtttgatacgtgttatcctccttgttcatcttaataaaaaaaaaatgttaactgtttggaagtagttcgtctcgtcatattcttttattggcattaatagtgcgaggtgatcttctcgctaggtgtaatgcaaggtaattatattttacattattgtactcgagtagatgaatatctcctttcttatttgtatattcagaggtaggcatatgtctcgttaatctcagctcaatagttattatccttgtctcgcttaagactatatagtcaataaattttgaatatttatcgatcaaacctttatgtagtaataacgagttatttaatatgctattactgatatgatattattatacccttagagtggtttcatattccttctgttggaaacgtgtcagcttcgagagcatagccgaatttcgggtatcacactatatatagagttcaacagcttaaccctcccaactgtagttttacttgtatttaaccctcgaatctcaaattttagcagtaaaaccctccaaactcttgaagtatagacaatttaagatgtcattcggttaactatctttgtgggctgcttatgtgtatactcttgtacacgtagcactattatatcggtacacctaatattattatttaaaaattactttcaaaattcattttaaaattcaataaaattataaaaataaaaa

SEQ ID NO: 399360 - DNA, 472 bp, Cannabis indica
tgggtgattccctgtttcctaggatatagtagttccttttagtaataacagaacctcaagtagttggttcggctttcccggattagggttttaacgtgagatttacccggtttattatgtgattagggcatccatccagcacgaggttttccgttcaggtcggccaactcacttgaattcggaaaggaggtaagaacaacgtataatgtgtgatatgaatatgcgaatgtatgaatgtgtttatgtatatgcatgcttatatagttagttcactaccaatacttgtacgaaaaaatggtacagagtgcattggtatagtgtatgtgattttaagagtacattacggtgttaccagcacaagtacgaaaagtacagggtgtgtgtggtatacaatttagtggtatttagggtacgaaatgaaccctccaacactcgtgcaatgaggtactgttgggttctgtgtcctaaataa

SEQ ID NO: 399361 - DNA, 672 bp, Cannabis indica
agcatctgcaaactcgtcatcatctaagatgtttgttgcccatgtggtgtcgacatcatttgagatatgtccatatggtgtcggcatcatctgaaaagtttgtggtatctatgacatttgttacgtctgcatcatttgtggcatttgtgactatgacatctgagacatctaaggcgactgaatcatcatctacatcattacttgtaaattttttggcgacatcatctatatgaatgattggaacatctaaaactgttgcaattgagacacttgctgaggagatgatgaaggtgcaggaaaagtgacatgaggctactctaacatttttccaaaagtaaagggagtctgcttcaattgttgatgatgaactagatccatcgggttggatgcattggagttgcatcaatcatctcatcttccagtgatatacgttcctcacgtgataattttggagtcaatatctcgatttgtcttagtaatctagcaaccttctataatttttatgaaattcttaagaatatgaagtgccaaattagacttcaaaaataataaattattttataggcgtataaaataagcttcaaatacacttattttcgtattttcgagcacaaaaatatgtaacaatccaaattttttgatatgacaacaaacatttgttggaaattattt

SEQ ID NO: 399362 - DNA, 1749 bp, Cannabis indica
attgacttataattaagaatccaatcacgcccttctggcataatcacttgatgaaattgaagaaaaaagagcctcaacaaacctaaagctagtagctcatcaacaaaaggtggctcggtacttcaacaagcaagtgagggcaaggaaattctttgtggggatatgttccttagaagagtgttcttaaacataaaagatagagcggctggtgtacttggacccaattgggaaggaccatatcaagtaacagaagtcacagattctggagcatataaacttggtcggtataatgaaaacatggaattggttctagtaccaaggtattggaacggggaaaattttagaaaatactaccaataagtgtacatggtctgatgacccctttaaagtacacaatgctcaaacatctactcttaagtaggtggccttgtgagcggacctcgctcaaaggtttggataaaacaactgacactcaggtcgaatgaccatctctaaagtacacccggtctagaaaaacaactattttaggttttaattagctaataatcagttagatcatataataggttttataattcaataaatgtacattactacgacaacaaaaccatccagaccagtaaatgaataaagatattaattatcattctaattgtgtctattagtttcttttctatagcaagctatgtaattaccattaaaaatgtgtacaaagggtctggttaaacctagtagccaaacagacaaaatcaaacttgtgcaatgcaagtgaccaagagtcataagtctgctcaatcacttgggagcaactatacccgtacaaagcataggtaaataacaagctcgaaaaacaaaacaattgcatgtgcattaaacttaagagaaaatattcattttaaaaggtaacaaaagcatgataactccaggattaaaagctgcccggccaactagttgtcttgaaacaaaatgaagtattacaaagtttaaaagttgcttggtcggccatattgtactgaaaaagcccatgggctgaactgaaataaataaaaaaaataaaaagaaaaacttcaaacggcgggagtccttggctctttgatatcgtcagcggctgggttgttagtactttggctggtcggagcatcggggttggctgcctcagattcttctttttctttttgggcctcacaaaaactaagacatgcctctttgttttcattgaggtaatcaaagttttcttctgggtttgccttccaaaattcatagaaaacatccagggcaaccgtctctaagctttccacctcattttgaagcacctcccgctctgcctgcccaaagttgagactctcctacaaaaccttcttctcctcggttaaatttaaaagaagggtccgaagactttccctctcatcctttagagaattgacatctctggttagagccacattgtccgctttaggctgggcagtggacggcatatcctaatctcctgttatagttcctcaacaagcttgttggcagccagaagttgcttattaaccttaaccagcttcagactcttctcctagggcacttttttggcttcctccacctcttttttcaagttgggggtggtcgttgtagctttcaaagttgctgacttggctcgagagtaggtataagccatcgggagtaggtataagccatcttcaggtggagctgcacaatgaagtaaagttaaagctgttgtgttttgtgccctaaataaaaccc

SEQ ID NO: 399363 - DNA, 573 bp, Cannabis indica
aactagttctaaataataaatagggatagactacgtaaatgttattattcaatccacaattattgcttaacgagacccgtattgtgttcatacgtaggagttgttgggcttgtaaacaaatgattaataattcaatttagtagttaggaacaaaagttttcacattaacaaaagttcaatttagttgcaatatatacataaattttaaggaaattagttacaatatttgatgtagtagcagaggagaaaatgacatatggtatccacctacctagtttgatggttcacctctacacaagaaatactataattaatattatatatatacaatagaagttctatttaataataatctattcaataaaataatctcaaatttattataaaaaaattaaatctcaatttaagtcacttataaataaaaataaatacattttctaagtctcatatgaataaagtatacttttatataaaaataattacatctcaataaaatatatatttaatataaatttatttatgtaaaattaatattttttttttaaaaaaaattataatacatgtataaatatt

SEQ ID NO: 399364 - DNA, 1279 bp, Cannabis indica
agtagcgattcacaaacattgaagatttctaagctttcctcgatccggagcactcagcagagcatggttaacagttttcaagacttatcttacagatgtgacaaatgggagaatcaataacatgacgttaacaaaaaaggggaggagggctacaggaatggcattagacactacactccatataaaatgtttaatttttagaggtactttagagttccatcttacttcagaatttttttagagtttgtaaaagatgaagtataaggcgctggatacaatgacttagaggatatataatccttaagattttatagatcatttgttaagcctaactaaattgtattgtattttatagtattatgttacatatatttatatttttgtataatataaagaaattttaatttatatcaaaattaagtaagatagtcgcttttcgcgtattaatttaatttttttaagtattataattaaaaaaaattattattaatataatataatttaaaaattattttaataaatagttatattgaaattatataaaataattacgtattaatattattaattaaatttactaaaaataaaactctataaaatagaaaaagttatctctagtcacaatagtattaattacattaatttacagtataaatacttaatcttaactcacagttacaaataaatattaagtttaatttttggcggttataataccaaagttataattctagaacataagtaggtacctggcttttaagtattaagtaaattgccacgtggcaatccttgattggtccaagtcaataaatttttatttttaaaaaaaatagtctaaatataccaataacaacaagaaaaagatacatggataatgacttgatatttaacggccaggtacttatgaaagttccagaaatataatttaggtattattattagaaattattttacgaggatctagaattactaacatgcatgttgtattataattctataatctaacaacataaatataaattttcaaaaacaataataaacaaataaaagttgtagaaaactttacattgatggcagcagaataatgtgacttcttccattcaaatccgtaacccttgatcctttctgttgcagagtataatcaagatctaaacctggattctccttcagttgacaatttaaactacacaatcttcctcactatgctgagtattgctttgaaatgtgtggacaatttctcaataccaaggaccacaaatttttgtgaagaaaactcaga

SEQ ID NO: 399365 - DNA, 1568 bp, Cannabis indica
ttatatattgtgtctcgtgattcccgtaccgtattgtgcttaaggatatatttttttgtgttgtgtcgttctaatttataacttcgtgctaagcctatattttttcgtgtctaattgtattcgtgccttttaatttcgtatcgtgttaaaatatctgacccatatttatattactaggcaccatcatagcaatgctcttaccatattattatgttatatgaaaatcacaaaagttgattaaaaaataaaaagctttgatttggagaacggtagaatagactatagtactagctacttttttaaattttggcagtgaaataaaataattgtaaacagttgaatttgtactgtgttgattattctttagtttccaagtttgaatatataggaaaataatttttaatataattagtctaaccaatcaattatagatacggaactcctgaaaaaaaataacaaattaaatttacgaattaaaaaaaaatatattaatataatatattgttaataattactattttttttaaaatataactcaaacttgttgacttgagtatttatagttttattaattattttgatttttttttcttctaactttttataattttagtatagtttttttatttatttaagaattataaatagtgagtattatcaataaaaattatataaaattgtctataactattaaaaaaatatattgttataataataaatttaattaataaagaagttaatctagttaaaaaataataataataataataataataataaagaataataaagaaaaagtaaaagactaatattatatatatacataattctacatacccaacgttttcgaaattaaatttatagtaattggatttttattctaactctgagctgctctattcaagagaattgtctggactcgtaggaccaaaatatttattatttattattttattattattattattattattttttctggatggaccaaataaataatctcactcaccaatctcatgcaagtggattaaaatatattatataaatatattttgaatttaaaaataatttgaatggctgtcgaaaaaataaatcaaatttgatcaagggaaaatatgtagaattcttcatatttttgttttttaaacaaagaaattgtacaacttttttaattatgatatgtgagcaaaataatattttgtgtacaaagaaaatgtacaaatagtactatattgatgttcgtgtaaagtataattagtttttttttttttttttttaattaagttcaattaggtgatgttaagtgtaatacatgtttgtttattttttttttaattagataatgtatttatttttagctgttactatgttataaaataaaatagtcacgtgtgcaacataatatttgaacgcaattttaggcgtgttaaactttttctgaattttttaaaattttacaggacctcttaaataattataattaatttatatgactatgagaaaaaatttgactaaaaatttatttcggatatcccttttaaaggggtgcattatagaattttctaata

SEQ ID NO: 399366 - DNA, 893 bp, Cannabis indica
ttgttatggcttcttttatttttatgcttggctattccaagcgttccacaggtaccactcttagtttctcaatttcgctgtctgaagctaacttagacacacagtccgcgtgagcattcttttctctggggattctttccactttatagtccgcgaactcatggagcagttcacggactattgctacatacgcggccattctttctccgcgtgtctgatattctcccgacacctggttcactaccagttgggaatcgctgtagacttctactcttttagtccccacagtttttgctaatctcagccctgctatcaaggcttcgtaatcagcctcattgttagaagctgagaagtcaaaccgtagggctgcttggagtcgaagtccattcggggatatcattgcgacccccgctccggatccattctcgttggaggctccgtctacaaataccttccacgctgggactgatggtgtgggtatgtttgcggtagcttcagcttcattgcactccatgatgaagtctgctagcgcctgcccctttatggaaatgcgtggaatgtagtgcaagtcaaattggcttaactctattgcccactttaggagtctttcggatgcctctggcttttgcaagacttgccagagcggatggttggtcaataccttgattgggtgagcttggaagtagggtctcaactttctcgaggccatcaggaggcaaaaaactagtttttcaatcactgggtatcgagtcttcgctcctatcatgcacttgctgacatagtacacgggatgctgagttttctcctcttcccgaactaaggctgctgttaggctaaaattagtctaagttttgggtcatattttcggttagttttcactctttgtttctagt

SEQ ID NO: 399367 - DNA, 577 bp, Cannabis indica
tattaataaaatgaaaaaatccccaaaagaatttacaaaaaataaataataccaatggactttaataaaatgaatataaatcatatttataccttaatggacgttgagattcaacgttttctccgctaaaatcggtggccagagttataccaccacattttttttataatatgttcagtttgatatatagaggagaaaaaaaaccaaacttttttccagtgtaggtttaggtattgaaaatagaagattttaagacaaatataggatgaaatagtgaagaaatgagagagattgagactattttagtggtggttggggagggttttttcatgggtttggggctgctatggtggctgttcttcgtgctgaagaagatagtgaaatgaggaagacgaagtaggggttttgatacataaccctatggtgtcggttatttggtattaactgacgccataggtgccaagtgtcgactaaaggcggcacctattgcgtcggttaataccaaataaccgacgctatagggttaatcaaaaattctaattttcccccaacccccaaccgacggcatagatatata

SEQ ID NO: 399368 - DNA, 740 bp, Cannabis indica
aaccaatccaacataattaaaaacatactaataaaaattatttccaaatttagaccatatgtgttccactaagtctgcttgaagattgcggtgaatatttctatcacgaattttggcatttctttgaatcatagtcgggaagttagaaataagtccatggcatacttcaaccgttggggtatcggtagagccttcatcgtaattaaaatcaaatgactcatatatttatctttcatcttcgacagtcatattgtgcaatatgatacatgaatacattatatctttaagagcatctttttgccagaatcgagccatacctcgtataatggcataacgagattgaagtactccaaatgttcgctcaacatctttgcgtacagcttcttgacattgggcgaataattttctcttctctccttgaggcaatggatagttttaacaaatgtaccccattctgggtagataccatctgctagataataccccttgttgtactgtgtgccatttatcataaactcaactcttggagctttcccttgtaagatgttagtgaataatggtgatttatttaaaacattgagatctttattggatcccggaacaccaaaaaatgtatgccaaatctaaagatcttgtgacgcgactgcttcgagcatgattgtcggtgcaccatgatcaccttgtgtgaattgccctttccatgcaactgggcaatttttccatttctaatgcatacaatc

SEQ ID NO: 399369 - DNA, 798 bp, Cannabis indica
agagggagagggtcggttttggggctgaagcaaaaaccaaaaattctactttctaatttgttaataattacattttgttacaaataacacaaatgtcaaaataacaataatgcccctacggccatataacatacatataagcagtcaagggcaataaagtcattattcacatatcacattactcaaataatctttagaatattcatgtatcaataaatgccaatataaaatcccaaaaatgtgtttcggccacgaactcagttggcctgaaattcccaattgtgactatactgcgccgacctgtcagaaaacacctaaaaaaggaaaagacaagtatactatataataatatagtccataagcacgtcacaacattaaaattacagttttaccgctcttgggtcaaaattacaaaaatgtcattggctcaccaacgggatcttagcatgtcatttatcaaattaattcacacataataaattatataataatataatttcatataaatacacatgtaactagttagggttcgctaatctgttatcttaatcttaggatattacaattatcgcctctttatagaaactttgtcctgaaatttacctaaacaactccggatatttctgctgcatatccgtctcgagttcccaggttgcctcttccactttactgttcctccataatacctttatcagtgaaattgtcttgtttctcacaactttttctcttctatcaagtacttgcaccggttgttcctcgtatgatagatctggttgaagttccaatgcttcataactc

SEQ ID NO: 399370 - DNA, 721 bp, Cannabis indica
caataatcacataatttgcattaaatttacaggttaacatatagagcttgaaacgagctttctagcgatataaagaacatccaaaacggagtcttgagtcaaaagttataggccaaaacaaaattcagtcttccccgatacagtccaaccggaattccagttggaacagccctaaaccaaccaaaattccagttgtctgggcagaaacaacacgaaaaataatctcaacgtttaagcctccataaccaactcaaatcttccccaatcaccaccaaactttccagagcatcatcatataacatattaaacatattttatagctcaaacacaataattgcaccaagaatcaaaaagtgtcattgttgagcaagctttgagtacttgaactcaaacttgctcaaccacacaattaaacaataagctcaattaggtctaaatcttcaatagaacataacccaatttcacaatctaaacacaaagtaatatctactaactctaaacacaactatgactacaacaccataatcaactctaatctcacaagcatgcaatttcaagaacataatccatggcttcacatatattttcactataaaattacagctataaaattcaaggtaaaagtggtagaaacactaccttaagctcttccaaagtccaagcacaaaatttcacaaatccaagcttgaatcaaaccaaaataattaccttttgttacaaa

SEQ ID NO: 399371 - DNA, 580 bp, Cannabis indica
agtgcgatcaacttccctagccagatccagcgaagatcagtttaacatctctaccctccatatcaggtacgtgtctctttatctgtgtgttgtattttttcaaatttgttgttttgaattgcatttgcatgttctattttgagatgaggttaaggtcttttcgattgtgtgattgtcttctaagatagatttgggaaccacaaattgcgtaatctttcaaattttttgcttggaaatttttggagtagattgatttgcggtagggatgctggcaaatctttatttttgccaaaaatccttctagttttgggtttgatgttagtttctgtcgtctctcttccagcattgttcctgactccctatctggaatgagtgcttcctgggaagtctcatttttggatagttagtctagttgggacctctccaagctgttagaatatattttaccaggacctatatttactaacaagtatgtttttaacatcctaaatatgaatttctaaaataataaaatttaaacacatataaagtatgatctaagccaaacactccttcagttgtttggattcttcacagtctt

SEQ ID NO: 399372 - DNA, 675 bp, Cannabis indica
aagaaagtaatctatggcttccggacattttgaagtagacaaattcaatggagccaatgaatttgggctgtggagaatcaagatgaaagcttttctggttcatcaaggagtgtatcaagccattgataaagaataattgaaggaattgggagatgacaagaagaagatcaaagaaattgaaacaaaggctcatagtgcaatcttgcttagtttgggagatgaagtgctgagagaggtatcaaatgaggaaacagctctgggtttatgggaaaagctagcctcaatttatttgaagaaatcccttgccaacaagttatacttgaagaagaagctatacactctcaagatggaagattcgaaagaactcagaaaacaccttgatgagttcaatcgaattatccttgatctcagcaacattggagtgaaaatagaagatgaagatcaggggatattgttgctcagctcactaccaaagacctatgaacactttgtggatacgattctatatggcaaagaaaccttgagcatgacagaggtcaaggatgcactcaattcaaaagaaatccagaaaaggaatgaggaaaggactgatggcatagcagacagtctgtttgtgaaaactagaagcaattcaagagatttcagcggtggacacaataaagctaatcacaagaa

SEQ ID NO: 399373 - DNA, 777 bp, Cannabis indica
tcactaaaaaagtcgctagaaaaattatttttgccagaaaagtctttgaaaaagtcactgtcactggaaaattcactggaaatagatatctcaaatataaattaaaatagaccggttctataacataattgttgttatcataatttttgcactctaacgtggcatcacacaatggtgacacgtggaatcgactctgggtacctgctcgcaagacacaggccgaacaaggcacctcatacattcgctcggacgaagtcttctagaccgagcagtaagcaatctgcgcaacatcccaacaattagcaaattcagcttttccatcgtgagtcatcaaggaaatccctataactttgggatcggattacagagatatggcaagctgtccaaatcccacgattagtgtattctgtatttactatgcaatctttctgcttatatcaattgtaaccataagggaaatacttcccctccaagcttatagccctataaatagtggctcatattcactgggcaaagggtcgaaagattttgtctaagaattcatattcagagatactgttgtaagagctctaagaaaaggaactattttccttgttcttcagtcaatacaaataacgaggattaggctattaccgaactgctcggggctgaacctctataaaattcttatgtctttatttgctttactatatttcattcgtattaaactactcgtcgtttacaaaattatgttggaatttattttaccaggatcttagatctactcacaagtatgtt

SEQ ID NO: 399374 - DNA, 542 bp, Cannabis indica
ctcaccctcaaaataggttgttagaatagtaacaatattaaagaatacacaaacaaaactaaaaccaatcataaaattaaaattagaacttaattaaaattagataagaaaacttagctcgagaatgatcaatgaatcatagatctttattgcttgaatagtaagtagtacacaattgaatatgcccaagaataaaactcaacacagggaataattacaaagaaatatctcacattgagaaaaatcacttcaagaatgatactcctattacatccatccacacacactaactatatgatattggattctctctccaaacttgaatctaagcctaaaagattaaagatcataactcagaacttagaaatctctttgagaatagaggaacacatatttatagttgttggtgggatctcttttaagttggtattaaagccaaatattataactaataatagttttcttcaaattcatctgatgagcatatagatgaacctactgacttgacatgttaagtgatgagtttaatcccaacatatata

SEQ ID NO: 399375 - DNA, 703 bp, Cannabis indica
ccaagtccaaaaaggcgaggggcatatggaggacctagacaatgcttcaaaatcctttgcagctaaaacatgaagatcaaacttagaaaagatccaagcccttttggacatgaagtcaccgacaacaattgaggaagtatgaagccaaacaaaatgcattgctgcactaagcagatttgtgtgcaagttgttatgaaaaatatgaacaatacgcaagtgcacgtaatcaagtagtaaactcacacatgtgaggtcgaaccacagtgaattggactgaataccactagattaaatttatgattctatttggcaaaccaataattttatgattgaaaaaaaaaccaaaacaaagagtatcaagaaactaaaattaacagcaaaagatttaatgaagatgataaaatagggaagagaatcctgttgatttatttacccaattgttaatgctaattactaccctttttcttgatgtgaatgacaaattaaacaaattaaccgaactcttttcagatcttttaggccctaaatcacctgttatctaatcaatttcggaattaaattaacatgtggtcagctttaagcaataatataaatatcacacaggttatgcaaatactttcgtttcacataaaacttagattatccaattttagcattctcaattctcacttttcagattatgaattgagatcatagaacatgt

SEQ ID NO: 399376 - DNA, 618 bp, Cannabis indica
tgcccagctcgctactttttccgatgatatttttatagctctggccctttctggcaactttccggtgatatcgtgtaccgttttgacaaacggttggcatgggtgtgatctactcgtggaggtggtcattttaatatacactactcctattttcagcgacgtttccgatacaccaatttttaccgccaccaattgttaatgtgcaccgcttaggtgaggctttagaaccccaaattttaaatatagtcgtattatatgtcattagactcgcttttgaatgtagaatgggatgatgataattattgaacgatttaatggtataggtgagagtaatattcaagattagactaaacaattggagctcgggacttgagagcttaagatcgttttttgaaaaaagtttaacgacttgggagaggtagggactcaacttgattattggacttgatttttatatgtgttgtataacatttgacatattccaattttttttatttacaaattgtttgaaaaattgaaaacttaatctacatatttttctggactgttctggggcactgagtgccaaatatattttgtgtgcaaatatttatgcaggttatgattttttgggtttat

SEQ ID NO: 399377 - DNA, 597 bp, Cannabis indica
ggcaatacaatgaaatcaattagtctaaaaataacaaagctactaatcaaagaaaataactaaagccccctctttagtgaggctctccttagcaaggttgtgaacaacctcattaatagttcttggacaatgcttgaaaagcacttaagagagatcactcctagtacaacctgatataaggattccattataagaattatcttgagtttgtgagtttaacgacataatagcattgatacaattagaaaaagtgataaccttttgaattccaaactcgtgcaaatgagaagaccttgcctcaaggcttcaatttttgccataaaatgattaaaacccgcctgaatcaagattgcaactaatgccttaagcgaaccatgaagaccaaagatagtaacccccactctaattttcaaatcagtagttatagcagcatatccactttcacttgaataccgttaaagttagttaaagtacagatatcaatacttgggcctaggaggggctaagtagtggtcgacacttgagaagtcttttgaatttgaaaactttagagaaggtcaactgtcccgccctttgtaaaactgtacactcatgtta

SEQ ID NO: 399378 - DNA, 887 bp, Cannabis indica
taaaaaaagaatagattgacacttaagttatattatatttaataatattgagtagtatatctttaatgagtgttgttattaaaactaatatagtgtatggtgtattagaaatgtctcaatagttaatgtataatatttataaaggtaaaatatagataaaaaataaaaaagtgtttaaaatacatgtatattaagtgagctataatagtttaaatttttagtgctaagaaattttaagttttagtgcctataattttttattatttttataatatagctgatttagttataagtgtaaaagtaaataaacataatataataatatttaaatatttgtgtattataaatatattatttatatacatgaggtaaaataaaaaaaaaataaagttttaatgagatattttgaacaataaaatagaaaaacttgtgttgggagtacttttacaagtatagttaataattttttttttaagaaaattactccattactattgttttttaactttttttcaaatttacattttgagtttttaaagtagtttctccggtagtttctgtgtcggttgctatacgatttttagttgcgatttagattactccgctaggaatttctatgtaaaatttcgtaaaaatacaaaaaaaaatattatgttgaagtataaaaataaaaaagccattttctttattattattaaattaaaatatatggaactcatacaatatgtaattcttaagatatattatcataagtgtttttaagaaattatcatattaaaaaaatattattattaggtaccaataatatagtataacatattttaagaataatttataatttttttataataattatcaatttaaaatatgtgagacttaatattaaa

SEQ ID NO: 399379 - DNA, 633 bp, Cannabis indica
aaataacataaaattttgaaaaggtgttcattttggtttgaatagatattttagggtttgctaaccataaaatttttaaacttaggatattttattttatttatcttaaataaagttgataatatcctaacaattaaatatcgtattttaattttgtttatttttttttgttaaatttattttattaaattataagattataaatataatattagaaatatctcaattttcgaattaaggtattatattaaattatcttattagatatttaattaatttaaattatttaaatataaaattcgaaatttggcagaaattgcgtcctcggtgtggccacgaattccctcgccacggcgacagcttgctgccaaaaaatttctgtcccatgttcagattagtattttagccataacttattcattagagctcagaattggacgattcaagatgttccgaaaagctaagaactagatctaaaactttcatactgagctccaagtacagttctgcttctaagattgtcgaaatttgcaattaagttctaccttataaagcttagcttaccgacttctactattttcaccaaaatgtgctaaaatcctttcaaatgactccaaatgcatgattagtctt

SEQ ID NO: 399380 - DNA, 1063 bp, Cannabis indica
aaacacgagacagatgtggtggttagaactagttaaagactatgattgtgaaattttatatcttcctagaaaatctaatgttgtagaagatgctttaagtcgaaagggtccagactgagccttcagcgtcataatgattttttctcagttagcctcagatatggctagggcaattatcgagtttgtacttgaaaaattgcataatctgacactccagtcaaacttattaggaagaatcaggatggcccaattagaggatcctgagttaattaaggttcgagaggaagtattagcaggtaaaactaaggacttcacgattttgagcaatggagtgttactattcaagactcgggtatgtgttccgagtaatgttgaccattaaaaagaaataatggatgaagcacatacaacaccttattcattgcatctagaaactaccaaaatgtatcaagatttaaaaccccattattggtggtacgggaggacgagggatgtagttgataatgtgactagatgtttaacttgccagcaaattaaagcagaacatcagataccggcggggttacttcaaccattagcacttcctgaatggaagtgggaagatattgcgatggacttcgtggttgggttgcccaaaaccacgggtatgtatgactcaatatgagtcatagttgactgtttcatgaagttttttgcctgtgaaaatgacctatgttgtaaatcaatatgcggaattgtatgtaaaagaaataatttgtctccatggagttttgaaatctattgttttggacagggatcccaagttcacatcaaaatttttggtgagtctgcaaaaagccatgggtaccaacctaaagtttagtacaaccttccatcctcaaacagacgagacagtctgaacgaatcatccagatgcttgaggacttattacgagcttgtgtcattgacttcaagggttcatggaataaatacttacctctaattgagttctcctacaacaatagttaccagagtactataaggatggcttctgagatgctatatggtagaaaatatcgttctc

SEQ ID NO: 399381 - DNA, 1060 bp, Cannabis indica
aaacttccttgtttcttctcttttagagaaaccaccaaagatacttccataaattgcctagttttttcgcctttctccgtgggtttttccttgattctacagtgctgttaagggcgaatcgtgggaacaaatttatcagaagcaaaaggttagttctcgaatcttctctatgttttgttttcggtttgagtgagaactgtgtcttctgggttttatttttttttgatatgcatgagagagtttaggaatgaatgtttgtaggggatatatatgaggctacgttttttaggtaaaaaactgggtaatttcataaaaatgacctgtaaattggcataaccgcatacgtataagaaatgcttgaataggcactgtttcatgctttgaatactcgcgggtattcggacgaacacttcgaatactcgcatatttgcgagacttaattacttctgattgtcgcctagatctttaggattttgtattctgtgaatttggtcgcgagaacattaactgagtcttcaaaatggtggatgtgtcacagtattctaatggtcatatatgcggttatatgtcccttgagatactgtgatacacccagccatttgcgacatgcgttaatgttctaatgagcgtactctttggctggtagatattctcgaaacggtgggagtacctcagtaacttcagggtcatgcttgagaacgcatgccccttgagtcattgagtttctcccagccgtttctagaggtatatcgcttagcccaggatgcgtgacttattcgcaggttgcgactttagttagactccttgaaatggtgggtgtctcctcgtcgcctcggggtcatgccggaagacgcatgtcgctggggttaccaggacactcctaaccatttattgggatgcttttctatttgcatatttagtattcactctactcgcatatttatggggtggtcagtattcgcgagaatgcggaccattctatcaagtgcgactttatagtttatatgcgagtgagatcacttattctgttttcacacattcaccacgctgaaaagatctt

SEQ ID NO: 399382 - DNA, 688 bp, Cannabis indica
agagagagagagagtatgaagaggtggtttttgtttttattaacattatcctttaattaattactatttaccgagatgtttggaaactaaatatttgagaactaaagaattaataaaatatagaataaagagatggagattttttatgtggtttgggtgttaattaaccttagtccatgagtcagtctattagcgtcttaggaagtttttgatgtgtttataatatttttgtaagaaatcccaactctgtactctatgtttctcttgaagaagaagaagacgaagagtgatattggtagagtttcagctatgttcgttctgattcccccttcgtatggaaatagaagggtacttataggctaagtggcgggtatggacatggcatgcctagggtttttgctcaaagcccactaatggggtaaattacatgcaaaatgagatttgactattgggtcccttagaatccattgtgcccatgcgtcctgcagttggataattagggaccatttgtacgaagcagacatttgttacccaaaggtttaatctttaaaagtagagtccacgtgtcgcccaaagctttcacctttaaagtagtagaagtcagtaatattcgtctgttataaaggtggtggaggtgtgcgcactaccatgcttggacgtaggggactgataactctaggaattagag

SEQ ID NO: 399383 - DNA, 389 bp, Cannabis indica
aatagaagaagattaaaaaaatatcaaaggaataagatggaaaaaaaagataaaaaaaatctcacaaaaagatgatatataaaatagagaaaattgtacaagaaaataaagctgaaacttcaagcctgaattcaactatgttctgattagattttggaaaaagtcaaaacataaaacttctatatctctttttcttttcggaacatcttgaattgtccaattctaagcaatatcgagagagttatgaccaaaatactattagtcaacgcaccagaaaaatcacatcctctactaatcctaagcagaataggttttctaatcctaagcagaataagtttttttctttcagtgtgtttttatttttttatattcatttttttggctataaa

SEQ ID NO: 399384 - DNA, 847 bp, Cannabis indica
attgagttagtgaaaagttggtcaaggccaaaacagtgacaaaagtacgaaattttcttggtttaatagggaaatattagcattttcttgaaggattttctaagaaccctatgctactaaccgagttaactaagaagaacccacagttcatatggtctgacaagtgtgaagcgactttttagaagttgaaacatcgattaataacagtgttagctttaccatcagatcaagaaaggttcactgtttactgtgatgcatccagacaatgtctgggatgcaagctgacagagttataacttatgcctcccgtcaattgaaggattatgagcagcgctacccaacacatgatttagagcttactgctatagtattcgttctaaaaaatatggcaacattacttttatggtgaaaatgtgagatttacatagattttaagagcctcaagtattttaccaattaaaaagatttaaatatgaggccgagacagtgactagaataggttaaggtttatgattttgagattctgtatcatcccgagaaagtcaatgtggtggcgaatgccttgagtcgaaaggtctatgtttagaaatggttaagattgaaattaaatttgtggttgggaagttacagcgtgacactataatcagatttgctagaaaaaaaaaagcaaaagaccgtagttagaagatcctgagctagttaattcgggatgagatactggccgatcggcctagagacttttttatctcaaatagcagaatgttactatttaaagctcgagtttgttttccagatgatggtgagcttaagaaggaaatccttaatgaatctcatataataccttatt

SEQ ID NO: 399385 - DNA, 876 bp, Cannabis indica
tttaatatcatggataagaaagcagatactattgtgtatgttaaaaaaagaaagaggcctaagaaataaaggtatttatttaaatttttatgttctttatttttttttttcaatatcatggttgttgtttatgttcttgtgttgttaatgttctgatcaatattttcaggatattgttccttatgttgatcctgctattcaactgtaggatgttccacaagcagttagtgtgtccgaaaatgtaaatgatcataactggttttcttgtttatttcttgttcattttttggtgttaattcatgttcttttttttaaaaaaatacttttattttaatcttgtcttttttataactgttttataaccagttttaatcttgtctttgttattgttaaaaggttgattccaataagtatgttaatgttccttcggtatgtggtgattctggaaccggttctaaggttccagttgatgattctaagaaagcagaatttaaaaaatctcgtgcaaagaagaagaaggtgagtatctttcctatgttctattcttgtttttgtattataactggtttttttctttaggaaataggttttcaaatgttgattttctgtaacttagtttttatactatttctaactggttttttctataagaaatgggttttcaaatgtttattttctgtaatttagtttttatactatttttataactggtttctttttttaatgtttttcatatgttttgtgtttcgttgcttgttttagtattataactggttttttttgtttgtattacctgatgtttgtctcactttgattttttaaagttttgtttttatattttttttaaccggtttcttttttgtgtttcaaggttaa

SEQ ID NO: 399386 - DNA, 879 bp, Cannabis indica
tttgatcatcattacctctagaattgctaccactaacacataccatttcaagcctttcactagtggtttccttaatggtaactaagaggggaaataatgtctcatcaacacatttttttctcaagtgaatatagaattgtaaactattttcatcttttattctcatgggtgggattccttgcttaggttggaattgaatttctaattggggcttatgatggtcaattttggtagcatcataaatcaatgtattgaggtgtttgaaggaacaacttactggtatcaaaactcctgtcacttcaaaattcacaaaattgcaacgatctacccaagttccattgtagtaaacaaacacaatactcgtatccattttgacattaactgcacaaatcaaacaaaccaaaaaaaaaatggtgttataattgaaatataatataaaaccatttgtgtctcaattctcatcatctctccagaactccattcccaattgagtccaaccctaacaatagctccaataccatgtgaatacggaacaaatttataatttttgttgttgagattttgcgaaacgttgaatattgaagaaatttgggttaggtttaaactaaagattacctgggaagcgaagaaagccttgtaattgaggagagagtgggagaaggagacgcaggcggggtttcgctgaaggtcgccgacgagggcggagcagagggaagggtcagagaaggcgttgagcaaggtgcatagattctttgttttgagaaaaagaaagaaagaaagaaaaagaaatggattctggaaagactaatatggataaatgattccacttcaagtctttaatggcatgtttgaattaatcatttcttaaatttgtttacc

SEQ ID NO: 399387 - DNA, 810 bp, Cannabis indica
ttcctcgaacacgagatttaccgttgcgcattgatctttctgatcatgatgtagggtattggcatgaccttgcacgagtgcaagagcagcacagagattttttaactcagtatcatctccaatggtcgtttgagtgttggtaacaggcggaacgattttgctatgaatgccctggttggatgctgaactgttattcccaatctcttgcacaccaggcgcgatttcatttataggagtcgttacaccgtgacccacgtatgccggctgttcaggattaacacttggcagaaccctggcgtttcctgggttctgcaatgcaggatccaccgtctgtggattgactggatcaaccaggcccctacgagtctgtaccaccatcgtacttgtggttagattttgaatgaagaacgattcttgattctatctctcaatgaaagcaccaaaatgttgacctcgcttttagccaacgacagtgagtcttatttagtaagcgataagtgatttgtagcaattgatatatagtaaagcaatgtaaagacacaagaattttatagaggttcagccccgagcagttcggtaatagcctaatcctcgttatttgtattgactcaagaacaaggagaaaggttccttttcttatagctcttacaataatatctctgaatatgaattcttagataatatctctagggtaaaatctctcgaccctttgcccagtgaacatgcatcactatttatagggctatgaacttggagaggaagtatttcccttcgttttttttttttgaacaaaaggaaactttttattca

SEQ ID NO: 399388 - DNA, 1069 bp, Cannabis indica
tgacgagcttaagaaagagatacctcatgaagctcacaccagaccttactcactttatctgggaaccactaaaatgtatcaggatttaaaaccctacttcttgtggtatgggatggaaagagatgtggtggactacgtgtccaaatgtttaacctgccagcaaatcaaagctgaacatcaaaggtcggcagggttattgcaacctttagtccttcctgagtggaagtgggaggacattgcaatggattttgtaactggtttgcctagaaccataggaatgtatgattcagtgtgggtcatagtggacagatttacaaaatcagctcactttctgccagtaaaagttacatattcagtggatcagtacactgtatgtaaaggagatagttcatctccatggagcccctaaatatattgtttcagatagggatccaaagcttacatcaaagttttgggtgagtcttcagaaggctatgggtaccaagttgaagtttagcacagcctttcacccttagagtgttggtcagtcagaaagaacaatttagatactggaagatttagtgtgagcctgtgtcatggaatttgaaggttcatggagtaagtacttgcctctacctaaattctgctacaacaatagctaccagagtacaatagggatggctccctatgagatgttctgtaatgaccgctttagtaatttggattagtaaaggcaattagcactaatttctgttattttataattatttatgaatttatttaattgtgtaccccaatatttagaaataaatattagagttataatttctcaatttcagagattttataaaactctaggggtattatttagcttatatgtgaaatatgcaaattttgtaatttttgctcggcgacaacggaaaatgcgatggatggatagtttgatcacatgggtaagtttagaaccttatttcttagtgggaaatattttagagaaaataaattatcgggattgagcggggttatgggatttgaccattttacccctagctttagaataccctagttttatgcgttaggggaattttag

SEQ ID NO: 399389 - DNA, 631 bp, Cannabis indica
gctcttgagacgactctgcatgtgcttgtgcggtgctcttttgctcaaagttgctggagcaaggtttcaattactgctgtggcgcctgatgcaatgttgttctcaagttggtttgaagtgggtttggcatcgtggaatacggttgaggctcttgaggctggtatggtttgttggtcaatttggactcatcgtaacaatttggtctagaactccaaacaccctgatgcgggggaggtagtggcactggctcagttaaattatgttgattggtttaatgctcaaaaacttaatgtcacagatgtaagcttaagcgggccaactgaactatctatggagcaatggacaacacatgatttcccttttgtcaaagttaatgtggatggtgcactttttgccgaccaagggcggtatggtctgggtttgattgcaaggtctgctgcgggttgggttttgggggccagaagcttatctagggaaggtgctttgcaacctcatattgttgaagccattggaatcaaggaagctctttcttggaataaagcaaatggatggtcacatgttttcgttgagtcggattgtttaagggtcattagtgatttgcaaaagttcaaaaatatagcttctccttatg

SEQ ID NO: 399390 - DNA, 575 bp, Cannabis indica
ataaacacttattggttgatcatcgttataacataggactgggattatcgatcgttctccaagcaggtcggccaacatacctaaaccagaattgaggtaagaaaagttatttgcactgctaagcattgtttatggttaatgatatgattgttatggtctagattatgatcgagatcccgatatatatttgttttgactgaatcttgattgagattaataatatgtatttgttgtgactcgatagcaatcgaggtaatgatgagaaacgagtggtgaggattggtaacggtcattaccgttatgaataattattcttgaaatcgcggatagatttcttacttatcgtttgctttaccgagcaacgatagtgacataagtagctcgtggttaatgagtggtaagtgtactatataaagtaccatgattgtgtaattatgaagttgtgaaatgacttaagcatgttattttgtgatgggttgtaattggatacatctttattataatgtgaatgaatggattttatattgcttaagaaattagtttcttttcttgcagagtcttagtgactaagaatt

SEQ ID NO: 399391 - DNA, 765 bp, Cannabis indica
aaattatgtattttattttaggttgtctccgccacatagtttggtagaaaaaccttaagttctttttagacattagaaacgtgttctagagtaaacacttatcagttgtacgtatgttgtgacataggggcttataaatcgttgtgcagtagcttccactcaggttaccgacatacttgcatttggaaccaaggtaagattagtataatgttatgcagatatttacacatgtttagcgtatagttagttgtcgtcagactagaaaaatctatagccatcagattagcatgtcagggcatcggtcaggtgtacatagagttgcaccgagatgccaacagatatatgctaggctatcagatagtatgagttatctgctaccacatcagtacgaatagagtactgagtataggctggatttgcagttagtcatactttgtcgagaacgttcctgactgatcagttagggttatggttgggtgtatgggcgcctgatcataacccggatattagtatgttttatgttatgcttttcttactgggtctgtcgactcacagtgctatttccatgtgtaggtaagggcaaggctaaagttgaggagccgtgagagcgagcaagtgaagattgtacatatcgaggcagttaggcctggagcgtacgatctttgggacatcaaggcttttactaaatagtcgctaggcaacaaagtttttgtatatggatagcaaactttttgaaatgtattttgtaacgagatcccaggattt

SEQ ID NO: 399392 - DNA, 571 bp, Cannabis indica
gttggctgttataattatgtcatttacataaactaagataactattgtggactgaggtgagtgatgaatgaacatagaatgatcagacttggatgaaacaaagccaaacttagacagagacttatgcaacctttcaaaccaagctcttggaccctgtttcaatccataaagggctttatggagtttgcagactaggttgggagaggtattgatctcataggcaggagtttgtgtcatatggacttcttcttaaagaacaccattcaagaatgcattattcacatccaactgtctaatttcccacccttgagtcaaagcaaaggttcaaacaactcgaatagtaataggtttcaccacaggactgaatgtctcagtaaaatcaaatccaggttgttgatgaaagcttttagcaaccaaccttgctttgtgtctagtaacagtaccttctgtgtcttctatctccttgtaaacccacttacaacctatggcttgtctcccagggggcaatggaacaagagagtaagtcttgtttctagtgagagcaagaatctcatcatccatagcatgtttc

SEQ ID NO: 399393 - DNA, 547 bp, Cannabis indica
atagtatagaacatattatatattcgaatgtatgtgtgtgtgatatatacatgctgtgtttgtgattgtatatgatttgggtgatattatagcggtacaaccattgtgtcagttcggctgtataggtatcgtactggtttagagtgataatcaccccagattattaattggtgctatcatagcgatgcaatcattgtgttggttcagcagtataggcattgtgctggttaagagtgatatcatggccaattatactttcaggtgttattgatgctatcacagcgatacgaacatagtgtcgatcccgcagtgcaatcatagtgctggtagtgggtgatatcatggtcaatagcaccaacggttaagaacgttcttaagtcatctggtaagccttacggataggtgtatgggtgcctagaaacaagtcgtgattatatgatttgttgtatgcttttcttactgagtctgttaactcacagatgctacattcatgtgaaggtaaaggaaaggcgatggctgaacaagagtgtgttaggttttatgccct

SEQ ID NO: 399394 - DNA, 355 bp, Cannabis indica
agcatatattacttcatatattcttttcgatcgtttcaattgcaattgcaattcaattcataatcttgttagtcgatgaaatcataggactatataattcttctgaaaaaaggatgatagctactttttgttgtataacagaattattagttactcgttgaatttattggagacatttacaatgaagtgaattatatgaatcattaatctttctttcatggagtttctccataatttccttccctttgggggtaggaaaatcatgatcgcgattgcggactcaaagctatagaatttgggcgtaggccttttactgaaatagaatggtcttactctttctttttctttctttttt

SEQ ID NO: 399395 - DNA, 943 bp, Cannabis indica
  modified_base (912)..(912): a, c, t, g, unknown or other
attactaactagtaactaaattattaagtactaactagtcctagttctaccgaaatttcgagagcataatgactatatacagaacctttcactatggatgaatatttaagatattcaaactcatctaacatgcatattattttacccatccgacaaatatattacagaacctactttattacgaatgaatatttaagatattactagttatataatttatgagtaactagttagtaataaaaatacatgaataacaatgaaaattagtaactagttaaatagttgtaactaactattgattatctactaaaaaataaatacataaataaaattaaaaataaaaaaattataaaaagtagaattaatttctaaactttatttctaactaatttttagaaattaaattctaaacttttattttaatactctcctacctcattctcattcacaatatttaaaaaaaaaaatattagtttaaaatatgcaatatatacatatacaatacataaaaaatatacaatataattacaatatttttatacatacatacatatccaatatatataattataaaatatatacatacaatacatattcaataaaacacaaaatacatatatatatatactattaaagtttagatttttaccttattatcgaaatccggcgaccaatatcgactaaaatctagcccccacgcaccaccacaataacacaatcttaaaaatttagaaaatcctaaaaataataaaaaaaaattaaaaagaaagcaatgtaaattactaaaattattagagattagatttataccttaataggcgttgagattcaacgatttctccaccaaaagcggtagccgtagctaaaaccaccacaaccaccacctctaagctcaggttatcctgaaaaacngaaaaaaaaaaaaaaaaaaaacgaaaacgaa

SEQ ID NO: 399396 - DNA, 857 bp, Cannabis indica
ggagcgaacggacccccataccaaagcctgtggtccctgtaccgactacgggggctcccaatgccagcactttgggttcctgtaagtccgctttaacgatacattatgttccttccgtccgtgagtatactagccttaggcctatagggttcgatgaacgtctccataggtttaggatgccttccattgagtgggggaatcatgccaaggagtattatttttcccacttaggcaattatgtaggtcggtcaaggatgggttctagacctccggcgtccattcccttggaccattcagcccatttatcttctagttggttccttccctcagacagctttctcggggaggatgaagccagttctatgatcttggactttgctagggccgaattagagagtcaggataggactagcttgattgctttttgctaagtgtatgctgctctcacggatgttctaatacttgacttattttcttattgcagcagccaggcttatggatgaaatcttggccactcatgttggagcccacagtcttgatgcttccccacctcctgcttcttctcagttggtcactcccgggaggtcttcctccgatgccccttcgggcactattgtcttggtggacgaggaggaggttcttgaggaagttgaagaaggtgaagaagagcaggaggccgccctcatgcgcaagcgcaagggcaagatggtggaggaggagccttctaagcgcccccagaggttggacactccagccccgagccatgactccgagattccctccgatgcgtaggaatacacagtgcctcacggcatattgttgactgcggtccgaagagacgaggagaggcagaatct

SEQ ID NO: 399397 - DNA, 708 bp, Cannabis indica
tactagcaagttatctccaaatgaattactaaactagtgactggcacatcagtgacaaatggataaagagcagagctagaagcacaacaatcgaaagatctcaagacaaagagaaaatatcaaaggctctacaaaggtaaagaggcaacaacttcaatcacttcgtacgtagtttaaaacacttcaaatgaagatggaagaatcggtgtcagattatcgcactctaacaatggtgatcgtgatgacaagatgcgcatccacggtgacaagatggaggatgttatcgtagttgaaaaaatactatgaatgatgatgccaaaatttaattatgttgtttgttgtgtagaagaagttcataatattgatgacctttcagctgatgaattgcaaagttctttcttagttcatgagcacaaactaaaccagcaagagaaggagaaggaggagcaagccttaaaagccttagaagacaatagttaaaagctaagagaagacagaggacgagctagaagagaggtcgaggcataggcagaggtggaaatgatcacggaactcagcaccaataccaaaaccaagacaataattctcatgactctaatggaagaaaaacaaggacgccaccaaccaaatgggaatgctacagatgttataggtacagattttataaatatgaatgtcgtactaatttgaatagacaaagtggagaaa

SEQ ID NO: 399398 - DNA, 738 bp, Cannabis indica
aaaatggcagacaatagtaaagttatcatctttataaattgctttattatttattatatgcattattggagtgagatacaacactgcttgtttattatttttgtaaaaaaacatgtgacaacaatgttttgaatatccataaaaatattcttgagccgcctccctcccatcattatctatttggtagggtcctctcccgcactaaataatgtgacacccaccttatcttatgcctcaaacataaaatttactatataaatacgactattccatttaaaaaacagaagatactatatacgatactttgtagttgctattagttaataataatttgctacattatgatgccaacatttaaaatgtaaaataaaagaaagagtacactaaatctgttaacaatcatcactacctatatgctagtatgctactatgttttcttagaaactatatgcaactattttatactcattcttactctacatgttaaataattatatgaatgatatgaatggatccataatttagagttattttttttttatcttgacatatatgattattctcggagaaatttaaataacactaattattacgaatattcaaataaaattaaaatatttactagcagttatgctagtattttcttaaaatagtgagtactcaaaatataagttactaggcaaaaaaaataaaagtaaaaattaaaagaagacaagagaattatagtggttcagttag

SEQ ID NO: 399399 - DNA, 698 bp, Cannabis indica
tatgaattctctaatacgatgaaataaacacatataaagtttagaaaatcttacattaatggcagtagaatattaatgtctcctttcgctcagatctttaacccttgttcctttctgtgggcatggtactctatcactaatggcttaaatttgatggaagaacaacaagaggagttcgaaattactatacaagagtctctaatctactagttgtctgacagagttaagaaataactaggtttagtatggttgaggttggttggatgagagcatcatatttcttttatagtatttcaactagtatttaggatttaattatatggattaaaaaatataaaataatgggcaaaaaatttctttagtggtcggccacttaattggcctcactagttacaattttgctaatttatttcaaccatttatctttctttcaataatgccatatttttcaatttcaatcttataaatgtcaaaattatttatttaacaattataattagttatcaaatgaattgtcatttatactatttattaattagacttaataaagtctcttaattaacaaataaactctaaaacctcttttcttcacaattaagtctttgcttagtaaaaattcataaataagacatagtctaattttagaattattattgattaattaaaatcaattaactgagtctgcaagcagtattatc

SEQ ID NO: 399400 - DNA, 1831 bp, Cannabis indica
gaataaattatttaatatatattagtatgaatataataaatattaaattgatatattgaaaataaatatacgcattaatatagtaagtgtctaagtataaatacatattaaaaacaacaaactatcataattttctgaatactagtaagatttctattataactaccatgtaagacatcgtataaatattagaatataatttctctaggtgaaaaagaaatctctataatagggtaagagtcatacctcacctaaaaacctctttatcttttacactatattttgggttgaaagggaaaacgaaaataattaaggagattggaaagaaaaaaactgaatttataataataattttacatgaactaaacttactaaactaaaaaaattgtacttttaaagttgtaatgagtatgtgaaatttgagtttgagttgtaggtaagtataaattgtgtattgaccaataacacttatctgaagtaaataaggttacataagaagatgtataaatatgagtttcacatttggacgaaaagttttgttgccatgacattagagatattatgaaagatacttgaacatgaatatatttttagtattttgatgcttactattataatgaaaaaaaatactacaaaagaatgtcatacatagcattttttacatattttcttttttatttattttattattattttatcataaagtaaaaaaatatatttatttaatatatattaaataataatataatattatttgaataatttacgacaatggatacttgatgtgcagaggttgcctaggattcctagttacgacaatggatactagccaacctatttcatctagacctaaaaatatgagattgatgtgtgaatttctagatgtatttccagagaatttacctggattaccaccttcccgagaggttgaattggctatagagttagttctaggagcaaaaccagtatcaaaggccccttattgaatgcctctagtagaattaaaggagttaaagattcaacttcaagaattacttaacttgggatttactagagcgagttattcaccttaggatgcttcagtgttattcgtgaaaaagaaagatcggtcgctttgtatgtgtatcgattattgggaactgaataagctcactatcaagaataaatatcctctaccctgaattgatgacttgtttgaccaattgaagggtaagactgtcttttctaagattgatcttcattccagttaccatcagttaagaacttgagaagagaatatcccggagactgcatttcgtactaggtatggacattacgagtttttggtgatgtcttttggactcaccaatgcccctgctacattgatggatcttatgaactgagtatttaaagaatttttggacatgcatgtgataatgttcatgacgatatcctagtttaattcagctacagtttcctcaaacccttttttgaaaagcctccttttagcctttctccaccttctgttgcaattctgaatgatgtttcaccttcctctccaaagtggtggtagaaacggtcttctcatctagaaggcgagtttgcttgtcatactcttgagacaaaagggtattgctttcgctccgtatctttgaggtcctgcttagcttgcttcaagtcagcttccaaatcactgatctgagagaaagcctcattgtattgctctttgtatctgtctccacagtctctttcaatcgtggtcaccttctttcacgaggaacatccttgtctagagattctatttactttttgcttgatgatggactccattctagcattagcatctgcagta

SEQ ID NO: 399401 - DNA, 536 bp, Cannabis indica
ttttttttatatattctcactacatatctggtgtatatatacattagtaaatttttcatttaatttattttttatgatattttgttaagcatgttttttatatttgaaattttgggctatagagaagaaattatagattgattgatgataataaggatggtctttattttgatacttttcttttctttatatttcttggaatttattttattttattatttttttgtgatactatatactatagatatgtacaaattaagattgtgggcaaaaatagaaaagaaaaatagagttaaaaaattatacaagctaaaataattttttttcaaactatttgttttacactttcactgtatatatatattatttgtattagtatatatttatatttatttatatgaatatatatttgtgcgtatacacagggacggacccattaagattgatgtgggggctatagcccccacgaacaaaaatattgtcttttaaaaaattaaatataaattttttaatttaataattataggccaaaatag

SEQ ID NO: 399402 - DNA, 700 bp, Cannabis indica
tagaacaggtttggaaagttttggcttcgtttgggttgttttggttgagatatgaaatttttagtaattcctgccctgaaccggaattctgattcagagaggcctgtagaaactggaattctggttggcttccaggaattttttccagaaccgaaattccggttggggaaccggtctaccggtcggggcaattttgggaaccctagtttttcccctttttgtgttatttagggtatttccatgttattcatcgatagggaaacttttagtttcaagtttaagtccccgggaagtgatttagcgtgtcgcttatcagtgttgtgattgatgtgatttaggagcctgtaattcgccgagcagattgttccactcaggttgaccggcacacctgaattcaggaattgaggtaagattaggataacagtatgcatatgtatttacatgtttagcgtgcgatatgtatgttggctttcgtactatccgacagtatcacatcgatacgactagagtatgaatagcataccgagtataggctgatattacggtcgatagtaccgtactatttgatagtcacatcggtacggctagattatgactagcataacgagtataggctaatacagtatcacatcggtacggctagagtatgactagcataccgagtatagtctgatattatggtcaatagtaccgttgtacg

SEQ ID NO: 399403 - DNA, 731 bp, Cannabis indica
ttttcagtcttttagtgttaggttttaacattatccaccactgagacttgttacattatcaattttaatttttttacatacatcaaaagtgacaattttattgttcagtgtttgaggtgtataaatgaacatgacaataaaatagtaagtagtgataagtagaaaccaatactcataaaatacattatatgcaatttttttatgaaatatatttggagttcttacactgtaatttgatcaaaaaatatttatgtatgtgattattaagaataactgggataaatatgaaatatgaaagcctcggacactactcggtcaagagcttataaatattgttcgaatttttaggagctgttgaatctcaaggtttcaccaaaagtcagtaattttttatagagggcagcttcgggtttgcttcatacttgttttcagttgaagagtagacatgttcctgttaattctatatgtcctttgtgtaacgcttcagattaaacgatctaccatgctttggtggggtgtgattttgctcgtgcgtgctggcatagaactatggtggacgtggacagcactttgagtgaccctttttgcaatagactgttggttttgttcagccgtggtaggcaggaagagagaggaagccgcggttgttagctggtcaatttggcgtgcccgtaacgactttgtttggcaacaaaggagccgtactgctccaaatgtggttgcttcagcaa

SEQ ID NO: 399404 - DNA, 643 bp, Cannabis indica
agagaagaagaacacacggtgatgatgccggagaggagtcaagatcgagagaaagcttttcttcatgctcttatactatattgcgaaattgaacaaaacaaaaaatgacttttattgattgtgaatgaataaaatttcaatcgatctgacacttcgttcgtaatgcatatcaaatctgatatgaatctggtagagttcatgcatggttcaaagtttccaagcaataatggcaaactcaatcgaagattattagagtgaaggaaagtggagctcgcttgggtaacagagttagtgcattaatttggagatttgtcaaaagaaaccgttaccgaacatatcagtatccatatctattttctagcattatttataggtatcagtttaatataaaatatacaagtgtgacacttgtataattctactataattaattaatttttttctcaataaaagattgcaatatattcaataattaatatcatcagcaatgtggacattattctttctttaatgagcattggatcgatcatttttcaaaaattatatatataatatatcatcagcaagagtggcaataaacaaagatcattgctattaggtactagtggtgcctaacgatattccctaaaattattatattaaa

SEQ ID NO: 399405 - DNA, 377 bp, Cannabis indica
ttaatggtaataatatataagttataattttaaaacttctgtaagtatctggccattaattattaagtaaattatctcgtggcagtctctaattgtttcatgtcattaagtatttattttttatttaaaaattaatttaaagatatcaataagaaaaataataatttgacacttaacggtcagttacttacaaaaagtttcaaaaatataatttaagtagtataatcgttaaaaaattaaacttaaaatatttatttattattgaaagttaaactcaaaatatttacattgaaaagttcctaaactaactaatctttcatttgtcatattaggaggcaacctacatgcaatgcacgttttgttttattgttcttttc

SEQ ID NO: 399406 - DNA, 559 bp, Cannabis indica
agacctggaactggacaacagaccctgacccgaacgctagcccaaaccccagactcggggccgagtctgggttttggggtctgtttgagtctggtgtcgtgttcgaggtctagggccggggcagagtccaaggtttagggctagggttgtgtacgacaaatgggatctcgaggtccatccgggtccgtggtccaggtccaggttcaagtccagatcttggtctgagccatattcgggtcctagtccgggttcggtctagatccatgttcagttcgagttcgggtccagggtttggatttgagatccaggtctaggtatgtgagcaaaattgtaagaaaaaaatttgttaggcaatttttttttttttttgaaaatagaaaataacactcagttttcaaaaaacagtttttaaatatttggccaaatgcctcttattattttttgaaagttattttctattttaaaacattgaaaacggttttaagttataaagccaaatagcctttaaaaaaatttccttccacatttttctcctcacttttttctttccttatcaaat

SEQ ID NO: 399407 - DNA, 1309 bp, Cannabis indica
tctactagatgtaccgtgcagctttctcttcagttttcgtagcttcatttcgattatctgagagtttcctagagtttgaggtaggctgctatttggtgttacatccagtttggggaagtatcaatcattttgatctcttccgtgccagtgatgctaggttcttcgaggaactgaataggaataaagttttccttgtcacttacattgcttcttaccaatcgaactaacgcgtctggagttgtgttttcttcccttggaatttgtctgagaccatagcttttgaattgtgcgagcagatcgtgtattttgctcagatatgctatcatcttttctccccgagcctcgtattctctagatacgtgatgtaccaccagctgtgaatcactacagattttaatgtgttcggctttcatctcccgggctagctttagcccagcaattagagcttcatactcggcttcgttgttagatgctttgaatccaaacttgactgtagtgtgcaggtgttgcccccaggtgtgacaagggcaattcctgcactagataactgatctgtagctgacccatctacatgtagtttctaggtcgacttatcttcactgttacttggctgaggtgtttgtaccggctcagggttgctttctggtattcttgctttcttgcccgtgcattctaccacaaagtctgctaaagcttggcctttgattgctattcggggatagaaagtgatttcatactggcccaactctaccgcccacttgagtagtcgtccagaagcatctggcttttgtaatatttggcgtaaaggctggtcggtgtatacccgaacaggatgagcttggaataaggccttaactttcttggttctagaataaggcagtatgtgagcttttctattaatggatatcagcccttggcctcaataagtcttttactgatgtaatagactgggtattgtacgctgttctcctttctgattagcacggcacttacggcatgttctgtgacagctaagtatgttcccagttcttctttgtctatgggttttgagagtacgagaggttttgcaagttgtggttttagctcttggaaagctttttcacattccttcgtccactcgaactacttgtttcctcgcaggatgttgaagaatgggacacacttatctgttgattttgaaacaaatgtgttgagcgcgacgatccgaccagttaggctttgcacttctttggtttttgttggcgacttcatatccaggagggcttgaatcttctttggattcgcttcaattcctcgggcattgacgatg

SEQ ID NO: 399408 - DNA, 517 bp, Cannabis indica
cttagatattatcttaaattttagctgtctaacttaaatttaaatctgaaatagtatctgatcaaagataaattattattttccaaattttgaaaaatgataattaaaatatctgtcaaataatctttttattttttaaataataataaagagattccaagactcaaatttgtcataaaaactggtaaaattctaaatccatacaaaatggtacagaactctaaatgagctcatcaaaattaatatcaaagaggtcattcacctcacaaaatttcaaggaggtcattaacctcataaaaaatcttaaaaagagtaattttacctaaacaaatttgaaagtgcactaaacttcaaaggcataacaaattaaatggcattaaaaaaaaaagagaggtcattcacatcataattaggggtgtttatccaatccaatccacactattttgctcatagtgcattcgatccgcactaagtgcggatttcatttttttgatccaatccaatccgcacaatagct

SEQ ID NO: 399409 - DNA, 614 bp, Cannabis indica
tagactacaagtagtactataatttagtactagtcttttaattggacagagtcataaataagaaaaaagtgtgcattggtatcatgtactactggtgcctaacatcttttacagatggtactttacgattagttaatgatattctttaaaagttattatattaaattataaagtatgttattaggcatcagtgatacccagcattttctataagtagctcttcatgattggttaacgatattctgtaaaaattatttttataaattatatgagatttgatacataattatactaatagcagtataataccgaagagagtactatgttaggaaatactaaatgtgtatatacccctaattaattcatgagaatcaaacaataagattaaggaatagcggaagcgtaccggagtccatagaatcgatctttaaatgatctttaattggtatgatcttccaatttgcatcaaacctttttctgaaactttttctcttggtgatggtgataccagagtggaaagatacgatgcaaatggagaccattacctgttatattaccaacagacaaaactgttggtaataattattgacaatttctatttggcccctcatcaa

SEQ ID NO: 399410 - DNA, 641 bp, Cannabis indica
aaaactccgttcatcgacggtacccttcctaaaccacctcctgatgatcctctttatagttcttaaattcgttgtaatcaaatggtccaatcttggatccttcactcggtttcatccgaaatcaagagcagtatcatgtatcttgatactgctgctgaaatgtggaccgagctcaacaatcaattcaatcaaggtaacggtccagcattttcgagcttaatgaaagcctcgcttttctccatcaaggagatgattccgtcagtacctacttcaccaaactgactgccatttgggatgaaattcagcaacttcgcccaaagataccttgcacttgtgttgctgctactaaagcacaagaatatcacaaccatgatcaggtgctgcaatttctcaagggtctcaatgaatcttaccatgctgttcgtgatcaggtattgcttcttgatccttgtccaccattaaccaaagttttctctatgattgttcatcaagaacgccaaagaactcttggcaatagaaatgttacccccttgctgcaactgcctcttcatccacaccttctacaccaaatctggattctactccagcagccaatttcaccaccaaaaacaaaaagatgcgtccaacttgttccaattgcc

SEQ ID NO: 399411 - DNA, 514 bp, Cannabis indica
tcaccaagattttgaattttatgtgtttcaccaggaatgacagagtggtgtgtgccacttttcaatttcaagaggacgcattggtgtggtgggacatggtgtctatgatacacgatgtcaccacgatgacctgggaaaatttccaggaacttttcaatgcgacgtactataatgaggccgttagaagtgctaagagaaaagaatttactcacctgacccaaagggagaacgtgagcgttactgagtatacaacgcagtttgatcggttggcgaggttggcctagggaattgtgccagccgatttcagtaagaaggaaaataccttgacgtactgaatgtgaagattaaacatgatctgatgattactacagatgacaaaaccacctatgctgaaatggtggagaaggcactgtgagctgagggcgcagttgggtgcatgactgagtcagctaggactccagtgggtggcggggctcctacccctcatgcatcaggctatagcaggggaggtagt

SEQ ID NO: 399412 - DNA, 633 bp, Cannabis indica
acttgcaatccaacttaaggcttcttcgatgctaattatctcagcaatttcgggttggacgcaatcaatctttccctttttgaaagcttctattacattaccatgatgatctcgagctacacaacccaacccaaaccgcccctcttgttcaaataaggccccatcaacattaactttgatcttattaaacacaggtgcaatccaacgctcattatgtcgcccccccatcgttcaaaggagacaaataaagactctttgttccttgagcaaattgatactgatcaagcatatttctagctgatgcaacaatatttgaagcagcccaactcttcttttgccaaacaaatttatttcgcgcacgccaaatagcccaactcaccacagccacttcctccatttcaccttcgtgccccttgctaaatatccccaacaaccagctgctaaaagttgcagccccagccccgacatccacagagctgcgattccaagcagctttagcaaactcacattccaccaacgcgtgttgaacaatttctgcaccagagttgcacaaagggctgtcgacattgacaggaacatgatgtttttggaacagaaaacaggttggaagcacacccgaagcagctctccata

SEQ ID NO: 399413 - DNA, 1009 bp, Cannabis indica
ttttgttgccttgaaaatgttctatacgttgtatagaataggtctggaaagtttggtttgaattggggttgaattgcatgagatatgaattttttggtgatttctgcactgaaccggaattccagttcagagaggcctgtaggaaccagaattccggttggcttccaggaattttacccagaaccagaattctagttagggaaccggtctaccggttggggcaaatttgggaaccctagttcttcccatttttgttatgtttagggtatttccatgttatttattgataggaaaacttttagtttctagtttatgtcctcgggaagtgatttagcgtgtcacttatcagtgttgtgattattatgatttaggagcctgtaattcgctgagcagattgttccactcaggttgatcgacacacctgaattcggaatcgaggtaagattagtataacagtatgcatatatatttacatgtttagcgtgcatgttaggaagcctgttagattacattagatatgtatgttggcttcgtaccatccgacaatatcacatcggtacggctggagtatgactagcgtaccgagcataggctgatactaaggtcgatgcaactgtactgtttgaccgtatcaaatcggtatgttcagagtatgactgacataccgagtataggatgatactgtaacacatcggtacggctaaagtatgactagcgtaccgagtataggctgttactatgtcaaaagtaccgtcgtacgaacgttcgagagtcagtaccttgtgggacacgaggattagggtggtggtcaagggtatgggcgcctgatcataacccgggatatatgtacgttagtcatagtgctatgtttatatgtaggtaagggcaaggccaaagctgaggaaccgtgaggacgagcagatgaaggttttacatgtttgggcggttaggcctggagcgtacgatcctcgggacaacagttgtaacaccctaactaccataggcgtat

SEQ ID NO: 399414 - DNA, 764 bp, Cannabis indica
gtatctctatttgaggcatagtttgcgtccacgaacccttataactctaattctccttttcctttctcataggttacgccataatcccatgtggccttcaaatatctcaataatcatttaagggctttccaatgttccgtgtctggattggacatgaaccggcttaggatacttaaggcgtgatctatgtctggtctcgtgctcaccatcacgtacattaaacatcctagaaacaatgcataaggtacatccttcatctcttctttctctttcgtactgttaggacattattcctttgacaaaacaaactttccctgtaatggaacgaatgtactctttgcatcttccacgttaaacttctaaataatctttttgatgtacctagactgcttcaagctaatagtcccttcttttaagttccatgagattgaactagcccaagctctttcatcttaaattcactcttgagcttggctttaatacttttgatcactgatttattttttctcatgatgagcatatcatccacatagagcaataggaacacggtcgtagattgctctatatttttgaaatataagcaatgatcgtatgcggatcgtttgaacccgatttgatgcatatacgtatcgaatcttttattccattatcttggggactatttcaaaccatacaaagatttgttaagcttgcaaactaatccaagaatccattcaaaaaagtagtcttggcatcaagttgttcaacttcaaactccaaatgtg

SEQ ID NO: 399415 - DNA, 1032 bp, Cannabis indica
gttttcaccttttggaaggtttaagggtgaagactgactgctcgttctttatttctttcacatatctcttctgagcattattgctttcccctataatatacagcctcccgaaataaccaagatgtcctctccttcaacaagaagaggttgtaacacctagttgtttgggttattaggctgacggggctggttgtatccttgcccctgtcttctcacatactgcttaaaatgacctcgaccaatgagactctctatctcatcttttaactgacaacattcgtcggtcgtatgcccaatatctttatggaatttacaatattcgttaggatctcttttgctcctcaaattcctcataagctcgggtttaccaaaggctaccttctgctcatgtgcaaggtaaatattttcccgagtttcattaagattggtataaatagtatacactggcatatatttatcatgcttcttttatttctttctatccttcgacggttccttaattctgtcctttcttttcagactagaaactcacaagttatctattcttgtggaaatagtccctgttgaaacattgatgggtttacctcccgagcttgttttcaacaagttcatttcctttcgggcttcttccttttggaaaaacacctgagctctctcgttgagctcagtcatgtttcttactggacgtccttgtagatcatcccacaactcaccctcggcggttaatggatccgtgcagattcttgcctgaaaggctataagttgcgtgctgtcatccaagtttctaaccctagccacagccgtgctaaaacgactttagtacgccttaagtgtttcgtcaggctgctgctttatattggttagcagggccgctttgggttgcctatcccttgcagcttggaatcgcttcttcaaatccctggacagctgctctcaagaaattattgaatgacgagtgaacttgttaaaccagctactcgctgctccaacaagcgaggtggggaacaaaatacagcataaattgtttgtcac

SEQ ID NO: 399416 - DNA, 533 bp, Cannabis indica
ttttttaacttttctacagtattcgcaactagactatctgtggtcgcgaccacgactccatatgagacatgagcaactttgccttttctcaattttgggctaaaaaattctattttaatgaaagtgggtcacgaattttagtggagatagatagaatggaaccctaaaaatacaagaagaaggctcttggagtgagcgtgggcgatccatgaaaatcctccatctagtttttttctcttctcttaatttcttatatttttatttgtgtctagtttaagtatgtatttgattatgagttaaactcccaatttaggggtttgatggatattgactgagattattccatggattaatactatttgattgttctttcttccttaattgagtgatttattcatctttgtgcttattacatgtgtttgattagccaccttatgcatgatctatgatctcaatacaaaatttgaaaagtgaatattgagaattctctaaatgaataaacataagttttgatgtgaaacgagagtattcac

SEQ ID NO: 399417 - DNA, 1023 bp, Cannabis indica
aggttttgggctttttgtgtcatgaggagcccaatttaaattttatcttacacattggaaaagagatattcattgataaagcatgaagtcccatgcaaaataaaatcgttggggccttattgccttaaggtatcatttactttcaagagcccaaagactttcaacaagaatatatatatatgttttgtgttctgccaaagaagcagtagtacgagattgttatttggagggcccaattaagagttttccactatggtaaacaagcctaatgattggctcaagaaaattctagcctcattcaatatgcggattattatcaggtgcacttatttcatctcgtatttcattttatcaattttaatactttcgagattagtatcagttaatttggtaaaaaagcaaaatatatatatggagctaccacatattgaagtctagttttattgtaattacaaaattggcgagccccatgtgtgctcatttttgcattttgctattgtatttctatttgcaaattggcgagcccaatgtgtgctcattttttgcaaaattatttgacaaactatgcttatgtactctcaaagaggcaagctcaaacacttattttttgcatactaaaataccaagtatatggcaagctcgcgatagtgctcgattatttttacccattagcacatcgcagataaggccaatgcctcgcttaggcaccactccaatttaatcgggcaaaacaaacccaaaaggtttgctggctaacgtcgcagaaaaatgaaagaatcgaaccctactgaaaaggttcgggcgatgaatttattaccaaaggcaaaagacttttttgtcttattttagggcccgatggcccacttggtaaataccacccgcttatatatcagatatataaaagtaaagaggcacgatacattagaggaacgagaaggaatcaatcaacacctggacgctatatgtgcggatagcccaacgcctacagattaccaggtgcactttttcctttattttaatcaa

SEQ ID NO: 399418 - DNA, 776 bp, Cannabis indica
gagtacaggtggagtacaaccctaccgatagtagaatagggcctccatgcaagatatagcaaaatcatcaaggagcaaccaaatggagtgaagccagccttcaaggagctgtaccaacatccctggccggccaagagaagcctacaggccagccagggtgagcctataggccagccaagatatgtgcacaagctggcaggccaagaagtgactgttggaccaaggaggcttccgttcgaccaagggaacgttgtctcttcaaggaaatggtaaacaaagttgtctcttcaaggaaatggtgtacaaagatgcctaaaaatcagctcgatctgcccaataactcaagcaacccaagattataaacctcctccgtaagaggaagggacaccttggttatctcgagagggagcgggtcacaagaatacaaggggcagttactctggtaaagaaattttgtaaaagaattgcgatgtgagcaaatatcagcccactgtggttgccatatcaagctgccacgtggaaagctggacgataaccaatagcagtcgaagacaaacacaagaccaggactacttcacctggaaccccgggaaatgtcatggattgaccctagatattgaaacaattgagggagtacgtgagggattgaccctgaacatcaaaaccaggtgctcttggaagattgataaaataaacgattgaattggggatgttctcatgagattaatgattgtaaatcacattgttgatgaaatattttgaactttagttgtgaa

SEQ ID NO: 399419 - DNA, 572 bp, Cannabis indica
cctattgctgcggtctatcatatcccaagggatagtaatacccatgcacatcatatggcaaaaggagctttagggcttgatgaggaattggtttggaaagatacttgtccaaatcttctctttgtaacttgagttcattgttttatcctccaagttacaaccgtcaaaaaaaaaaagtgtgctttttattaaataaaataataaataaattatattctatggattgaaataattttttatttttaaaaaaagaggtattttaaataacgtaatataagttattttgaaggaagaaaagttattatagaaaattataaaaaaaattgaaaggattaattacaaaatggtaattgaagagaaatattaagattaacctatataatagtgtatgtggttgtaatttaatatcaagtgaaggttaactatgtaatttacttagtgaaagtctaagaatattctcacttttagtagttatagacaggctcggccctgggcataggcgggctaggcttgtgcttagggcccacctatcctaggggccaaaaaaaaaatatttaccttttaaaattata

SEQ ID NO: 399420 - DNA, 525 bp, Cannabis indica
acgtccgaccgatcggaccagtgtgcagattttttttgtcggtccgagagggagagagaaaaagtagataaaggggggtatttttggagttttgaaaaaagtgtcattatttttgtagtgtaaaatgtattggtttaaaaaaataattttgaacatttttaagtatagaaaatcaaatttcccgtttaaaattaagtttggggtgtgccaccccttgaaaaaaagaaagattgtttaaaattaagtttggggcgtgccaccccttgcaaaaaaaaaagactttttttttagaagttgcaagttttaggttttatagcattgcttcagcattctggagcagagacacatgaaaaaaatgctatgctaaggcattgctataactcctaggagcacgttattttggaaaattttggggtaataaataatggcaatattaattctcaaatttttatgggatattctttgaggaagtaagtgtgaggtctcattttggtcttagaaaaattaaggtgcttttaggtgatt

SEQ ID NO: 399421 - DNA, 1134 bp, Cannabis indica
cttcttgtatggattcgggttctcgtcctggtcagggtcttggtccaggtccgattccttgatttagacaccgattatggattgggtctaagcctcaggtcttgggtcctgggtcccaactccaaatgcagatccttgtctagttctagctcatgtcttgggtcatggtttgggtgtcaggtggatgtttgcgtctaggtttgggtcttgggtcctgagtcatggatccaagtcccaaatttaggcaggatcttaagtctcggtccgtgttcagtactggtccttgtcttgggtcttggcttggtctaggtttggatcatggttcagttctaaggtcctaggttcgagtatcgggtcccgggtcgccatcccggtcccatgtcccggtcccagtctcggtctcggtcccaggtctcgatcttggtcccaggtcccgagtctcaatcccattcccaatccgggttctaatcctagtcctagttcaggtcttggtcctagttcgggtttaggtcccatacttgatatcggtctaggtccccgtcccgggttcgagtccgagttcttgtacgagtccgaggctgggtctgggtccaagtttcagtccgtgtatgggtccgggtcttagtctgggtctaggtttgggtctgcgtttgggttctagtacaggtctcgattctggccccaatcctgggtcacgggtcttgggttacggaatttgggtcgcaggtcctggcgcaagtctaggtttgggttcaggtctgggtctgggtattgatcccagcttggatccggcttattgtgcggttttgcgtctaggtctggtttgggtccaggtctaattccggttccacgatccttattccagttcttattcttgtttcgattcttggatccaagtttgggtttgggtcctagtttggaagtggttccaagttcgagtcttggtacgattccaagatctagacgcccactaggggttgggtatccaagccctgggttgtgggtcaagatccttatccaatcttaggtcccagtctcgttccgattcggatcttgggtcctagtccgtgtccgggtccaggtttgggaccgagaccggggtcggggcttgggtcacagtcccagtcctgggtc

SEQ ID NO: 399422 - DNA, 1271 bp, Cannabis indica
ataaccttattcccaattagatatggtcagtacttatcacaagcaaacacaatttccagtatctctttctctgtagtggcataatttagttgagcatccttcagggttctactagcatagtagattgtgtgaaacaccctgtcaaccctttgacccaagaccgctctgattgcataatcacttgcatcgcacatcaactcgaagggcaactcccaatttggtgaagtgactattggtgctgaaatcaacttttctttaagaacctggaatgccttcaaacaatcttctccagactcaaacggaacgccattaacaagtaaactggacaatggtttggagatctttgagaagtccttaataaaccttcggtaaaaaccagcatgtcccaagaaactccttactccttttacagaaactggaggtggcaaattctctattgttgacactttagctttgtccacctcaatccctgcttttgaaattttgtgtcccagaactatcccttctgttaccataaagtggcacttctcccaatttagcaccaagttagacttctcgcatctgattagcaccttttccaaattctctaagcaatgatcgaatgatgagccaaagaccgagaaatcatccataaagatctcaatgcaggattcaattaagtccgaaaagatagccatcatacacctttgaaatgtagcaggggcgttgcacaatccgaatggcattcttctaaaagcaaaagtaccgtagggacatgtgaaagtagtcttttcctgatcttcaggtgctatggctatttggtggtatccagagtagccatcaagaaaacagtaatattcttgccccgccaatctgtctagcatctgatcaatgaagggcaagggaaagtgatctttccgggttgctttgttgagttttctataatcaatacagatcctccaaccagtaactgttcttgtgggaatcaactcattcttttcattcttgattactgtcattccccctttctttggaactacttgcaccggactaacccatttactatctgagatgggataggccactccagcatccaaccacttgaccacttcctttctgacaacttccttcataggtggattgagtctacgttgtgcatcaattgttggcttagcattttcttccatcaaaattcggtgcatcacagttgagggactgattcccttgacatcacccagtgtccaagcaatggccttgttgtgcgcccgaagtactctcagcaatctatcagt

SEQ ID NO: 399423 - DNA, 500 bp, Cannabis indica
ttatacaaacttaccacctggctgcaaaactctaggttgtaagtggagtttgaaaaaaaaatagaaactcgatggaactgttgacaaatacaaagctcgtttagtagcaaagggttttagacaaatagagaatgtagatttccttgaaactcttttacctgtcactagaataacgtccattagagttttaatttcactagatgataaacacaaattatttgtgcaccaaatggatgctatatgacaacgttccttaatggtgaattagaagaaaaaatttacatggatcaacctgaagggttcgcgatccctggccacgaacataaggcttgcaagttaaataaatctctgcatggtcttaagcagccacctaagcaatggcatgataaattttacaatttagttatctcacatggctttaaagtgtatgaaagtgacaaatgtatttactataaatctgagaataacatttgcactattatatgtctatatgtggatga

SEQ ID NO: 399424 - DNA, 524 bp, Cannabis indica
gtttatgacctatttcaactcaactcaaggttggctctgtcgaaccacctatatgtctaaaagaaaattcaaaacccaagtgatgctgaggtgttcttgcaacagaacaccctccctcatgcatattgttaccaagaaatcagatacaattaaagagagagttgaccgagatgtgagtaatgaaatgtggctcacttattttataaattacatattatagaataaaagtaggtgataatatattagatacgtatataatcacatatatatttttttatttccctgtaaatcacataaagaccataaaatagttgcttatgcttgagtgactttcctaaaatgcatactctttttttccttttttgaaaaatgcaaagttataacctttttttgaacaaaaaaaaaaaaaaaaaaaataggcaagtcatacttgatttgagcttagttggaaaaggataacacttctgcatttatattatgaaaaaatgttaaaagagtattagcggtgttcatccaatctaatc

SEQ ID NO: 399425 - DNA, 694 bp, Cannabis indica
tgtaaagtggtcatattttaaaaattttgaaatgcaaaagtttagggaattaatttcccccattagtatgcatatataatcaaatttcctattttcaattaccaagttaactctaaattaagcttaacaagtttacatgctttcagtttcaaacacagtaaatacataaacgcataacacaattctaatatatcatatttctactatgagatgcttgataatataactgtgtgggatttctatgtatgacatgttattcactaatgcatgagcatgttaataatcaattatcaacaaatatttatttaaaagtaataaataaacaatgaagatgaccctggtaataattgggtaattctaattttataacctttgaaaattaaaaaaaataaattataaaactaatctccatcgctgcaaaggtatttttgtaattttgtagaatcgtcgtaagcctcaaaattaattaaaataattttaattaattattcttaaataaatctttatttaagacatcttttaaactttttaaattaactaaaataaattttaattaatttaatcttaaataaactctttatttaagacaaatttattatcgtattaatttgttttaaaataataatatttattatttaaatttgagtttaagacaacttttgtcttaatatggttattgtatttgtatttgtaa

SEQ ID NO: 399426 - DNA, 1042 bp, Cannabis indica
tttttttattatatttttgacaattaatcccggttttagtatgactttttatcacattggcatatatcccggtttttaatttagcgaaaatcgggataaaatgcccttaaaaaccgggataaaaagtctttttttgtagtagtgtcacaatatcaaagattttgtgattaaggagatgtaatggtggatgaaagtttgtattgaatacaacttgttagatcttattacaaagctaataatacatactacacttgatctagacatcaaggtgctgagattaattgaagtgcacttttagttttatattagtgcaagtgagagtttgttgggttgtgggccctaaataaaactcatttcaatataatcagatttgataattaataaaagatcataaattattttatgttgtaggttcacatgatttatttcatgattgtatgtttaatatataaattctattaaatctagagcatatagttattcatggttatagtgttgtcaacacaatagaatataatcatgattatatgtttctgttattccaatttttgctcgtgacatggcatgcttacgtggacagaacctatgccgcgtggtagtacaactcactaaaaggaaggccaagtcagcatctgagccaacgaagaccccttcactcaaacgaggatcaagtgatagtccagctcgctctcgggagctggccggccctatggctagccaagccaggaaacagcatcatggctagccagcttggccggtacaaggccatgaccagccaaggattgcattgtaggtcctacaggacacacctacacgtggacatcataagtgggctgtaaattgggccccaaaagtccaacagacaggctgagaagtatctagaatctaagggcattttggtcttacgtaaagatctagctaactatcctatttcaagggatttaagttgtaaacgtaggatttaggcctcctatataaaagtcttaacctctagctgaaaacttaagttgcctaagcctcctctaagctagaaatctcatat

SEQ ID NO: 399427 - DNA, 1360 bp, Cannabis indica
ctcgtacccctactccacctataaaaccaacaaacaccaattccatacttgccaatgtcataatctcatcaaacattgatacacatgccattcccataattgtttcagtcaatacaactactccaacacccgttgcacaaaccagcaatccagccacaagtctaatacttgctgctgaaaccagtttccctgtgccaatctctttcaatgatagcacctccatacatgtcccatccactgctgtcaatattgaagctgccaacacatctactactagtattcaagcttcagcaagaacacatactatgcagaccagataactaagtgggataaggaaacctaaagcctataaataatgccacaaaatatcccttactcgagtctttcattccctctgaacctaagaacagagctgctgctctcaaaaatccaagtggttcaaggctatgaaccaggaatttaaggcattgaaaaaggcaggaacttggactctgttcccttattctccacacatgactgtcattggaaataagtggatacacaaagttaaactaaatgcaaatggcactcttgacagactcaaatcaaggcttattgctaaaggatatttacaaacaccagggatagattatgaagaaactttctcccctgttgttaaacctggcacagtaagaatcattctcactttagttgtgtctcttaattggtctgtgaagcaattagatgtctcaaatgctttcctcaatgggcaaactacatgagacagtgtttatgagtcaaccagaaggatttgtggatcccacaaaaccatctcatgtgtgtcaactccacaaagctctttatggcctaaagtaggctcctcgtgcatggaatcaaacattaaaagataaacttctggaatgggggttctctgcatcaaagtctgatacttcattgttcatctatagctctggtaacaacctaatcatcctacttatctatgttgatgatttctagtaacaggacccaatactcttctcattactcagcttatttctgatctcaacaaatccttttctctaaagggtttaggtccaattcattattttcttggagtagagatatatcgtgattcctctggcatgtatctctcacaaacaaaatatatcacatacttgcttgttcgacttaacatggaaggagccaaaccatgtgttaatccaataagctcctctgtcaaactatcccttactaaaggagagccatttcatgatcatactctttatagaagtactttgggtgctttacaatatctcactctaacaagaccagatgttgtattcatcataaacaaattgagtcaattcatacatgctcctac

SEQ ID NO: 399428 - DNA, 705 bp, Cannabis indica
gtgatcgtgcctgaagagtagtggactgggtactatcgtccaggtttctcaccctcgcagcaactatgataaaatgacttaagtaggccttaagcatcttgctcggctattgctttttgttagtgagtgaagatgcctctggttgcctatcccttgcggcctagaactgttttttgaagttcatagacagctgttcccatgaggtgattgaatgacgagtaaattttttgaaccagctgctcgctactccaactagttaagtggggaacaaaatatagcgtagattgttcgtaacattgttggctcgcattatagtattgaaattatttaaatgcaagaccagatgtgtggtcccatcattcgacgagatgtgagggttcttgaatccttagggaatccagtattcatgaaatctggatggaaaggctcgagctcctcattcgagtcctatctagactgcttcccctatttttcgacatgatacctcctaaatttatcctccaactcatcaatttgaaattggataggatcctcttttgaccgagttgttggcaaagatcaagctttttctggttcaagtgattacaaagattcggttgttgttggatatagttgataactgttgggttttgtgccctaaataaaatccatttcaatataatcagatttacctattaataaagatcagaaataacattttatgtt

SEQ ID NO: 399429 - DNA, 1720 bp, Cannabis indica
aatatctaataagataaaatgtaaaaacttacatttttcaatcgtataatttaatttaataaaatatatttcaaaaaataaacaattttgaaaatatgatatggttagcaaattttgaaatttaaactagattatttctaaaatttattaatattttaatatcaaaataagataattcaaattttaataataaaataagtaatatcttatcttataattaaaataaaattttaagattaaccataaagctatttttgtggaaaaattaaattttcaaattcaaagggcattaatatctaaaactaatattaattaattaaaaaattaataaaaattaattttattcggataattagatttttaattgaaaattagatttttaattgaaaattgcatacccctacgcgtgcggatgaagtgaaatgggcgatgctgaaggctgcatgcagccagtgttggccgaggaacttccgtaaggagtaggccttcagacagggccttgtttgagaatcctcggtcagcccttgtctaaagaggcgtgctgtccgagtgatgcctctgatcagggggcgcacaagtgtgcatcaaatttcagatattttcatccaaattcaaaaaatcataactaatacataagaaatccaaattaagttttgtgaaaacttaaattcattaactttttgtctactttccagtgaaaatatatccagaatgatacaaataacattttacaatatacattacgatttccatacaatcatcaaataggcacataaaccatcatgaaaccatccaaatcaacacaaacatcattttaaattcatatttcatgaaagtaaatcattactatggctctgattccaattgttggattatgttttaccaggatctagatttactaccatgtatgttatttagcatcctaaatattaatttctaaaataatgtaattaaaacacatataaagtttcagacacgttacattgggtgcaacgaattaaatgactccttccgctcagatctctaacccttgtatcctttctgttgcggagtatcaccaagatctgagcctgattctccttctcttcatttcgattcttcaaagtcttacacactatgattgagtaccacttgatgtgtgtgggcacttactctatcactatagggtttgaaatattgaagagagaaagagagagggatggttcgaataagatagagaagatggctcaaaattttgactgaagacaagtgtgttgatcatgttttaatttgaggccatcactatctattcataggaatccaactaggtttaggtttgaattattggccattaaaaaaactgataaaataaatggtaaaataccccttaagtggccggccatggatgtggggccccacttttgaattttgccatatttctcaactatttatctcattttctcaaaaatgccatttttccaattcaaccacttaaatgcaaaaactatttatttaagaattaaaattaattttcaaataaaattgccatttaacatatttattaactacacttaataaagtctcttaattaacaaataaaccctacaatctcttttcttcacaattaagccctagcttagtgaaaattcataaactagacataatataattttagaattacaattgattaattaaaatcaattaacttgagtcttacaagcagtattgtctcaattagtat

SEQ ID NO: 399430 - DNA, 721 bp, Cannabis indica
gtgtgtgtggggggggggggggggttaggataaaattttaggttgtgcaatgtaatttatatataaacgcttaaataaaaaaataatatggagaaaagaagttaatgtagaatataatgtaaaataaatttagtagagttttgatgatatacgttaaagagaagtgtaaattataatcttttagtcaacctttatgcttaaaattacatgtcggaatatttttttttcacagtaatatttgtcacagttacaatatcatccttgtaaatttttgaaaaaatccagtacagaaaataaagtttctgatatttcagtttattacgcgtgttcaaaaaacttcaaacctatttttggtactgtaaactatttaaaagtttttaaaaatttagagagatgatgttataactataacgaatactaccttaaaaaagtttttaaaaaataggctaattaggatttttgcttcctaaactttgatatgtactaaatcatgccccctaaacttttaaggttgttaaaaatgaatcatgaactattgagattgttggatttaagaacttttatctaatttcattcaattttactatttcagtgattgtttatgtactaaaccatgttctccagactttgatatctaccaaatcatgtcactcgaactttgacatatactaaatcatgctctctgaactttcatccatgttagatttttttacttaaaatt

SEQ ID NO: 399431 - DNA, 1014 bp, Cannabis indica
aggtgcaggaccagccccaatgtcaatctgggcgctagataggtttttttggcccctaaatgctctcattttctccccgaaaagacttgtcactttgttattgaagaaaacaaagaaaattcttgggataattcttgggaaaagtccttggaaatgtcctaggttgacaaagtgtcaaaccgggcactgtagcctagccctacgtcaaccttgacgctgagttagcttcttggccagtagaagacttcattattttcctaaaaagaacccatatctttattgttgatgaaaatgaagaatattattagaagactttgcttgaattgctgttggaagtggccctagttaacaatatgtcaacttgggcactagtggcctagcctagtgtcaacctaggcactgagtggtctttctggcctccaggttgattcgtttattttttgaaagcacttgtagcttcattttgaacaaagacggagaaaattctcaggaaaaaatctaggaaagtgattggaagtgccctaggttgacaatatgtcaaccttggtgctgggtgcaccaccaagttaacctaagcgttgggtgctcaggtgtttcaaatagaaagtgttctcaaagttgtgttaattaatggctaactaacttaactaaatgttattggggatttgaggaataataccatagaaattgttaccaaatctaatgtgaatgagtaagatgttaagaacactataaatcttaatttagcccttcatgagaatcaaacaatagaatatagattagcggaagcgtaccggttcatagaatcgacctttaaatggttcaatcttccaatttgcatcaaaatctttctctaaaactttttatattaccaacagacaaaactgttggtaatatttattgactatttctatttggcccctcatcaaaatagaaattgtccttatggtatccacatattaaaatcatgacaatcatgctcttaagtcataaactttattccaaaatagacca

SEQ ID NO: 399432 - DNA, 546 bp, Cannabis indica
ccttcataactcacttcccgcaaatgacaactgtctaaagcctttctaaaattgtggattagataattcggtttagggaggcctccctttttctctctttgatgcagaatctcattaaaatctccacccacaacccaaggccccgagtacattctacatattcttttcaagagcttccacgaatggactcgttgacttggatctgggtcgccatagaaaccagtgaatctccaccattgaccattctcaattctaacgaaagaatcgatatggaagggagagaaggattgcacatgggtttctacatccaaagcccaaagcaaaatgagacccccactttttccccgagcttcaactgtaaaacaaccaacaaaacccagcttgactctcaaagcttcagccctcacagtacgaatcttggattcagagataaaaaccattttaggagaataatggttcaccagggaagttaaagaacgcattgtccaagggttccccaccccttgggcgttccaaaaaaggatgttcatggctgtaggcgaccct

SEQ ID NO: 399433 - DNA, 531 bp, Cannabis indica
attataatttagagaaaaaaaaagaaaatgatgaaaatttttcttagtatattatctcaatgggcgatctcttgtttatacacatatgagagttaaagattaagaaactaagaaaaaatgaatattaattacaattaatggtaacaaataaaatatttggacatccatatgtttattaatatttataacactccctttgtgatgtcaggctatttacaaaaatatgaaaaaatgaagatatgttttgatatatatggcataaaaacttagtgcatgtttgacatcataactaaaaaactgttttttgttttgaaaaacaagaattgttttttgaaaacaatttggcttgtttggccttgtttttgggaaacttacaaaaatactgtaatttggattaacttttacaaaaatactgtcacacggaattttttcaaaaatactgtgtttttataaaacaccagtaaaacacaaagtagaacaactcaaaacaccagtagaacaccagtaaaataccagtagaacaccagtgaa

SEQ ID NO: 399434 - DNA, 499 bp, Cannabis indica
ggtgcttctccaggtgctgttgctaatgcagcgagatttgctgggatattgactccaatagtcgcagctggtgggttaggcggtttggtgcgattatttacaccctgatcgtgcattcggggatcacggggctcttcaacgtcacgaggtgcctgggtgcgtgccctgaaaataacgttaaggtgatcgcatagatcatccctgtgcacctgatatcgtcctccctgtggtgtctccacagaaccggacctagtatacctgctgggtgtgcgaccatgcgaggatgaggaggcggattcaatgtcattgtctcgcgactgaggtctgctacgaggattgcatcattcagggtcttcttcagtctgttcctcctggttgggatatctcgcagattggtccctcgagcttagttgattcaagtcgagtcctttcgggttggcccttcattccctgcgagtactgttattacgacacctagagttagttacttgagggtttt

SEQ ID NO: 399435 - DNA, 2211 bp, Cannabis indica
ggtagtagaatcttacagtgactaaagctagaggaactagttgagttacttccttaagtttttgagtatttgggtccatgtccaggtgcaagtttgccaagaaagcagatgaagctagtacagcaagtcctgtacttagtaagtaaacatctctgtattccaactctgttcctctcttgaaaccaaatataaatggatagttgatcttatatcttctccaaaagtaaatgtttgtagcatacatgagaaggtgcagaacggcatatagaaatacactgcattgattacatttttattttattagggaagagcaaagtcacagaagagaagttaggattatgatctatggttggttggttacctgtaaagtggaaaaatgctctgtaagtactgcactccctcttctttagttggcagattatgaagttcaattttcaaagcaatggcaacaagtagcgcaaccgtgcaacccgaaaaaaaacctgaaagcaatgattagtttgtattaggtttgtttccatgtgaagcaaatgaattaacttcatcacattggttcctacctgagaaaaatgtcactgtgtggttttctcttctttgttttggcctcaacgatttcataccttcactgcgattggattttgaaaaattcttgatgaaggttgtctctaccctctccaagagatcaatgagctgtgatgaaattgtggtcaaactagcatacatgatatattatattgtactacaaaaaatcttaaattttagattttagacactgacttataaagtaaagatgttacagacctcatctgaatttccaaggacagagttatccacaacttccatgtacaatttagatgcttttcttgatgagatctgcatattatgcaaataaagttaactgcactatacatgtttcaacataatgattactgtagaaataatgaatagctattattataatctgtagaagtacaagcatgtgtaccttttcatactttttcatgatcttggaaaatgctaaaagattcatataactgatccatcatccattgagaaaaaagtataagaacatggaaatggtatatattcaaggacaagaatatgagtgtaacaatttcttttcattacctgtattgtttcagaagataaagcttatggtaaaactcaataaatgcaactctcaattgttgttcagctcttctcaaactccctttactataactcaagtcttcaactttagagtctttcaacgcacctttaattgtagtagaaattggtgattgagggtcattgttaatcttcacatgctcaagaacttctccaactttgactttctctctactgccactgctttgactttgttcttgttgactatgtctgtttgaattaaaccccttgacactacgtttatcaactctaatcctcaaagcaattagagattccatttgtttattcaattgatttgcttcatccatcattcctttcactttgtccttgtaaaagttatttgccttataaaactcttcatcaagttttctgaagaatgttacctcaaactcagttccttcttcaggctgtccaataaaaactgtctcaaacaactgcaaggaaccatctctctgcaacgtcttaatttctattgcttgattctcaagatcttcctcgttgtagcggctgctagattggcggtaaaacccgctgagagttctgttcattgcagggtgcttgttctgcttgtatgctctcatatttctcaatatatgtttgaggccattgtaatccatataggcttcagtccactcagccaccttttgtttcttatactctttcccaaatttcatctttacttctacctttgttggatattagcaatcactgcattacatatgtatcagcttagaagtaaaaaagttttactaattcaaacagaaaaattcatctttctttaagcataaattaagaaaaaacatagattcatcaactaaaattttcttccaaaagaatcaactaagacaaggcaaatgtaatatgaatccaatatactgctataattgtttgtcaaatttgtcaacacttttaatatttaccgggtttaacatatttttataaaacaaatttcttctagagtactatatttttataatgtatcattaattgaacacaccaataaagatgctcctaattttctttttttataaaaaaaaaaagtaa

SEQ ID NO: 399436 - DNA, 622 bp, Cannabis indica
atactccaatataatggacaaaactcaactttgtgccgagttttatttagatactatgagagaaaaatcatgtgattgtgattaatttatacaatactctttcagaaaattttttatcccttaaaaaaaattattcatcgtactatttctattagatttatacggtacacataaagtgtagtttttttttttttttttttttggaacacatcataaagtgtagtcagggtcggccctgaaaatatatgggcccaagacgaattaaattttggggctctcaaaaatacataaaaaaaatatcaaaaaaaagagtatagtgggatttgaacccatgaccttgaacattatgacttccacctcaaccaactaagctataaatatttgttgtttgtaatacacttaaattttacttaaataaaagcttaataaatttttttattttttcattttgggcccccgaaaagtgtgggccctaggcacgggcctagcccgcctatgcctagggccggccctgagtgtagtttataaattgagaatttaatattttttttattaatttttttatccatttacatttaattctattttattgcaattttttttccattttcattggtattat

SEQ ID NO: 399437 - DNA, 665 bp, Cannabis indica
ctcaaactaaacaatgcaatagacaactagacgttcagatgattgaactgctattaccacctgcacaacttcaaacattcaataaccagaatttcaactcgataactctaagaactaacttggatgcacaatttaagagtaagcaattcataaagacacaaaacatcacttttgacactcatatcacaaccattctacactttccaacattccgctaacccatgatcaataagtttggatgacatacctctctccactaatgttgacaactttttcttcggaatcaataggtctttttcgattataacaacatggcttaggtacacgggtaggtgaaaagtcatttaagctacactataccataagcacaattacacaatacgagcacccacacttatccattttttctttttcatataccccaaagaagatagtaagagattgccattttttcctatgtgcctgcccaattgttcacaattgattctcaagaagaaattatcgcatttactttttttttctgttttgtttttctttcttcttctctctttttcaatagaggcacaacacataacaactttattatatattttttcaatctctcactccaaaatgtattcccccacttacaacaatttatccccaaacttgcttaaaggcttatg

SEQ ID NO: 399438 - DNA, 726 bp, Cannabis indica
tcagatgaagaaatgctacgattaattaaaaaccgtagcaaccttaaacctgtggtttattcaaggaagaatgtcactaaaagagttagagatcatgttatcatgtctgtgcctagtcaattgccagccctagacaatggttcttcaaatattccaggtaattcttcatcttctactcctattttaaattcaaattctgatcctaagcctaccccaaagtaagcgccaggaaatcttgaagtagttaatcttcctattgctcttagaaaaagactcgtgcctgtaccaaacatcctatttccaaatacatatcctatgatcacctatcacaatcctataaagaatttactattaaaatttctgaactggttgtgcctagaaatattcaggaagcactagatgatccgaaatggaggctagcaatgtttgtgtttgaggaaatgaatgctttaagaaagaatgatagttgggagattatgatgtcacctgacgagaagaaaattgtaggatgtaagtgggtatttacaataaaatataattctgatgaaagtattgagagatacaaagctaggcttgtggctaagggatttactcaaacacatggaatagattataaagaaacatttgcttctatttgtgtgttattatctctagcagtcaactctaattggcccctacaccagttagatgtaaaaaatgcatctcttaatggagatctagaagaag

SEQ ID NO: 399439 - DNA, 771 bp, Cannabis indica
catattttatagtattttataactacctataaattttcacataattctgaatagtttatagtgtgaaaataaagttcaaatagttgctcaccatacttaaaaaatagtcacaggtgtaataaaatattttaaccttattttcgacattacaaattattctaaatttttttgaaaatttacatgtgattctagaaaaatacaatgtatataatcataaaattaaaaattagactaaaaaactcttttgaatgcaataattggtgaaaatggatcataatgacccttttaaaggatgtaccaataatttttgtaacatttaatacatataaaaatattttttataatatgcacactcccaaaaagatcgttttggtacacatctctatgtttcagcatctaaaagaattttttaatcaattttgttttataatcgtgtacgtttatagttatttaagaataccggttgattttttttttatcaaaaaaaaatatagtgacaaaaataaaatataaatattttgttgcagtcataattttttttttgagtggtaaatagttatttaaactttattttcgtcattgtcaactatttaagattttttataaatttaccgataatattaactaagtacaacagtcacgattttaaaaaacaaaaaaaaaatgttattataataaaaactagaaacaaaccgcgcttcgcgtgcggttatgttctgtttagtaataaataaattaataaaattaaaaatatatattaaaaaatgggat

SEQ ID NO: 399440 - DNA, 607 bp, Cannabis indica
atatatgttgacctcgcttttatttaatgataatgaatcaattatgaagcgattagaaatataataaaaacagagcaaaaaccaataagcaataaagagcattaggttttgaagaggttcgacccctttagttcggtaatagcctactccccttagattgtattaacttgagagcaaagaacacagtgcttcctctctcaaagctctcacaatgaaatctctaagtatttctctaagatctctctctaaagcgattcttttgataccctttacagtgaagctagatcactatttatagggccttgatgcatgagggaaggtttccctttcaattacaatatctataattggaaagaacatttattacataattagaatacatgaaatggaggatggagacagcctgccatatccctttgattcaatcccatgattgtagggattgccttcatacttgggcttcactataccattctgaagtagtcatgtcttgttacacaacttcgaaaaccaaacttattctctactcggataatctgccctttaccctgctcagataagcagatgttgtgcgtgcagattgttggaatttattttaccaggatct

SEQ ID NO: 399441 - DNA, 503 bp, Cannabis indica
cctgaagatggtaatgagcattggactttaccaaatgttgatatgattaagattaatactgatgctgcaattttctcctcttctaactgttacagctactcttgggtagctagaactcatatcggttctttgttggagaccaaagccaaatgtgtaagaggagctgtatccccggaactggctgaggctattggtatccatgaagcgctgagttagatcaaggataaacaatggagccgtgtggaagttaaatctgactgcttagttgcaattcaagctatccgaaattcttctaccatgtactcctattttggtagaatcataactaaatgcaaaaggttgttggatgagttgaaagattgtctagtttctttaaaatttgttaagcggtctacatacaatggagctcactatttagcgagatccacttgttttatagctgatcatagtttgagtgtgagtaatgctccctcggagttcatttctgtattaatgaacgattt

SEQ ID NO: 399442 - DNA, 716 bp, Cannabis indica
tgatgactttgtagttcagaaaatagttgctgaaactggttcagttattggcagtaaaaaaaaatcttctcgtaatattagtggtatatcaaaaaaaggataaactagaaaaaaatatggtatgtatatacattttatatattatgtgtttgtattattgtataaatttttttcctttttttttttaatttgaatatgcttcatttttattaatattattttatgttcatttttaggaaaagttgtctgatttcacagatgatgattctgaacatattgttgattttataagtaaagaaaaaaaaaacctgttgaagtctgtgacaagaagaaagtgccaaacagaattgagtggttcatctattcctgctgcccctatggtaatcataacttgaatctggtttcattttgtcaattatatattttgttataatttagttttgttgttgtgaaaccggttttttatccctcttttatttatttgtatgttatatatttcattgttaaattagttttatgtagatcaaagttgttttcatttttgtgaaacatttttttttatttttgtatttgtttctttatttttttatttgatatttcaaattgtttttctatttattttttgaatttatatatcaggtgttttattttaagattaaacccaaaaagagattcggaggtgttgctcaagattttaacgatacaagtgtcctctt

SEQ ID NO: 399443 - DNA, 816 bp, Cannabis indica
tgcatggatccactattaatcatataatgacatatatatatataaaaattttatttgaattaatttcgatcttaaattttttgatatatttcaactcatgatctcagaagatggcaacaagtgtccttgtcctattcttatgttctcgacttctcagaataagatttggtctatttttttttttaaatgtcaaattaattaattgaaacttaataatttcataaaaaaaatatatatgcatgtatattgctacatatatagatataaatttcattaatgctcatttttattgttatatttattaattaaattaattactgtactgatcttatctcttatgacaaagagagagagcacataaaaatcctgtcttttttttaaaaaaaaaaaaaaccattagtaatatctcaagtattgtccctgatatttgataaagaatttatttattttatacataaatattttaattaacgacataatgtgatctctcttttaaatagatatttaaccattaatgtctacaataattcatatatagtgtatattcttttttttttttttaatatcaaaggtttcattaaaattaggcctcggcctgaacaatgtcacacaagaaagaaggagcattcagctcattaaacatataatctgacgataaataagaggccctagcaacacaatgggcaaccttatttgcagatcgattaacaaaagagacaaggacattatttaaactagataaaatagtacaacagtcctcaactaacaaaccaaattgggatggcatatgaactgagctataatcgcttgaaccac

SEQ ID NO: 399444 - DNA, 932 bp, Cannabis indica
aactcgaacttacaattctaggttctgctattttctctagggattacactaactcaggaaatagagaaacacccaactacgacacgaaaatggacgagaattgagaaaatggagcattcggggaccctgcctagccagttttggaggtactggtaaaaccgtctagccggtttgcaccagttcaccccaaactttccatttcttgctcaatcctccaccaaatgcaaccaaaccttccagaacacctatacaatgcatatacaacataatccaactagtatttcacaaaaaaaaacatacaaaatcaatttatgccattaaagacctaaacttgagtttcaaaactcaagcttgctcaattccctcaccagagctcaaaactaataaccaaagcttaaaatcaattcaaaataagcttagaaatcagactacacaatctttaaaccctaacagtcaccaacttcaaaaatcacaactcaaaccaagtaagaacttaaggaattcaataacaaagcttctagggtttaccttggttaagaaatcctttaatcccagctgaaacacccaaaaaccagcagcaattcccccttgttttgagctggttcgaagagagagagggaagggaagagagctctttctatttttggtcttttctttgttttttctttaatttctcaaagtgaaatgtgtaattttggctgaagtaatctaatgctaggtgtcaccttacaaggcagccaccaaatctcttctcttgacaattactaaaatgccctttctcttaaaactaaggtatttctaaagctagggtaaaatggtcaaattccaatacctacttaatcccgatattttattttctctaaaatatttaccactaagaaataaggttctaaacttacccatgtgaccaatctagccatccatcgcatttt

SEQ ID NO: 399445 - DNA, 938 bp, Cannabis indica
taaattacagtaatatattttcagcagtaaaaagaatatataatagtttaaaattaaatacaagaacaatgtaaacccataattatgggtatgagcatttgaacaaaaaaatcagaaaaaataacttagtcacaatgattcaagttccgatctgtccctaacaagctgcaaccgtagaacagactcaagcccgatcatttttgagcccaatcgatacagatcccaagatccaccatcgtctgtagataaattcaacaagagagaacgagagggaacaccatataccagagatctatatacagaaataaaaggaaagatgcgaagaaaaaaataaaagatgagcagaaatcaagaaaagaagatgaagaagaggaagtgggtacctgaatattttcggggcgaagatctcggattccagcttcgttgaagctgtcgcttgcggaagagacccagccatcgcctgggtcaatctcttcgtcgtagtcgaccgagagagcagcgaacactaagctcatcttgagcgtcaacgttgatctctctgacgttcccttgcaatcgtggttggggaagaaggtggccggagtaaatcattggctggatctaacatttttctttttttttttttgaatgagctgtgcggctgtgagcagaaacaaagaggtgagaggtaagaggtgaaagagagaaaatagggttttgtttttcttttgaattggttggcgttaattaggctcactaattaatgtttttttaaagtgcagttgcttttttctttcaaataaattgtaattgcttttttgttttaagtgatatgtaaaacatttacttattattatatcttttatttttatttatttattaaaataatattaattataagaaatttttacactaaaaatacaaaaggctaactttattacatatatactacaacacgg

SEQ ID NO: 399446 - DNA, 522 bp, Cannabis indica
gtgtggaatcaaacgacgtagggattggttgtgtgacccttccaggttgttatagaataaccgacgacatagggtacacgtgaaatttgacacatgtaccctatgctgtcagtttttctataacaaccgacgacatagggttatataaatgaccctatgcatcgtctccttccttcttcctcacgatccaaacccagtagagactagcccagtagccaccagcgaagaaaaaaccctcgccaaccaccacctccgccaccccttttctcctccatttctcatccatttcagcccatttttttttaaatctttcattttcgatacttaataccatacacccaaaaagttttcattttttaccctctttaagtatcatccgaacccaactagaaatttgtgggtttaaaatccaaccaccattttttgttcagaaaacattgaatcttaacatcttttaaggtataaattgttggatattttactaggatctagatttactaacaagtatgtttcattaacatc

SEQ ID NO: 399447 - DNA, 1004 bp, Cannabis indica
gtatgtatgcttagtttaagctaactcgtacattttcttggtccgtatgatttagcttttcatattgcatatatatgatttatatatatggaatccatttgggctttctcacattttattattgtttattgatcttggtgatttctttttgcttgatgaagagcctaaaacaaagaaaaggggttggctgtttgtcagcttgctgagggcattacttgctagtacccattagagaagacaattaggtggctattagcttggagtttccaaatgttaaaaaagaaagaatagttgacaattcattattcgcccataattatgattttttaccctttaaaacacaatgtattgtcatcaagaattgatgtgcctatgtaatactgttcttttattttacaagctaaaagacctaataacttttatgtaaaccgaaaaatattgtaattgattcagatcattacattcacatatatagtatatttataataattttatgaagccaagagttaattatgtcatctatggtgctggtgcctcgacttttgaggggttgggaggacaatagtgatgcctcatgtcactacaaccggtgcaactgtagcttattgagagtccatctttggtgttaaattttctttgttataaattgcatactaaatttagtgatgtatattgttgtatcttttctcaatttgtaactgaatacgtttccattataaattttatatatgaacaatttagggtaaattattgtcacttaaatctacactactacaaaatgggtttttagcctcctttttttaacccattttataaaaagggaagctaaagggtctaaaaatacccgcctattgaaaatttacctttagatgcggcttttttataaaaaccgtaggtataaaattgaattataccatttagagtctgtgtggaatgaaacgatggaggatttgtttatgtaaccctatgccgtcggttcgtatagaataaccgacggcataggg

SEQ ID NO: 399448 - DNA, 507 bp, Cannabis indica
agcttatggagggaaactaatctccactttcaacttttcattctctctctagaaaaagctcctcctttttctagacggcgacgccccacattgcttcaactctcagattttcaaactattttgacgatccaagctttccactctcttcagcaaaggtttcttgtagtgggtaagctttctattcccgtatttacttaatttagtgaatttttccatggttgcacgaatattttctttgctttgaatattttttagattcccacattagattgcaatctttttggtattttgatctgcttgatattcttcggatgtataatacgggatttcttgacaaaaaagatttgattttgaccttcattgtaatttttggctctttaagttacaaagaacacaaagaacgtgttcgagttcttgaaaaacacacgattagatccgacatgcactctggccaaccatagaggtcttgttcaagacctggcctgccatgggtcttcatcatgggat

SEQ ID NO: 399449 - DNA, 645 bp, Cannabis indica
agtggtttgatactccccgcaggaagtgtatggtgaaatttggagtgctcgaatgtagagcacaaacataggcgacatatgtagctttaccacctgggcggcatactcttgcttcccgagtggtttttgggatgtagttttctgatatcaagttatcttctgcatcaccgatctgagatcttttaaaggaagatctaacgagaacattaaattaagtatttcaacaccttgtagatttcctccccaggtatacacttgggcaacatacaacctccccccgagtgtagacctggatggcgtacagtcggggtatgaagggaaaatatctcaactacacttgtaaccccgtagagcaacccttgcgcataggattgacttaagagacaagacaatgcctcacaagaagtaaaagagacaacacaatatcatcctgggagtacaggtactccctaggtgagatacacttgggtgccccctggttgcaaagaccaaatcgaggtcttcattcaattatgaagatcctgaaagattcgatcttatccaattctacaaatttaggaaattgattggggtgcgaatttgagcaattaatactgattaattctccctcccaataaatactaactttccatcaccttggaaggg

SEQ ID NO: 399450 - DNA, 731 bp, Cannabis indica
gtagtgatgatgaattagttgctctaacatctgctctttctagcatatctcattttttgcagaaaaagagaaatcttgtttcctaaacaacatgtttcagttaataaaggtgttgacgatgttatagaatctgaatttgatgaatctgaatcggacaagattctttagctgaatcctacaaggtaatgtatggtaagtggttggaggtttgttctaaaataagttgatgtcaaagactatcaaatgtttgtctaaggaaaataaagatcttgaatccaaatgtaaaatttttgaaattgatcttgattttgaaaaacaagaaaatgctaggcttttaaatgattttgagagtctaaagaggaatgtgaaaaatcagtttgtcaaagctgaaagttcatcatttatctgctctgacccttcgttgcaagtttctgcaggtacaaaaaaagttcttggcggaacagtttctccagcctcaggtaagactttccaatcttttggtaagacaccaaaattcataccaatttgtcacttttgtggtgtgaaaggtcacattcgacctaagtgctttaccatgaataatttctttaaatcaaattattttaaacaaaatagtatgagaaaaagaagttcttccaaaaaggtttgggtaaagaaaaataattctaaatgtctagtttcttttgcttgtcataaatctcatactgctaatttgtggtattttgatagtg

SEQ ID NO: 399451 - DNA, 577 bp, Cannabis indica
aaatgcaatagatgttatatttgtaaacccagttctgaaaaattagaataaaaaaattataattttatctttctcgaaatacgtgaactaaaaactttaaaaactaaagaaaaaaaatgaaaaaaagatgaagaagaaaaactgaacaagaaataaaataaaaataataaacttatatgttaatggagagagagaactcgagaaagaagagggtggaaaaaaaaataaaatccaaggactttaaaatacaaaaaaaaaaaacatccacaaagatgatggtgaacatgagagagagggctcaaatacaattaaaaataagggtaatttgtggcataacctccttaagtggtaaggtctttgcaactaacccccaattctaaaattttggtggtaaaacctcctaaacccaagttctgctgctagcacttagccccttccatccatttttggttgttaactgccatggtggaatgtccacgtgtacacagtgtacacgtgatacaatttaactagtccacataaataaatatttaaaaaacaaaaaaaaaataaaatttttaaaaaattaaattttttt

SEQ ID NO: 399452 - DNA, 790 bp, Cannabis indica
attctaaaatttgataatgatggtggggaaaattacatgaaaatttacaatttttccttaactacatttatgcttcattttataaacgacgcaataggtgaaaaagaaaactatttcaacaatttatgtctcatttttgaaccgacggaataagttttttgtgacggtttggaaatgccacaaacaattttgcgtcgtttttaaccgacgcaaaaaataaaaaagaaaagtgcattttttgcgtcggtttgtaaatgaagataaatatttttcgcgtcatttcaaaaacgacgttaataaaaaaactatttgcgactacgatatatacgtcggttttttaaaccgacataaattctttaaatgacacttaaaaactgacggaaattatactttttgtagtagtattttcaaaataaatggacactactacaaaacacacttttggtgtcggttttaaactgagacttatacttttagtgttggttcataaaactgacacctatactacagtgacaaaaagtaaattattggtgtcggacaccattgagtattggtctcgttttataactgacacttaaagtatacttttatgttttatcttttagtgccggtttttaaactgacaccattgagtttgggtctcatttttataaccgacacttaaagattctttagtgtcagttataaaatgacaccaaaaactttatttatgacttcccaagttttttagtgtcggttttaaaacgtacacaatattattaacagggtgtaaattactattatttgtcaa

SEQ ID NO: 399453 - DNA, 1176 bp, Cannabis indica
aaagaaattacataaataccactgacacacaccatcaacccaaaattcatgcttcatgggcaactatcgcgcaaccacgcacaacccaacgcaaccgaaacgaaaattcaaccagaaagagaactaccattaattccggcgacttcacctgagaaaacgaccagaatcaatcaaaacagtggctgttttgaattcataaaaaaagtgtagaaaaactaccatgaaactaaaattcaaccggaaatctagtttaatttgtataaaattaatgtcccgacttcaatttttagatccatgaaaggcatatctcaaaaagttaaactgtagtttccaaacaatccaactcaagtataatccaaaaaaaaattacaaatactatagtaaaatatttatcatggtgtattttcgttgttttctaaatttctaatggtgaatttgtttttattaaatcataaatagacatatagatagagttacgtacgtggaaatactattctgatttttaatatttcataacagttgcattacagttgtataaatattttgctaacagttagttcgtctgattgaaaccttcgtctgatgcaaccttcggccaaccacctagaaactttcgtttgattgaaaccttcgtctgatgcaatcttcgactaaccaccctccaaccatcatctgattgaaacttttgtttgatgcaaccacaacgcaaccatgcagcaaccaccctgcaacgatcgtctaattgaaaccttcgtttgatgcaaccaccgcacaccacgcagcaatcaccttgcaactatcgtctgattgtgtaagtgataatataagaggtattttgataattaaaatcacataaaaggtataaatgttgtccacaccttatggaaggtatttttgtaaataaagtatcaattttatattttttttatgtaataattacaaattattataataaataaactttcatcaattaattataaaataacttaaaagaattatatgatcttttgcctttcctataatgttgagtaacaactatcaactaaaggataatttatgaaataattatatgtctcatatgaaaaaacgttttcatgcaacagctaaaggaaagcattaaatcccaatcaacaaaataaaaaaaaaaaaaaaaaacaaaaaaaaaaaacgaaacaa

SEQ ID NO: 399454 - DNA, 854 bp, Cannabis indica
  modified_base (36)..(36): a, c, t, g, unknown or other
  modified_base (41)..(41): a, c, t, g, unknown or other
ttttttcatattagtctgaagctgggctagttttanattanaaatttcacaaaatgtgctaattaagctaggcggcttcagtgattcatttttttggttggatttctctatctattgtagtcagaacagagttgattaatgtattcaattataaagtttacaggaaccgggagaagggggggttagatttgtaaaatggaaattgaataatatatgaaatatatatagattgatatttagttgatacatttatatcatatatttttctatgattcacctttgtttcagtaaagaatgaaaatggttacaaaggaagaggttagaggacggtggtatgtcccaatcaccctatgctattctcaatttcttaattttctagatgagacagactaaatcaacaagtcaaaagttcttcacaagagattacaagtctctgtcctaaaactaagtcgagtcaactcttttaaggtaaatgatttaaaaaagactagtaagtaggagtttattaaagaatagtgctaaatggtaaaatatcgcttctatatagtcgtaggcactactcacttaaagtaggggggtacattttctttcctggaccaatgaggatccatcccgaataaaattaggattctccatctaaatagaaaattgtgtaggtttggatattatttttgtctcttcaatgttaaacaaggtagaaactaaattacactctccaaaaataggggcaatagttctcaaggtcatattttttatttatccgttggtctccaagttaacagattcgttaaacccaattcaaatgccacgtgtcgaaatatgattagtgggtgttattattttaattttaaaaa

SEQ ID NO: 399455 - DNA, 655 bp, Cannabis indica
gttgcaaaaatatctcttattatagaaattattacaaatattctcctataattgtattttgttcaattctcgtagatatagcattaatgaaaattaatctaacctacttcaaaagtctacaagatataaatgtataaatttgtgcattgagctactgcatatttaatagggaaatttcactattaatatctaataaaatatttcatatcaaaatttagacccctttcttctttttttttttttttgtacaaactgatcctattaattttaaaagtttcctaaaataaactttccctctctctgattttccctctctctctttgcctttctctcttcacgaaccacgcgaccacgaaccaccgtcgacccaaccttctccaccaatctccagccgaccatgaaaccatcaaaacccacgaagagttttcatcttcgccgaccaccacgactgaatccatctctctctctgtcgtcaaatttgacccaaacccacgaatcggcgaactgtcgacccaaacccaaaccacctcagtcaacccaccgtcgccactacgagcacgaaccgacgaagagacacatttctgtccaagaccacaaaaccaccacgaaccatcgccgccgccaccaagctcagtcaaaggttaaggtttttttt

SEQ ID NO: 399456 - DNA, 931 bp, Cannabis indica
tctagagctagttttgggtccaagacaaattcctgacccaaggtccttattccggttcttgttccaatttcgggtctctggtccgagtctgggtttgggtcctggtctagaaatggttctaggttagggtcctggtacgattccaagatctagacaccgactacgggttgggtccaaccctaggttgtgggtcaagatccgcatcccaatcttggccgatccgagttttgatttaagtctgcgtcccaatacggttttgggtctgggtcgtagtcagattccagttctcgaactcaaacccagactcggactcggacccaagtttggggtacgggtctgggtctgggtctgggtctgagtctaggtttgggtttgagtccggttatgggtcctagatccaaacactgactacgggtcaggtccaagccccaagtttagatgtggatcacggtctcaggtcccagtctagttccacttcgggtcccaggtcctggtccggctctggggtcggattctgggtctcagtcctaattctgatgcccgtgtcctaggtccaagtccccagtcctggttcgagtcccacgagcaggggaacccaccataacatttaatgatgaagatactgtcaagatcagatttctgcacaacgacccggtggtcgtggaagtccagatagccaacaagatggtagccagaaccatgatagataatcgagcctcttccaccatcttattcaagaccacatatgaaaagatggggctccaactcaaagatttaacccctgtctttagcccgtgtatggtttcttcggccaaggagtcgcacctctagggcaaattcgcctacccctcactgttggacaagctccaacaagcataactataatggcccaattttttgaattggacattccatcagcctttaacgtcat

SEQ ID NO: 399457 - DNA, 1084 bp, Cannabis indica
gaacaagcatggctaacagaaggcctgtcctcaagaagatagttagcaggggtgcagttttgtctacacaacaagttgaagatctgatgttgaattttactaaagatgaagttaaagctgctctctttgacattccaggaaacaaggcccctggtccagatggtttctcgagctttttcttccaagattgctgggagatagtgggagatgacatatttcaggcagtgacttcttttctggaatcaggtaatcttcttaaagagatcaatgctacaatcttgacattagtccccaaaatgaaatgtcctaacacagttaaagattttaggccgatagcttgttgtaatgttatttataagattgcaacaaagcttttgtgttctagaatcaaactaattctccctaatttagtctccttgaaccaaggaggctttattaaagggagattcataggacataacattatgatttgtcaggatttgttgagacattatgggaggaagaataataaaccttcatgtattatcaagttagatctgcagaaggcatatgacactatagaatgggattttattgaagaaatgttgcagggactcttatttccacctaagttcattaaactagttatgaactgtgtgagaacacctcgcttttcattgatgtttaatggcactttacatggatattttgagtcaaaaagaggtcttcgacagggggatccaatgtctcctcttctattcgtgttgggaatggagtacctcactcgaataatggggagaataggtgacaaagaagacttctattatcatgaccgatgtgcagccacttctctaaatcacctagcttttgctgatgatgtattactgttttgcaatggggatctcaagagtgtttactatctgctacaaggtctcaagttattttctgaaacatctggtttgaattcaaatgctacaaaatcggctatgtacacttttaatatgcttgaagatcaagttaggagaattaaggcaatatctggtttttagcaccaatccttaccctttacttatttgggagttcccattggtgcaaagagaatatc

SEQ ID NO: 399458 - DNA, 765 bp, Cannabis indica
tggaaaatggtaactttcaactgaaaaagtgaggaaccatttgtcggatcagttcaatgtttgcctagaatttcaactctgaaggctagggatttactacgtagtgggtgtgtaggatttctagcggttgtgattgattctaatagacccgtgatactcaaatcgaagaaggtcaaagtggttaaggagttccgtgatgtgtttctcgaggaatgatcagggttaccaccacagtgggaaatagattttattattgaccttgtacctgggacaaaacctgtttcaaaggcaccctattgtatggctctgaaggaactaaaagagctgaagatacaacttcaggggatgttggatctagggtttacctggcctagtgtattgcccgggagctccaattttatttgtaaagaagaagagactcttcgaatgtgtattgactcggtagcagtgaaacgcgatgttgggcctttagagagtcatgtcttcatatggtttaagattttattagtagtggggcaacatgattagacgttggtagtgtcgggaaattgttagggtttggaaatgaccaaattactcttagatagcatgcatgttttgatgtgtgtgatgggcaaaattgtcttttttacttaaaattcttttgtccttttgtggtttatttaagagtaataatctaattttcttttaataaaagatttaagttttgataattagaaatttacccttttcatgtaaaatctagaaactctctctctctctctc

SEQ ID NO: 399459 - DNA, 1028 bp, Cannabis indica
taagcggcataaactcaatgattccttttagtggcattaagtatgcaatatttataaaactataattttcctctagttttattagtacagactctattattgacttaaacaaggcacatataaggtctagattctacagtattgggtttggttgaaaaatatagtatcaattacttccaaatcttattttaataaattcaaaatggagtttgtattgatgaaaatgagaaaaattatagttttacaaacattggatacttaaaacgactaaaaaaatcattaaatttatgccacttataaactcaaaactttgggtacttatgttgctgtttacccctctaaaatatgcatctttctaatatattgagaaaaatttagtgtctcaaatacacacaatacttaccagatattaaaaaaaactagacaagttacatgacataatatattaatcaagatttttttttatttgagaagaggagacttacaaacttgtacacacttttccgacattagtgtgtagtgaaaaatatgatcattgtccttgacaggtttttcattttttgccttttttatttgatcttgcaactgggtgttgtcataccatactaaaggtatcccttttttatggtatcctcttcataatgcctaatcataaattttacctgatgaacttcttgatggttcaaaaaaatcttgatgttttttctgatgaacttctaggtttaccaccgcagagggaaatagatttcgttattgatttagcacctggagcagaaccagtttctaaggcaccgtacagaatggctctgacagaggttaaagaattgaagattcagctttaggggttgcatgacctagggttttcacagcctagtgtgtcaccctgaggagctcccgtactgtttgttaagaagaaaaacggatccctacgcatgtgtattgactaccagaaactgaataaatagactatcaagaacaagtatcatttacttaggatcgaggaccttttcgatcaacttgaggggaag

SEQ ID NO: 399460 - DNA, 521 bp, Cannabis indica
ctctattgggatatctcttgacgttacgtggtatgaaccagcatcaaactccacggcagatgttgaagccactaaaagagcccaagattttcagcttggctggtattatatatatatatatgtatgcattttcaaagtcaccaatacatatactatagcttaatgtgaatgtgtaagtgcaggtttcttgaccctttgatttttggagattatccaaagtcaatgaaagagagagtaaaaaaaaggttgccagtattttcaaaatttgaggcttcactagtcaaagggtccttggattttgtgggcattaaccattacactacttactatgcttggaaccggacagttgcacttaacgataccctgcaagactctggcgccctaacaattcgtaagtaataattagatgttggatggagcttgtcttaatggaggcctaaaaaaaaaagagcaaaggtcccacatttttacttttattattttttaaaaaataataataaaaaataataataaacgaatat

SEQ ID NO: 399461 - DNA, 622 bp, Cannabis indica
acactaaaaagattctttggtctgagttagaaatcgagactattgagttgaatagaaaaaaaaaagcccaaagaaaaaagcttaaagaaaatcctaccatgtatacatattattttaaaccttacatttcaaaccctctctcttcttcttctacctaacccgatctctctctctccttctcttcttcatgcgacaacacccttctctggccatccatctccttcattggcttcgctctctatctctcttgataacaggtatgtctctctattgtcctggcaaaagtgacctatatatattagtgcaagtgggagtttattaggttttgtgccttaaataaaactcatttcaatataatcagatttactaattaataaaatatcaaatcattttatgtttcatggtcaaaagaatttatttcatgattatatgtttaatgtataaattctaataaatcgagaacatataggtactcacgattatagtgttgtcaacaaagtagaatataatcatgattatatgttcaaaagttgaaagtcccatgatttgtcagtacagtagatttaaactgacatgataatcagcgataaagtatacttacacatattggataagtgtatgt

SEQ ID NO: 399462 - DNA, 575 bp, Cannabis indica
gtagaaaaattattgtaaattgcatgtataataagaaggcaatctgattcgagcaccaccaaaaatcatgaccatgatttgatccggtttaacacttctcatatacagagcgggtgcggtgattgctcccccactctcatacctgctttgtaaatttaccctcatatcgactccaatatccgttcaaattaaagcgggagcggaacaggaattactcgacgggggaaggattcctatcaattacccattatatatatatttttttttaaaaaaaatgatgtctcaaagagaattttttttttaaaaaaaacaatcatataaactcggtaaaacaataaacataagtggagtatgtatagtaaatgaagctagtaatacaaaattgataataaaaaataattgattaagtgtcatttttttaaaagcaattaagagtaattattaatatgcatcaccgtaggtattttcatgaaaattaaaatgtctcattactataatcaataaaaagtctaaaacatgaaattatttaattgtagtaattatgattttaaacttaaatatatacatatatcata

SEQ ID NO: 399463 - DNA, 938 bp, Cannabis indica
gtagatgaagaagattattgggtgtaaagtatgagagttgaaatacttagtaagggctcaacagagaatctcatctcgactgtattgtacctattcttgctcaatcaataaagaagaattatggtggtgttccagaattggagtagagtcatagatcacatcgatctatcgaacttgaaccagtatataacttgatattaattttttattttattttatgcatttagtgttttttagttttcattactctgtttgctcctgctttaattcgattgttattttcgatttaacaatcttgtcatcgctaataatagagttttattaatttaattatgcacatttagtataatatatctaaaaatatatattataatttataaatatatatatatgttaatattatatatgcactattactctaaactcatatttatattgttttgttctaatactaaatgttaaattagaatcctgaacaatttactttcagaatctacactcactaataatgttctttagcatatacatgtatcaatcgtgatcattttttttttcttttttcttttaagaaaataataatactctttacctttttaaataatctaaaatatcactacgatatccttaaaagaaaatactcaaaatacacgaaagtagcaacttgtagtatgatggggttgaagaaaatacaaactacaatccttttttttgcttcaaataataataaattagagtaacattcttcaaaattttcagctccttttgccatgtgtgcttcaatacttggacaataatacactttgatggcgttttgtttgcggccagtctttttcattttcattacacattattattattaggtaagtgtttgttattattttgttagcaattgaatatatatctttatatattaaaagtgtctatctaacgacaattct

SEQ ID NO: 399464 - DNA, 682 bp, Cannabis indica
ttgatgaatcccctgtttcacctccgaagattgaacaatcttccccacctaaaacccaccattttctctggccgtagtctcctccaaatccaagctcagctcaccaccactggcctcatctactctaacccttcttgtcttctttcactccttaatcttacccttttatgccctgaaactcttcactatgcaactgccattttcagccacatccaacagtcaaatgcgccaacctggcctcttatggtccgcaggctcgctttagacaccgacccttttcggattttctcttttttcaatactatgcaaaggctgagacaaaatgacccacttggtgatccttatgtatatgctgttggaattaattttaccaggatcttagatttactcacaagtatgttgatttaacaacctaaataagaacttataaaacgataataaataaaacacatataaagttaagaaaaaccttacagtgggtgcagcggaataatatgtctccttccactcagatctcttacccttgattcctttctgttgcagagtataatcaagatctgagcccgaatgtccttcagttggatgtgatccttcacactcttccaatctatgattgaggtattgtttgctgtgtgtgggcactactctctcactaggattttgaaattctctctctcttgca

SEQ ID NO: 399465 - DNA, 668 bp, Cannabis indica
tttcaattaaggtcattttataacatttattaaataatataaaatataaaatatctgatcttaatttttaaaataagataaaataatcaaattttaaataaggtaaccaattaagcaaaatatcagattttatccattttcaagttcaaaatctactaatatctaaaattaattaattaattaatttattcttataattagatttgagaattgaaaaaatctaaatacaaaattatacaaaaattcaaaattatttccatgaaaaagcatgaaaaaatgagaaaaaaaaacaaaaaaaaattacatttggtgaggatggtatgcagtgcataccatccgcgcacgcgcatggtggggatcagccgagaattatcgcacaaccatgctgcatgcaggatttctgtgcacgcaggtgggttgttgagacaacctgtgcgtgttttctcggacaaaatgtctccgaacatgcgtgctgactgagtgacactcgattctgcgcgcgcacgtgggtgtatcccaccttgatattttggatttttcaaaaaatcataactaattcaaataaaatcaaaatctagttctgtaaaaaaatgaattgcttaattttttttcatactatccaagaaaaataattccagaatgaacttctaattattttacgtaaaaaa

SEQ ID NO: 399466 - DNA, 650 bp, Cannabis indica
agatctcttctttctctaggagattggataaactagattcaagttgggcaacttcctcccgattgcacaagttatgatccatattttgggctaaggataatttttgttttggtactttcggatctcttttaggtagtgcaccatattttcctaggtagccaagaatctaaagctttttaaaacatgaagtgatattggtgatagcagtatctaatgcagaaaatttcggatgtaggtaactatgagttagctattatatgttgacattctggatcatctttccatggagcttcatagtgaaaccttttacgttttttatatgaatttgaagaagaaaccggggataatccaaactcaagactaagcactctatgatccgaaccaaagaagtctaggtgagttaaccttgcctcgggaaaattagcactccaatcttcattaactaaagcccaatccaatcgttcctcaatagtattcgattgactgctatacttccaagtaaatcgaggccctgcatagtctaaagggttcaaagagctctcttctatggcttgacgaaattggttcatctgagattctcaacgagtgacttcacccactttgtcacttaatcctaaaatttcattaaatctcccatacaaagccaagat

SEQ ID NO: 399467 - DNA, 703 bp, Cannabis indica
ttagtttcaagttttttttttttgctgaaatctttttcttgtctagttttttgtctttttttatttattatatatatattctcttttctattcatctttccaaaaaaaaaaaaatactagttacactaaataaaaaaatactaattattttattttagtttaaaaaaatactatcgcaacttactttttaatgcaatcattttgatatgtaaaaacataaatatttactatcacaaaaaaaatgatccaaataaaaagtataattatttttatttatatctatatattttagcattgacattatgcatcagtagtaccaatactgccgtaaggtaactttttttgttaatgattagtgatattttacaaaaattattacattaaaatctttaattgcaatatataacagacatctcgtacgtagtggttagacatcactaccattttttttaacaaaagactaaataaactgttaatataagtaaaattaaccaactaacttcacaaattattatattttattattattattttcatataataaaagtaaccatgtattgttatttaagatagcttcacattcttttagtaactttcgctaccttaaacatgtatgataaaattacagagttatgataaagtatacttaacatcaaaattagcagagtcaatttttttaatattaacaattctaatattgatt

SEQ ID NO: 399468 - DNA, 907 bp, Cannabis indica
tagccatctcaagttcaacaattgaggctacttacaactcaagaaaactcaaacttggttggaaaaagcctaattcgcttggaagaatttttcaaggcacaagagaggtgttttggatttttggaaggtttggaaaaattatttgagggttttttgaagtttaggagtccttggaataagatcaacaaaggaagagaagaagaaataataataataataataataataataaaattgtgtcaaggaggaagaaaaaaaattgtgttgttctaccttgaagtggagaaggcttgaaagcttgatgaaaatgaaatcgagaggtgctctcaaagtgctataggcatgtggaatagaatgagaggtgtaaaaattggttctcaactcacttatttatagctgagtctgatttcctaatcttaaagctaattggagtctcttttaaatttaaagctttctaagaaagaggtaaatgataagtaaaagatataattatatatttttccttctccttttcaagtgtatttcgaaattcctatacaaatacgaatagaaatataaatttaaaaggtaacaacaattcctaatactattgagattaaagaaaaattagagaaattaaagggaaaagataaattataagcaaaaggccaaaagtcttttctcttcttcctttctctctctaattttgaatggcatattcagcaaggattaggattccaatccaataaatcctaatgccataacaaaaataagaaaattttaaattttcaaagaaagaaattaaaaataagtaaaaaaaaaagataagatttttcctctttttctttgttgattgattttcgaaattctcaaggactaatcaaaagtgttcaaagtcctaatgagaatgcttaaagaacaaatacaa

SEQ ID NO: 399469 - DNA, 832 bp, Cannabis indica
tgactgttgactttcgttgattggcgtatgtatttgcgtctttccctattgaactgcgacttcatcaaatatgcgaggtgtgcctttcttaatatagcgaggtctcttttagttaatattgcgagatcctttctttcggtactgcgagtactataatattgcgagccaccttcaatacagcgagttctctatagacaagtccttctcgcggggagggtaaatttatgccgataacagttattataaataggggcagattacacagaaaaaggggacaaaaagtccttgaaagaaaaaagaatacactgattgtaaagaaccctagttctgtatcaaaaaaagtttgaataagattgactcgtggactatgcagagttaactgcaaaaccacgtaaaaaacttggtgttatttttgctccttttattttctataatttatgtgctaaacctattacgaaaataggctcatattcgttaacgaaaatctgtgttaacagtttggtgctttcattgagagcctactagataaaagcttagaaaaatccctcctaaccaacaaggaatttcatctccatggttgataatgaggaaaacgataacactcatcctaaagagactactcaccgtcctagaaaagagctaatgggctcacggaggccacccaattcacaaacaatgcgttcaacacggtcaacactttcgagaagaagccaacatgatggtgacccaaacccaaaaactgggaatgaagaacctaacacagatgctagcggttctcttgtgagtgagggtgcctatgaccccaccaaatacgtaccgttggtcgagttgg

SEQ ID NO: 399470 - DNA, 511 bp, Cannabis indica
ttttttaaaaaaaattaatatagtttaatctgattaaattaaataagtatatactattaattatacaattcataattgtcataattgttcaaaataataatttcacaaattactattttgcctttaaaaattatgagaaataaattcttactcaaatttattcatcaaataaattttttccctatacttgtatagaggtgacttggggaccatagacctatattttgaagctccaataacactttattgctttcattaatagaataatctagtttattaattccattaatactccatgaaattacactttttaataatataagcagttcacctttcaattattagttcataattagagttggtcaaaattaccattttacccttctaattatctctttactctttatgtcccattaatttaatgtgaatagttaatctataacttattatagatttggatctaactgttcgcactcccagaattaacactataaggaaactaatatttgat

SEQ ID NO: 399471 - DNA, 882 bp, Cannabis indica
attattgagctcagggcggcttaatcacaaagtcggtaccgcatacttatatatatgtttcgtcatatcttattgtagtcttattagtaaaatacttttaaattgtattttgatactcgggatcccgacccatataagtatagagttataataaaattaagttaacttttggatttgaaaatatttaaatacgggcgttacaatcgggtccttataattaagaaataattttaagtaatattgttagccatgcattaattattatttccatgcattaattattattttttaaaaaaataaaaaataaaaaagaacaggtgccatgaatgagacaatgaaaatcacatcagtaattttttaataaaatttattaattgaaaaaaaaagaatgcaataaaacaagtatcattataggagaaaattgaagttttatatgatagtcattacaaaaaattttacttttagtcacaacaaaaagttgtgactaaaagttaaagaattgtgacttaattataaattatcattgttgtttttgcttaaatttttgaaaaacttaccaaaaagtctcaactcttgtcatctaattgatttaagtgcatgaacacatttgttttatcatacttgaggtatgagaaaaggtttgaaatcataaccatgccattatttacctgcatctcttactttcaaggtttttgacatattttttttggtagattgaatgtttaaacttgttttgactatatgaactttcatctttttatgcattttgaaatttctctttacccattgtgcttcattgatacaagtcatatcttgtatgattaagggggagaaatatatttagcttgaccttgcttcctctgccaccctttttgatgaaat

SEQ ID NO: 399472 - DNA, 738 bp, Cannabis indica
tattttgaagggaagagttctatgcagttggattcactattgctccatctggagaggtgcgaagtaaaagatgacgcctataagcttggactgatcgtttttattgagggtgtattagtatcaaaagagggtgatgtccaagttttgcctgtcatgttaaaattatttaatgaccttgaattcttcttcaagtatctatagggcgagcgtgcttttcgtaagttgatgcagctattgaaaaaggatatgcaacattactaagataatgttgacaacaagaaggggaagaaggttggtcatgttgggttttgtgccctaaataaaactcatttcaatataatctgatttattaattaataaaagatcgcaaatcatttatattgcatggttcacatgatttatttcatgattatatgattaatatataaattctattaaatctagaacatatagttatttatgattatagtgttgtcaacgcagttgaatataatcatgattatatgtttcaaaagtttgagactcatgatttgtcagtacactagatttagactgacatgataatcagcgataaagtatacttacaccttggataagtgttagtcctttcacgacattggcaaagtattctagtatcggatgtatggagtatgcatcggattggactgatattgaacttggataagatatcataaacttacccttatatctttctaagtcaatatccctagttgatct

SEQ ID NO: 399473 - DNA, 589 bp, Cannabis indica
ttgataatatctatctgaaatcaaggaggttttgggattatgaactcaagtctgacacaagctggtactggcgcaagttatgccatttgagggtgaaatttaaggaagcagatatccttaaagcaggagctaaggatcggttcaagactaactggttatacaataccagtctagttcgaaaacaggtcaattatcacaaagctatctggagctcaaccatagtgccaaaacacagatttatcctttggcaggtggttaactctcatttgctcacaagggacaagttggttcgatttcagattgagctaagttctaccttgtgccccatgtgtgaagatgccttggaaacccatgagcatattttcttttcttgtgagttgtcgagcagggttcttgatttggttttcaattggatgggatataaagggtggccgactgattatgcaggttggtgcatttggttagcattgcgagagaatggctctttgcacaagatcaatgcttctattttggcagctgtggtttataatatctggctcaaatgaaacagatgtatctttaatggcttctctaaatctgtttgtggtgt

SEQ ID NO: 399474 - DNA, 384 bp, Cannabis indica
atcgaggatgaggattaagcaattatagttttgaattcacttcctagtgaaaactatgagcattttgtggatacaatgatgtatggaaaagattctcttacattggaagaagtagaaaatgctttgatgtcaaaggaaatcttaacttcaagagtgcagttcaggagaaggattgttggttcaaggcaaatctttcaagaaagagaagatggaaacaatctggaagtgtgttggtcgagttacagagttgagacaagttaggcatgtccttgagatcaagaggaatctcatctcagtagacatgcttgaccaagaaggatatctatcaaattgaaaagggtgttaatgaaaattgtcaaaggctcaatgattgtacatgaaggg

SEQ ID NO: 399475 - DNA, 686 bp, Cannabis indica
tttaaaatcaattataacccaaccaaatataatcagcccccacatccactacaagacaaataacttgctagagaaaagacctctttacccccttagataaattaaaatgaataagaactcccaagggcaaattggtcaaaactaaacccaaaaattcaacacttaaccaaaacaccccgaacaaaaacatacaccataatatacgagatataattctctaaaggccccaacgccgctttccacagcttccgaacacaaacacagaagttaggtaattagcataaaataacataaaaacatatatgaactcaattatatttgcacaaaatacattttatgaatactaattaaatctcaaacataaaccttaattatttaataacccaaagcgttaatcataggcggtctttacaattattcccccgttaaaaggatttcgcccccgaaatctacctaacaactttggatgctgagccctcatatcagattctagttcccaagtggcttcttccactttactatttctccagagtattttaaccaatgctatggttttggttcgaaggacctttccttactatctaaaatttgcactggttgttcatcatatgataggtcaggttgtaattccaatgtttcataactcaaaacgtgcattggatcagacacgtactttctgagcatgg

SEQ ID NO: 399476 - DNA, 675 bp, Cannabis indica
atatatatatatatatatatatatatattttatatggacaatgctgtttccaaagaggacaaacaataagaactaatcaaaaacacagatagtcatgttctcagattcttggcatgctcaaattgccgcccatatactttagataaataataacactatcaaataaaactcacgtttgaaaattaaaaaagtttttttcttataaatatttagataaatgctaaagcgtattaatagtactaaatatttttttttatgtgtgaatattattattggtccaactaaatattgagttttatatagtttaatataataatagttttaaaggagtatcgcaacgtgacaaaagtgctaggcaccagtgacggatctaagatttttactttgtggggacttatttatcataaaaaatatttatagctacaatattataatcactcttactaaatttatctaattttgtggggcttttctactactttggcatataattattaaattaaaaatttacatttaattttttaaaatgcaatatttttattcgttgaggctataaccctcacatcaatcttaatagctccgtccttgctagacaccactaatgtctaataacaataatcaaatatttattacatactaggtgattgttacgtgtcaagccacgtagtgttagtt

SEQ ID NO: 399477 - DNA, 558 bp, Cannabis indica
actggtttttcatcaagaaaccatagaaactgttttttccatcaagaaaccagtttctccatcaagataccagtttcttggtatttttttgtgattttttcgacaataatgtcaattccgatgactttttcggcaccggcaacaactctggtgactttctcggtgccgacagcaactctggcgactattccaattctgatgacttgtttcagttaactttattgtttagcatttatattttgttatgatttttcatagtgtcgaatttggtttcacatggttcataagttcaaaactggttttacaggttttaaaggttctgtaatgaggttgttttattttatgatgttattgtatattttttattttaagtttccttttattattttgtttctaggtttgaaactagttttcacacttatattttattttagattattgttgtgcattgtgtgttattttgtttatatttatgaatattcttttttgtattttttccccatttgattgattaatgaaaattggtttcaattattttcattgtatatcatttttgtt

SEQ ID NO: 399478 - DNA, 538 bp, Cannabis indica
gttcaagagcgcaccagaccgcgtatgagctattgtaattggcaacagaggcaagaacagtttcagacatggaggatcgtaaccaagaaagaagaagctgatccttccgtcgccattgaagaaactctggattagaggtgccattgagtagagtagcagggggaggaacaccagtgaacaagatctcatcgagatcatgtccaataaccgtgggaatgacctgagacttccaagaaaggaagttgacacgatcaagcttgactgtaaaagatgatgataaagaattggagaaaggattccaagatccatgtgcagcagttaggacgacaggtgccggaggagctcgatttgcaggaatggtggcaggggcctgaggatcggtggtggacgaagacatagtctagagtcaaggctactgataccatgtagaacagagaaaagcagagaagaacaaaggaaagaaatcaaagaaagagctcactttattattatgaatataccagtatttatacagagagaaaataacaaaaaggcaaaa

SEQ ID NO: 399479 - DNA, 611 bp, Cannabis indica
attgcaggttttccacttcctcggcccaacttctcctagctgatagtagagattcatcttcatcacgattctccatcgcgtgctgctctggaacttgtaccagaaagttttcatcaccgtcgagcgagcaatcagagctctccttctccagctctagtttctccgaagaaccaatcgccaccttcaagcctggccttaaacttggttttttcctcctcgccatggaggagagagagaaacgagattagaggagctttttcattattattattattgtctttctttatttctaacttttatgatatttcaaaattttttaattttaaaacttagattaagttaaaaattgattttgaattaattttagatcaacttaaatcaacaaattttcataaatgattaattaaagtagatagacaaaaatttattatattttaattagaaaattagaaatcagtttatgaattatctagatagatattttcaggtagaccttttggtatttttctaggtatatttaattaaaaaaaaaaattaatatgtatgttaattttattctagacacttaaatatttgatatttatcttaacatatttaattaaataggaaaa

SEQ ID NO: 399480 - DNA, 666 bp, Cannabis indica
tttttttttttttaattttttatgttctatatttttcagatcgacaatggctattcaatggcatgtgctccaattgttattttgtttcaaagttataaggtaactttttccttgctttgaaaaattcttactaaaactatctttatattgcatatgtatttagattcaatttaatttcattatgtttcgtctttatattttatttccatcatatatttcactttttgtactaatcttttttttcttctctattccactgtctcttataagcttgattatcacaagtttatatcttctattttgatcatgacaatgatctcaataattaatcttttaattaagtatatacatatatatacacacatacacatacagtatatatagcatatatattatgttttataattttatattgttttagtgaatatttcttatgtgttcatctaaataactattttttatgtgagcttgactctataacatgcctcttttgtgtatttgtaactccattcatatacatattgtaatgaccgctctagtaatgtggattagtaaaggcaattagcattaatttttattattttattattatttgtgaattaattttaatcgtggaccccaatatttagaaataaatattagagttataatttctcaattccggag

SEQ ID NO: 399481 - DNA, 512 bp, Cannabis indica
aattaattagcgataatctttataaattattatattaaaaaatttaacttatactatttttttaatttttttttttcaattttactattacctcatactctccattaacatacatgtattattttatttcttgtctacttcttcttttttatcttctttttatttttttctttaatttttaaaatttccaatcacgtttttagaaaaataagagtgtagtttttttattctaatcttttagaattaggcttgcaaatataacatctattgcatttagtgttaggttgtgcaaaagatggttagttttttaatcatttttttcttttgtattttatatttgttttagtattgttatatggttgtttgtcatgatttatttattttacgtcaatttttactgtttttgttctatttcgctggaattgatggttagtttttgagtgttctcatattattgtagtagatctgtttgtaggtgtataagatgaaggctataaatatattttttcttc

SEQ ID NO: 399482 - DNA, 661 bp, Cannabis indica
ccatgtgtaaataaatgaaacatagggaatgtccacatttcattagcagttgtgaatgattcaatcccaataaaaataactgccaacctatattcctataaataggggcagaatccatgggaaaagggacgacaaaaaatagagagaaatcctatcattttaaaagttaagatttggattttgtgttatagtgagatttctctcacctagaaactcgagaccagacccctgtttagaggacacgtatactcagatttccaatgaaagctgagatgtccatgagggactcctcgaagttttaaacctcacttaagatagactcagcgagagacagcgagcttgaccaaagtctgatcgcattcgagacaagagagtagctcgcatatatagaattatgtgcgagtatcctccccatgtccgtgtataaaccaggagaccgactttctataaatgcgagttggtcctaagaaccctgcagccttgataaaccaatacagacttgcatgtctaggttctatcagctcgtcatgcgatgtccataaaaggcgactatctaaggacgcagacatcctaaacataataataaacctgcgtttttaacatcggaatatgaacagtcaactcgcagtagctgaggacgcatacgttgatgaacttagta

SEQ ID NO: 399483 - DNA, 1109 bp, Cannabis indica
tagccttgattgctgaagaggcttagcatcatgttgcgaaagagcagaatgtaaaggatgtcgtcacggcattgaatcctcctactagtggtaatgtcagtaaggggaccgacagtggcaaccctgaccacaaatgaaaggctgaggctttcagagcatcagggggtaatagaaagttttgaggaaacaaaggtggccatcagggctgcaagtcctaattctgatcatatcccgagtaccctaaatacaagaaacaccatccgggtgagtgtcgggccaaggcatgttttcaatgtggcatggtgggccactttatcaatgattggcctcaggctaagatagaggagcctaagaagaatactacacagaacccggggcgactttttaccatgacttaggctgacgttgatgctagtccgtcaggtgtgacaggtcaattgtctattaatggctgttcttactgtgttgtttgatttgggagctactcactcttatgtgtcaagtagagttattgaaagtttccataagccatgtgatatttatgctttggggtttgcaaccctgttaccctcgggagaccttattgtctccactatgtggatttggtcttcgtccttttggattggcggttgtgaattgaccgccaatctaattgaattgcaactatctgattttgacataatcctgggaatggatcttttatccatgtatggggcaacgatcgactgtaaacggaaaatggtggtgtttgagccctctagtactaacccagcggtgttcgtgggtaaggttcaaggggcacgcataccaagaataactatgttgaaagctaaggacctgatgagcagaagttgtctaggattcatattcactgtagtggataccagccaacctatgacatcagggcctgagtatacaagattggtgtgcgagttccttgacgtctttccagaggatttaccgggattgccacctacccgggagattgaatttgttattgaattggttacgggagtggatcttgtatcttaagcactgtatcgaatggctccagcagaattgaaagaattgaacataaaattacaagagttattgaatctgggattcat

SEQ ID NO: 399484 - DNA, 541 bp, Cannabis indica
aggtaggattgaacattttctttgagtttgactcgaatccgatcaacccgctcagacccgactcggccaacctgattgtagaaccaaaatcaaatatgaggggtgtcgaaaactatattaaaattctaaaacttattttttttatatcaagaacgttataagtaaatttatactaattttttcaagaatttattttttagtttagactatagaaaaattttatctttcatcttgtggcaaagtctagtcttcagtattttcatagctaagaaaaattgctctataataactgtagaaattataaatgtaagaataagagttattactttatatacaagtagaaaaatttatcttttttttttctaatttttaccaatcacgatagtaagttaaaaatagttgccaaaactataaaattaaaaaaaaaaaaaaaatacgcacatgatcatagtgttaaaattgtccttaattttttatttgatatcaagatattttacatttgtcatatatacatatttatatatatgacctaataccaata

SEQ ID NO: 399485 - DNA, 613 bp, Cannabis indica
atagttaacatcttttaatatagtatgaaaggtagaattacaaacatgagcagcttttaaaccttgaaccactaataaggaatctgtttcaattaaatcatcagataagccatggctgatgagccatttcagagtaagagcaagagctgtagcttccatctcttttggtttgaaacaccccttgatagattttaagaaagcagccctgatgtatccactaaagtctcacaaaacaacaccaataccaattagtccattagctttattgtaggatgcatcaatatttaacttaagtttgcctactggaggtgctatccaaggagctgcaggtgatgcatttggtgtggcagtagctgaagttatgtttggaacaacaatagagttagagctcattggtgtggcatgaacggtttggtattttgcaagataatcagttgcaaaaactagaattgcagcaagctgtttaggtgattttccatggaattctgcattgcgctcgaaccagatactccaacaaagtgctaaatattgttcaaactctagtgttgatgtgttggccgagacatagagcaagaattctttagatgtagatgttgttggatatattttacca

SEQ ID NO: 399486 - DNA, 1415 bp, Cannabis indica
ttttttaaaaataattaattatctttttatacaacgtaaagtattgattttttttttattcaaatattgtatataaattatttatttttttaattttttttatataataattattatatagaataaatagaaagaataggaattaatctcgataaatttacgagttaataggcgtgtggtggtagtcgaacattattggctaaataattaatatgagttgcaacactagaactaattaaatagaatcaaaatatgtaagatttattattgagaataacattctcatattatttatttgctaatgataaaggtattctttttctctgtacaaaactgccttcctaaaattcttaatgccatccagttgtcctaaaaattgaaaggaactacaataatattgcttgtaacagagtgataagtatacacttcaacatgtttgaaaatgtctatgatgtctagtactttatgttcggtttgcttgcagagcttttagggatggatgttaaaccattcactttcagttatgttgagctaaagatggctactaatgacttcagttttgctaataagttgggagagggaggatttggacctgtctacaaggtaactcatttttgtaatcaaaattagttacccagctcaggaacagattttatgtcataatcatcttttactgttctgagggaacacttgaagatggaagaacagtagccataaagcaattgtcagtgtcatcccatcaagggaaaagtcagtttatagctgagattgctacaatatctgctgtgcagcatcgccatctagtgaaattgtatggttgctgccttgaaggagataaacaacttcttgtatacgagtacttggagaacaaaagtctcgatcgagcactatttggtatgagatttgtgtaaagcccgcttagttaatttggaaattagcagtgtttatgattaattatgaaaattatttatagctatttaaataatttattatactgttatttatggaattcagaaatgcatggttatgttattcagtagtttttatattttgcatttccggtgcccgatattttggaactcggcgtttggctcagtagaaatcacaacttagtatgttagtagtttgggactgggtttagacattgggaatgccgggaatggccgggaatctagaagttcccaaaaatacccctttagtgatttttatgtgattttagtattgaggggcaaaatggtctttttgccccaatgactttttgtcttttgtgattttatgaaatggaaaataaatgtttatttgattatttgttggctgaattaaattgataagtgacttttattttcatttattcatttttacaaaaaaatacaaagctagaaaatagaaaactctctcaaattctctctctattt

SEQ ID NO: 399487 - DNA, 748 bp, Cannabis indica
ttatttcactaaatggacaaaagttgagccattggcgaccatcacatccaagaaagtgcaagacttcgtggtgaaaaatacaatttatcggttcggactaccatacaagatagtctcggacaatggcaaacaatttgacagtcaatccttcactaatttctgtgtgaaccatgagatcataaaaagtttcttcgcagtggtacatccccaagcaaacgatcaagtcaaagcaatcaacaagacactcaaagatactctaaagaaatggcttgaagatgctaaaggaaactgggcgaagaactccctgaagtattatggccgtaccgcacaattgagaaaatagcgaccaggcacactccatttgccatggcatatggttatgaagctatgttgctcgtagaacttgaacctctgtcccacagaagattgacatatgaccaagaggttaattatgcactcctcgcagaatcacttgatgaaatcgaggaaaagcgaactgcagcaaacctgaaattggtagcccatcaacaaaaggtagctcggtactttaacaagcaagtgaaagcacggaaattctttgtgggagatatgttcctcaaaagggtattcttgaacaccaaagatagcacgtcaggtgtgctcggaccgaactgggaaggaccatatcatgtgattgaagttctggaatcaagagcatacaaattgggtaagtacgacaaaaaaatgcaactcgttctagtaccaaggt

SEQ ID NO: 399488 - DNA, 1144 bp, Cannabis indica
ttttttttttgaaactaaattgagaaactccattaaaatgcatcaagccaaaaaatcagcatacaaacgataagcaaatttaaacaagggcaagtccggctaccacaccgagcctcatctaaatctaacgctcgttttgctaaagaatgagcaatatagttcttagaccgattacaatgcgatagggatatgctactgaaagaattcctaatatgatgaatatcattaagaacaataccaaattcattaggacaaggacctcttctattcacagccaaaactacccgctgacaatccgagaaagcagtaatcaccgtataccccatttgtacgcagcaagaaagcccatgaagcgaggctttggcttcagcaacgttaggttccaacaatcttgcgtatggagctgcactcgagaataggacatgccccatacgattgaaaccaaagcccccatccctattttttggttctcaacacaaaccccagcatccacaaaaagattaaactcaccaagaaccatatcggtatccgatgaggtcgatcgattactcacgttgctaggagtcgtacccatagaaattggcacaacattattagcatcttgatacttccataaataatccatggcccaggcactaaccatgttgtcagagaggagcttgtgatcatgcacaaaggtatttcacctattccaaattcgtcagctaagggtttcaaaatgctcaagttcctgtcgtctcaatgtatccatacaccccagtaacaactcataatagcaagaagcgtccttcaaggagtcggggccactcaaaacctagcccgaacgaatagacttaagagaagggcagagccatagagcatgaatagtagtctcgttattctaaaagcaaattggacatatagtataaaccttcataccatggcgagataaattggcataagccggtgttatattcgaaatttggctgctatctcagtggaggatacgtgtcaagataaagggaatatagatcggtgcaatcgcttttaatggaataactcattaattatgtaagtatcagagtatatttgtaacctgtagactgtaaggtcttaggcgaggaactaatatgcaaactggtacttagcatattagcgagaaacc

SEQ ID NO: 399489 - DNA, 522 bp, Cannabis indica
aacctttgttttgctgacgatctcattttatttagcaaaggttcaagagcctcgattatggttatcaaacacattctggataagtttggtttgagttcaggtttatacttaaacaccaacaaatctcttgtttattttggtgggatgaattcagaggataagcaggctgttcttatagacttccatctagttgaaggatgttttcctctcaaatacctcgacgtccttttaaggtcaaccaaatggagagcggaggattgtgggttcattattaagaagataaaggaaaggttgcacacttggtcaagtcggcacttgtcatttgcaggtaaagtgcaattgatccattctgttttagcttggtttgcgtaactattggataatcatttttagtcttcctcatagtattactaaggagattgaaaagctatgcagaggttttcttggggtttgaatgaaaacaagtgtaagattccatattgctccttgggagaaggtgtgcctcccgaaatcgtatggagg

SEQ ID NO: 399490 - DNA, 717 bp, Cannabis indica
taataagttcttgactcaattcaaaattttataaagagttatttatgaaagatgagagatttgagatttatttatatagattttgtggatgttgcctcttctaattagaataggaatatgtacgtttaaattaataactcacttaatatcttttttaaatgacttattattcaaagtttactaataaaaatctcacgaaaaaaaagatagtaaataaagaaataaataaaactatcgatcttaaaattaaagttgatttttttttaactaaatatcgcatcttctcatgtcatattcagagatattttattttatttaaattgaagagataaaaatatattttaatataatttaaaactaaaaggtatatatatattttagaaaaaaatctatattactattttattatctaataatcattcacaaaaatatcacactttaatttactataataatcttttttaaacttttaatttactatttcgttcatgcagcttatcgttttaatttttttttgtttacattgtgtaatgccacactagaaacaattacaatccaattatttgttaatttcatttttggcatatttaattgactaaaatattttattatttattgtatatttgggtttggtttccttatttgtgtgtatctaaacttggaaggaaaattgtctagctttcctatttataaaaattgaggtaaaaatggtaagtt

SEQ ID NO: 399491 - DNA, 771 bp, Cannabis indica
ggcttgccgttttttaggctattttatcgtagttttctcgtgttttctcaatatttagggcatttccatgctatttattaatagaaaaacttctgattttgagtttaggtctccaaaaaaggtttagcaaattgtttacctaatttatgtgattgtgatctagggcctccgtttagcacgtgattttctattcaggtcgattggcacgcttaaatttggaaacgagataagactagcacagaatatgtatgtatatgtgtgtaggtatgtaaattacatgatgtgtatgtaattcatatactaccaacactagtacgatagtagtatttagtgcattggtatagtatatgatgtttaaagggttcgatccaatattaccaacgctagtatggttaagtacgtagtgcttgtggtacaatactcaatagtactcgaggtacgattcagccctacatacactagaagggacaagtgcttagtgcatgtggtacaaaggtcgtccttctgttaagaacgttcttcattatatgttaagccttgtggataggtgtataggtgcctaaatttaagtcggtaatatattatatgttatatatttttcttactgagtctgttgactcacaattattgtttgtatgtgtaggtaaaggaatagataaggctaagcaccagtgattccagagctcgggaatgattgtacatgtcaagatggttcgacctggaaagttcggtctcgagatgacttgggctttattttgtagtcgatgtgca

SEQ ID NO: 399492 - DNA, 689 bp, Cannabis indica
atcaaatggtctattttcaaccaagtctgcctagcttgttcaagcccttaaccaggctcccttgtgcaacattgctccggcactatggaacaaactttagaactcaaagattttggagcgacacaaggtccattggtggagtatcctatactctacccttacgagcccctcttgctaagagaatgggttttgaggaggtttcctaccctatttgtggggaggctgaggagaccacagagcacttgttcttgtattgtaactttgtcttccatctttggcgatcttctccttggggggttatgcctgttctggattcaggagcccgaatgtgggactgggttacttttctttggaatcttaaatccataggagttgatactgatgagctattcctctatgcctcgattgtggtagatatgatttggagagcccgcaacgagaaggtacataataaatcaatgggtaacattaaacactatattgactttatttcttcttgttacacagattatggctcttgccttcttcccctccacagtctattgggactcaggattggtctttgccgctggaagattgggtaaaatcactgcgatgtcaaagtcggatgtgaaaactatgtgtgtgtgcgattgcgagagaccatacgaatcagtattgtgggtggcgggttaaaaggctacgacttc

SEQ ID NO: 399493 - DNA, 1252 bp, Cannabis indica
ctttaattttcactacatttgtatttaattagggtaaacaaaatccttaattttgtagtgaaacatatttaattagaataaaattgtccattgtaatgtttgtataatatatgtgaactgctaaatgtggaaatatattttatgtatattatatatatattttttttgttgaaatgaaagtcatatcgttttattaaacgagtaactcagttaccaaactaggtgacaaaacaaccgaaatagtgttcaagttgaagaggcgatcagggtaggatatagaggctctcgcaaaggagtgagccactacatttgctgatcgtttcacaaaatagaaagaaacattacgcaaagtacataacaagattttataatcatttataactttgccaaacatagaaagcataactactgtagtgcttcgaatagcttgaaccaccgagaggcagtccgtttctaatgtcacatgaagccacgcatggtctttaatccaactcaaggcctcccgaactccaatagcttcggccacaacaagagacaccgagccattaaaccgtttagtgctgccttccaccaataaaccactagagtctctagccacaaactcaacactatatataattagaggtttcggtaaacacaaccgcatcaacattgaccttaatgctattaatatttggagcaatccattgctcagctccatcctctggaatgtatccagtgaatgacaactcattattagaattctgagcaacacgccattgactaaggtagtttgttgcagatgctacaatgctttccacccccacaattttattttgccacactttatcattccttgcgttctatactgcccaacacagcgccaccaaaggtcggctttatccttgtccaacaccaggaattgttccatacaccagccaagaaaagtggtttctagcatgctatattaatgtcgtacctatgcccagctgatcccaaaccgtcgcatcaagaggacaagacaacaaagagtgcacaatggtttctgcgtttaactggcagaccggacaaatgacactcacattcacccttttcgactgcaactgcactaaagttgggagacaattcttcgcaacccgccacaacaggttcttcatctttggaggaatttttaattgccattatttcctccaaaatctgtccttagccgagacatcaagatcaaactctccattgagctgctccaatagcttgtaagcactcttaacagtgt

SEQ ID NO: 399494 - DNA, 1413 bp, Cannabis indica
tctagtatttttgaaatcagatcggatccatataatattttaagtccagtatgtattggattggaatggatccatccaatccaagaaaaaaagagtaaaattttaatgttaatttttatatatacatatatattttatgtataataatattaaatctaatgctcatttaaactaaatgaaaatactaattaattctattggatgttgtattaaatttttggataccacatccaacatccgatccgattcaattgtaaattcaaaaataacattcgatctgatccgatcataattgaatatctaatatttggtggtcagttataattggatcggccagttatcattgaattggatcgatttatgaacactcataactatagtttaataaattttttaaaattaagaaattataacttttatacttattattaaaaatagagccaaaataataattaactacatataatcatgaaatataaataattaatattaattattttattaatttatattttaagtttgtaatcattacaatcagttatcaatgataaatttaagttgtaagtactaaatggtagtataatagaatttttttttttaagaaagtgataatagaagttaaaaagtaaaaacaagatgaagctggcaaaaaaataaaaaagaaaatcattaactacacatagtacatacatgggcatacattacttaaaaaaaattacctatatgtacaaatagtttagaagcttattttcggaattgggtttcccagtgtatatctaccaccaccctcaacatttgcattaatggcggcccctttggaaagattatcccctcgtgtggtcttcgccaaggggaccccctgtccccctacctttttatttgggcggcggacatcttgtctaggcttctggaagatgcccaagctaagaaatctattagtggtatcaggctgagtagagggggccctattttatcttatatcttcttcgctgatgacctcattctggttggtaaaaccaatctagaggaggccaagggatattgggattgtcttgagaaattttgctcttggtctggtcagaaggtgaataaaataaagacttccattttctttagtaaaaatacccccaacagcatgaaacaaggtatcaagactatgttgggtattggatcgccggaaggaaatgtcaggtacttaggtctccctcttttcagatcgagacaaaaagatgctgattttaacttcattctggataacttgacttcaaaattgcatggatggaaagctaagactctttcaaaagcgggaagagcgactctaatcaagtcggtaggcctgtctctccctatgtatgctatgcaaactctaagctttccaaccgcctagcttcgaagattgatggcttggtacgt

SEQ ID NO: 399495 - DNA, 671 bp, Cannabis indica
tcaatatttagtacatgtcaatgttcaggagctaaaaatcttaattacccttttactaattaaacttagctttttttttttcttttacatattgaagctaaacttaaattgtattggagctaaacttagtatgaaaattaaatttatattggtgctaaacttaagtctaaaactataaatacatattttaatcggatttttcttactgaagattttttttactaggtttttccttcatttttcttttatagcaacatagaaaaaaaaaaaaaaaaaaaataccgtattttaatataaaaaaaatgttaaaaacccataaaatggaaaaaaaaaaaaataaaaaaaactatagatccgtagaattgtgacttttaagtatttatgtggaactctcaaatcagtgttatatattattaacaccacattagtgttacactgcttaaaagaacaatgtgcaacaaaaatgcatgtctttgatcgagtaaaaatccattaccaaacaatgtgggcgtttttcttttcttattattttcttcttacaagatttggctctttaacggtagtggccaggcaatagcacttgcatttgcccaaaaccattagaattaatttatatatagactttttattcaaaagaaaaaaaaaaagaaaaggaaagaattatggactta

SEQ ID NO: 399496 - DNA, 461 bp, Cannabis indica
ttgtgaaattaaccctatattttatcagtttactaacaagtatattttttaacatcataaatacgaatttctaaaacaatgaaacttaaacgtacatataaagtatgagaaaccttacattggttgcagcgcaattaaatgactcattccgctcagatctctaactattgtattattttctgttgtagattataatcaagatctaagtctgacactccttcagctgtttgaattcttcacaatcttacacactatgattgagagctaacttgctatgagtgggtatgcactcaattactaaggctcgagtttttgtgtggaagaactctatagaatttcgaaaatagaagagagaaaagaagaagaagaagtctcaaactctctagttgtctgacaaaatgcaaactagatttagagtcattagttagattatgaaactattcttttctttttatactaat

SEQ ID NO: 399497 - DNA, 647 bp, Cannabis indica
atacatgaaaaagataagtgacataaagaattttccaaaattcttcaaaggcaatactttttcaaaaccttcaatggctaacaattaaaaaagagaattcaatgcagagaatgtgaatgttttggatatattcgatctgaatgtgtaaatacactgaaaaagaataagaaaagttttaatgtcacatggagtgataatgaaactgatagtctaaaattgttacactaacctcagtttcttctaagtttgtttgtgattcacaggtgaaagaaagattggtagtttgaataataccattgaaaaagaaaattctgattttgattctgatgaatctgacatctgtgaggagtccctggctgagtcttacaaggttatgtatgaaaaatagatacatgttacctctgaaaatagatccttgtcaaaaataaataaacaattatctcattaatctaaattttttgaattgaaaattaaagaatatgatactgatttttgtttaaaagatgaggaaaatattatattaaagaagaaatttgaaaattttaagaaaaatattcaattgattaaccctagatcttctatttttgaggaagttgagaatgcaggttaaagaggctttgctggtcttggatcaaatggtactgaaa

SEQ ID NO: 399498 - DNA, 602 bp, Cannabis indica
aaaagaagaagaagaacattactgttgcgagtagtttgccggaagatcgagggtaggaggagtagtttgcgagcagaggctcataactcggctaccattgttcgatttggaaatctaagtgaagatgctcatctagtatccccgcaggtaaacatcgaagagaggagagagatgagaatggtaatcgaggtaatttctgagtggagtttgaaatgggtagggctgcactcacagtcacaccaacacaagtgacctattataatagctaaaaatgtatttagctcagagcttcaaaatacttttccattcccatggcccttcctcgttccatttaatcctctcaatctccatctccacaaactttattgatactaagaccactcttctttatttttttttattaaaataccctaccaaaataatattttatctattttacctcaaacttttatatcaatttatacattagcttctctatttttattaggatttttgccctctaaactttaacatacaccaaatcgtgcctcctgaacttttaagatcgttaaaaatactccctaaactattgaaattgttggatttaaggacttttttccaat

SEQ ID NO: 399499 - DNA, 898 bp, Cannabis indica
tcatgctgggtgaagttgttgatttcaaatctcaacttggcgatctttgcaggaggaaagaatttggaaatgaattttaaggccaattcctcccaagtgttgatagaattgggctacaaagataccaaccaactcttggctcgctcccttagtgagaataggaacagccttagccttatggagacatcgctaactccattcatcttgaaggtctgatagagttcctcaaagttagcatgatgcatgtttgggtcttttgatggcagccccccaaactggtctgaagattgaaccacctgcattatggccgacttgatctcaaaattgttggcgtcaacggcaggtggccttatacaagagttggcccctgtcaagttaggaagcaaatagtccctcagactacggtcattgtggttgtgaccattagcctggtcttctacaactcctccattgttaccgttgttgccattattggcattgtcagccatatatactttttgttcaatctctattgcagccttttctaatattttctttcttctattctgtctgcaagtcttctctatttcaggatcaacgggcaatctggcagttgcaccttaactcataaactagttgagcctgaaaaaaaaataagattttgaaacaaacagcattagtactaaaattgaaaacagaaccaaattagaacaaaatttaatttttattgatattaactatcaatccctggcaacggcgccaaaaatttgttgtggtattcttaacacgcaagtgtacgtatcgtaaataagtaatagactcacaaagagtgaggtcgatcccacaaggattgtagttaaatactttaaaattaaatctttacttctatttggtgaaaaaataagagaaaattaaattt

SEQ ID NO: 399500 - DNA, 1099 bp, Cannabis indica
ctttctggaaaggtttttatttaaagatacgatgttgtaggtgtatccatgttgattctctagctagtctattccttttgaaatagggaagtttagttctttaaagaacttagcaggtaccaagttttcctttgtggtcaaggcgtagctggctggtcaagcaagtgcgtcggctgttgtgtcatcttcgaggacttgccttacagtctttgagctgacttatcaagtcttcatattagctcaagtaggccatcacattcttgtattgagttgtatattcacctaggacataacctatgattggttgagagtcgtggtatatgtctaggtggtcagcccgcgcttcgtgtgctagcgcgaggcaagcattcggagcttcatgtttagccttgttgttagaagctttgaaattgaccttgatgcctcgcgcatccatcgcccgtgaggggtcccaggggccatgcctgcattaggtaggtggtcaatgctcctcttgggttgagttatcttgctcttgctctcactttttctcttgctcatacttttctcccgaaccttcagagatttagggagatatgcttttatgattggccatgaagttggtgagagcttagcctttcctggtcatgcttggttgataggcgaccttacattggccaagtctcagtggttcacttgagtggtcggcctgatgctttaggtttctgtaaaacctgttgcaacagttgatcagtgtacacctttatagggtgtgtcaggaagtatggccttagctttctggaagccaagagtaagttgtaggtcaacttctccataagtgggtatcgtcttttagcgtcgattagtatcttggtaatgtagtatacagggtgttttacaccaccttcttctcttgtgaggacaacactcacaacatgttctgtgactgctgggtacacgcctagctcttcattgtttaggggtttcgataacacaagtggttaagccaattatttcttcagatcttgaaatgcagttttacattcctttgtccactcaaattttttgctgcctgtgagaatgttaaagaagggtacacatttttctgtagacttggaca

SEQ ID NO: 399501 - DNA, 607 bp, Cannabis indica
aacgctaacaggatgaagttatacgaattcttcccataacgagactggcacctcacttacttattcttgagccgatccgacttttacactgtacattgtacgctaaggactttcacgattgatacgtgtcgctttctttggtgcctcgctattcgcattcaacgacatatggtttctcgctaatatactaagtgttagtttgtacattgattccttgcctaagaccttatagtcagcaggttacaaatatactctgatacttacgtaattaatgagttattccataagaagcaattgcattgattcacattccttttatcttgacacgtgtcctccattgagatggcagccaaatttcgggtataacacgagcattggccattttttagcgtcaacaatatattaggggtgttccctgtgcagtggtgtgggcatgtatttttttttgggttcaaaccaaacttcatatgcgatttttgtaatttctcaaactgcaactacactgcgagattttaagaccgcaaaaaccacaccacaaaaatacgatgtggtgcggtgcggtttgagttatttacactatcatcatcaaacattataataaaattta

SEQ ID NO: 399502 - DNA, 837 bp, Cannabis indica
tttttttgttgcaatttaggttacaacgctaataggagtttctatgtagaattctgtaaaaatgcaaaaaaaaaaaatagaagtgtaaaaaataaaaaaaccccaaaaaattatgagcttgtttggttgtgttttcaattttcagtttttaaaattgtgtttttaaaagtgagaatagaaaacagtttttgtcattttaaaaatttaatggtgtttggcataaatttttaaaaactgtttttagatatcaatattttagcaccataccatgacattaacccatctgagtctaagttcgggtctaggatccgagtatgtagcaaaatataaaatataatatgttagataaaaaaaaataattttgaaaattggaaacaacattttgatgttttgtattttctagtttttaaaactcaatttttaaaaaatagttttaaaaattttatcaaacgacttctaataattttaaaactattttcaattttaaaaataaaaaacagttttaaactttaaagccaaagagcatgtatgtctttgaattagcgcttgacattctattttgtttgtttttttttttctcttttggcttacctagcgcatgagattcatgaacttgataattattgcgaaattatgcatgtacattacatagtaatagttttgtcaaagataagggccaaaagttaccgtgttgagcgagctactacatgcattgatcattggaattgccttttcaagagttatataaagtaatgcttttatagtgttatatgaagggaaatttacatggtatactaatttttttcatttttttacaaaaatactgtcaggcggtat

SEQ ID NO: 399503 - DNA, 523 bp, Cannabis indica
atgtaattattttttctttcttttacgaatatagttaatattattatatttgaggtccaatatatataaagtgtaaatttacattattataaaagtttatgtaagaataaataaataaaaataattggttcatgggcaagaccgggtccaacttgaaactcgaaacccgcccaaaagttccactggtttgaatccgacccacccgcattgaacgagtttctttaaattttcaggttgaccgggtcgagtctaggtcaaacccgataaaaatattcaatggcatcaatccttgatcttttatgagaatattgatcctaattttaatatcacaattaattaattaataagggctacatagatagttgcacataattatttgaggtatagttacttttgagcaaaagaatcgattttgctaggttggctagcttaaatggtattatgtgagggtgtggacggagaggaatgagtagttttgatctccattgtataaacatatatgacaatcagacaaattttatgg

SEQ ID NO: 399504 - DNA, 789 bp, Cannabis indica
ctccgtcgtgggtctacgaatcctacgacaattccaagaaaggcacctcatgaggaggtgggggcatgcttgaggccgcctcctcgccatcgccaaaattttgatcatctttaactgggatttccacgcaattatccaagactacttcaaaattgccagtaaattcttgggcatcaacagcctcttttctccttcctctacgagtcttgactcccgaacttcttttcgaagtagcaattccactcctacgcagccttctcttagacttgcctctagagttttcacaagtaccaatactgaatttcttttcaccattgtcgtcctcgacagcaggcttcttcccagtttcttcaactacagggcaggtgggcagttggaattgagtaatcgcaggagttggctgataccaagtgtgaggttgcctttttttgcagcccaatagatggacaatcatcatagatagatcagggggattggatattagagaggcttgggctttataaaggttagtatagtcagggccatacaattggaagaatttggcttgggcttcaaggtcatcattgggccattttaagaaagtgggctcagggaagtcatgtggggtttaagacctacaaacccaagaatggggaatttccaagcttcactactataaaaatgggttttcccgacgcttttaaacagtcgtttaaagtattgtcgtcggtttctataaccgtcgcctattcggccgtcgtaaattgggcaaaataggcgacggttcaaaaccgtcgctaatctgggatt

SEQ ID NO: 399505 - DNA, 542 bp, Cannabis indica
tgcatgtgccctcttactagtattgttaaaaaggagatgagtagggtacaccaccaatttttcttttatcattgattatttaatagttgtaatattaatctattgataattattataagtcgccacttaccgcccagtggcccacgcgcagacaagtagttaatgttgaggattttttattatttttctatttttaattaaaaatactcttatattatattttattaaaatatacttatttttatagatgcattacctgtacatatatatatatcttttcaccgtttaagtctactactaatttacattaacctaaaatgtttaataaagatattatttataaaagtgagtatatatatatcgtaaaagaatataaaaaataaagataaaaattaaaacaaataaaataaaatgtatatacaatataatttctttattcttttttttttcgcttaatagagtaattttttttttgagaaaataaaacatttaatatctttatatattaaaagtgtctatctaacggtaattcttggtttaac

SEQ ID NO: 399506 - DNA, 889 bp, Cannabis indica
atagaatgtaaaaggggtcgattaatcaattaaggaatcaaatggagtaaaagagagagagagagagagagagagagagagagagattcaccaaggacattctctatacaaacactctcattaataacaaagagtcgtggactaaggctcattaatgcccgaaccacgtaaaaatcacctgcattaaagcttccctagctcttctcattctttcatttacttggttgtagaaaacctcggtcaacaatttcaataaaaaaaaatattttgaaaaaagttataaattaaactaaaaaaatattaagtttatttaaacaaatctacatttttttgataaaaacaaaatatattcaagtttgttcctgtaaaatttagttttgaatatattttttaatatatttttacaaattaaatttttaatatattattttaatatctaaatgaattttctaataaaaataaataattttttatattgggtaattagtttcaatttatcttaatcattcaaaatgattttttttaaatctaaaataattttttaagatttacttaaaaaaatattgaatctttctcatttttattttgagggagtatgatttgatagttgtcaaaatttagggggcaaagttgttaattgataaagacacgtcatcatttaaacggaataatagaattgaacctaacagaaagactaaatttctaaaaatgtaacagttcagagaattcttaacaaactgtatattttaggggctaaaatcaatattgtaattcaaggagaaaattactaattactttatactaaaacaagccattagttatttagtgagagaaaaaaagggttatttacaaaaatatagaaaaatgaagataagttttgatatagatg

SEQ ID NO: 399507 - DNA, 816 bp, Cannabis indica
aaagatacctcgagcaccgcccagcgaactaactcaaatgtaaagtccttggcctttcgccgtatggggaatcgacctgatcggacagttacccaaaggcaaaggcggagtacagtacgcagtgattgcagttgattactttaccaagtggacagacgctgagccactggcaaccatcacgtccaaaaaagtgcaagagttcattgtgaagaacaatattttccggttcgaattaccatacaagattatatcggaaaatggcaaacaatttgacagtcaaaccttcactaatttctgtgcgaaccatgggatcatcaaaagtttctctgtagtggcgcatccccaagcaaaaggtcaagttgaagaaacttgaggacgctaaaggaaattggctggagaaacttcctgaagttctacagtcgtaccgcacaactgagaaaagagcaaccgaacagactccattttccatggcatatggatatgaagctatgctggccgtagaactcgaaccaccatcccacataagattaacatatagccaagaggccaatcatgtactgcttgcaaaatcacttgatgaaattaaagaaaagagaaccgtagcaaacttaaaactgatagcccatcagcaaaaagtagctcagtattttaaaaaaatagtgaaaccatagaaaatcttagtgggagatatagtcgtaagaagagtatttttgaacaccaaaagacagtacagtaggtgtgctcggaccaaactgcgaaggaccatatcaagtggtcgaagttctagaattaggggcatataagttgggtaagtat

SEQ ID NO: 399508 - DNA, 570 bp, Cannabis indica
caacgaggccgagtacgaagcttcaatcactggactaagactagcccaggagattaaagccgaacacattgaaatctttagtgattcacagttggtggtaaatcatgtatccagagaatacgaggctcagggagaaaagatgatagcatatctgagcaaaatacacgatctggtcgcacaattaaaaagctatgatctcagacaatttccaagagaagaaaatacaactgcagacgcctttgctcaattggcaagaagcaatgtgagtgacaaggaaaacttgtttcctatccagttcctcgaagagcctagcatcattggcacggaagaaatcaaaatgattgatacatcccaaaattggatgacgccaatagcagcgtacctcaactctggggaactcccacataaccgaaatgaagctcggaagatgagaaggaaggctgcacggtatatcatagtagagggagtcatgtacagaagaggattctcgatgccactactcagatgtgttactcaagacgaagctgcacggctcctatctaaagttcacgatggattttgtggaaatca

SEQ ID NO: 399509 - DNA, 541 bp, Cannabis indica
ataaataaaatattctaatatattattcatccaaaatgtcaatcaaaatggtgtgtttttagtttgagaaattatagtaaatgacctcaaatcatagcactatataagtaaatgtcattaatttaaaactgttgcttctaattctaaaaagatatgaaaaaaaaattattatttttttatgtggtaaatgacaatatataaaaagagctaatatatttattattcatccaaaacgtcaatcaaaatagtgtgtttttagtttaacaaattatagtaaatgtcctaaaatcatagcattatataagtaaatgtcattatttcaaaactattgcttctaattctaaaaaaatatggaaaaaattattaatttttgtatgtggtaaaggacaatatataaaaagaactattatatttatcgaaaattatagtaaatggtcccaaatcatactttatgtcctcatttcaaaaaaatatagcaaatgaccctaaatcataagactatgttaataaatttatttcaaaatcattaattttttatttt

SEQ ID NO: 399510 - DNA, 877 bp, Cannabis indica
ccccaggtggtgtgggattgcacagcttacccagtgtttccccttacggacttcacgggactactgactgtcacacttgaagtttagctttagcatacaattttgagttgtggtggctgttagggtttgaatgaattgtatttggatttctaagttcattttgagttaggtttgagttcttgctgctggtttggggttggtgtggtggatgcataagtttaattggaataggagcaggtttcccgaattattcgattcgtcgattcgtggtatttttcagagctttggttggttaattccttgttaattaggttattattaaattagttacctatagcagaatccttagttgggggtttgggtttcccaaattagggttttggcgtgttgtttacccgtttatgtaatgtgactagggcatccatccagcacgaggttttttgttcaggccgggcaactcacttgaatttgaaaacgaggtaagaatagcatagaacatattgtatatatgtgaatgtatgtatgtgtgatatatatgcatgcttgttgtgactcgtaccaatagtagtacggtagcggtacagagtgcattggtatagtgtacaatgtttaaagagtacgttatggtgttacaagcactagtacagaaaggtacgggatctctatggtacaacacttagtggtactcagggtatgaaacaaacctccttaacactcgtacagtagtggtacgtagtgtatgtaatatagtggttgtatcctagtaaagaacgttcttacttatcattaagccttgtggataggtatatgggcgcctagatgcaagtcattattatattatttgttacgtgattttcttattgagtctgttgactca

SEQ ID NO: 399511 - DNA, 1016 bp, Cannabis indica
aagacccaaactcgaaagtcgacttagaacctcatttctcctccaatcgttgcctctctgattgctactccaactcctaagcttggtgatcatgatgactctcattcatcggatcactcattgtcgaagttttcttcttcgaatggtgctacaaatatcgagaaagcaatagtgcccttgcccacagtgagttcttgaaccaggtctaaggtatccataccacaaaaacctgaagtggttctacccaaaagtgtctccaaagggaaataggtggtgtcttcattttcaaaggccaaaagtctcaaagaaaatcccccttccatttcttcatcgaattctgaacctgaagaagagaccgaagaggatcaaaaattagagggtatttctgattcaagtgaagagtttgtgcccaaagaacaaccctctgctgataattcttggtctgaaagtgaagagcctgaagctaaacctgtcagggcagaatcggttggtgttcctagcctactacaattccaaagaaggacaaaggaaaacgacccattgtctctccaagccctattcttcctgagaaaagaaagaggccctttggtattactcttgaaaacttcaagccccattctcattacttttgttacaaagataatgctagagacattaaattctatgagaatcgaaatgttactgttgagaaaaattttaatgtcattgctcataagccatttggggtttataacgtgttgaacgaaagacaatggatggatacttagattggttttgatggctatgtggatcgaattgtgaaggagttttatcctaacatcaatgatgagtgcctcgatgaggactcttttatgtttggtaaagtctttgtcaagggacactagtattccttaactgtgaaggatgtggctgaagctctcaatcgtcctatgggaattgggacaactaatgtggaattttatcgtcaaaaggtgttcgggtatctcactgttcataatgatgtgaaactctccaac

SEQ ID NO: 399512 - DNA, 615 bp, Cannabis indica
aagcagaactcgagcttgcaccaacagcagcagcaacaccatctttaggcctttttggaaaagctccatcaaaatactccgaggggttggaatatggttctagtcgggggaggctcaagagtttcatgagattgagccacatttttctgagaggacaaaatcttaaagattagattcggaaacacaagcttaaaagtgtgctttttacctcttcgaaaagaaataatctgattcaaaatgtgggaggccaggtcgatggattctcccgaggtgatacgaaagatgaatgaggccacatcttgagacaccacagtcttgtttgagttgggaagccaattgctaagagcaaacctcatgagagatgaatgagcataggtaagatgtgtaatgtgaagactctccttcaatttcaatttagcccacgcacctgtgagttcagtgagcatcaagtggcgatccatagacattatggcatttggtacattttctggcaattgtaaggcttgggaaatgtctttttcagagaaggaaaaccattgtcctcgaacaaacactttttgaaaaagtcttgaaaatcatcagataaattagtatagaattctttgacaatgtttt

SEQ ID NO: 399513 - DNA, 501 bp, Cannabis indica
ttcgttttcttcttctagaaacaaccaaccaattcaccatttcaatctgtgctctaatcatcttcatcactctcctcattttcacactctcaactttcgaaccaaacagtaaccgaactcaccaacaacagccaagaagatttctttcccaaaatcctaaaaattttcccaaacacaacaaacccagaaatgtcggtgacaacggtggccgcgatcgtgattttctcttctcatcgtctccatggttcggctaaatgtggaagtaaaaactcaaattgagctcggagaattctcgattttcgtcagctcttcaaggattatgtactctttatcaaagaggaaccagagcaatggcagatctcaccgtcggccatatctttattgaagaagaagaagaagaagaagaagacgatggttgtgctggtttgggattggggttggtgattgattgtttatggcaatgagaagaagagaaagacgaagaaaagaaagaaaaagaaa

SEQ ID NO: 399514 - DNA, 1303 bp, Cannabis indica
ttttaatccggaacccatctattttcaatgacaaaaagaccctcatccagtgtagaaatctcacaatttaaaaaaagtattataagcagcaatgactgtggtaggaatagtggataatacatgagataatgcccaatgatcctcttcttgtgaccgtaaaaagattatcaaaataagcttagatgatgtctgaaataccatcccttgaagtgataacataacaatgatttaattttattattaaagtttctagcatcagccttaggatagaaaaacttagtgttacgatcaccagattgcaaccattcaacctgagacctttgctgcaaatattgttctttgttagctaagagttcgtcaaggatggattctagaatttgtacactttgcaaatggccaggagctgtgttcaaagaagtttgaagttgtttgacttgctgttgcacttaagagatgtcattttttagtttcctaaatttctcaacatgccaatattgcagtcgagttgcacaattttgtatactaaaaaaaatacagagagaatatcaccagatgaattctgcaaccagcaacgagaaataatctcaacacaatcaatatcgttgagccacatcttattaaaatgaaattaagatctatgttttgcaattggttcggatgacattgagaaacataccttaactaaaaggtcttggtggtctgaaaccataatggtcaagatgtgtgagtgttggaagtaagaggctgtcaggataaaccttattagtaaaacaccaatccagttattctttcaaagcaacaagatttttcttgttttagcccaagtaaagtcatcaccaacaaaagaaagttcagataaaaaacatcggtctaaaatggttcgaaaagcacacatctgattgtcttacctaagtggcccactatttttgtgagtgtgtgaaaaaatttcattcaaatcaccaacaaacattcaaggatcaaggggagaaatatcatcaagacgattaatcagagcccaagtattcttcttattaaccgatttaggaaaaccataaacaatcgagaaatgccatctagggccatcatcataagacacataacaatcaaaatgatttgtattcattaaacgtaaagatacatcaacattgtcttgacataataaacataattcttcctttgaaaccaacaggagaaacttttaaaccattactaaaatgtaaagactgtttaaactgattaagagcactagtagaagcttttgtttccatgagaaatagcagttggggagtttgctcacgaacaa

SEQ ID NO: 399515 - DNA, 602 bp, Cannabis indica
ataagaattttccttctatgctttctctttctctatactgtatatagattagattttatttttataatgttcagtttctttctttttttctttttattaaattaatgaacgcagttttactgattttttctaataattaagaatagttatagcatatgttgaactagatgacaatacaaagagcctattcgctgtcatgtttgcagatattgtggaaaaaatattttttgtactgctgcccaactaatagattatactgcagagtgcagaggtgtagttttaaataaataaaataattttacttgcctttcataagtagatttttttaattaaataaattatgcacaccatgtccaatcatttttaatgaaaatacatcactatttaccgccgctttgttaacactaccaaatttaatttatcaacgaaaaaatagacaattcaattatatgtggacccggctagaataaaaagtgcaaaatacaaaaattacactattgtctttgtggaagcaaatgaagattaacctccacccatgagtatcattagttttcttatctataatttttagacaaatgttatctttaattatcaacaattta

SEQ ID NO: 399516 - DNA, 592 bp, Cannabis indica
cataccaacaagccaatggaaacgtacatgctaatctctgatagcattcttagatgcactaccgggtcggttgataatgtccatgagtattccaactcatggagacatatgagtcatcttatggttctcatattccctctctattagtcccactgactagtagtatctcacttagcaccaaggtggcagggggtggtggagagctgacaccaggtactcccctcttaaagagcattctaagcttttagccttctactaggaacatatatgattttttctctgtagacatatggtcatcaccatataccaaatcatagagtttctcaaatccgattatgtcattgtattcatagacccaaataaatagtgaatatcaagtcctatcccgatctaaacaatattgaagatatttatgaaaataccactgtcgtacaaactaagcatcagtatgccaccagcatgcacaccaacatgcgccaccacttgatcaccacttggccaccttatgggcatctcctagtttgtattgtgtcgtctttaatcacatgttacattctcccccacttcaacatgtcgatgccctcattgacgg

SEQ ID NO: 399517 - DNA, 373 bp, Cannabis indica
ctcttatcttttacaatttagacgcaacttagtgaaaaattccaaaaatttagtacatagttaatttttaattctaataaatcaattaatttgagacatcaaggtgatattatcctaaatactacagggaccatgggcctatataatcaagcttccaataaatagttatagaatttacagagtaaattctctatcttattaattccacctgattctactacagattcagaatggcactcatgattacatagaatactctattctccaagaatagatttgctagtagtgatccattgtttcaatctaaatagtgggtaatgctctatagatggtctacattgaatatggactaaattatcgttttacccttcaa

SEQ ID NO: 399518 - DNA, 1210 bp, Cannabis indica
gcaagtttctaggagttgacacagcgattgataatggcactagtgttagctttgccatcatatctagaaaaatttgttgtttactgtgatgcatccagacagggtctgggatgtgctctgatgcaagctgacaaggttatagcttatgctacccgtcaactgaaagattatgagcaacactacccaacgcatgatttagagcttgctgctgtagtattttctctaaaaatatggcaacactatcttcatggtgcgagatttacgctgatcataagagtcttaagtactttttcacccagaaagatttaaacatgaggcagaaaagatggctggaattagttaaagattacgattgtgagattttgtatcaccccaggaaagccaatgttgtggctgatacactgagtagaagaggtgtcaggcaggttttcattactattatgatagctcctcaactggcctcagagatggttaacgcaaaaattgagtttgtagttagaaatttgcataacttgacactcaaacctgatttactagagagaatcagaaaggcgcagttagaagatccccagctagtcaagactcgagatgaagtgatggctggtcggtctaaagacttttcaatctcaaataatgaaatgttactctataaagctcgagtttgtgttcctaatgttgatgaactcaagaaagaaattcttgacgaagcccacactacaccatattcactgcattcggaaactaccaagatgtattaggatttaaaaccatacttttagtggtatgggatgaaaagtgatgtggtagaatacgtgtccaagtgcttaacctactagcaaatcaaagctgagcatcaaaggctgtcagggttattgcaaccattagcccttcctgagtggaagtgggaggacattgcaatggatttcgtggttggtttgcctagaaccacaagaatgtatgattcagtatgggtcatagtggatagattcacaaaatcagctcattttttgccagtgaaagttacttatacagtggatcagtacgctgaactgtatgtaaaggagatagttcgtctccatggagctcctaaatccattgtttcagcagggatccaaagtttacatcaaaaattttgggtgagtcttcagagggctatgggtacaaaagctgaagtttagcatagctttccaccctcagactgatgggcaat

SEQ ID NO: 399519 - DNA, 813 bp, Cannabis indica
aggttgtggcttatagttgtacaaagaactaaaactatttagctatgaattgaaaagtcagcaacatattaaagttatggaatctttaatcaatgttgctagtacggttcactgatgcccattctttggtgcaagtaatcttggttctaattacggatgtagtgagactttgaagtgaaggtactgtatataatagagattatatatgacaaggatcgatatgaaaaaagttgtctttatcaacatattgtttatcataaaagacctaattcatatcataacgatgatcaatagtagattggcctaaatcttgagttatcatgaactcctgttcatgttattagtttttttttattcacttgttaaattttttcaaagaagatgattattacaacttctgttttgggaattaaataacatggatggtttaggacatgatgtaaaattatggaatcctaactttcttaacgaatcgaatgttggttccctttaagtgttaattctagaactggaatgttgtgcacaaatttagatgagatatcgaattatacttccactagtgaattaatggaactaaaggtaaagaagtaattggaaaggtaaataatattttgaccaaaactaataacgaaccaacacatggagggctaatcattgaaattagttatatcaatggacactagagttaaactcagtaaatataattctataattactaagagtgcaattctatatttatagtggagtgatcatgaaattaataaataagaaattatttagttgatgagactcaataaataatgtagtttattg

SEQ ID NO: 399520 - DNA, 836 bp, Cannabis indica
tctcaaaatctcaatttactgcctgatctgggtccattagtgaaaaaacttttttatctattagtgtaattttaatggaccatttcagtagctactgcataaacttagattctattccttttcctctctaatgttttagtaatcaaatgagggtcaatgaactttttttcttcttctatatatttgaagaattttgttatttttgtgagttttggtacttaattatggagtgtttaatattgttgaatgcaactcttatagctcttaaggaaatctctgacatgtaagagggaaagctatgtgcataatataggtgggttgtatttaattatatgatttgaagcattaagactttgaattgaatatatattgtatattttatgattggtatatgatttgcttggtcctctttgaaatgttttgttgagggttctgtagattgtgcaaaaacttttgcaacttgctcaaggcttgtatttttgggtgagaatttatttttaatttcagtttatatgcgttgtttcactggccctaatttaaattgttataataattttttcactgtagtaaaataagacttgatgcccatgttcacgaattaatgggtaggtgctctagggaaacacatataaatgttttctttcctttcttctcctacctgagcttgctactgctcctaacttggtttaagtttacatgttcggattagaaatcttgcttattctcttgaaagggttgcttcaactcattctaaatcacattgttttctaatttttggtaaacaatatagatgcaaaaagggacaaatgttcacattatttattactatttctctt

SEQ ID NO: 399521 - DNA, 1388 bp, Cannabis indica
taatcaaacaacttcataagttataaaaagtattatttttatatttttttgataaataaataaacaataattaaatttaaataaaacttaatgtatcaaacaacttaataaattactaaaaaatatattttttatttttatatttagacattaaataatacttatttaataggtttataaacttatttttataaaactattttaataggtttataaaataattcgtaaataaattgaatagtatctaaaaaatcatatgagttacattaaaaaaaaaaaaagtaaacctcaatgtatcttaaacaataaaataacataacatatccttaaaatataaaaaaaaaaataaaaaattaatattagtcgtcatgtttggagatagaaaaatatatatttctcatatattaaaataattattttattatttatatatgtgtaaaattctgaaataaatttttttaagagaaaagtaactaattgatatcttattcacatcaaaagtaattcaatggttacttttttcaaaactcctaaaaatcaaaaatttctagaaacgagaattttccaatttttactattttcggtaattattttaaattttggtatgtatgctgacacggaacaacggtatttgtgtaaataattttcttaaaggcatttttgtaaataaaattaattttaggtataatattgaaaaaattcttattatatatatgagcccaaattattttgttccttttaaattagacctaacatgcaaaatgaccctaaatctaacaattaagttaataaatgtccttttttataaaatattaacaaaatgtccatttagttaaaaatttaataatgaaattacaattataaccttgaataattgaccctagctattttttttctttttctctctcgacacagtatatcatgaaggaaagaaaaaaataaagtgcattagtttagtttttttttgtatattaatatttttctaaggtatattatttttatgtgatatggaatacttgaatgaaagaaagaacataaaaactacgaatggaatattagtttaagtttctggtatatttgattttgtattgtggtatatctttattatgtgctatgatatatatagaaataaaaaacttttaagagttgtatagtatttttaatttgtggtataatattttaaagtgtttggtatagttattttgcacaatggtatttcgtttttatgtgcaatagtatattaaaaaaaactgaaaggtagtatattagtttaagattgtggtatattattttaatgtcctatggtatataatgaatgaaagacgaaaattaaaaaatatggaatattagtttaaatttgaggtatagttatattttaccaggagata

SEQ ID NO: 399522 - DNA, 868 bp, Cannabis indica
ggtaaaatatttccaacactaatcaacagtgttcaaagtcctgattcagctacgaatgcttgaagaacagatacacgtgcctaagaatgtcaaaattgatgttcgtctggtagtttcgagcaaaatgggcttggttcctgtcatcaactcaacttcacacaagtgtaaaattaacttagggtgcaaatgtttactcatacactttctctagtggcgtcgacatcaatgtttaacatgtggcatgaaggataacgtcacgaagttgagtagacccaagtcatagtagtcaacttggcaggggatcctagccctgcgcccaggttgactctgggatctccgagatgaaagtttgggcttcaatagcttgaatcaaactcactatcttttattattatgtaccataaagacttggaacaacctaacacaaagtctgggagctaaaattgcacaaacttgtaactcggaagccaacttgggcagggtttcacccaacgcccaagttgacatcttgaactagggtttcagtttttggaaccatcttagtgcaaagtggccaaaacttgcattgggacatcaactagacataccgcagacttgtttgaggcatccgaatcaaattcgaagcaagttggtttttgagcacccggggcctcggggcaccgagcacccagtgccgaagttgaaatttgttaacttgggcgtcttccaagtgtcagatcaaagatccatttttttcattgaatctatcttcatcaaaaatgggaaaacaagtccttctggaggaaaaacaacaagctctgggtaaaaaaatagggcctagcgcttgtcaacctgggccacaaaaaatggagttttcttagaattcttt

SEQ ID NO: 399523 - DNA, 755 bp, Cannabis indica
ttattccctttattattatttttcaatctcagaaacaacaacgaaaaaaaaaatagtagtgttaattttttttcgggggtggaatggaatatagatatggtccttcttaagggaaactttctctttaatgctcccacctttattatatattttttgccttttggggttttaaagtatttaaattttctcggccgtgaagttgtttggctatatatttaattttgttttgctcaaaatgtttatacacgttagggtaatgttaaattaatagacaagttttgtgattgggtgggactggtatagaatgataaaaagatagatatttgtttggagtgttgtgattaatggggcaatcgatttaaaaatgcctatttggggtgatattgtattattgttagtggaagattttttttttttttgagaattgttagtggaagtttaaaataggattatgaagtacaattatggggattatggtatttttatctttttaatttaatttttactttatgtttattcggtgctttgttttgataatttgaataatcataacaacgtcaaagggatgcgattttctagatgtgttttgttttttattcagttgagctggaattgtttgaagtttgggtagtaataattgttgggttttcgtttttatttatttatttgtacttcttattaatttatggtaggtgccctataattcttcacggcacttaataataagttgtacaaaacccaaaatacccttcttt

SEQ ID NO: 399524 - DNA, 758 bp, Cannabis indica
ttctgggaggcataaaggacgaatagaggcagatagatagttaatgcccttggtagtgaactgggtcagacaaaggcggaagaagttggccacattcataaaatacgggttcaaaggcaacaatgtcccttgctgagcatgagcttccgaccaggcgcacacccccctttcagggtttgtggcttggttattgtgggcgggaatgtaatagtccaattcgactaggtagccaccctggtcgagagcgcgcaggcgcacctcagtaaccttcgacggagggctcacccacctggcacccaaggtaccttgccttctgtgaggaaccgcagtagtaagtttctcaatgacgtagtccacgccctcaaccagaacgtctccatcagcatcgactagctccacagcctcattgtatcccccatagttttggggtgcaacctcttcctcttcctccgcctcggagggactgctaggacggacatcgtcatgctcttcaatctcctggacctcagcgtccccttcatgatccccctcctcttggacggttggatcttgtttggtgttgggcaaagcgacgtgccgagccacttgagggtcaaatgcatctgccatgcgcattttctttttagtaggagccatcattctgttgggttttatgccctaaataaaactctttacaatctgattgtatcaatataagaaatttaagtgattgatgtttgcatgaattttacatgctaatggtttaatatgtttgatat

SEQ ID NO: 399525 - DNA, 721 bp, Cannabis indica
aaaatagtatttatccaaaaataaaactagtttatattaatagagtaaggaaatttaatagaaaaaaaaatatgatatttagaataaaaatataatatatatgggatatgtcattttgaattactatataaaacattaaaattcttttcatatttttttttttaaaaaaaaaacaaaacaaatgaaacttgaaacttcagtgatcgccgaagttgtcactggggccaggaagtcgtcgaagtttgttgttggtgccggaaaagtcgtaagagtagttataggtgtcggaaaagtcatcggaattgttgccggtgccggtgccggaaaagtcgttagaattaacattgtcgacgaaaaaatcaccgaaaaaatcaccaagaaaccgttttcttgatgaagaaaccggaaaaaccaatttcttggtaattttcccggcaacaatgccaatttcgatgacttttcaagagtttactgttggtgccgaaaaagtcgccagagtagctgctagtgtcagaaaagtcgccagagttgctgtggcgccgaaaaagtcgtcgaaattggcattgtcgcctgaaaattcaccaagaaaccagtttcgtcattaaaaaaccaatttcttggtattttttggtgattttttcagcgaaaatattgattctgacgactttttttgacgcttacattaactctgacgactattctgacaccgacaactactcca

SEQ ID NO: 399526 - DNA, 1156 bp, Cannabis indica
ttttacaatattagacttatattgcatatacctaatgttttcaaactgttatacttttatctccatcaatttttagtgacaagtattctaaatattatttaatgttttggtagcttttgaaatgatttatagtctaaagaacagaaggagaggctctaagggatatgcagctttaaaattgaacttgagtaaagccttcgatcgtgttgaatggtcatacattgcagctgttatggagaaaatgagtttcaacattagatggatttctcttatcatgtcgtgtttacactctacttctttttcatttctgataaatggagaagtaactggctcggttattcctccgagggggctccatcaaggtgatccattatctccgtacttattcttagtatgctctgaaggtctctcacgtctcttacaatatgaggaatccattggacgcctcaaagcttagctgttgcccgcagtgctccatcagttacacatcttttatttgtagatgatagtttacttttttgtcaagccaatgacaggtcttgtgttgcaataaaaagagcattggacatctatcatcgagcctcaggacagttgcttaacgtaggcaaatcggttatgtctttctctcctaatactcctgagcatgtttaacactctttcagtaatattcttggtatgccaataagtgaatgtcatgaaaaatatttaggcctcccagcctactctgagcaagataaaaaacatttgtttgctgatatcaaggatagaattcggaagttattgcatgcttggaatgacaagttattttcaattggtaggaaagaggttctcttgaaagctgttgttcaatccattcccacatatgctatgagttgttttaagctttcaaagagtttttgtaaccaacttgacacgatgatggctcagttttggtggggttcttcagctgataagaaaaaaacccattggaaaaaatagaaattccttagcaaaactaagatggaagggggtatgggttttcgttcatatgtccattttaaccaagctttactagcaaagcaagcatggcggattttccaaaacccaacctcattactgtccagaatcttgaaggctcagtatttctcaacctttgatttcatgtcagcaaggaaag

SEQ ID NO: 399527 - DNA, 638 bp, Cannabis indica
tttgatagccgactaagaaaagttgcacaagtcaaggtatgaggagattaaacgtgtaactagaaataataatgacaaccatctcttaccatgcttacttggatagagtgaggcatgagacactattatcaaaattggatgatttggctcacattttttaacctgtagctaaacaactttctgttgctggaggagaaaagactacagaatataaccaacaagtaatttgcaataactttaatatagttattgtcattgtcatctatattttatttatgaataatatgctttgtaacttcatggttgtaggattcaccatcttatgtacatttttttggtgatagatttgtatataatgtatttaaatgattatattaaaatataatatagttggttgcacatagtcgcatatggtcgcacagggtcacatagaccaatattagaatataatttgaaatataatatggtcgcacatagtctcacagggtcacatagaccaatattaggatatactttaaaatatactatggtcgcacatagtcacacatggtcacacacggtcatatagaccaatatcaggacaatatttttcaaaaaccgtgtttttgcaaatgtcaattatatataagaaaatataa

SEQ ID NO: 399528 - DNA, 636 bp, Cannabis indica
ttttatcgtacccattaccattcccaggattgtgaggtttactccctttcttcttgggtcctccaatcaaattttcataagtttgaaggtcattgactaattcatgaaagtcaatttccttcttattcatgacataatttgatgtatatggtagaaatgctggagtcaggctattcaagataagactaacttgagtagcactgtccatttcagcaccatgatcctgggcttcttggaaataactggacatgaggagaacatggtcacgcacgttttgatgaggttccatccgtgcattagttgaatctctcaaaattttgcaggatgtcttaaataactacgatgtagacgatcatagaaaaaaaattagactaattttttttaaaatgctgaaatagataggaattgtcaggacagttagttataactgtttttctgtttctaacaactttctgttgtttgttattttagttggcctttgccttgtactctggtatatatataaaccagttgtagcttttctcaatgtaatacaatacaatctttcaatctttctttcattctctttgctctgttctttctttctgtctttccaatctttctgttctttcaatctttcatcttctttgtgttctc

SEQ ID NO: 399529 - DNA, 944 bp, Cannabis indica
catacatgtgccagattttgattagcctacacaatattaaatatttaaatattataaaaaataattaataaagtaaaatataaaaatattacaaaataataaacaataatttttttccattttttttcttttacttttcttcgaacattattctgttcttcttgttccttcctcattcttctctttatgtgtgttctccattctcaaaacaacatcacaccataattaataactaaactctaaatttcaccaacaccactatcattattttttcaatgttagaaaaaaaatattagggaatgtgggaaaattacaattaaatgtgcaaaattaaatcaactaaattttaaacgatcaaacaattagcaatgacaagattaacaaattacaaacaataatcggaggaaaaatagggagaaatagattatgaataacaagaaactaattaaagcagtaaaacgataaaaactacaccaagatatatacttgttcaagtccgatagatcgatatgatctatgactctactctagttctgtaacaccactaaatcctctttattgatggagcaagaatatgtacaatatagtcgagattgattctcagatgagttctctcaaagtgtttcaactctcacacttttatccaagaatcttcttcatcaatagaaaattcttcttacaaaactcaaacccaatctctctcttttctctgtacctctcaatattctctctctctctctcaactcaatctaattattgatctgacatgataagtgttggtggtatttgatgcgtgtagtatgccgtatcaaatttactacttttttccaatactttcagttatttcagtataaaagcaagtacgggtcgaacacacgaggactatgattactttattattcattatcaaacagaaattaaaaggggggttgagttgtaattaa

SEQ ID NO: 399530 - DNA, 710 bp, Cannabis indica
ttgtttttattgagtttaattgcaactgcaacttagtagaggaaacaatattttggagattcgaatgggctgcgacaagtttgaaagttctgggtcatgcatggatacatagctcttagaagtatctgattcaaagactgtgatttccacaatacatgatgattcaatcaaataaatcacaaaattatattacacctagaactaacagagtaagcaaatgacaagttaaagaagtaccaatttcttgagagaagttcatgagctctttctctaatgtttcaatatgcttcttgtcctctgtacggcctgtcgataatgatgtcacatgattttctagtcgctgcataaaaaattgaactcaaaaactcaaacagtaaaggacaggaaatgcatgagaatcaataattgtaaaccattacactaaactcgttaatgcagcatcatgaacttaccctaattaattcaaaactttgtgattgcgactctttcaacatgtctttctcctttcttagctacaaacaaaccaatggatgatgaatattattccataacgtgaaacagtattcatggacatataaactaggcgatattttcctacacaataactcaagttatggtaatgggttagcagtattatcaaatactagccattccaaatagcacgggaattacatggacaacatctccaaggaacatgacaaaccaataac

SEQ ID NO: 399531 - DNA, 655 bp, Cannabis indica
gttgattcaaagatcgcagcgtccgtgttaatcttaatcgtgttttccttaggtacttgccaatgctcattgccatcttcagagttcatcaacccaaaagaaggatcaaattgtctatcttgagcatagttccattgattaagagtagtcctagttaacactaaaacatctgcaacttctacacttttttgattccaaaccaagctattccgacttttccaaagcgaccaacaaagcatactaatcaaatacctgtcatggccactccatttttcaaacatttgaagaagccaatcggcaaaagagccttgcatagaccccggatccccaacatttaagcctgcccagcatgcttgtgaaaatggacataacaccaagacatggtttatggtttcacgatcagctagacaaaaaggacatttatcatcaatggggacatgttttattctcagctgggttttagtgggtaagcaatctgtggaggcttgccataagaagtttttcaccttcggagggactttcaaattccacaatttcctccaaaaaccagagttggctgttgtacccgtgtgtccttggatatcctgcagcactttgtaagcactcttgaccgagtaatggccaagcttttcattcctccaataccaagcatctg

SEQ ID NO: 399532 - DNA, 953 bp, Cannabis indica
atatacaaacgcagtacatgtcacagaacatactttactatgaatatactttactatgaatgaatatctaagatatttaaaatcttataatatacatatccatattaataaccaaaaaataaccagcctattcttaaaatacaagttcttctcaaagatagagatctcataaaagagagactaacttctacaaagaaaatcattcaaaaatagttagtaatatacatatgtgacaacatacatatacacaaaatataaccaaactaacacaatttttttacctttaaataaaaatcaaacacttatacattcatacatttacattcacataaatttgtatactgtttgtatatatttatacattcacaatcataaacacatatatattcacatataaaatcctaaaaaaaaaaattcaaccaattatctaatgtataagaatataaaaacactttaaattattttaccatttagacatatactgattattaaaactaattttaaaataataaaaaaaaatctaaatatatatatagacacacatggcatatataatatttcttttacatatttaaagaaaaaataaacatataaatagacacacgagtttaaatggactttccatttgttaaaaaaatttaaatgaattttatatgtgtatttattgtaaaaattcaagaaataaaatcatataaattatttagcctggctctaggacttctacctcggtcacgaaaatttgggagaatctgaactcccagaccaccactggatccgaccgagttaccttgactcctggtgtttcgcctggcgtccatactattagaacaacctgcataaccaagagctagtctcactactacaaataaccctttctatgtccctttttcatgtccaacaaaaaaagtgtaggacataattttttttttccaaaaatttcatgtccaacatta

SEQ ID NO: 399533 - DNA, 791 bp, Cannabis indica
tatgctaatttatagtataagagtttattaatttaagttcgacccatccaagattataagaataatctcttaattacaatccttttatttaaaggaaataccttttgattctaactacgatgatattaaatgatttaaaataatatagggaaattggggataaatttggaattgcaactgaactcaatcaatttaattaaccgagttggctacatacattctttgtgaaggataaagccacttgtagctcagaatatgatatttttgaatttgaatataagaatttcggtatatgaccactttcaagaattctctgctatttgaatatttagaaaaattcgtggatgattttttatgaaattttgagatttatattttataccattttgcggtatcggagactgcacctactcttagcaactaagttgcttacgtatctttttgtaggaatcaagttaaacgtagttcaaaatacggtgttttgataattatgaggtgaatgacctcttttcagaatgctatttaatttattatgacttaaaattttagtgtatttttgaattttttaggtaaaattactattttttaaaggtttttataagataatgacctctttgaaattttatgaggtgaatgacctttttaattattcaagattaattttgatagctcatttgaaattttgtgctattttttatgactatagaattttatcatttttgtgataattgttttgagtttttttattatttttttataaataaaaaaattattgggaaaaaaacaaaaaa

SEQ ID NO: 399534 - DNA, 747 bp, Cannabis indica
aatgtcactgaaaactattactagtgacttttatttttctcccgtccaaagcctatataggtcagtcaaatcgtacaattaattaagatttattataaaataatataaaataaataagaagaaaagaagaagaagatgaagagagaaagagaaactcaataagaatttcttagttatttattttaatggggtgaatccttatttatacaaaaatatgactaaaataatgggaaactaaattaatgtaataaagaaaaatacaaccaagcattaatggtgataattaatttggtgatttggacatccataaataatatttcataacactccccattggatgtccataaaaattgtcacattaaaaaccttgctggaaaacttggtcaaagaaaaaatagtatagtgtaaacaaactccccctcatttacgcattcgtggatatcttctaatcgacgaattttaatcttctatgtcgtcttctcaaatattgatgttggtaataactttgtaaataagtctacaagattgacacttgattgaatatgttagataccaatatagccattctccttaagatcatgagttaagaagaatttggtgaaaatgcctttagctctatcttctttattatagctttagttgagcaatatatttcgcgttatcttcatagagaatcgctaatgttgatactacgttacagagtgcaatctatatgtttttcgagtatggtatgtcaatgatctcact

SEQ ID NO: 399535 - DNA, 872 bp, Cannabis indica
cgagaaaccatacagcattggatacacaaggcgagacatcaacttagttactcctgggaagacgtaagcgatgcataatgattgggaaaacacttagcatataatatacaaactaagtataacagttgggcgaatccatccaactaatagcaaggcgcttatctcgctataggaaggcatgctcttgatactttcaccaatcagcttcagacatcttttagtgagattattagtcttggcaaatcagttctctcgaacagaagctgacattcaaatgatgactactgaagtactctttgttattaagaactacgaatgtcaaaatgaagtattatgccttcaagcgaagaggcaacaaggcgtacatcatcaacctcagaaagataggggaaaaagctccagctcgctatcaaggttattggtactgagttcctgtcgagacatcccaaaacattatgatttaaaacatgtttaatacacaatcacttttacccagtaaaagcggattaatcacagctgtgtgatattcaaatattagctgcatttatactacgtgatatgtaatcaaaccccgtgatttcaggggataattgttgtaaagattacagtcaactctgtaattaactgcctgactatgaaattataaatagaggccagttatactgaaaaggggatgaaaaaaattcataagaaaaaagaccctgagaaaccatcagaaatctaataagattgactcgtggactatgcataattttaactgcaaaaccacgtaaaaaacttatgtgttcattttcttttctttactgtttttatttttctgtgcaagtttatcattcaggttcaaattttgttaacaaaaatcttcgttaaca

SEQ ID NO: 399536 - DNA, 676 bp, Cannabis indica
aaaaaaaaaattcttttaacaatgtacagacacaaaaaattaaaagtccccactggtctcgttagtgtttctcaaattgcttatgagaaaagtatgtacatgatatattggaagagagcataaatttagagaagaggtgaactacttgcctttagtattgaaaaattgaataactaaaagcacaagaactctcatttagtttggatttttttttccccaataaagtttagaagcttttaggtgtttgcaactctagataactataaatattaaaaagatctattgtaatctcaaataccaacaacagtgattaataaatagttctctaaaggtttggatttcattggaaaggaagaaaaaaaaaagattaacagaaaaaagaaaaaaactggacaaaaaacaaagaaggaagaatgggttttggaaaagaagacacaaataattttttacattatttttttaaaataatgacaagaaaattattcaggttcccagttatagggctattcttgtccttacatttcaattaacaaaggaaaattttatttacattccaaaaacttataaagactccccattttaataatctttatattatataaaatttatatctttaattttattaagtttttttaatttttttttcctaattcacattcttaaaaaatatacctat

SEQ ID NO: 399537 - DNA, 586 bp, Cannabis indica
ccataataatattttaatcttgccaaaatttcaaccatacaatacatcaaattcataaaaagaaatataaaagaaaaaactatgaattttatatttacctatagctaaaataatttttaacaactacattaaattatagtccataattataataagatatttaaaaagatataaatttaaatcacttcaaaaaatatttaagaaaaaaaaatattttttttattattattgacattaaatattatatcttgattaatgttttgtttcataatattaaaaatgattttgattgaagcaaaataaatagaaaacaaaacatgataagagaagtaggaaaataaacaagagagaaagaaaataaaaaaaaatagataagcttataaaatattagatttagaaagaaagcttaaataatattatgtatttaattttctttgaatttagttattaagtgtatatgtttgtagttgtttcttaaatagttttatttgaaaaaaattaaaggatattgacggttaaactacctaaactttacgattagtaacacttaaccacaaaaactgaaattttgacggctaaactacct

SEQ ID NO: 399538 - DNA, 826 bp, Cannabis indica
ccgatctgattgcattagtatctgattttttcaatactggtacatttcctagtggatataacactaccaatttggttcttattcccaaaaagaagaatttctctaccatgggagacttgcgccctattgccctatgtaatgtagtctacaatatttgtgctaaagttcttgccaaccgaatgcgtcctttgattgatgatgttatctcagaaactcagagtgccttcatacctggtagactcatttccgataatatcatggtagcttttgaagtaatgcactatctcaagtggaaacgaagagggtaaaaagggttcatggcccttaagcttgacatcagtaaagcttacaatcgtgttgaatgggactatttgcgtgcagtcatgcttcgtatggggtttgctgagagatgggtgaatcttgttatggaatgtgttaccacggtcacatatactattgttcacaacaaccactccatgggacctatcattccaacaagaggtatccgacaaggtgatccgctttcaacgtatcacttcattatttgtgctgagggattctcttcaatcatcaaaaaatttgaagctaatcagcttattcaaggctgtcgtgtggctaatggtgcccctgcaatttcacatatgttgtttgctgacgatagttatctattctgtcaagctaccaatgctgcgactttgaatgttcggactatgcttcatagctttgaaatggcgtctggtcaaaaggtgaagttaataaatcttctattttctttagccccaatgctgatcaaatgctaaagaatcaaatgttggaaattatttta

SEQ ID NO: 399539 - DNA, 1162 bp, Cannabis indica
aattaccaacaacaatcaagaattttgattgcaagaacacaatcgcttgtgcagcaactgagttcgtcttcgacacttcttcaatctaaaatcccttcagatctgatgacgaagtagacactgagctcccttcagtctgaactcagtaactttaggctctgatctttctgtcatagatcaccatcttcaagctatacaatcagacctgcaaaaacaacaacaagacaagcaagatacaactctaactctcacgataaaactgcctaacgaaccatatcgatttaatggataattagtttacagaatgaaaccaactatttatacccaacagaccagtccaacttgcactaactaacacctaccgttaagtcaggacagactcacacagactctaacagtaagcaagagtgcagatataacagactaaaaatccagagatgactagacattatattaaaataatctgtcacaaaataacgacacttacacggcattttatgttcttcacaataaagtcttgaactttctttgatgtaatggttgcaagttgttcggcttctgtccacttagtaaagtaatcaaccgctaccactgcatactgcgctccgcctttacctctgggtaattctctgatcaggtcaatcccccaaatggcaaaggaccacggcctttgcatctgtgttaactcgttgggtggagctcttggtatctttgaaaatctctggcatttgtcacacttcttagcataggcttttgaatattcaatcatcgttggccagaagtaaccttgccttagaattatcttggataagctctgtctggcggcatgatttccacagaatccatcatgaacttcggataggagccgtgcagcttcttcttgagtgacatatctgagcaatggcattgagattcctcttctgtacataattccctctactatgatttaccgcccagctttccttcttatttttttgagcttcatttcggttatttgggagtttcccagactcgaggtaggcccctattggtgtcatctagtttggggatgtatcaatcattttgatttcttccgtgccagtgatgctaggctcttcaaggaactggataggaaccaagttttccttgtcacttacattgctgcttgccaatcgagctaacg

SEQ ID NO: 399540 - DNA, 650 bp, Cannabis indica
gttgaagtgcctcctgctcagattaatgatcctctagctccttctgacctagctgtcccatacaaggagcctggaactccagccgtttgaatgcttcctttttctatatgctcgaccataaggccttttttttaagacaagatgaccggccaagcgatctttaaacttggaatatattttttattttttgaacagctagctgaccgggcagcctttaatcccgggtttgaatgcttttgctatccctaatgaatttcattctttgtttataattatcgtgcaattgtgttttttttatttttttaccaaatgctttgtaaaggtataagtgcccccccaagtgatggagcagacttatgactcttggtcacttttttgtttatttttacaagtatactttttgtctgatcaaggttttgggttcgaccaaaccttttgtacgcattggatggtaaattaataacatgctaatgaactcaactcaatttgaatttaaaataaacatatttattcatttattggtcagaaatgtgtctaataccgtagtaacttacatcaaagttattatgctgatctgacctgatccttagcttaacatgaaataaaacaaattgcaaaaattaaaaatcgtactttcaatggtggtcatc

SEQ ID NO: 399541 - DNA, 710 bp, Cannabis indica
aatattgtgagcaatgaatctcctagagacaaaccctccttggttcggagtaattagattaggtagtatctgtttcagcctagtgcaaatcacatttgttgctaccttgtggatgacattacaacaggcaataggtctatagtcactcaccgtgtttggacatttcatcttcgggagaagagtgattacagtagagtttatctctttaagaatctggcaagtttggagagaggatgccacagctgcataaagttcctctcctatagtttcccagttgtcctggaagaaaaagcttgagtagccatcttgcccgggggccttagatccaggaatcccaaataaagctcctttcacttcctctttagtgatgtctctagtcaacaactctgcctgattgcttgttaccaatggtccttggctcatgatggatttcttaacatgcttcctattctccattttcttccctaggaggcttttgtaaaactctagaaaggctttcgtcacttgctctggatcttcataccttataccctctttggattcaatagagagtattttattctgcctcctcctatccttgatactggcatgaaaaaaagcagtgttgtcatctcccaccttaacccagctaatcttagctttttgttgcaaaaaggagagtaaattctttggtgcttgtatgtaggcctccctgttgggttttgtgccct

SEQ ID NO: 399542 - DNA, 831 bp, Cannabis indica
ccactcgttgttaatgacttctcccttcctccatggttgaacgaggtaggacattcaaatccgtcttgcaaatgtcagaaaattcagctaaaatatcacctactcctactgcagaattttcattactaatgttcaaaccatttgatccactcaaatcaacactcctcccattacttgccatcaacatgtctaataattttgactcgtactcacgactatcaattgaacgcctatccaattcctcgcttaaaaaacaaacttttttattcaaattcgcattgtcaacttgaagctttcttatggactccatcatgaatcgtaataaagtatccatcctattcattattactagtttcgacttatttaggaagtaatctttagtaaattttgcccattctattcgaatatcctttagtgcagaagcgtatctgttccaaattacacaaaatataatcctaagttaagtaaaagtttttgtatcaactacataaaagaaacagaagtaatttcttcctttcagtttaggagccaaaaacattcaattcctggtcattaaagaccaaacaaattgcatatagcccagaaccttgtacccaaaataattataaacataacaaaccatataaaaatctatatttacaactcctaaaaggagtgttctggtgagctggctgttagttgtttcagttagtggttaagccttgagctattagtttcttgattcttgatgtagatataaaccatgaaattgattgcctaataatcaaataatttctttctctctttttatctttttctctctttcttcctttactctttctttggttttct

SEQ ID NO: 399543 - DNA, 1281 bp, Cannabis indica
ctccaaatatgataaatggtggcagccaatgtaacaatcaacaacctcccaatcaagctagaatggcccaaccgaagccagttgtttcatctcccaaaatcagcagcccaacaattgaatcccacccaagcaaagactgcttcaagaaccatctttgagaacctgcaagtgaagaatagatgctgatggttttcaatgtcagaaccacaaacaacacataataaatcagttgttgttatgtggaataaaacaagcttatctcttgtgagcaggttagaatgtgctgtctgccacaagataaagctctgttttggaacattcagccgacaccaaatggcccgagctgctggatccggttgctgcaagattagagaattatagagcttagaagctctaaattttcccttagctccagctgatgttatatctgtaaccgagaaacacttcctcaaatggcacaacttcttccaataccaacttgtatctccttttagatcataattccaaaaattagcccccttgagataaacaccattaacccatttaacccaaagcaagtcctctttgttcataagatcccaaaaaaacctagcaagagaggatttattccatttaactccatccttgaagcccaaaccccaaaagcttttggaagacacactttatcccaactagctaaatgaatctttggtcgattatccttcaatccccacagaaagccacgacataatctctcgatctcctttatcacacttttagggagaagaaagattctcatccaataattccttagactcaataaggttgaatgaattaattgaacccttcccgcaaaagaaaggtactttgttgcccaagaaattaatttgaccttcatttttttcaagatagtaccatagtcttcaagcttccatttagttggtctaaggggaataccaagatatttgaaaggaaaactccctacctgtaaattgatgagttgagccaatttaccttgttgagagacacctccaaagtaaatgtgagacttcccaagattaatagagagacccgaagtattgctaaattcttcaaaagcttccctaatcacttgaatagagtcttcattccccttacaaaagacaactaggtcatcatcaaaacataagttggtcaatttcagctttttacacaaaagatgatacataaatctcttatctttgggtgcaagttggaatcttcgagataagtactccataatcaaaacaaagagtaaaggagatattgttggaaattatttta

SEQ ID NO: 399544 - DNA, 605 bp, Cannabis indica
tcatcaccatctttgcatgaacccagttgtatcagtcccaacccgcctcgttcatcatcattgtaaagtcttttttttttttggcaatttagatgccaaaatattttttatttatggtgagatttccttgtgttaataaatcgatttcctcaccttaataatatgtttttaatgcacttttctatcataagaaagaatcttatttcagctgtccattttctaagtttggaaacttcttgaaagagaagaaattctcttataaaaagttggcttttatatggaaactttgaccgtagttatttctctttaatgtgttcgattgtgtcttgataaaatcagatcaagcacactgtttttggcaggtatcaagtccatatacatgatcagacacgatttgggtttctttttctggtctggtttgctactacagtgcttgtctctactggtggaaaataggattttcttttaggaaagtttgtacagctgtggaatcgactttgtggctgtctgtagggttcctatgttctataaatagatcctagagagtaggcagtcgattcaactcttctagctttcattttttttgcatattctcatttgtgaag

SEQ ID NO: 399545 - DNA, 648 bp, Cannabis indica
tatataactttcttttttattgtgccaaaaataataaaaatagtactgtttcatggtatcaaaacatgattctttgagtttttaaataattaaagatcattcatcacacaaaaaaataaatcagcgattatatatagaaaaatcaaaatggtgattacctttctttcaaaaaaaaattgcggttaccttataaaaaaatcctttgagtagtaacatatagagattaaaagggaggttagagattttccaattaaagattaaaagaagaagatggtctctttaaaaaaatatggggtgcacttctccatttaaacaagacctacttttgtaataaaaatggggtgcttttataaaaaataacaattttaaaaataaagagggggtaaacttagatatggggtgtacttatatatttttggggtgcaaatataattacccaaaaactattccttttttttcaaaaccccaaaaatacccccctcacaatattctctctctctgcatcatctctctctccctctatctcacacccgaaccccaacccctccaccccaacgccgatcaccacccgaaccccaacccctccgaccccaacgccgatcaccacccgaaccccaacccctccgaccccaaccccaacccgaaaga

SEQ ID NO: 399546 - DNA, 520 bp, Cannabis indica
aaaaccattttccatatctcaatcaaatattaataacgttgcatagctttttctttaaattttctttttttttttaattattgaatttaaatttattagccctgccacattttttttttttaattttattgttcaacttttttatcttaattctcttaaactttaaaagttatttttgatcacattgctattcaattgagtttaaaaatatatcgttataatctactcttcaatgtcatcatttcaaaatgtgagaagcatatattttttttacaacttttaaaatcaaaagaactatttagggtgcgtttgggatagcttttaagaaagctagaaacacttttttaaaaagctatcattcaaaatgtgtatggtaaaattagaaaactagcttttttaagaatttaagacaaaattttagctttttgcaaaagttggccaacaccaactttgggaaattagcttataagggaagctattttgttggtttaatgaatatttcacttgacaaaattaccct

SEQ ID NO: 399547 - DNA, 1571 bp, Cannabis indica
ttttttttttttttttcaattcacccaacatcattgaaattcttgctatatttttctcatttcagtcacatttattatttttttcaagtgatgctgagtttacaatttttttttctttttcttttacctttctcaatctcgcaagctttctttcttctatcctttcacacactatgtatatcgctcccccaaacttattgtaaagcttatgatatcattaaaaatgtattgaagacaaaaacaacagtgtgggtacatcgtttggttcactgggtgaagaaacaaaacaggtttaggctcaaaagggttcactaaggatattgattttatggtaggtttaaaaggctcaaactatccaaacaactgcctaaatcatgttcctattgaatgctgtcaaggatttcgccttgagaggataaggcatgcaagttctaagctatccaatcaatcttaccacaaaccatagtaaaaccattataacatatttcgcagatatcaaattgcatccatacacaggtttcacaagcatccaaactaatccaaagagttaacagaattaagcacacagttttgcaatttcaggacactttacaatcaacagcagcatacaactatctttagcttattgcccattcctaataaaaaactaaaacagataaaattaaagcagaaaaattaaaaatttaagtccctccccctaaactaaaattcacattgtcttaaatgtgctattaaaactaaaggaaaagagacttacctgagacccccatcagattagatcaagtccatcccttgcatccaaaagagccctcgtaccgaatgaagaaaattgacctccaatattgttaatttcagagttttgcacaagagtaagttcaccttcagaactaccacacatcaatcatttccaacgatgcctaatcgttcgaagttgctctttaggctttgctctctttttataagctttaacaaaagaacccttcaccatctcaatcttgcaacaggtaggaatgtcggttggggcaaaaacattaaaattgacctctttaatcatattaggccataatcaatagacacaattgaaattgaagccctaactttaatcattgttaatttctcttttggattacttgctttttaatttcactatctctttagtgttcttaaatttgattttctcttaattttgaattcacaaaatagaagtaaggattttattttaaggtatttaactacaatccttgtgggattaacctcactcctagtgagtttattacttgttacgataagaacacttgcgtgtgcaaattaccacaacattctgtgcgaggctttgtcgagctaggtggtgttgtttgggataccaaggactatatgggttgcttgggcggttggagctgtgggtgattttgcagttcctgtggctaagctactttctgtccggcttaggttggagtttgggcccatttaggattttggggttttctaaacgtgtttgcggggtttgtattgtgattttaacgagtggttgtcaactggtattgataaccctagtggtagtgttgtctatc

SEQ ID NO: 399548 - DNA, 829 bp, Cannabis indica
gaagtaaacatcattcactgaatgagtctttatataataacagttattagagtactgtgaatgtggcactgatgcgatttaaagtttcaagttcgcacgttgctttatataaaggatgaaaaagctatactgatctaaagtatagaggcattaaatttcaagtggggaattttatctttcttcaggttgttccaatgaggggaattcagaaattgggaagaaaggaaagttaagtctcaggttaaccggtccgtctgaatttctggaaagggtaggtcgggtagcttattagctaaacatactccctgctttatctagggtttctaatatgcacttcaatgtttcaggagtatgaggtagaagcaatctatatatggagttatgaaaatattgaaatacaaaaagacttgtcatatgaggaacagtcggtatagattttctgaattgaaagagaaagtgttgcgaagtaaagactataccgttagttttagtgccctgagagaataacaagattgaaaggcaattcgagagttaaattcgtagttgcgggagctgtatcctgagttatttgaataatttcgaggacgaaatttctataaggaggggatagttgtaatatcccgaaaaatatattgatattttaattggacatattttattaaatatgtgattaagtgggtattagagtaggattataatcctacttaaactaattacgagttgattaggaaaatatgagtaaatgaataataaagcgtaattgattaattacggagattgtattgaaatatgtgggtatcgtagataccataattcgaataaaatattt

SEQ ID NO: 399549 - DNA, 1267 bp, Cannabis indica
aaaaatgttaatttttttaaaaaaaattgtgccttatgtaattattccttgattaagttttgggtgaattgttactattttttacagtttttttcttttgtttgattttggattaacgtttagttgttgtgatgtatattattgttatgcttcttatttagttattattttggattgaggcaaaattgctttagaattatttttcttttaggccatatttttttattaaaaatttaaaaaatatagtttacaaacttgatgtctcacactttataaaaaaaaaaaaagagataaaatagtttaatatttaaagtaatttgcggtataaatacctaagtttaactcttaattgtaaataaataacttagtttaattttttgcagtaataatacctaagttataattttgaaactttcgtaggtacatggctattaagtgttaagtaaattgtcacgtgtcaatcactaattgatccaagtctttatttttatttttttaaaaaaaattaatttaaatatactaataagaaaatgacacgtggataataatttaatatttaacggtcaggtacctaaagttctagaaatataatttagatattattacagtcaaaaattaaacttaattatttatttataactgagagttaaacttaaatatttatgtcgtaaattactctaatattggtataagaagaagaaaaaaaccactttaattgactagacatttagatgggataagttgaaaagtacctcttttttgtatctattaattaaaaataccctcatattgttttttattaaaatatacctatttttttagtggattgcctaatatacattcactctctacttaagtctagcatataatttacataacctaaagggtctaatggggacatgaaccataaaagtaggtatatctaaaaaaaatataaaaatgaagataaaaattaaaacaaataaagtaaagtgggtacatgtaatttgctccatttagataaatccttatcacggcccaataggctaatcatacccagcccaatcgtgtggttatcatttgcgttttggtatgggcctacatgtttaagcgaggcccaattacatgacccacttgtttctatttagctcaatgttacctttggttcaattaagcctattctagacatataatgatatcaaattaaaaggtaaagaaattatgttaaattgatttttatgattaagaaattagatagagcttaattataaacacattattttaatat

SEQ ID NO: 399550 - DNA, 949 bp, Cannabis indica
taaaacctgataacccaacatacataataaatacagtagaacctctatccaagaatacacttgggaccaagtaaattatattctaattgagaggttataactaaatagagttacactagaaaaaaaaattaaaaaaaccaaaaaatatcaatgtaacaataataacaataaataatcattaatactatatcataatagaaatattttagagtaaatataatttcatacatgtattataatttaaaataaaattattaattttacataaataaatttacaaaatacatgtatatattttattaagatgtaattattcttatatagaggtatactttgttaatacgggacttaaaaaatgtataactaattacaatttagaggttattcttatttataactggcccaaattgggacttaattttttataacaaattagaggttattcttgaatagagtattcttaaatagaggttctactgtattagtttaggccaacctaattctcataatttcataataaataccgccaaaaaataaagcttagtcaataacactgacaattttattggcgtttaggaaaataaaaattaatattttagatctaaggtggttttctttttagtcttatgataattgcatgatggtataggtgagagtgatatctaagattgaactaaacaattggagtttaagacttgagagcttaggattgtcttttggacaaagtttaacgacttgggagatgtaaggatttaacttgattattggacttgattttatatgtgttgaataatattagacatattccaatttttatgatttgcaaattgtttgaagaatagaaaacttaatctgcatattaatctggactattctgacaaactgagtgccaaatatatttttgtacaaatatttatgcaagttataatttttgggtttattcaaaata

SEQ ID NO: 399551 - DNA, 642 bp, Cannabis indica
cccttattttattcttatagcataggaatattttcttaactattgatgtatatgacttttgagtgtacacaataattaatatacaccttcatgtacccaataaaaaaaattaaattattgaaataatgaaaaaaattctgacatgttatctattaatctttatttctaaagccttttattttttggaacaagttcattaaagactaaaaataaaaaaatagtaggatccacaagggaaaatccaaataacagtagtcaacccagcaacaccgattctagcttgggaatccaaaccatcatcaaaggagagtaaatctctcttaacaaagataaaattacatttcaaaaaatgacaaatagagttgataacataaagttttgtatatgtattctgcaaagctggcaactcaaaacgcttggttgttcaccaatcgggtgtaagagaattataccatacatatactaaattcagttatagaattagtgtccaaaaataaaaggttgtgaaatattaatgcaatagattttaagttgagattttgtgaaatgaaaatcaaacaaattcaagtcgagaaacagtcaaattcgtcctcaccagaagtgaactcttcaagcccacattctcagctagtaaggaaaaaa

SEQ ID NO: 399552 - DNA, 533 bp, Cannabis indica
ttcggttgcttttccttggttgtttttctgtttttcttgtagtactctattttccttagtttgtagttctctgaactttgattatttggttaatcgatttgctctggggtgttttcacccctttctttatcaaaaaaaaaatatgataaattcttatattatatcattttatttttcaaacagagtttggtgcttatatcgttaaactcttaaatatttgctattattaatattatttattagtgttaattatctaattggaagaattcaatccataatttaaatgaatagcttaaaattatataaataaattaattaggtttaaaaaaaatcacccaataatttctcataaaccaagaattcttttatatagccaaattttatatagaatagataccggacaagtatctactaaatgaatttattagataatataacacacatttacaagcactatattattactaatgtgtttttatttttattttattttttttttttgtaataaagataaacttcattaactcaagagc

SEQ ID NO: 399553 - DNA, 744 bp, Cannabis indica
caatggaaaacatcaatcctgctttaacatattcttcccaagtttaaaagactcagccttcaactgattatgatttataacttaccctgattttctacaatggtctctggttcatttctagatttatgacctttgagattacaattgtggcatggaaaagaagggagaaagtaaaaatgactatggataaattttgtgaactccttctttgaattggttgatgatataacttggcatcacccaaaggctgaagaaagttctacagaatggggcacaagacaacaaagtgatttccttctttaaacggattaggacaaagtttgaagtgaaagttatggggtaaatgacactagaaagaatgatgatactcatcatgcttgtagtttgatattataattaaattatgtatatttgtagcaatttaaagtgtaataaacattcttactaacattttgtcagattactcctttagtccctaggcattgtaatttttttccttgctatgttataatatttgttatcatttttatacacagaattaaggattttgattatctggtttagaatatgaagaatttacatgaaatatagttttcttctatagttttgatttatattggaattatgaaattgtaaagttttgtatgggatatatgttagactttttatttgggcttacattaacttttattggttttattaaaacttgggttgattggatagttctttgctgtgttagcccat

SEQ ID NO: 399554 - DNA, 584 bp, Cannabis indica
aagacatatgcaaaacatgaaccccttaaaaaaaatgagcttttacaaaaatactggattttggttaaaattttataattttactgtcacatgatttttttttttaaaaaaatactatctttttataaaataactgtaaaacaacaaaacagagtaattaaacaatggaacaactagaaaacaatcgtggaacaacagtgaaaacttaacacaatacacaatataaaatttacacagtatttaaaaaaaaaatatcatctcaaagtaaaaacgtaaaaaaattagaaatttcagtatatggtataaaaccccccaaaaattgaggaaattgtattgtatacccactttactttatcaattttaatttttaccttcattttcatattctatgagatatacccacttttatagggaaatttcaatttttgaccctaataaaataccccatttcaaaatatataccctccactaatttatacaaattaattccactattactcatttgtacccaaaatacccctcaaatttaattttcctattcacactctctttccgtctttccctctctttcactctctctctct

SEQ ID NO: 399555 - DNA, 667 bp, Cannabis indica
ttgcacattcattattgattctttttacatgagaaatattgacactattaaatgtttccagcaccatgtggatcttgtgaatgatattactttcgactgtgaggctgtttccctgacctttaatttcttccaccaacaacctgcaatctgtttggactgcaatctgagatgtatctgccgcaggaggcttcttcagagcttccagcagagcccaagcttcagccatctttacagagtaaaggctgggcatataaatcatcccagctgagagaagttggccattggcttttctccagatgaaacccgagccccacaccaacagcattgtctttgactgctgcatcactgtttacacaaatgcacccactttcaggaggaatccaatgtttctttggtgggcggggggggggggggaagggactgcctcatgttgtatagcagtagtctcaattatggtagcattcggataagcagagaagagccaatttatcagctgctttccgttcatacttgggaggtgattccactgcctgttatgattttcccagatggcccacataagtttaatagtatcttcaaactcatacctgtcaattttctgctcaacagccatcaagaaatcaaacatagacccttctcccaggcttgaacattttttgtaccaagg

SEQ ID NO: 399556 - DNA, 513 bp, Cannabis indica
tcattttataattatttttgtacaatttatctatggctgctaattaggatttttaccccttaaactttaacatgtactaaatcatatgcccctgcactttttttgccgttaaaaattccccctaaactgttgagattgtttgatttcaggacttttgtctaatttcatttaattctaaaatcatgcccctaaactttcatccatgttagaatttttttactaaaattggacaaaagtccttaaatttaacaatctcaatagttcggggggaatttttaacggcaaaaaaagttcaggggcacgatttggtacatgtcaaagttcagaggaaaaaattactaattagccttgatcaaattttctttcagaatttcagcaaaataaataacagtaagacaataataaaaaattgagaaataaacaatgagcaaaaaataaggacaattacggtttaggtagaatatttgtacctaaaaaattcacccacctggcaaactcgactcacctggaccc

SEQ ID NO: 399557 - DNA, 947 bp, Cannabis indica
tttttgaatttattttttttcacttttttgattaaaatgatttgtaaagattttatttttatttttatatttttaaataattatttatgtggactaataaaattgtgccacgtatattctatgtacacttggacaattcaacgtgacagttaataggtcaaaataaatgaaaatgacaaattgttaacagaacatgagttttgaagatttttctccaaaaaataaattttgaggattgattgctagccaagtgaagtattggggttatgtagaaaataactctatttaaaataaataatatattatacaattaaaattaataataataatattttttttttttttgttaaaatatataaaaattatatgccaataaaatatataataattaaatatatgtagcatgccaataaattatatacatacattaaaatatttgtattatgctaataaaattatagaccactatacatatcaaaataaaaaataattatcatctaaaaataaaaatatacaatacaacaaaatagaaatatattgtataataaaatctatataccaacaacccacaacaacctataaaaaaatcgacataactgtaaaataaaaaaatatccttttatactatttattatttaggaggaggttttaatagttacatcaaatctgtcaccatcatagttacatttatttgtagtcattggatcactattgaatgattttgattaatttagaacttaaaataaataaattaattaataacttgtaacctgatagtaacttgatactttatttccttataaaatcgtaattaaaattaattatatgtaaaattaaattactaataatcattaattaattttttgtaatttgttactaaataagaatcatttagaaattaatttttttcacttaaattattgtaatatttgtaataaaacttctta

SEQ ID NO: 399558 - DNA, 786 bp, Cannabis indica
tagtttgaaggagactaaccaaaccaacacttttatttctatcattaatataattatatattacacattatattatgtacccccattttaaaaatataagattttattatttctattattaatacaattatttatttaacttttgaaaaataaattattattttaaccgtcactaactcaaaaagaaaaaaagaaaaaaatttgaaagtatgaagtcgtaacaacaaatttcatgaaaaaaataatgtagtgtaaaaagataaatcaagttgtcaaaactaagtaaaaaaaaaattgtaatacaattacatattaagaagttaatattgttttgcatattgtaattaagttattgttttgttgctttgtagttatatttttgtttttttatagttgttttcatgttatttttcaagttattttagagttgttttttttcgttgtttttaagttatttttttttttcattttactgaaatatattatttttgtaattttaaaactttaataaagtatttttgaatacttagtacagtaaaagtaaaaaaaaagtataacagtaaaaataacaaaaaaaaaagagtaattttataagggaaatttacatggtatactaacttttgccatttttttacaaatatttttgtacttttttactgtattttgttataagtttcatactgcagtatactgtgttaagttttcactggtgtttaactggtatttttttagttgttctactgttgttttaagttgttctgcttgttttattggtgttttataaaa

SEQ ID NO: 399559 - DNA, 582 bp, Cannabis indica
aacaactttcatgcattaaaatcaaataatagccctatatttcagattacacataaatgcatgaaattaagcttaacttagcaacttcaagctcttgaacaagagcttcaaacccaattatctcaatcaatttcatgcagcaaaacaccataaaaaacacatggattagagctagagaacacccccaaaactccacctatagctcaacaacataactcacaaccaaatcatgcataaactcacatagaacaattcaaaattcaaacacatgcaaataaaagtatcacaaccccttttccatgctcaaccaacaacaaagttcagcaacataactagaattaaggctttaaagaaactacctcaattccttgcaaggctaagcacaataaaatccaagtcttaagctccaaatcaagccaactccaagcaattcacaccaattaagcttgaaatttcaagagagggttgggttagagagagagaatccagaatttctaatttcatttcataaaattcaattttcaattcaagtgaatcaatataggtcaaaagaccattttgccccaagggccaattctcaca

SEQ ID NO: 399560 - DNA, 552 bp, Cannabis indica
agcattgaatcccaccaattttaatctttgatgacactatgaacccatctaagccaaagactctcttggtggctcgagatagcccacgcatacttactcatggctgccttgttccattcttccaactttttgatgcccaatcctccttcagttttttgttggcatattctgtcccaagctacagctcttgcaccatgaaacattgcttgccctttccaaagaaaagctctacaaatagattcaattgccttcagaactttctttggcaaaatcactatttgactccaataggcttgtatggctataagaactgagttgatcaatgtgattcggcctgcaacggagaggttcctagaactccaactcctaattctagctgtcattttctctgccagaatttcgcattccttccctgatattctctttgcacaaatgggaatacccaaataagtaaaaggcagattctgcctcatatatcctgacagttgcactatcttgtttacacttccttgatccatgttgctgcaataaattgcagttttacttggatta

SEQ ID NO: 399561 - DNA, 541 bp, Cannabis indica
tcagctactatattagctttcccggggttatactacaaagtgaaatcatagtcttccatatactcaacccatcttctttgcctcaagttcaagtccctttgagtaaaaagatacttcaagctctaatgatctgagtataactcaaactttatgccatataaataacatatccaaattttcaagacaaagattaccgcagcaagttctaggtcatgcgtagggtaattcttctcatgtggtttcaattgtcgagaagcataggcaactaccttgaaattttgcatgagtacacctcctaatccattacctgaagcatcactgaataccacatatggttcctcgctattaggaacagtgagaacaggcgccgaagttaatctttccttcaattctctaaaagcttcttcacaactatcatcccaaataaactttacttcttttcttgttaactttgtcaaaggcatagcaattccagagaaattctctacaaagcgatgatagtagcctgccaacacaagaaaacttcaaacttcagttacat

SEQ ID NO: 399562 - DNA, 624 bp, Cannabis indica
ggtcactggttcaccggagctacttcctcgcctatcctctctctctctcagctgtcctgttcctgttcgcattggtaagatctttcgactttgtatataattgtttggtttttctgacgggaatgggtttgagggttacaacagctctttcattacttgtagttttcagaaatttcttttctccctttttatgattttatattatattctgtgatcagaattaatcctattattgttattgttaaatcaacctatataattgagaagaacagcattaggtgataatagttagttgtttttgaaatataccgatttgattcttttatgctgtaatcttgtaatcatcttttattcacagtcgaaccaattgacaagaatttcttattttgacatttacatgaaatttatgcaactgttcactattgtttgagtaataatttctggatctggaaagaggtttgaattgaaaggggaagagctattttttagattaatccccggttgtttttttttgttgtgattctcgactatttaatatcagttcaaatattaataggatttgttttattattattttattatatataaataatattttattaaataaaaattaaaagtcaccca

SEQ ID NO: 399563 - DNA, 2056 bp, Cannabis indica
gattttggtttaagttctcatttattatgactccgcgttcggttggttaaaatccagtcaacattttggtgctttcattgagagctttttccaaaatcttgaagtcttttaccttgaaaaatggtgctaaccacaagatctcaagaacgacctgatgaggagatgcataatgcccaacaagttccatcagcaagcaatctcgccaaaaacaatggagagcgacccccgcgtcctggtaatggtggtgcagccaccaataacaccactgcccaaactactgttggtcatgggatgactggccaaactactgccgtcaggcagacaactgccgggtgtaccacaaatgccactgtcgcaggaggcagcgctactaacggcgtcaccgaaaggggtagtactagaaattttgtcccacctactgatggcatgggccaagctcaaactagctgaggccctagcgtctttaggccgcggcgttaaccccatgtggatatcgagggaatcgacctcgagatggatcaattacaagatgcgataggccgaatgcaaggctagttccagactgtgcaccaagagaaaactcaagctcgagcgaccttgactgaaagtcttgccaaccaaaggagagaattccaatcttggttgacaaatcatgctcgtgaaatgaggaggcgccaagaagaccaagatcatcgcacctaagaggctttcgacttaatacgaagctacttcaaccaaaacactcaagagttggttactgatgcccacaatcaactgatacctcaaacccatccacaggaagcccctacctcgaggagccagtgggacagggtggtctatggacctgaagagtgcccaaggaaccaagagagggctaggagtcacccctctaatagcgtttcccgcaacaataatcgactgttcccagtcgatgagcaagtcctacccagtcattatatgggacgcgatgactcccataatgttcatctaaggcggagttgtggagggaactctaggaataacaatggtgtccgtggcagaaacagtagaaggacaccccaacgtagggagtggcgaccctgcaaccaacgcgaccaaccacgagatggcgatgatcacccaagagatagtaggtccagggggagaagagaagaccccgaagtcaatagtgattactgtccaaactacactaacagtcacggtgatgatgaagctgaaattcgggccaacaaccaaccaaattctgagcaggggttatcaagccggagggtcgtatgcccctaataggcagtatcaacctgagaatccgccccaaaggggtagagattaccaagtaccgctccgatcaatggaagggctgatagtcaaaatgcaagaggaaggccaagaatcgggctagttttagaacgtgtaggcccccaagggggtagagaccttcaggatgccctcctaattgatacaatctttagccaaacaaagcatcctcgttaatgactatgtcctcctaattgatacaatcttcagtcacatgtgacattctccttgtccttgcctatgggtatgataacccatcatcccaccaaaggatgacttaccaccaagtacgaagtagttaaggtcatcccacctggaatatacaagttagaactttacagtgccaacacaaagttagtactagtgcatttatattggaatggagagcacctacataagtactaccaatataagttacttttcaacaatgtcctaggctgtttggtgtacccgcaaagtgtatttctatagctggtcgtcatacctaccaacaaagttatatgatgtaaagacacgaattgcccatttttgatgtaataaggcatgtttgcccattttattcatgaagaaaaaattgcaagttatttttcatataacgacgcaacttgtatgattgttattgaatcaaattgcaagcctaactaaggtacaagagtgtatgaaattatagtggcaaacccgtgacaataatagttcctaatgtgaaagccctgattacttaacaagtgattaagaggtgaac

SEQ ID NO: 399564 - DNA, 1062 bp, Cannabis indica
gtatacagctgataacatcaatcgaagcagtgcctgaggtagtaaacaaatccttgaagtactcaaccataattcgatccaacccatcctcccaactcgtccaaataccattggaatcctgaagcttagtaattgaattactccgtcttctagctgaagcagacgcatggaaaaacttactattgttatctccagcctggagccataactgtttcgatctttgcctccaaaagacttcacgttgagtgaggatttctttaaacttacttttggctgcccgaaagttgttagtagaaatagtatctctaccatgtttccagaggttaatttcagctttgcactccttcagtcttttcttaaagtcacccgaataagcttcaccccagacaagcaagaactcaccacagtatttgatcttttgttgaatatcgaactcagaactaaaattccagcactctttaattacttgatgacaaagaggttcccttagccaacaattctcaaagcgaaatttctttttcataacaaaaggaatgttatccactaaatcaagaaaaatgggacaatgatcggaagtggaaagctctaaattatacagtttagcaagaggaaaaagatctaaccaatttttagtacaaagagctcgatccaatctaacctcaatccattgatcagtaccacgccctttctcccaagtaaaaggatgcccaatgagctcgagatcctgaagctcacaatcgttaactgcttgttgaaatccccgtagtaaccaatccggataattattgccacctctcttgtcttcctgagaaagaacattattcatgtcacccataatgcaccacgccaaaaccgaatccaaagccaagcttctcatttgatcctaagtacgtctacgttggccacggtttggttcaccataaataccgctaaaatgccatttttcctttccttccatggtgatttccatatcgatatgggactgagaaaaccccaagaggcgagcttcgtcttcatttttccacagaaaagccaatctcccacttttaccttgaggttcaa

SEQ ID NO: 399565 - DNA, 906 bp, Cannabis indica
gaattagttataaatttttaaaatttggaaaaaataagggtggggatcactcccatgcaggcgcgcacacctgagttcactcggtcaacatgcgcattcagacacgttttgtccgaggaagctcggccagggttcttgtttggaacctcctccgcgcgtggaaatgctgcggcaacatggatatgcggccaacctcgatcaaatgtcccccaacacgcgtgcgaatggtatgcgatgcataccatccgagccaaatgcaatatttttcaaaattttcaatttttcatagttttacttggaatttaatttcgaatttttaggtaaaattttatgtagacttttatttttcaaatctcaaatctaattatcagtttaaaattaattattatttattaattaattttagatattagtaaattttgaagttgaaaaaggataatttctacattttttggctaaattggtttttttttttatttttttctttaaaatttgattattttatcttatttttaaatctaaggtcatatattttatatttttattatttaaataattttattattattttcatgattgtgtacgttatagttatttaagattatctgtaaattttcaaaaaatttcgagtagtttttaatgctgaaaataatgcttaaatattttattacacttgtaattatttttttcttataagacagttaaaattagggttgttcatatgaattgggaaaccgcgatttaaattcggacaactacaatcagaaccattgtaaaccgtaaccggggaaaccatttttggtggtttggtcaatccggaccgtttacgacgtaatggttcggttgtggttcgtaataaataattaacggttaaaccggactggaccgtttataataaataattaa

SEQ ID NO: 399566 - DNA, 587 bp, Cannabis indica
tatatggattaattaatttagggggttgatttgcaggttttaacttttcacaattgcaataagttgatagtgagagatttttcagtgcgtaacgctcaaaaaaatcacattacttttactcattgtaataatgttaaggcttcccatttaaccctaacttcatcagaaaagactgcaacgggtaatggaatttacctctcacatactcaagatattgaaatctttaattctgccattaaaacaggtgagtttatattatatacaaatatttatttattagattttgttcttaagtatctcttatattgtacttagtataaatcattaaatcattcattgttttattgagaaaaaaacattatccacgtaatcaatatataaatatatattttgtaaggtattaatgttttatttaaacctttaattacgatcacgtaaaaacaatttttttattaaaaaaacttttaaaatttaaattagaataataaaattccatcatatgcataggtgtttacaattttctatttttttttagtttgagatttgttaaaatataatattcttaatttaatgtttattttagtccg

SEQ ID NO: 399567 - DNA, 1262 bp, Cannabis indica
actatactgtgaccgacttgtacaaaaaaatacctatagtatagacagaaataaacatactatataataatatagtaccataagcacgatataccataaaattatgattttttcccttctcgagtcaaaactacgaaaactaccccttacacaccaacagggtacttaaaatacaatctatcaatatagtttcacatattaaattatattataatataatttatcatgaatacataattaatctagttaggattgctaatgggttattaaaccttagggtattacaattatcccctctttatagaaattttgtcctgaaatttacctgaataactttagattatttttgctgcatatctgtctcttgttcttaggttggctcttcaacttttaatgttccccataatactttgatcagtgcaattgtctttattttgtcaagactttctctcttttgtctaatacttgcactagttcctcctcgtatgaaaaatttggttgaagttccaatgttttcataactcagtacgcagaacagatctgacatgtattttcgaagcattgatgaaacacatcatttacagctaccagcgctggaggcatagctaacttgtacgctacttgccctatcctcttaaggatttcaaagggtccaatgaaccttaggctaagttttcctttctttccaaagcatttaatacctctcaaaggagatattcgaagaaataccatatctctgacttggaaatcaatatcccgtcgctttggattagcatagctttgctatccactctgagcagcgagcatttgcactttaatcttatcaactgcctcacttgttctctgaacaactttgggatccaagaactttctctcacctacttcatcccagtgaataggtgatttgcactttcttccataaagtagttcataaggagccatcctgattgttgcctgatagttgttgttgtatgagaactcgatcaggagaaagtactttacccatgatcctttaaagtctaatacacatgctcgtagcacgtcttctaaaatctgaatggtcctttcggattgtccatctttctgaggatggactactgtactaaatttcaattgagtacccatggctcgatgtaagctctcccagaactttgatgtgaactttgaatccctatcagaaacaatggactttgggataccgtgaagacgaactatttctctaacatacagttttgcatactgatcaatggagaaattcgtcc

SEQ ID NO: 399568 - DNA, 726 bp, Cannabis indica
ccggggtcaccgtctagtcaggcgtcgggggaagagcgaagtcagggctataggtctgggcaagagtcgctaaaagctcctccattggcctggctgcttcaaaaggacaagcaaataagtgtcagagtggccacgagaaaatatgcacacaaaaacaaagcagtaaaactagtcctaccctgactatctaattcagccctagcaaagtcgcgtaccacaatactagctttgtcatccccaagaaagctgtttgaggggagaaaccagctggaagacagataagctgaatgatccaggggaataggtgcaggaggtttggaccccatctgggaccggcctagaaaatgacctaagttggaaaaataaaagcccttggcatgatcaccccaccgggtagggggcattctaaatctaagaatacgttcgtcaaattctataggcctacaccgggaataatcttgggcagaaggaacatgatggaccgttaagggagacttaccggatccggatgtgctcgcatcaggagccccagtgttggagaccgagagaagcatcttaagtcgagaaggcatctgttctttccccgcttctattcggaggtcctccctgcggtagcctgagccttgatgtaggttaactcctgttccctcctacagaggtacttctggtatcggtcctccgccgaggcaataatgtccgcccggagtgccttttcagcatccaggg

SEQ ID NO: 399569 - DNA, 982 bp, Cannabis indica
gatatcgttttttagctttccaacacatccaaaatcagctcatttggaatttgtatgtgaaagttacatgcattttactgagagaggttgaagcaaaaaaaaaacgtgttgtcaccggtgcaagacttttggtggtcgcgacgagggactacagaaactgttttcacttttctacaactgtcgcggcaaggctattggctgccacagtgccggctttgtacgggtcaagaaaaacttcgtcttttctcaattttgggctaaaaatatcattttaatgaaagggggttgcgatttttgagagattattcagaattggagacctagaagcaaaggagagacttcaagagcaacgcggaggcaatctaaaataattctgccaattatttcttctcttctctatatctttctatgttatttttctattttgattttaattttggatttgctaatgtagattatgaactaaactcctcttttgggaagatgatgattgttgattaagattactctatgagttaatgttatgttctgttttttctctcaaatttgtgaatttatccatatttgtgcctaattatatgtttaagattgatcacctttcgcatgctctatgatcctaattcaaaatctgaaaaagtgagttttaagaatgctaaaattgggtaaactaagttttgatgtgaaacaaatgtatttgcatagcctttgtgacttttagattattgttcaatgcgaattatatgttattctatctcagggaggattagataacatgtgatttagggcctaaaagatcttaaaagagttaagtttaatttttataatctgtcattcactttaagaaagaggaatagtaattagtattaacaattgagtaattgaagcaacatgattctatttcctaatttctcatccttgagtaaacacttttatttcttatttttatattattattccttatttttattttcatcaaaattat

SEQ ID NO: 399570 - DNA, 615 bp, Cannabis indica
acgtttttagtagtgtatttacttggatcatatagcttaatcaagttttaatttttcagactcttttctgtgaaaaacaataaacgtttccatcaaaattctaaatgctctaactttaaggcatgaaaacaagatatggaaattattttaggcataatgaatttggatttatgcttgcaagaagaaaaacctgctgatcgtactgataccagtactgttgttcagaaaactcttcatgcacaatgagaaaagtcaaaacgtcttagcctcattgctataaaaggttccattcatgaacatctattgagtggtttgcaagacactataaatgtaaaaaaaattaatgttgtagaaaaactatatgatactggtgaaaatgctgaagctggatatcttatggatggaatgaccaccattaagtatgatgaatcaaagggagtaagagattttattctaaaaattgtgaatgttcaagccaagttgaaagatcaaaatattcctcttcctgactcttatattattcattgtgctcttcatgcacaacctgtctcattttagtgagagggagtcaaagcttaaagtgggcacttatcttaaagttgacattatctaagt

SEQ ID NO: 399571 - DNA, 679 bp, Cannabis indica
ttatttaagatattttgtaaaatcttaaaaaatttgaaaaaattttaacatgccaaaaataaggttcaaagagtcagttgcacgcatgtattttttttttttttttttaattttattttatacgggtttggagtagacattttgaacattgatttttatattgtaaattattctgaatctttcaaaattttgcagaatatcttaaataattattataacgtacacgactaaaaaaaaattagactaaaaactttttatagatgccaaaatagttaggggttgcatcaatacatctattttagtagggtgcattgtagaaatactctataatatatagggtgcttctacaatgcactcttgaaatgggtatccaaaaaaaaaattagtttaattttttccacaatcgtatatgttataattatttaagtcttcttacaaaattttgaaaaatttagaataatttataatataaaaagtaatgttcaaaaaatctattttacacaggtataaaataaagtgtaattgagatctttgttcgtgatcgcatccccaatacttgtttctcaatcgttttgatcctccaacaaactatcacggtaaatatctctctctatggttttctttttttcttttttgtagactaaattcattccattttatatagccgtatttcgatatt

SEQ ID NO: 399572 - DNA, 791 bp, Cannabis indica
tcatatttttgagtatttttttttccaggacctctttcacaagagtttcttccgtccccccttttttgatcatgtctgccactatttataattgcatagtggcagttaattacaaagctgaccaaaatatgtttgcagccattaatcttaaaatcgtggtatttgattacaaatcaagccaaataaatgaggtttttacatagttgtgaatatctcgcttttattgagctgagatgaacgcgcaatcaaaaatatacagtaagtcttatctcatagggatgcctcgccgaaaatgaagccaagataattttgatagcaagcagttgcttgtcatttggcttctcgagactaatattatgttaactctgataactatactttctggtatcgagatgatctttctcgcatgcataccaccttctaacgagataaacgcctcgttgtctgttatcttgactcgtcacactatctatacttagtttgtatatcgtataatatacgctaagtatttttagtgttgtcgttttctctttcacgcagcgaggttgaggcctcgtcatgaacgcgtgcatccacatggtttctcattaatacataggttagcagttcgtacgtttttgtctcgcagaaggctattcagccagccgaattataaacataccctgcgaattatattttcaatgagttgttccatgttaagtatacttttcgttagcgtgtttgagttcttcgttcttcccagctcgacacgtgtctttctctgatgtgcttaccgaatttcaggtataaca

SEQ ID NO: 399573 - DNA, 860 bp, Cannabis indica
agcactctaatcatgcatcattagaaatatgtattctattcttacattcctaggccactgagactgcaagaaaagtgaccaatttcataagaaatataacattcatttaatcatactataacaataatgtattcaattacaactatcacataataacacacttgatccatttcacaacatcgtaaccacctagtttcggtacttcataaagtaccattagcactcgttaaccacgagctacatatgtcactatcgttgcccgatacagtaaatgataagtaagaaacctatttgcggttttgggagtaattactcataacggtaatgaccgtttcttatactcgatcataattaagtcacaacgataataattgtttcatatcattaacctcgattacaatcgagtcacaacgatgataatcgtttcctatcatttccctcgatcataatctagtcacaacgataataatcgtttcctattatttccctcgatcataatcgagtcacaaccaatacatatcgttaatctcgattgagattatgttacaacaaacacatactgagatctcgatcataatcgagtctataattatcataacattagccatatatggtgcttaataatcttcttaccacagtccaaaagtttagcgtgcatcccgtctaaatggaatcaaagcttgacgatcccaggtcctatgtcacgacaacaacactcaataaatacttcaattaaaatctccgaaataatcctaattcctaaaaccggacaatccttatattccaatagttctaggttaggttttactaacttctaaacattccacactaaacattgaaaaccaccccgagccctaaaa

SEQ ID NO: 399574 - DNA, 625 bp, Cannabis indica
tattattttacatcaaatttttttaattagatattaatttcaaaagaatatttaattaaaactttttataatgttaagtttgatgtatgtgtgtgtctctttttaagcaactcgtaggttgtcaggtgaatttgaccaagtttagaattttttaggtttgggttagcagggtttacaaaacatcaaatcgaattcatccgatttagctcaagttttcctcgtacgggtttgggttttgggatgggcaaaacatactatgttgaaaaaaaagaaaaaaaaaaaagctaactttagtgtatgccttttggtttcctttcgagaatcaatctctcatggggtaagactgtacatcaggggggattgactggattcgggctttataaaacattagggtcggctcagggtggggcacggcccaagatctccgtaccaaggcccaaaaaattcattaacaaaagggctattttcaaaaatatgggaaaaattattaaggttatgataaatatggcataaaaagtaaataccactaaatatggcattatctaaccaatcaaactaaaaatatggtttttttcctaaaaaaaaccatacaaaaacattaaaaacgaaaaatctagaattaaaa

SEQ ID NO: 399575 - DNA, 980 bp, Cannabis indica
gcccctcaagctaatgtccaaccaccacaagctggatatcctatgaacgcccttcttctagccttaagagcagttcccgctcaacaaatggatcctgccgctcgacagagtcatcatttttatatctttcatcggatttaagtgcctaagtttgagggtggacaagatcccatggtagctgaaaggtggttgaggtagataaaaaaaatttcaacacaataggaacacctgaggaatatcaagttacttttgctgtgtccaagttagagggtggtgcagaagattggtgggagaccttgtcgaggacaatggaaactgatgggatggcttggcgagattttgaggaagttttcagggaacaatatttgagtccatctcacaggaaggctctgattggagtatttgatggtctaagacaaggggatatgactgtgaatgaattttacatgaagtttgtagagctatcctcttatgcatatcctggtcttgttgaccaacccttggtgattgaacagttcatgcgtcgtttgaggcctacggtacgtggtctgataacccctttgacctttaacaacttgactgagtgtgtgacagtagccttgcgaactgaggctcacgtaaaagggaatgagaagaagaacacaagcagaggaagaggaaatgactgaaagatgaccaagaagaatcaaggacagtggtcccaaggataacaatttagtggggtagcactagtagtggttcatctgaaaagactcgtagtggaccatacgggtgtttcagttgtggtcaacaaggttataagaagaaagattgcccacaacaacaacaaagatttcaagcatctcatggaggacccataacgagctatgtagagtctactccttttcatggacagcccaggacaaaccagtcctagtcttcatcttatggtttcacacccaaatcgggccagcagtctcagtatcaacatcagtttaggc

SEQ ID NO: 399576 - DNA, 768 bp, Cannabis indica
taatagttatttaattgaattgtatcttaatactttattacactaataataatacgagacattaaatgatgctaagcattagtgtcttttggcatttgccatttctcataacgtaactaaacaaaaattaaatagaatttttgctcataaaacttttcagactattaaaaatttcacttaaattattgaaaatgtacgttagatttaaaaatttctgtctaattctttaattttactaacaaaggtctaatgtgacggttatctatgtactaagtgctggcctcgaattttaacatgtatgagattatacttccctaaatttcatctgcgctaagtgtttgttagaaaaattgaataaaagttattgaatctaacaatttccatagtttagtagaactttcgaaagaccttaaaagtttaataagtataatgcagtatatattaacgtttagaggataaattttttaatttattaaattaaaaataattaaaaggcattacaaatttacagagtaaagaaaaaaccaaactcatttgttcccctaaaaccaacccatcattccacaaccttaaacccactcacgtaaattcaggactatcgctagcttttcttttgttgcgaataaacacaatctagtcataaaataaaactcgaatccttcataaacaatcaacattgatctacaaagggctgacaacaaccacaacagaagagcgccaaagtcgaaattgttcgctttgggcctaaaccctcacgattttattttt

SEQ ID NO: 399577 - DNA, 961 bp, Cannabis indica
aaaaatctgacaacctgtgtcaaatctagataaaaaaagataaatataaagtttttgcaaccttgtcgaaaaaatatctctcatgtaattagaaaaagggatattgggattgtatgaaaagtattgtgggtgacatgattggagaaacttatggtataagaaagcctaaatgacaatttcaactacatttaccctaagcctaacattacaagcttagaaagaccttctgattcttggttgtgcattaatctatattagtggagaatagtgagtattgcaagcatatggaattttgtgttagttgattgatggttgtaattggcatgcataaagtggttcaattgtaagttaattgcattctataatttcatgagctaaataaaaataaattgaaatctgtcaagggtgtaatagaactgaaattcaggattatatgtataagtatattttttcataatcatgtcattgaagctacttgaaaattactcatgttttggagattgacttgtttaatgtttatttagtgttttactcgaggacgagtaaaagcttagtttgggggaatttgttaggttatttttagtattaattttagattaagtttagtatatttttaatttagttttaatcgtgtttggagcatttttacgcttgttatcttttatttttgcagatttaaaatagaagaagattagaaaaatatcagagaaaaagatgggaaaaagataaaaatatcatgatatttaaaatagagaaaattgtggaagccgaaacttcaagcctgaattcgacgatgttctgattagattttggaaaaagtcaaaacatgaaagttctagatctctcttttatctttccagaacatcttgaatcgtccaattccgagcaatattgagagagttatggctaaaatactatcagtcaacccagtagaaaaatcactgtcgaactccaacacggg

SEQ ID NO: 399578 - DNA, 741 bp, Cannabis indica
tttaaatagtaaaaattgaaaatttttctgtgttgattgtatttttgtaatttttttttcaaatttttatctattacaagttaaatttttcttattttttggtgtgtttaaattttttgtgtaaatttttcaaaaaaatttataaaaatgtcttaaaataattacaacatatataactatataattataattaggtgtacaatatattttcctaatgtatatttaaatatttctatataatatatataaatattattatataaactaatttttttttgagagatattatataaactaattgtgtgtataatttatatgtttttttttttttgaaacagtatggtatagtttataattatatgtttaaattgatggtgatgataaatgtttaaaatatgcgtatattttttgaacatgttggaaaaatacatattgattgaaggaaacatgtcttacaaacaaaaatcgaaacattaattgacgtggttaatgcttcgtatgatgtaatcataggtaagtggcactaatgtgtgtatacacatatatatatatactagaagaaagttacgtgcaaggcacgtatatttagttttatgttatgtgttctataatttaattaagaaaaaatcaataaataatcatataatttaaaatgatttaaaaactaattttaattagtgtgtggggttatttgaaaatcaatagtgaaaaatcaaatttaaaatttgcagaaagagaaga

SEQ ID NO: 399579 - DNA, 573 bp, Cannabis indica
aatatatttttgtacaaatatttgtccaggttatgatttttgtatttattcaaaaatacatccctaatgctgccagattttttagaaaataaaagtgaatatgttcttttattattcttattatttgtctacctttgattatactgatgagagccatgttgatcattatttgtgcatattgttgtttcatgacctagtctctgtgtcatcataggtagatcaggtgtgtactaacctgtaggtgaaagacctagaatttgtaaagggggtgaattaaatcttaacctcggtattatagttgttatcaggtgtgactacccagtatttgatgttgttttttatgtttggtattgagagctaggggtctaatggactgtgtgatatgcatttgaatcttacttttataattctttatggtctctctactttgtttatacatttcaataatggtgatgagatgttttatttttaaaagctaacaatgttggaatttttattaaactaagggtcctttgatattagttgtttttctactggactttatgtaatgaccgctttagtaatttggattag

SEQ ID NO: 399580 - DNA, 650 bp, Cannabis indica
tttatatacaaagcaggtgtctaatcagttatacaaggattgcattcattgtcaatccgtttttacacattgaattacaataattaaactaaacaacgttaacattaataaatgaacggcagttactaagctcatcagcgtatgcgtcttccgaatctgcgagttgactgttcatattccgatgttaaactcgcaggtctatcattacgtttaggatgtctgcgttcttagatagtcgcctttgtggacatcgcatgacgagctgacagaacctagacatgcgagtctatattggtttatcgaggcggcaggatctttgggaccaacgcgtattatagaaagtcggtcttcgtgtttatataaggatatagagagggtactcgcacatagttcgatatatgcgagttattctcttgtcccatataacacgagttatgatcgtgtgatcagactttggtcatgcttgctatatctcgttgattctatcttgggcgaggtttaaaacttcgaagagactctcatggacatctcagctttcattggaaatctgagtacacgtgtcctctaaacaggtgtttggtctcaagtttctaggtgagagaaatctcactataacaggcttgaaaaatataattctgaactctaggcct

SEQ ID NO: 399581 - DNA, 510 bp, Cannabis indica
ttttcacccagaaagatttaaatgtgaggcaaagatggtggctggaattggttaaagattatgattttgagattctgtatcaccccaggaaagccaatgttgtggcagatgcattgagtagaagaagtcccgggcaggttttcaccactgtaatgatagctcctcaattggcctcagaaatggtaaatgttgggattgagtttgtagttggaaagttgcataacttgacactccaatgtgatttgcttgatagaatcaaaaaggcacagttggaagatcctaagctaatcaagattcgagatgaggtgatggttggtcggcgtaaggacttttcaatctcgaataatgaaatgttgctgtataaaaaggaaatcctcgatgaagcccacaccacaccttattcactacatcgtggaaccactaagatgtaccaggatcttaaatcctacttttggtggtatgggatgatgagagatgtggtagagtatgtgtccaagtgtttaacctgcc

SEQ ID NO: 399582 - DNA, 1549 bp, Cannabis indica
ccctatgtctgataaatctaggaaactttattcacatagtcatgtttactttccaatgtgttgacggcacaataaacaggatcaagtatgtgaaaagggtttcagatgaattcatacattatgtacatataatcatgaaataaatcatgtgaaccatgcaacattaaatgttatttctgatctatattaataagtaaatctgattatattgaaatgagttttatttagggcataaaacccaacacacttttactgccgcattgaattgcaccggtaaaagtagccacataaccctaaagcaaaatcccacgtttcgttaaacacttttaccggcgcattagtgcgccggtaaaagtaatcccacctaccaccactttccacgcgggattttttccccccaaaattttacgtgggcggtcaagattccaaccaaaaatttgctagcttttaccggcgtaattatgcgccggcaaaagccttacaaagtggaaatgtgctcgcgccatttggcggttcattgttgatctttcaccggcgcatatgtaataatacgtcggtattgagtaccttttgccagcgcccaattgcgccggtaaaagttattgctgaatcaaattggcagttcagcatttcatttattctgacaacttttactggcgcaattgaccaattgcgccgataaaactaggttttcttgtagtgatagaaagtcacagaaagaaactatgcttgggaatgtttaacctactccaaacaattgaatcacatttaactttagtagcaataggccgaatagccttatatccctctgccactttgtacctgtcattttgcacctgggatacatcaaaactgcttgatgttttatcttttatggctaccagcttgtgccaataccagctggttgttggtgtggccctgtaggaccacaaactttcctccttgatgtacacattatgcatccatttcacccataaattgtcttctttttttacaatggcccaaacatacttgaacataattgctagattccaatctgtgatgctcttaaaacttaggcccccagccgatttaggaagacaaactgagctccaagcaactgctattgaacctgagagggcatggcttccattccacaaaaaactccgacatatagattctatcttattcacaactttttttgaaagaatcattatttgacaccaataagaatggatagccatcaataaagaattgatgagaacaactctccctgcaaaagagagattacgcatactctccaagttcttatcctagccacaattttttcagttaaagtaccataatcagctgctgaaatcctctttcgacagattgggattcctaaatacttgaagggaagatcataattttgaaagcccgaagcatcaagtactcttttaatatcattatcattcatgttattgcagtagatgttaggttttgtgccctaaataaaactctatttcaatgtaatcttttctattcaattatcaataaagaaacagatttattctcattacttatttag

SEQ ID NO: 399583 - DNA, 1765 bp, Cannabis indica
taacatggttgagaacagaggcggtcaaggaaatccccagcatacccgtggtcgtggccgtgaccgtggcagagcacagggtggtcgtctagtaaatccaccacaagctcctccgaattgggagccaagatttgcagaaatgcaagatcagatccgtcaagaggatgaagagattcagaggttggggcagcagggtcctcctgccgtggctcctcaacaagttgctcaggccgttgcagttccagcgctgccagcagaacaacctgttgttggcaaccgtatggagccgttgtacgaaaggttccgtaagtaggcacctccaatgtttcttggaggtcctgatgtgatgaaggctgagcagtggctcacagtgattgagcgcattctcaacttgatgggagtggttggtaatgatcgggtgaccgtatgctacttttcagtcccaggaggacggcctcgtgtggagttgataaccctcactcgggacgttacagttatgacctaggaagaatttaaggagttgttaactctaaatattacaatgaagttgtctgcagtgctaagcggaaaaagttcacacgaagtggtgcaaaccgaggggatgtcggttacagaaatatactacgaaagtttgtaccggtctggccaagctcgtcatgacgaagattaggcgatgatcgtggtgatcactactactgaacgcaaccctcatatgctgaaatggttgaaaaagctttgagagccgagggtgctgtgaaattccttcaggagccccgagtgactttgagtgttggtggaacccccacttttcctgtatatggtagggatggtggcgactccaccagtgatcagaagaggaaagttaccccagcatctagtggttcagggcaaagcaagcggtttcgtggaaaccaaggcttaggttgatgccagggttactcttaccctgagtgtcctcgttgcaagaaacatcaccctggagagcgcaatcggaagacatgctttctgtgtttcatggtggggcatttcaagaaagactaccctcaggcaaagaaagaggagccaaaagttgaggtaaaaccggctcctgctcgagtgttcactattacccaagctgatgctgcagccagtcttttttgctgtgacaggtcagcttctcgttaacaactccttgtatactgtattattttattcgagagctacacgttcatatgtggctacaagaataattgatcttttaggtaggccttgtgatgttttagaaagagggtttgggaaccctaatgactagtggggaattggttatctctaataggcgccttaggtctatgccggttaggatcgaggataggaagttgagcgctgaccttatagaactggaattaactgattttgacatcatacttaggatggattttctgtccaagtattcggtcagtatagattgtacgcggaaaatggtgacttttcagccagaaggtgaagatccatttgtctatgttggatcagttcaggggtctcggatcctggttatttctgtattgagggatagagatctactacacggatgtgtaggatttttatcagtggttattgactccagcagacccgagatctttgggcctgaggtagtcagagtggtaaaagattttcttgacgtgtttcccaaggaattgtcgggattgccgccgcaacgagaaattgatttcgtaattgatctggcacctggagtcgaacctgtttctaaagctccatataggatggc

SEQ ID NO: 399584 - DNA, 900 bp, Cannabis indica
cttgaaaagaaaataatatttatacagcatccatagaataagagactagacctaataaagaggacaaaaaagcataaatcttcggcatttagttagaagtaataaaatagaatggaaagaaaataatttttcttctatttttttatttgattgcatttaaaagtattagaatgtcattttaatggaataacttttccatcattttaaaagaatgattattctattttaatttagaagaaaaaactattttagtgcaagatgagaaaaaatttaatagtgtttgtattaattttttttatacattttaaatttgattatctttcattactattcatattctcattcatattcttattcttatattttcattcttcccaatcaaacactactttatattatttatgggcgtgtcacacttatattatttatgggcatatcacacagtgtgcaggttgagccaggcacgaacaaactagcagtaaacggactggaaattaagtaaacattatactattatgtttgttttcaccaataagagcattctcaatagcttatcttatctaagaccgacaaaatgggtcagacacaataacacgaatcgaaactcgtacgagagttagcgggtttgaattcgccttaaatgagtttggatcgtgtttgggttgactagtctaactcgcttaataaacgggtcatgttcgggttgacatggctaacacgatattgacccgttaatgacttatttaaagctattttagtactttaacgtgtcataaatggattataaatgtgttgaatacttcataaacgtgttgttaattgacatgtttaaacaaaatatgcttacaaacggattacacatgtcgtgtcgcgtcaacccgtttataaacgggtcgtgtt

SEQ ID NO: 399585 - DNA, 886 bp, Cannabis indica
aggcaccaatggtggatcttccctttaaggcaagggcctgctatccagattcagcgggatgtttgtatcagtttggccaactgtagtggccaagcttttggtggttgtggtggtgacaggatttgtcacatcagcaatgttaaaggggattctagttatgactggaacctgagcattctgatttgtagtctatgggtcttgagggagacccgaagatgtagatggcgcgactagggttcctctcgtgttaaccatggcgtttgatcaaatatgatatccacactctcaacgaaagcaccaaactattgacctcaaaatgtgatcaatcgagaatggggtcctagagatctgatgcttgccatgtgttacacaaatagaatgaaaaagtaaaaaacactcagatttgttatagaggttcggccccctttaataataagtaatgacctactcctcttttagttgtattatgttacgaaaattataaaataatatgcaagtgcacgtaatcaagtagtaaactcacacaggtgaggtcgaaccacagggaattgaactgaataccactagattagacttatgattctatttggtagatcaataatattgatagattttgaaataaagaaaaactagaaaattaaagaaaggaataaaggtgtttaatcaaggatgagaaattaatgaaaagaatcttgttgatttaattactcaattgttaatgctaatcactattctctttctttatgtgaatgacagattataaaattaacctaactcttctcagatcttttaggtcccaaatcatatgttatctaatcatctctgaactagactaacatgtaatcagcattaaacaataatataattgtcacaatggctatgcaaa

SEQ ID NO: 399586 - DNA, 1003 bp, Cannabis indica
atttgttgaaaacaagctcgggaagcaaacccaacaatgcttcaacaagaactgcttccacgagaatcgataactcgagggcttctggtccaaagagaaaggatagaattaaggaaccgtcgaaggagagaaagaaacaaaacaagcatggcaaatacgtgctagtgtatactatttagaccgagcttaccttgacacaagtagaaggtagaattcggcaaacccgagcctatgaggaatttgaggagcaaaagagatcttgacaaatattgtaaattccataattatatcgggcatacggctgaaaaatgtcgccaactaaaagacgagataaaaagtctcatcgcttgaggccattttaagcattatgtgaaaaaacagggccacagatacaaccagcctagtctgcccaataacccaaacaacgaggggttacaacctattcttgttgaaggagaggaaatcctggctattttgggagggccacatatcttacgtgaaaacaataatgcccggaaaagatatgtgaaagaaataaagaacgagcaatcagcctttgccccagaaccttccaagaaggtgaaaatcgaggaacctcctattgtattcatgaaggaagatgagaaaaacgtgaggtatcctcatgtcgatccaattgtgataacaattcaactcaccaataagaggatcaagatagtgttattagacaatgggagcttggtatatccttgataaggaaactctaaagaaaatgggctcaaaaaagccaagttaaggccttgtatggtaaccctttgtggattcaccattgatagcatcactagccttggcataattgttggaaattattttaccaggatctagatttactacaagtatgttggattaacaacctaatatgaattctaaaacaatgaaaataaacacatataaagttaaaaaaccttacagtggtgcagcggaatattatgactccttccgttcagatctctagcccttgatt

SEQ ID NO: 399587 - DNA, 1170 bp, Cannabis indica
gaattcactccatgtcattgaggactcccgagatagagacaactctccatccgtggagcagtcatcactatcattcgcaattgcagtagaatccttctcgtggtgatgatgtcagtcgtccttcctatctctattgtgggatttgttgaagccttattgctccctgtacttcttacaaaattttttgcaagtgtccagaccttccacagaagtaacactttcttgtttccttctctctgaattttgatcttgattgagagtgatggtatttactctttgaacttacttttttggcaatcttcatcttgccaagtacacttcttctttcttggattctttttccaattgtaattcaaaattttttgattttaatgcaacacgtacatcctccaatgcaatcatgtctctgccatacttgataacaacctttacttcttgatatgcaattggaagcgatcttagaaaaatgatggcctgactttcttcatcaaccttgtagtttatattaaccaatcctacaataatctcatttaatctatcaatattatcatcaaagaaaataaaggaattattctaaaatcgtataaccattctagcaaaatgatcttgctagctattgatggttttaagtatagttctttcaacttattctaaactcctttcgtcatcttctctacgatgagtttttttcgaatattgtttgatagatacatgatgatcgtgtagtacaccatctcctatatttttgctttttcctctggtttctttttgacaaagagtttctcatctccaagaatctaggatacgttctggtgtactaagattcctttcaaactttctctccatagcgcaaagtctcctgttccatcgaatttctccaatttaaatttcggcattgatggcattcaaagtttcttcaagaattgcagtggaaagaatcttaattctgcgttcttaatcgattaccaactctgatttatgggaaaattacaaccaaaggtgtaaaatcaaatcaagtaaactctaaataatcaaataattagcaatgacaagattaacagatcaaaaataataatcggagaaaaaattgggatgaacaaagtaagaaaaactagaaaacaattaaggcaaagaaaaaaaaatacaaaaatcaacaccaagatatacact

SEQ ID NO: 399588 - DNA, 919 bp, Cannabis indica
gttagtatgtttgttagttgactattattaaagtttttactcctctttctttctttggttttatatcagttaagttagttaagttcttaactaactctgtactggtttatatcatagtcggttgtatggttgtatatatagtcctgttctgcctttgtgtaaattcaattcattcattcagatcaataaacactttctttttcttttcgtaacacatcgtagtcaaatagttagaataattggttaagatgctttatatttacatgagagaccatgttttgaatcctattgcccattttttctatgtgtatctactttttatttattaaaataaacaaatgaagtacaaggttcaaattaggttcaaacttatacaactataataggagaatgttgctatttaaatttagctagttatttattgttttggattatattaaacgtataactaagctcaccttaaaatttaattctgagaccgccacgaatcctcactatatagtattagcgactgggggttcatcgctgtaaagtccttttttggcaagttagttgccaaaatattttttatttaatggtaagatatttttgcattcataaccgatttccttaccttgtatattctgatttagctgatcttttctatgttaggaaagatgctttttacagctgaactttcctttgtttggaaacttcttgtaagagaagcaattctcttatggaaagttggtttttaaaggaaacgttgattaattgccttttccttattgaattcgattgtatcttgatacaatcagaatatataatttatttatggcaggaatcaagacttaatagaggatcataccagattatagcaagtttcctttttctggtcagatttgttgcgtcagcttccgattttgatgctgcaaatcgt

SEQ ID NO: 399589 - DNA, 544 bp, Cannabis indica
accacaataatgttttcaaatttttgttagtgtaatatttcctatttttatttcaacaccaaaatatatataatattaacttaagccaaagatgaggcctagtcgatgtgtcaaataagatgtaacaaatgtacaaaaatatttatcagatagatacatttatggattttgataaaaaaatgttttcgtaattatgttcatatgacacatattctcaaatttttatacaattagtggtatgtttaacttattgtaatggaaattgtaatgaaattaaattgtttcagtataatatttgttttgcttttaaattaaaatgataaaattatgtaatgagaattacattacaaaagactaaataaaataaagttaaaatgattttaatacattttttatataaatatataaaaattaaagtacgagataattttatcgatttatcatttattttaatatttatttcaataataaaataaacaccctaattaattgaaatttttacatgaaaaatccattttacacaatttattacaaaattactcat

SEQ ID NO: 399590 - DNA, 1095 bp, Cannabis indica
aatctgtaggtactatacctaagattaatttggccagttgttcaaacttggtcgtatactccgtcactaacattgattcttcctgaaccaattgtgtaaactccttccattttgcactacgaacaaccttattataatactattagttaaacagatcctggaattcatcccaagtcataacagcgacatcctgtgtgagcggtactaactcccaccataccagggcatcttcctggaactgaaatgtggcacatgccactctgtcgctatcggtcactcccataaaatttagtatccaattcatagtggttagtcattgctcgactttcataacatcatggcctcttagaaagaccaaaggtccctgtttctgaaatcgttcatacagtggtaccaacctgttgccagctacaacatattccgctggcaacattggtactggagcaataccaatctgaggaagaggagcaacctgagggccttgctgcctcagcctaacaatctcctcatcctgttgctgtattctagcctgcaactcagtaaacctttgctcccaatcttgtggagcttgtggtggattaacattaccgagaccatgagcctgtccacggcctctacctcgacctcgtatatgagggggttcttaatggccttgatcgccactagttccgatcacattaccctgacttcgtacattttgtcgggtatccatatgatacaagcctgcgaacccataagtcagtttagttaggtagtggtcaacataataaacttaagaccacatacatgagatcttagacacgcacataattaattaatatatcactaacatgtttccatcatgcttttctaattataataagctactaaaacatgtaaaggtttactgaaccgtgagtcgagcttatatctgatgatgattgtacatatcttgacaatttagtagacaacctgacagctccgataccaaaattgtaacaccctactagtttaggcgtgctacaatacttttcataattactgtgcaacctttgctaatcaaaagatttatcaaaagtgataaaatttaaactttaataaataaacatatattgt

SEQ ID NO: 399591 - DNA, 1060 bp, Cannabis indica
gtttgattatggttatttaaggtaattcaagaaggttttgttgttaattagttagatttaaccaagtttgagttttgaactcaaaacttggagctttaatggtggattttaattctgtacttgggttgttgttttgttgttttagaaatgttctttgggttatttagagcaggtctggagagtctcatgtggtttggggttgttttggttgcgaaatgaatttttttaagtttcctgcactgtatcggaatttcggttcagagaggcctgtaggaaccggaattccggttggcttccaggatttcctcccaaaactgaaattccggttggtaaaccggtgtaccggttggggaaaatttgggaaccctagtttttcccatttttgtattatttagggtattgccatgttatttatcgataggaaaactcttagtttcaagtgtaagtccccaggaagttatttagcatatcgcttattagtgttgtgattatgttatttaggagcctgtaattcgtcaagcagattgttccactaaggttgaccggcacacctaaattcggaatcaaggtaagattagtataatagtatgcatatgtatttacatgtttagcacatgttaggaagcctgttagatgacattagatatgtatgttggcttcgtaccatcctacagtatcacatcggtacggctagagtatgactagcgtaccgagtataggctgatattatggtcgatggtactgtactatttgactgtatcacatcggtatgctcagagtgtgactgacataccgagtataggctggtacagtaacacatcggtacggctagagtatgactagcgtgccgagtatagggtgttactatgtcaaactactgtcgtacaaacgttacagactcagtaccgtgtgggacatgggcattacggttgtggtcaggggtatgggcgtctgatcataactcggaatttatgtatgttatatgatttatgcttttcttactgagtctgtcaacttacagtgctatgtttatgtgtaggtaagggcaaggccaaagctg

SEQ ID NO: 399592 - DNA, 136 bp, Cannabis indica
tacctctaatcccatagactattaatactgttatggaagtggatcaggtacctcaactcgcaaaatgtcgcattctcgcggcaacattggaagagaatgacgacgattggttcagccaattgcctgaggcatccat

SEQ ID NO: 399593 - DNA, 598 bp, Cannabis indica
tttgtttgtgatcaatataatactgtcttttggtttgaatataactcataacttaaggaagaaaagtttgaaactagaaagccttaattcaatcctggttagctattttaaggcattttatagatttgtaatttcacttcaaatcttgaactgattcttatcttaagcaaccaaaatgtggatcacaataacaacaagttttcagtcaaaattgataagtatgtgtctctttctcttccctgtgatttttgtttctggcaaattcaaaaggttattaattttttcttgactttttctttatgattgacatgtagttctttgaccaagaaaaagcaatggatggattttcattttctctgcattttagtctcttccacttcatatttgttgggatggagcaccataacaataaagtattatttatcaaaattaactgcagtattaaaagtaatatagtatagcatatatatgactctttctattcctttttgttggaaatgaaatggagcagcagactagcttattattaattcttcttatttaacgtaaaaccatttattccattgctctacatctcttcaactctctctctctctct

SEQ ID NO: 399594 - DNA, 1043 bp, Cannabis indica
aacttattatgctcatatatatttttagtggcattgtcactaaaatcgttcaaattttagtcacatttttaaggattatatatatatcttgattagtttttgtggacacattattataattaatgatgattctttaaatattagtatggaagaaagtaagcatgtatatatatgataagatatatgtatggaccatttttgttttattatttatttaaataattacctacgagtttagaacattccaaggagagagcttagataactaagttatactaataatatactttgcaaaaaaaaaaaaaaagttatactgataatatgccattaaaattgtcgttttctttttctttttctgtaatgatatatatgttattgtcatttgaacattggtcttctattttacttttcaatattaaataaacttattagttattatccaaatatggcatgacatataaatggttagcaatttttagaactattaaagtacaaaaataaatgacactaatattaaattacacaatgaatgtgctagtcactgtgaaaattaaacattttctctaataattataataataattgtgtgttatatactagaccattatttccaatggagggataaatttgtgtgctaaaattagtttaaatgagtaaattttatatttagtttaaattttataattatattaataataaaataaattttgttttaatagaaagtagtaaaaaagttaacaaattaaaaacatttaatttttaattaaaagtgtataaaaactatattaaatatataaataataatataaaaaaagttatgggtgtttttacgtacgatgcacacccttaaaaaagaataccaatgcactttttatctgttttgataataaaaaaaatgaatctaattttttttcatggtcgtgtacgttataattatttaagatatcttacaaaattttaaataatttacaatatagaaaatagtgttcaaacagtctatttcacacgcgtataaaataaaaaagtcacgcgtgtaacaaact

SEQ ID NO: 399595 - DNA, 996 bp, Cannabis indica
tttcttcctatgattttaaattttataactaaattctgataattaactcctacgaaagtagaaccggtaaaacgggtcagacacgataacacgactcgaaacccgcacgagagttagtgggtttaggtttgccttaaatgggttcaggtcctacgtgttcgggttaactcgtctaacccgtttaataaacgggtcatgttcgggttgacacgactgatacgaaactgacccgttaatgacctatttaaagttattttattactttaacatgtcataaatgtgttataaacgtgttattggttgacatgtttaaacaaaatatgcatataaacgagttacacggattgtgtcgtgtcaacccatttataaaagggttgtgtttgggtttcattttctgacacgattattaaacggatcgtgttcgagtcaagcatatatctgttattcatataagtctcgatacgacacgaacacgacccgtaaacacaaattaccaccgataaatacaactagttgaattaaattattattaaatgcattgatattatcaaaatcatgataatgaatatacgaggacagacaagataagggaccaacatcatgatcttttcagaaaacacaaacaaaaaaaaatcataattggtgtgtggtgtctggtgatgtcatatatatataggttattatttattataaattaatttttataggatttatttttgaataaatttatagtacattttttaaaagtcctagataatggcatgattacgataatatttagaattagaataaattaatagagaaatataataaaataaataaaaaataattaaaattaatatttttaatatatatgttatttactaaaattctttaaaaataaaataataatgatttattttgtttactttattaaaaaacataatctgaatgcttaaattaactaaattaccattttaagttaaactatggtatatagtaattattttgtataga

SEQ ID NO: 399596 - DNA, 712 bp, Cannabis indica
aaataaaatattaaagtcatgtctaggatctcgtaaaagtattctcaaaatattacaagttatttcatacaagccgacctaagtgactaaatagaatttttatacaatattttttttttgaatgggagcattatgatagttttcagaatctacaatctagaactaagtcaacccccactacaagaaaaataattaatagttgcaaatttattagcagcgggctaattttgtcactaatgatggggcagtagcgacaaaaaacataatccaccgttaatgttggttgatttttttttttttaaaaaaaacaataagaaaggttattgcaagaaaaaagttaatagttgcagatttattagtgacaggccaattccgccactaataattggagtgttagtggcgggaaacatggtccaccgctaatattacttgatttaaaaaaataataagaaaggttattagtggcgggcctgttactattgtctgccgttaataattaggtgaaaaaattctctctcatttgatttgaattttttattagcgacagacattagcagcgagctcttctaaaaaaattgaaaaaatatcgtaatattattagcggcagcattaacgcgaactctgacgctaataatgtcatataagtaaaaaaaaccttaatttttctattttttcttcatctctttctctctttcttctaaaaaaaatatat

SEQ ID NO: 399597 - DNA, 594 bp, Cannabis indica
ggatgacactagtgatagcctataatgatatgttcaagaaagaaattttaaaataaaactaagaaagttaatctgagcattcatatggataataataacttatcagaattaaggataagataggaaattttgcaaagtctgttcgaaagactcaagcataattcatgttccatatgaaatgttttatggtatctaaagtgattacttaatcttaagcaagtattttacattaatgttaatactagaatgctatgttgatgacttagtctagaaggaacttaatgttttcagtttaagataaaatgtcacaacaagatattcctaagtatcaatagtgagaggttaaatacatacttctgcatgcatttaaccagactcctactgttgagtgggagtcatctaagatataatcatacaaggaacattgggagacaatcaggaaaacatttctaaaagtgaccagtatgttaggtgtatattagaatccttgtatctacactaagtcagaactcagagatggtggttactctaggggtggagggaattattttagaagagtgtaaaaaacccatatataataatttagttccacca

SEQ ID NO: 399598 - DNA, 652 bp, Cannabis indica
taagatcgctcacaatatctatgccctcggggatcacttgtgaggatcgcccatggcgggctatagggttcccttagtttggattggtcagaagatcctcagccttggaatccatcattttcggctcaagttgaggcttgaagtctttgggaacaaatggaaaatggttggcacatctggttattataagtttggaaggatgaacttctgaacttagaatggacattctagcaggaaagagatgatccatcctgaaaatggatctcactaaaaagccagaggtttgtgaaaaatgacaagcttgagccgcccttttatacacaaagttcagtgacaagaaagctaaagatggagaaatctaatggttggaagatgggtagaatatgaagaggctattcataatgatcctcaaaactgtacaactaccagaatcaaaggatgcattttttccaaggaaggattttggcaaaaaggccctctgtaattattaaaaagctcttttaactaaaaaagaactttttaaggggaaattgttatacccaaaatttggatgccacgtcaatgaaggacacgtgtcaggataaagggaatgtgaatcaatgcgattgctcttatggaataacttattaattacataagagtcagagtatat

SEQ ID NO: 399599 - DNA, 556 bp, Cannabis indica
gtggtacaaaacttagtaattcctggaagtacaattatggctctaccaacacgagtacagggttggtactttagtgcatttggtacagtggtcgtacttcccttaagaacgttcttatccatttggtgagcttgattattgagctcagggcggcttaagcacaaagccagcatcacattacttatatatatgttttgcatatcttactgagtctgttgactcatcagtttgctaccttttgtaggtaaagggaaaacgaagctggaggaacagtgagatggagcttggaagtgattgtacatatcgcggcagtgcaacctagagggtttcgctcttttctattttgagtctgtattttgagttgcctgtatgcgaacttataagaaaaattatatatatgtgtataacctagtaaaatacttttaaaacatgttttaagcttcgggatcccgacccatataagtaaaaagttataatataatcaagttatcttttgagtttagaaatatttaaatacgggtgttacattctgttggaatttattttaccaggatct

SEQ ID NO: 399600 - DNA, 849 bp, Cannabis indica
aaaatttaatatttttaatatcacaaactaaatactatttgtttaaacaaatgagagagatgcaatactagattaccatagctaagtgaaccagtgcagtatatggaacatggttattgaattaaagtgccaatacaatgtgaaaattgttatgagaattgatttttttattgaaacaagtagcacttaatttctgatattaagaatattagttttaaaataaaaaaaaaatgtaatgtatttgagccctccacgtgttcatatttataagttaacggaagtggttgtaacaggtgtaagagaattgtaatattggatatttttgtctccaaaaataaagataaagtatttaagtgtataaaatttgaaattagtcactacaagaaaaggcatttttaccggcgcagttcgtcaaatgcgccggtaaaagttgtcgacgtaaagcaaaaactgaactctcaattgtatttatgctttacttttgccggcgcaataatgcgccggtattactatgttttgccggcgcgataatgactatgcgccggtaaaagtgaggaaatgaagcgccaacaggcacgaaaagtttgccgcctttcatttcatttattctggcgcttattaccggcgcagttcgtcaaatgcgccggtaaaagtctcaaaaaaagagaggaaaacttctcgcgtggatttccttggtaggtggggatacttttacctgcgcacatttgcgcaggcaaaagtattaaataaaacgagtggattttgatgtggcaagtggagatacttttaccggtgcaattgtgcgccggtaaaagttgtaaatgaaacgcacgttttgacttaggtcaa

SEQ ID NO: 399601 - DNA, 1092 bp, Cannabis indica
aatacctaacatacaatataaatattagttaagttcaactttatactcatagatatcaataataaaaaccaactaaaaaataaatttattcaatacgcattggtaatttattagtgtttaggaagataagaattaatattttaaatcttaaagtttttgttctttaatctcatgtagtcaaatgtatattaaataaattaatatatattttaaataaatatataaattaatatatattttaaataaatatataaattaatatatattttaaataaaatatattaaatatataaaattataaatataattgaatgaccgttggatgataattggatcggatgtcccatccaacaaccgatctcatccgattagattttaaaaatttacattcccaatctaattcaattatgattggatatccaattcaattgaattagatgggattaaatcgagcgattgtaattggccattaaatgactttctacacactcctccaacaaaatacatatagattgctagagcacatacttattgtaataataaaactagttgcatgcaaattttagttgagaagtattctcatatgtatttgaaaaatagttaattactaaatctattaattattaaataaattattctttatcatatgtattaaatctatataaaaaatatattgaaaaaaaaaattagttgactactagacaatatatattataagcatctggaatggtgtattattttactatattagtgtggaatcttcacactatttcactctaataacacactaaattataatgagatttgaaaaatattctcgcactataaaaaatcttacttttatcacaataaaatttgtgactaaaagtaaaatgttgtgactatttataaaacataatttttatgttgtgactaaaatgtgtgtggctaatgtattagtcacaaaaattataatttatcgtgactaacttgttgtgactaaaattaaattagtagtaacctatatttaaatactatacgttagtaacaacttgtatctaaatattatattttaataacaacttgtatataaaattaatttattggcagctg

SEQ ID NO: 399602 - DNA, 703 bp, Cannabis indica
attaatttttttttaaaataaaagtaaatttagatcattctattatgattattaagaaaataattagtaattttgcactccaaatttttaatattactcattttatttgacttgttaaaaaatttgtctgaatttttacatttatagaaatttggtcattctattaggttctattctattattctatttaaatgctaacgtgtctttgtaaattaacaattttgcccctaaaccttacactcaaaataaaaataagaaagattcaatatattttttttttttttttgtttaaatcttaaaaaaatctttttgagtgattaagaaaattaaaaaagaaagagtaaattatgatataaataattaaattcataagtttaactccggttgcaaataaatacttaaatttaatttttagcgataatagtacctaagtgttaagtaaattatcatatgataatttctgattggtccagattattaaattttattttaaaaatataatttaaaaatatcaattaaaaatgacatgtgtataatgacttgacatttacattaccttattttgattcaaggctttcatattcatagtgcttaataccacaataaagtgtcatcatataattgattagtcatttcttataatatttattaaagcaaaaataaatgctaattccgaactttgacatgtaataaatcgtgcccc

SEQ ID NO: 399603 - DNA, 674 bp, Cannabis indica
tgaaggggcgaaattgggacccaccgttcaggttgacacttggggctggtcccactgcctaggttaacatattgtcaacctgggctgctttcgatccaattcatcaaaaagtgtttcaggcattttttctgtcataaaaaataatgaagattcaagcaagctcgagaagaaaactgtaaaaccgagcccctagaaaagggcctagtgctgggcccatcgcctaggttaacaatcaacttgggacattgccttcaattactcaaatgtcaaatttgatgtgaccattaaattcagaatggtcaaaaacagggtaggagacattgtcctcaagttcaaaagccttcaaagtattaaaaacgagatctcgagagttagtacccagtgcccaagttaactaccaaactcttacatcatcaagagagagagctaatttgacaaagttatgagcaataacattcacatagtacaaaataaaaacttagatacattagtacttttacaaatcaaactaatattactcaaaaccgaatcataacttgtcatactaaaatccttcttactcaaaaactagcttcctcttttaataaattgtgtaataagttgtttgttttatttttaccaaacaaatttttgtttggagtttctacaccatatactgaaattttcaacttttt

SEQ ID NO: 399604 - DNA, 727 bp, Cannabis indica
ctaacagttatttctctacatataactattaagatacaagtaattatcgaccggtgacaaaaaaatactgacaaatagtttcctacatatacaaattcacattttacattttttagttgcaattaagttgcacgttagttggcttgcaacagatataactgttgcattacagcttcaacagcaatccacgatccatgcttcttgggattgaaacctttgtttgatgcaactttcagtcaaccacccaacaatcttgtctgattcaaccttcaatcaaccacccaataacttttgtatgattgaaaccttcgtctaatgcaaccttcagccaaccacctaactatattcgtctgattttataagtgatagtgtgtaagaaatattttagtaattaaaaataaaagtataaatgttgtccacaccttatgtaagtatttttgtaaataaagtgtcaatttatattttccatgtaataattcttaatatcttattatacaattaaaaatacgttttattttttagttctaatgtggtatctctgcatatccttaggatagacaatgaactcttatagatggaagaaaattctcatctggttgcgtaactttgttacttttattattttaactgtgtcggtttctctaaaaaaaaaatattgaaaaatgcatttatttatttattaaaaatatttttattgcgatgtacaatttttttttttaattaaagt

SEQ ID NO: 399605 - DNA, 1029 bp, Cannabis indica
gagagtaaaaaaaaattacaactaaatttgttactcatattaataaaaaaaaataatatatttagaagatattaaaatttgataaatatgacttaattttttatttttttttaattttatattaattaaagtcggagttcctttcttcccattttataagtttctatttgtatattttttaagttatatatatatttttttatttctatattaattaaagactggaggtttcttttctcatattttataattttcgaattatcttttctttaatttataatgtttttaacctatattaattaaaagttagaggttcccttcctctcattttataattttctttttccccttttttaatttattattttttaatctacataattaaagtcagaggtttctttcctcctattttctatttttttatttattctttttttatttctaatattttgttctatattaattatatttataaataaaaaaaaaccacttcaaagtactaattaggtatggtaaataattccctaataactaaactcttttatagaacataaatatcataactaacttaccatttatttatttattttaaaatatatataatttcgaaagtcatatatatgactaacaaaataataatattctttttcaaaaaaaaaaaaaaaaaaaaaacaaagtaacaatatttgtaattaatcttttaattaaaatatatatgtaaggaagcacgtgtcgttttaaaaatatattttaataattaataaatttttatattgaaatttgaattctaatttaatttattatattgttaaacactaagaataatatatatttataataaataaattgattaaaaacatagtaaattaattactcacattattaaaataaaaaatattaaaatttgaactttcatatatttttatgatttaagtattactaaataaaatataactgcacgagaagcgtgatttgtttcttaattataaataagaaacttaattagttatacattttctaagttccgta

SEQ ID NO: 399606 - DNA, 633 bp, Cannabis indica
agctcaacgccatatgattactcaaggaactatgatatgattaccagactgccgaatagctccatatcttatgatagttttgctgatgccacttcagagaaggaatccgtaagagatttacttttcttttattacaaaaaatcttttaaaaattttctctgttagtcaatgtagatagtgagttttgtgttggtgtcttaattatcagggtaatgagtattttaagcaaaagaagtttaaggaagttattgactgttatctagaactagaagcattgcattatctcaaacaacagtaacttatgcaaacagggctatgacgaatctgaaggtcaaaaggcaagtttattacaagcactgctgtattgtttggcacagttagattattaaaagatttttgaaccaaatgttgtataagcattttaattcagaaagtgatttagttgtttgtgtagcagttatcgtgcttacttattacccaacaaaaatgtgacattttgccaattgcttttggagtaagtttcctttgtcttccaatacttgactgataattcaattttgttctttagattctaggatgctgaggatgactgcacagaggccttgaatatggatgatcgttacattaaagata

SEQ ID NO: 399607 - DNA, 666 bp, Cannabis indica
ccacagttgacaccattgttgcagcactcaacaggcagtttgctcttaaggatctaggctctctggcatattttctttggtattgaagtgacacaaacagatgctagtcttcacctgtctcaagcaaagtatgcaaaagaccttctagcaaaggctcaaatgagcaatgctaagcctgctccactccaatgacaagtggtattcatttattagcttaccagggaaacccttggaagatgtccaattgtataagtcaattgttggagtcttacaatatctgaccattacaagacctgaactttcctttagtgtaaacaaggtctgccagttcatgcaaaaacctttgtctacacattggccagcagtcaaacgaatactcatatatgtgagtggtacaacagatcatgggttgcacttgcaaaaactaggaactttgaatcttgtggcctattgtgatgcagattgggcctcagatccagatgatagaaggtcaactacagagtttgctattgtttttggctcaaatctaattgcttggaaaagtaaaaaaactacaaactatctctagatccaacactgaggctgaatatagaagtgttgctagtgttacaacaggattgacctggttacaatacttgttttctgaactctagatacaactatctc

SEQ ID NO: 399608 - DNA, 82 bp, Cannabis indica
ggaatctatagcttctatctggcaaatagtaagcaaaggatgatctccttcgagcttgaccaaacgaacataaatggtggag

SEQ ID NO: 399609 - DNA, 626 bp, Cannabis indica
atcaattgcaagatatgaaatatgtttggtacgagaacaaatagtaataagttctctttagttcaaaagtactttttattacacattaattaaatataatttcaaaataattttaattaataaatattttcttttataataaaagtattaaatatataacctcacataacttatcaaaattaaagtacttaatgcacataatagggatatgacctatataaaattaggcataaattaaaaaatagtaaaataagagtaaaaataaaaaataagtataaatataaagtgtaatttcgtcataataagagtcgagaatttgaaatataccggagagttcaacgtttgatcataaattatgtgctatttgtctagctgttttaaaattttaaggtatgtctaatataatagaagtcattttagttaatttttgggcttgaggagcctttattgataagcccaaaaaaaaaaacaattgctattatatatatgtcaaaattttaaaacatatctagaaaaataccacttgattttacagctagatttgttcttggtcatctgtatgatcaatttgataactacatcaaatttaaatactaaatgttaggttataattagcctatgtttcg

SEQ ID NO: 399610 - DNA, 861 bp, Cannabis indica
actaggggatatagtacatggattagtgcaaaatttacacaaaccgaataacacataacatcagcaaaatgaaaaatgaagaatattaataacaaattaagataacaagtcacaccaccgcaaaagcaacgttcatacatcaaagcgtcataaaattcaaaacgggcatcactaagaggatgtcggcacatcaaaaggatcgttaagcatacatacttaatgccacaatggcgatgttcatgctttaaacaaaagagccctaaagtttaaatcgattgtcacttgtaaacaaaagggagaacttaaaggacccactatggagcaatggtaccatcttcagcaatggagaacatcacatcgtcaatgccactcccgccaaaaatagaagtatgagcgtcgacatccataccagggacaaaggtatgagcatcggcgctctcaccaaacatagagatatgagcgtcaacatccatctcattctcttgctcaagagccaaatattcttcatgaagtgcaataacaccatcgacgtcccatccacgatggagccctttcttgagtgaaatatcattaacctcctggtacaatgcgacatacttagcctcctcctccttgagtttggcacgcacacgctccaactcaatattcaacgaggaataatcctatttgagcttgtgatatgatgatttggtagtctctccttccaatttcaagttctccacttccttgataagtctagaatgctccttgttcaaagctctgttcttttgatcaagcgaaattgtgtcacacctcaagtagatgactgcttgaatagcctacaaaaaacaagttgaattaccacgagtaacacacaaaaat

SEQ ID NO: 399611 - DNA, 932 bp, Cannabis indica
aagtcaaaatctccataactattataatgcacgaaactcctatataaaatcatttgttctaagcttaaaataaaattaaaccataccttaggcttcccttctctaaagatttgctatctcactactatcggagcttagattgctaggttttggattaaaattgaagaaaataaataaaaggggaaaaagttttcgtcgagggaggaggagagtttcattcgtactgttataaacttataatatatatatattaagtttaatatatatataaataatattataataataataatattgataaaataatatgaataaaaattttattataaatagttatcctatcattttttagtcactaaaaaacctttacttctagggtatttgccaattttgagtatcccaaaataccttaatatttctaaaatcgacttacctcaataatcccattcatatttctaactaataccgttgtgaaatttttggtctccaatcgggtctccaggatcgccaaatctaaaaatatttttattttacaaataacttacattatatccacatattttagaaaaatctctataattaacaaattacgcttatttatctacttatcatgtcttcagggtcactgaacctaaaaatctttttattgcacatagagctcatattagattcacacatgctatataaatctccgtaatttataaattacacttatttactcacttttagtaaatttaaattttatgctgaaatagattagtaggatcatattcccacttattacctgattaacccataatataaatataaacttaattatttaccattaggcttatcaagatattgcaaccatccctttgtcctcaaaatttttgtaaacaattcgggatattaccgccgtatttatggttctaactctcaaattgttgttt

SEQ ID NO: 399612 - DNA, 592 bp, Cannabis indica
gagagagagagagagagtgactaaccttcttcgtcggaaaccacggctttacccatcgtgttagggcaccaaatagtggaaaatggggagagaggttggggaggtagaactaggaaccagagattttcaggaaaagacgacgaagacgaatttctaaaaagcctgggtggaataagttgataggcgtgagtccttgttcgaaacgacgacggtccttgcgtctctcttgtgtcgtttatgaaatgttagccccacaaatattcttttgcaagttttttgcctcgcttttagccaacaacagcaagtcttgattgtaagcgataaatgatataatttagatatagtatgaaaagataaataaagaacacacgattcttaaagaggttcggccccgagcagtttggtaatagtctactccccttaattcgtatttccctcctttaaagctcttacaataaaatctctgggtatgctctcttagatctctcttcagtaattcttctgatcctttgtctagtgaaaatagatcactatttataaggctacatatttgagggaagctttccttttttcttacaatgtctataattgg

SEQ ID NO: 399613 - DNA, 774 bp, Cannabis indica
gttgtgaaaatacgataacaatgagttcagttgataaatgataatcattcattgttaaatccttaaaaaagttattatagtgcaggtttttaaagggaaaaaacagaaaaatacaaaaaataaaaaaggaaaaaaaattacaaaaatactttgggccggcccattaaacatttatacagtccacatacaaatatttacaaaaataccacatgcactaagccttcagctgtacagagcgaaccatgaaggtgaaaataccgcgatcgtttcaaaaccgcaaaacaaccaaaatgaaaccaaaacgataaaaatacaactattaattctggcgaaatcaactggaaaagaagacctgcaatgatctaaacagaaaatgacgaaaaaaaaatcagaaaaactgtgaagaaactgaaattacacatttgttttctgttttattcgatcaaaataactccccctaatatcgaaatctatattcatgaaatgtagatctgtaacaaacagatctggagctcccaccaaatccaaaacaatgtatgatgtgaaaaatttaaaaaaaacctcatgaataatacatctacgttatatacagttgcattttgattgattactggtttccaatataaatatatttttttagaaacacaataagaagagtaaattcgaattaaggtacaaccagttacgtataagtctgtttattttttgttttggttgccttatagttgcattatcgttttatgatagtttatatattatgcaggaatttaattt

SEQ ID NO: 399614 - DNA, 691 bp, Cannabis indica
gggggcagtctccctcattctacacattgtagctaaggcaatgtatgcctttacacaatttgagagactttggttaacttgcttctgcagcctgtcgatgctctcctcacgaaggtcactggcgcgacaggctcctatgtagagaagggtctggttgtcacatttaaccgcttaggcatctgctctcttattctcctttttcacttcatcttctaggctctgaatgtataagcctttctggcccgtgtcctcttgaggattgctgacctgttatttaggatagtgatggtctcagacttttccatcacgcgagcctcagcaacgtccttctcctttacgactttggttaagttttctcatagagagcgtgaatacttcttagcttcttatgctgactttgcagcctcatgctcaatttagtcgttgagggttaaatacttcttcaggtatttggcatcccacttctcctcctcggttgccaacttggcttcccactcttcttgaggcatatggttgctggagtctatctgagccttagcctgctcagctgtcacgacccgagccctaggctgtggcagatgtgtaatatccataacttgggtggtcaaaggtcacactttgacccttgtaggaaaataaagcttataaatgatccttttatttatattacaaaatactaatttaaaagaat

SEQ ID NO: 399615 - DNA, 947 bp, Cannabis indica
gggtaagtgttattccttgtgaactgtggtttgagccagattattattttttgttgctctacttgaccttttttctttatctccacaggaataggcatagtcttgtgagcgactctaaaggtcctcctcaagctgacaaagaattccaaaggaaggttggcatggttacagatgtacccaggagaaaagttggcatggtttctatcaaagaatccagccaacccaaggtctggaccagaggacttttgtgccagcccctttctgatatagaggagtttcctgaagctgggaaagaggcctcggcttcaggaaatgggatcttctgaggatgaggagaatgaggtatgtgcaaagatcaaggctctctacatgtagccggtctttctcgagctatgtgtagtcggtctttctccgagctacgtgcaaacggtgtttctcaaactatatgaagacagtctttctcgagttttccgacttctcctctcatcctttttttaggaagatgatttaatggtttgcccctagtggcttttttgtaaagacaagtttataatcccacttaggttttttcttatctcaaatgccttttactactttcatccgaacttaatacaattgcatttgcttgcatgtttattcacaatgtaaacaatcatattttgatcaaatgtacagtacttttggattttttcattgctcgtaatcttcctatttaagtagttagtaatctactaaaattttcaattttcgagcagttatcaattttgcctcgctatagcagttacaatctgccttaagcaaacttaaatatacttgaatgattttgtatatttttaatttgctcgtatgaatagttatattatctattcattttctaggttcaagtacttttatcaaggcgtcgtgattcctcgtttaatactttcctagctcgtgagaaccgttag

SEQ ID NO: 399616 - DNA, 1081 bp, Cannabis indica
tatttgcattctagtgtccagggcataaagaatgtataaatgaagtgaattttttaggtgttgtgaagcatccaaatcttgtgaagctagttggatattgtgcggaagatgatgaaagaaggattcagagacttttggtctacgagctcatttattttctttctctttgtacgttggtatttttattcttcaatgtttcacctttatctcgcttccatcgagacaacctgttcaacaacacaattacatatccaaatgagacatgtcggaatcaaggtgcctcgatcttctgcccaaatgtctcactccatttctgaccgccatttgtttccgtaactgtgcgcattcatgaatgagccacatttgtggtatggaaccattgttgaagctctacaaattagagcaaattttggtagataaggttaaggggtgtattgttcctttagctttttaataaacttgcattcttgtagagatcttggtaaatgtttttcttgatatgattttctctaggaattgattcgtcatggagacttgcctaataatatgttagtttctttggtttacatggagacttgcctaataatatgttagtttctttggtttacagggagacttgctttacatgagacctacctagtaatatagtgagagttttctatttattgtaaatttgtattaattaaattttcttcagtagaaaagttaggttgcaaaagtctataatatttttagtgaaaataaaaacaaatattataaaaaatagaaacaactagtattgtcatttatatgtgtgtgatattgaagcgcaagattatatcaaaagtattgaggaaattatgtcaaaagctcaacattctccttttggcactatatgattattagtgaattaattggtagccatgactatcattatggtcatcttggtctattagaactcatacgtagtttttgttattgtcaggtttacgattacattttttttggcttttaaattttaatttatataaatgttacgtgcaagatacatatgcatagttttattttaagttatgtatattttaatttataaatgttatat

SEQ ID NO: 399617 - DNA, 745 bp, Cannabis indica
ttctgggggatttcaaatggaagcggaggcgggagtagctggtaagggagggaaattaaggaaacaactcttgataatggattctaagaagagtgttgttggtgttgagtactcttgtattgtgtctgtgtgtatatatatacatatatacagctgtatacccttgtaagttgtaaaggagggaaacgaaataaggaaatactgatgatgaattcaaatatacaagtcaactgaaaagaagcattgtattttttttaccgttataagttgtctgtctgtatggaaagaaatcacctgtccccaatttcctatcccattcctgtccctccaataattaattgccacctatttttttttctacatcatttgctcactttttgctaaacgttttctctgttagttagttgcgtttattttttaatcttctcactcacaactttttcttcattaattacaatattttatggttttaaaaaaatatttacaatatatcttcacaaaattcaaaatcttttcaacttcccttatttatattgaggggttttttctattttaggttaaaattaatcaaaataaacatttataccatcctaaggaaaaataaacatttatacttttactaattacaaaaataacatttataaagtttctttattacaaaaatacaatggagaaataaaaccaagtgtaaaaggagagagtgagatacacatgtgaataggataggagagtgagactcacacgc

SEQ ID NO: 399618 - DNA, 696 bp, Cannabis indica
ccgacctagaagatgtacacaggagaaaagaatcccttgtcacatcttaaatattttgaaatgtaaatagattttctaagggtacggggtgatgtgcggtgtagggtattccctaccatactttcagaagccgcccaatagtggtatttcaagttaccactaggaagatttaattcatggaaagctttttcctcagagttccatgcgcagttctcctcttctagccaactcccattacatttagaagacctggttgaagtgaaacaaagaccaggagagccccttagaccctacacaagtaggttcatgatagaagatacaaaagtagcaagattaactaaagaggggagactggccgccatactgggaggcatcgaggtactcggagaactgtggaaggaaggatattaaaaagagtggcatcgtaggatctatggtataatttctagaccgagcagatgggtttatcaagctcaaataggccattcaggagtatatgtcgaacctaggctgggccaaccacaagtgccctcagcaggagcacctgctcagagcccacaatatcctagcaactcaactctgagtggcaaaaggtccaataacaatggcaggcaaggcaatgggaagaagggaaagttcacaggtaaagccgaacacacccctaaagaaaatgcctccaaattcactgccttctct

SEQ ID NO: 399619 - DNA, 779 bp, Cannabis indica
ttgtaaaattctttgaaatgtacatatctaacgttctttcttgtcttatatttttcggccatttcagctaacgaaatagctagtaattttggatgtctgtcaatttcgtaatagtactgcatttgacaaaaaaaatattatgataacatactaataatttcatttattaatttaaatataaattccaaataatttacccgaattttggatagaatgaggtgttcatactgctctgggacacttgcccaattgggataatgtccaggaacatgcaatgtaacctctccccctacaaaacgaggaaatgttttactctccaaccctacaattctgttagagacgttgtcaaactctaaaggcaacgacaccccagcttttttccttctttcttccaacttaaccaaaacattcctcccacgacctttcctaaattcaccagtacgatgccaaactatctccttggctatacgtcttgaactatataatcttttcaatcgatgagtcaatggaaagtaacgcatcaccttatgcgctactttttttccccttgtgttctcatcattaacccatctactggtcccacacactgggcagaaatctttcaatgcatgctcattgtaaaataagcaacgtcatgaattgattcgtaccctaggcctaatttacctgatttcttctttgcctcatagtgtgttgcaggaattttgttatctttcggaaatgcaaatttaagcaatttcaacaattcatcaaaaatataatttggtattttccccaaa

SEQ ID NO: 399620 - DNA, 816 bp, Cannabis indica
ttttagttcttggaaagcattctctcatccttctgtccattcaaactttttattaccttggaggatgttaaagaagggaacacacttgtctgtcgattttgaaacaaatctgctgagtccggctggccgaccagttaagctttgaacttctttcgtttttgttggcgacttcatatctaggagggcttgtattttttctagattgacttctattcctctagcattaacaattaataagaaacttacccgagctgaccttgaaggaaaactttaagggattgagattcatgttgtactttctgagaattttgaagcattcatccagattctctatatgcccccaacctttttggatttgacgagcatgtcatccacatatactttcatattttgtccaatttggtttttaaaaaattttgttgactaacctctgataggtggctctagcattctttagactgaacgacactactttataacagtatagacccaaatttatttgtaaacttgtatgttcttggtcaggtggatgcattatgatttggttatacctcaaataggcatccataaagcttaagatttcatgtccaactattgcatccacaagctgatcaattcttggaagtgggaaacagtccttgggacatgcctttttgaggtcggtgaatcgatacatactcgccattttttatttggcttggccattagtactgggttagccacccaagtgttggaatatattttacaaggatctagatttactaacaagtatgtttttaacaacctaaatatgaatttctaaaacaatgaaaataa

SEQ ID NO: 399621 - DNA, 550 bp, Cannabis indica
agagtaaaataatattttaaccaactctaatcatgaactaataattagagagtgaactacttatattaattatatcaatggactataagtaagaattctgtaaatataattctatactgtcaaagagtggaattccatatttatagtggagtaataatagaattaataaaccagatcattctattgatgagattaataataatcttagatttattggagctttgaaatataggtccatgatcttcaagtcacctctatacaacactgtacaggaaaaggttttatttgatgaataaattttgagtgagaattaatttctatgggaaataaatttttaagggaaaataataatttgtaaaattattgttttgattaattatggcaattataaatcgtatacttaatggtatttaactatttagttttattagataaaactatattaaatagttaaatataatattattactaaataatattaaagagataaatatattttttaatccttgtgaaataagagattaatgagaattaatcaattataatttat

SEQ ID NO: 399622 - DNA, 535 bp, Cannabis indica
catgttgaagtctaaacttgcttgaaaaatgtcttgaaagacacgaagacgtgatcttcgatgaggaactcacaacgatgaaaagataacagaataaggatatagggttgggagtagggatgcacattttccttacggggatggtgccccgcggggacccgcccctaatggggcggggattccccgtctaaatggggaacggggcggggacggggatcaaattgtgtccccgaatgttaaacggggcggggacggggatgacactcctctccccgacagggacccgtttaatttattaattattttttattaatattttatattttataaatgtgtttgtattttttttagtatattaatatcatttttacaatttttgaagttgtgtttatgtataataattactacattgaatagtaaataatatgtaatattttatcttttatgtaatttaataattttatacatttaattttttaaaataattttttttttacaataggggattcctcgccccgtccccgccccattaggg

SEQ ID NO: 399623 - DNA, 651 bp, Cannabis indica
ttaaacaggaagattacgagcaacgaaaaaaaccaaaagtactgtacatttgatcaaaatatagttgtttacattgtgaataaaaatgcaagcaaacacaattttattaagttcgaatgaaaatagtacaaggcatttaagattagaaaaaacccaagttgggttacaaacttgtctttacaaaaatgccactaggggcaaaccattaagtcatcttcctaaggatgagaggagaagtcaataaactcgagaaagaccgactacacatagcttggagaaagaccagctacatgtagctcgagaaagaccgtctacacgtagagagtcttgatctcagcacagaactcattctcctcatcatcagatcccatttcctgaagtcgagacctctttcccagcctcaggatacttctcgatattagaaagaggctggtgcaaaggtcctctggtggaggccttgggttggctggattctctgataaaaaccacgccaacttccctcctggattcatccaaagtcgtgccaaccttcttccgagatccttataaaccagaggaggacctttaagatcgctcccaagatctatgtctattcctgtggagacgaagaaaaaaggtcaatggagctacaaaaaacatacaaaattaatg

SEQ ID NO: 399624 - DNA, 608 bp, Cannabis indica
gggacacaaacccacataataattgttgcctggaccgagaattaagatagggacctggcaaacagaacgaggaccgggacctagtacctgacccagacccgaacttgaacctaggacccaactcgtgacacggcaccagaaatggaactagactacggcctgatattgggatccagatctggacccaaggctttgataaaacctgtagtcagtgtctggatttgagacccagcccaagacacgaacactgacaaggacccgaacccacactcggacatgaacccagtctcaaacccaaaagtggacccgaacccgtaccctgagacccaaaattggaacaaaaaacggaagttgaccgggactgaaactaggacttggacttggaatcataattgaaattggacctagatccagaactgtaaccggaccaggacccggattccaaatcagacctagacccgaattgggagccggatccggatcccaacccaaacctggactcgggaccccaaccggaacctgaactcaaacctaaacatggaaccagactagggacaaagaaccagggtcaggacctagaaccgcaccccaatctcgatcccgaaccc

SEQ ID NO: 399625 - DNA, 823 bp, Cannabis indica
cattgctccgccttaagtggatctgcaccaccctcaaacacaggcagtcactgctttctgaaccacttatgcgaaggctccagacaatttctcgcatcttgtggcactaccagaagtgccagaggatcaaaattgagacttggagaaggcttagcttgctactccctcaatttttgaatataatcaccttgttgtcggatggcctcctgcatcacgtcatacatctctttcaagtttggtggtggtggaggattcacaccttcaccatcaacctcgagccctaaaagctcacgataacctcaattagatcacctcgggcgcatattctactacactcgcgaccaaaactttccatcattagaatctttcaaataaaataaatgctaataagcattgccatacatgcgcatacatatttaacaatctttataaaaacttatcatacttcctaataactttcaaatttcaaacaagcaggtaatcagataattaacaaataattcaacatcacttattgaaccatgagtcgaaggagtcttgtagataatatacatatcaaaccagtcttcaagatctttaaaccttggtcgctctaataccatgttgtaacaccctgtctcacaggaatgtcacgtgttcatgcttttacaaataaattttataattaatctaatctggttaagaaaagtgtggtttagtaaaattttttagattaaactactgttggaattattttaccgggatcatagatctactcataagtatactgtttaacatcctaaatatgaacttctaaataattataaataaacacatataaagt

SEQ ID NO: 399626 - DNA, 607 bp, Cannabis indica
cgataagatgttagggcaaaaatagacgaagaaagactatatttttttcgataaatttaattacactaaacataatatttatttaattaacataattttattatggagttaagtgtgatacaagctccacaaataatatttttaattgataattacatatcgaaatagtaaaaaaaatctcacaaaatttttattattttaactaggagtaattataatttttgctttaagtatgttaaataatttttttattacagctataggttattttctaaaataaatatgtatatttaggaaaagaaaagtaaatactattttagattttgtgttttgtaaaagttatttattggaccttctgttttgtaaaatgataaatataatcctgtattttttaaaatagtattaaatagtaccctgaattgatttttatcaaaataaaacttaataataagttgatctaaatgtgttattacaaatttagttacgttttctgtatctatttatgctaagaatagtcttcaagttgctatactaaaaaaaaattgtctaaaattgagtttaaggttcatttgtataattttaaaaaatataagatctattttatcat

SEQ ID NO: 399627 - DNA, 522 bp, Cannabis indica
ttaaataaaactaacatttacgtaactcggcgtgtaacttccttctaatatacatagatggcttaattaaattcaaaaacaaattaataaaataataaagccaacaaaaccaaaacgtctgatggcttaattagaattaaaaaaaatcaataaaaaataaagccaacaaacctaatacgtgtgatgataaatttgaagaaatgatttttagaaaataaaataaaaaagaaattgagagaattaagaaaaaataaatagaagtatatattctatatcaataattaataaatatttatcaacttaataaaaaataagacaattaagaaaataaaagttatgatttttaaaaaataaaataaaaaagaaattgagataattaaggaaaaataaaagtatatattttatatcaatatcaataattaataaatatttatgaagctaataaaaaattaaaaaataaaaataaataatatcatttagagagattttagagtgtcatgtcaccgccttatatctcttctt

SEQ ID NO: 399628 - DNA, 544 bp, Cannabis indica
atgcttttagatgaaaccctaattactcacctaattttaaaaggaaaatttaaatttatatgtatatatttggtgtatattaaatttttgaatacaagcttattaaaattaaaaaaatagacatattttatattcatacccattatacttttctctcttgtcttctcttctatcttcactattcatgctctctattcttatctatattgatggtggtccgataagagtctgatagtggtccgatggtagcctgatactactttttttttttaatgttttggtacataaaaaaataacatcatgccaccatcggaccatattttactttatagatgttaagctacattcattaagctcgtcaggaaggtatcgggccactattagactactatcggactaccatcggaccatatcatcaggctaccatcgaaccaccatcggacattcgtcttcaacctttactcatttttactataagaaggcatcaaactaccattggatcaccatcggacctgacaaaaaaactagttttttgcccaaaact

SEQ ID NO: 399629 - DNA, 428 bp, Cannabis indica
cccttagaaatatcctccccactgtcattccacaaccagttgaagaatccagaactaaacccaccaggtcccaaactcttacaagagtgaattttttaagaacttttgctcacattattttgtgttaatttcaatgcttattttatttatatttttaagaatatgagttgaaagaaaaaaattataaaaaactaatataattaaagggaggagatttcaatggttacattaaatatgtaaccatcatggttatattttttttagctatatgattactattaaatgattatgattaatttgaaaattaaataaaaataaataataattaacttataacttgatagtcacctaataatttaatttttttctaaaactttaattaaattaattataattattaattaatttattactaaataaggatcttt

SEQ ID NO: 399630 - DNA, 739 bp, Cannabis indica
tgaaccataggcccaagaatgatgtaatgttattattgaataattggacttccatccaaagttgatcacgtggtggccttttagaatgtacttgggccaaaattttgagatggaaatcaaataggccttaaaccataatcctttgcttccatgattttatcatttttactctaaatctgaaaaatggcataaaattaaaataaattaaataatttcaatcaaaataattttacaattaaaactataaaaaaaatctaattaaattaattttatgcctataattaaagacttaaaatgtacaaatttgagctttaatcatcatggtatagagaagtggatgctggttcacaatttctacaacgggctgattggtaacactagaactcttatagatgcagcagctggtggagcatttatgagaaagagtgcaaatgaggcttacgatctgttggacgagatggctctaaacaatcagcaatggccaactgaaagaagtcaaactaagaaagtcgctggtgtgctgaaggttgatgccattacaaagctgacagctcaggttgaggctttaacaaagctaatcgcaaggcaagctaaacaagcccaagttgtttgtgagatatgtggaggtccccatcacttttctgagtgtcaggcagatgtgaataatttgccaatggatcaagcaaaagccattgggaactactcccaaaataataattatgggcacaaccaacagggg

SEQ ID NO: 399631 - DNA, 493 bp, Cannabis indica
agtaatataggtaaacatcatacccacatttattgatgaaaaatgcggatgtgaaaaaattgttgtccccatattaatattactgactgtcacaacttaaagaaattgttcacttgaataaagtattaggacacttggcattgaggaattggtatatataataattaatgttttatttataaatgtgtaaagaacatgatgccaaaggtaagcaatcacatgttgcttggtttttcataaacaagggaacttatccctttaagctgagccagtcactcactcactcactcactcacactcactccccaccctctgtagtacaatgtggggtcactcccttaaggatcatccaagttcaaattgcacaataggtcccacaaatagtaaaaatccacactaattatgggcttttggccccccactgaaaatggtatgggatgagagagagagagagagagagagagagagagagagagagagagagagacgaaca

SEQ ID NO: 399632 - DNA, 508 bp, Cannabis indica
aataaaatatgatggaagaaccacgttactataaaaattatattttgagaaatatcattaacgaattatatactataaaaggtacaacttagtagtgtaaaaaaaaatagagacaaaaatactaattattatttattttttgaattggcaatagaattggttgaagaataagaataagagtaactattttgtaactattttatatttgttcgctaaatatgatttgtttcacaatgaaagaaaaagaggattttacacttaaaaagttttttaaaattttattacaaaaatatgatacttttagatttgaccactttttatagtatattttagtttttaaattattttatggtatttttttataccatatatgtgtaaacttaaattttaaaagggtagatactattttggactctgtattttgtaataattaccaattagaccttttgttttgttaaatgacaaaatagaccctatatttttcgaaatggtataaataggaccctga

SEQ ID NO: 399633 - DNA, 1413 bp, Cannabis indica
attattgcaaacagaattaaaccaatacttcctaccatcattttccctacccaagctgcctttgtgcctggaagaaacatccaggacaataatgtaattgtgcaggagataatccactcgtttaatagaaagaaaggcaaggaggatctttttgctattaagattgatctggtcaaagcatatgatcggctgagctggagatttattgaccatgtgctctcttgttatgggatccctcaacagttttataggtggatctctcagtgcctttccaccactactctcaatatctgtctgaatggaggcagggttgggtcgatcaagccttcctgtggtcttcgccaaggagatcctctctccccctatctctttatttgggcggccgaagttctttctaggttgcttgtggatgctctggacaagggagagattcttggaataaggcttagcaggggcggcccggttctctctcacatcatttgcggatgacttaatccttgtgggtggagccaatgtgagggaggctaaaggtgtttggcgctgtcttcagcaattttgtgcttggttgggtcaacaagttaataggcttaaaacaacaatcttcttcagcaaaaacatcccccagagcatgaaaagagggattaaggaaactttgggtattggttctctagtaggctttattaaatacttggggcttctgttgttttgatcaaggcaaaaggatgctgactttaacttcattattgaaaacctcacttccaagttacaaggtggaaagcgacaaccctatttaaggcagggtgtgctaccctgatcaaattagtgggcctttcgatggcgatgtacgctatgcaaaccaccaaattatctaaccgtctggttagtaagattgatggaatggtgcgggacttctgatgggggtttgataaagggaaccatggaatgcacttaagagcttgggataagcttcgtcttccaaaatcccatgggggccctggattcaggaagacgagagaaatgaaccttgcctttctacctaaatggggatggaacttattgaatgggtgcaactctttgtgctgtcatattttggaagcaaaatatctgaaagggaaggatttccttaatcataaattcaagagttcagattcgtggttttagaataatgtggttcgagcaaattttattttaaggaagggcgcctgtagactagttgctgatggtcaagatacttgtatttggagggacccttgggtacctcatggcaaagattttctcccgaaacctataggttcctatggtaatgttgatgctactaaggtggccaatcttttacttcctaacggggtttgggacattcgtaaacttaacgttctctttgatcaagaaacggttgctgctattttaaaaggg

SEQ ID NO: 399634 - DNA, 563 bp, Cannabis indica
cttaatattcagataagacaatccaaatttttttaccaaactccgtaatataaatacaccaaaataaaacttatattttggctctgaaacatacaccatactatagagatcattgtaagcttcgaaacaatatataaaatatctaaaacggacattcgagtgaaaagttatgacaaaaatatgaattctgatctctagaatttctagaaatggcaagccgttttggtaaaatggccgaccgttttcttccacgaaaatttcaaatttcgcactctctgaaacactactaaaacctatccaaatcattctaaactttacaagacacatatataccattaggggtgttcactaagtatctgatccaatccaatcagcacgatccaatccaatccaatccgcaaaatggggatatccgcacttgcgcggattggattaaaaaattctaaaatccgcacttgtgcggattggatgttgtttaacctcaaaaagtaaccgatccaatccaatccacacttaattatatatattttaaaaaattataatatataacatatattaatttt

SEQ ID NO: 399635 - DNA, 884 bp, Cannabis indica
cactgttaaagattttaaactatattttatgtatggtgcagacaatttgtgtgaacacccccatgtcgtaccttttcctgctattgattttgtttactttgtataaataattaattttacattttcagtcacgagactcaaaaaatttcttaaaaattagtacgtgaagttagtaccctccctttcaaaaacaaaaataataataaaaaaagttaatacccttgaaagataataataaattggaatataagagaagtatcatgcaatgatcaatttagagaaagatgatggtcatgtaccatttgggtgacaaaacgtgtcaccttgtcgaattcgtatcatattttatatgatatgcttttatatttcgtgtcgacccattatttaattcgtagttaattttctcaaccctaacctgacccgtaaaaaatcgtgtcgacccactatgacccgtttaactattattaaaattgacattgtagaggaaaataataaatttaagttctattagaaagcttgtatacatttatgggtaaatagtattatatatataatttaaaaattaaaattttaaaatatttttaatttcatgttaaagaaattaaattaaaatttttttaacttaacattaaatcgctaaatatatatatttcgatataattgtattattattaataaatttttattttattatatttaaaaaaattgtgtcaattacgcgttaaatttgtgttaaacgaatcatgtcgtcagtagcggacccagaatttaattggagagtgggcgtaaatttatttcatatataaaaatattctaaaaaaataagtaaatataaataaaaacacaattcaatattttaattcccaactaaaaagatattaaat

SEQ ID NO: 399636 - DNA, 838 bp, Cannabis indica
atgttgataaggacttcaaatggatggagttggctggatggaactagttccaaaacagccaaatctgtcatccaacggaagctccccttgtcgctgtccacaacgccatcgtgggatgagcgttgttagatttgagggaccgaatacgggtgcgccaaaccctccaacaaaatcgggacgcaagatggattcctaacatttcagttccacttaattatgcctagtttcaattttgtaatggtagttggttgttcacttttactattggaaaattgtaatgttgaatactttattctaatcaagatgtgaaaaattgtaatgtggttcctacaaattaattagcaaatataaaagatttctttattctaataacgtatttctacgtatgtctttccaaccctaaaatcaattttcatttggaatagtactttcaatattgaacctcctacagccagagaaataaattatatgaaaatatgtttggaacgtatttcaatgtacgtcagaagctggatctcccatatctcaataagttcaagtttgaaaataacatgcatcaatatatgtgcagagtacttcacatcgtaaatacagtatggtggaattatgtttactcaatatttgaatataatgagataataagatttattttcaaatgtaaactataatttcagacatatttattcgtacaatactttattttaatacagtttaaaccatttcctatttaggagttgtactaattttggactactacccattcttaatagtccccgttcttaagttgttgggaattatttaaaaattgtccaataatgtaatcttcttaaccaagtat

SEQ ID NO: 399637 - DNA, 496 bp, Cannabis indica
accagcaatcataaaaattaatggaattttcaaaaatatatttttcccattaaaaaataaaaaataattaaaaattaactaacaaaaactataaataaatctataaatcaattttatataagaactataaaataaaacaactcaaaaacagttttctttaataaaaagtttattaattttactgaataagtatttttataaataaaaaaatttaaagtattaaaataatttttttccatgttaatgtattttttaatttttttaaattttttaatctattatataaatatttaaaaaaattaatggcatcaaaaggtactaaaacttaatccaatacatatttctaattagataaattattattattattatgtataaaaatgataaaatatgttatattattttataatatgataagtgtagattaaaatgtagtaatatatattattatgtgaataatatgtattagttatttggtaaataaattgtgtaacat

SEQ ID NO: 399638 - DNA, 909 bp, Cannabis indica
agatccggttgagagtaattgctagtataccttgtcttactcacagatcgcgtcctactcatagactttgtcttcgagtggctcgcggatttactggttcccatactttctagatcattacctcgttgagtacttcctcctcttcgagttaatcgactatgggttccgcctcgaagtcacacttgcttcttcacgctctgctctttcctcccgagagcggtttattgtatttcccccatcagggtctgtacgagtcctcactttatgggtttgggaagaacgttggtgatttctagcaggtgacctccgttccctcgattgagtcccaagatcctcctcattctcatgagggatttctcgttcatcagttttcggttgcctcccatttggctgttcgttctgattttcagggggtgtctcatttccctgggttgttcttcgcgggccttgtcctgtgtcctggttcgtgagccacgagatctaccttgtggtgttctcactccaggttcaggttgatttggagcattcgtcccctgtgccaccctggctgaggctgcatcacgctctaactctgcgtttcgccgctgcgcctcttccagacggcacctcaggcggcgatttttcgtttcataagttccttctccaacagattgggtacctccacgattgtgctcttcatccctcgtcctagggttctaaccattcccacgctgagttctcctcgagcgtgttgtccgcgtactaggaccaacgttgggtcgagttctctgggaacttgtggtccgcgcactagggccaccctcaggttgagccttcctggaacgggtggtccttctagactgcgggttggtagatcttctagagcccatgggctctttcccagaacggtaattagtttcctcatgtggg

SEQ ID NO: 399639 - DNA, 1053 bp, Cannabis indica
ttttaaaaatatgaagatactaaatagtttataagataatattatttcatatatatttttgttacttattttatattctagcaggttaattataattataattataattataaatggttatatactaatcaaaatacacttatgttacttttttgtttgtttatttttatagtaacttttacgttacccttaaatatatttaaaatttaataagatacaataaaatacaaaaattactaaatagcttatattagcaaaataaatatatttttttaatatacatataattattgtatgatgttattaaaataagtttatatagaatatatacctaccatacagtaacttttatatatataattataaaataatttttagtaatatgaaattaaatgacatattggattttgtttaagttattggttacttctttttttcattaataaaatataaaaaagactataaggttacttttaattctaaaaatttaatctggaaaaaaaattctatagttctcatatatctaaagaattatctcgaaaaaatagatcataatagtatcactcttgagctccaacaaatagcagtataacttaaattttatttttcttaagttttccttataagttattttcaaaatctatcaaaattattctataaaagagataatacaatttagtaactaaaacgttacctacttaatattggtctgaaaaatatatacttcccacacattaaaatgaccacttttaagagtagatcataatgcttcaatttttaagcacaaataattattggtgtagctgaaaaatattatagaaattgatcaatattacttcataaagtaaacttatgtagcatacaatttagtaacttttgaatataaaatagcaaatatttattttaataaccaatgaaattagttagtatattttattttgtttaaacttaaattctagttgttttttttggtcaattaagctaaaaaaaactaaaatgttattcttaattttgattatcttttttaataccagtaacgaaacatatgctttc

SEQ ID NO: 399640 - DNA, 1445 bp, Cannabis indica
agcgccgaacaagatccagccattcaggaggaggaggatcgtgaaggggacactgaggtccaggagaatgaggagcaggacgatgtccatcctagcagttcctccaaggcgaaggaagaggaggaggttgcacccccaaactatgggggattcaatggggccaaggagccagttgatgctgatggcgacgtcctagttaaggacgtggactacgctagtgaggaacttaatgctggatttcctcatagaaggcaaggtaatttgggtgcgaggtgggtgagtctgccgttaaaggttactgaggcacgcgtgcgggatctcaacaaggattgctacctgggcgaattggactgttacattcccacccacaataatcgcgccacaaaccaaaagggaaatgtgcgcctggtcggctactcatgcccaacgagggccattgttgcctttgcacccgtactttaggaatgtggcagacttccttcgcctctgtctgacccaatttactaccatgggcattaagtatttctccgccctcttcgttctctatgcgtcccagaaatgggatatgccttctccccatgaggtaagctagttttttgatttgaagtccaaccctaagcaaggcagatcggtgtaattctatttctctgaacaagacttcaagtggttgacgggcactggggataaggccgtgagcaagattgggcattttgctgacgagtacttcatggtggaaggcatgggcaccacccatactcgtttccatcagatccccacgtatcaccgccctcccttcactcttgctcttagagatagagctcaaaagcttgctcaactgccgggagatgaccgaaatatcatttagttgaccttcgaggacaactttgtgaagtacgggctctatccaaaggatttcattcctgagccagtgaaggagaggaagaggaaatctagtgctggacaggctgagagagctcatcagaaggatgaactcattcaacttaagtgtgaagctaagttgaagggaggtgcaagggccaaacagtatgctcatgagcccttgaatccttaaaatgaggctgaggaagagcaggtgactccgctaaaaaggaggaagaaacttccagcccaggccaggcccgttgaacatgccattcgaattagggagcccaattcatctgctcggccatcttctcccgtactaggaaaagggaaagctgccatggcggagataagggacttgtcaggtgatgatggagtcttgaatcttgctcggacaatcatttcgtaggatattccgtcttgtttttaaactttttgactatcatgctttatgattcttatgcgtttttcctctaaccatattgtttttgtttcgtgcaaacatgtctcagaagatgcttgatgttctgaagaagagagttggaggaagctcaagctcatct

SEQ ID NO: 399641 - DNA, 736 bp, Cannabis indica
aaaaatactgaattttaggtaaaggtttacatttataatgtcacacgacaaaaattatatttatattgtccttgctttttttttttcttttatattgtaaatactatcacataccatgtctctatcttccacacccacagagagaaccaccccaacaatacgagaacacccgaaaacaaccgaaaataaccattaattccgataagatggaacaaaagcagagaaatcgatgtcaaataaataatcatgacaaaataactgtaaaacaacactaaaacaaattaaaaaacaaaagaaaaaaaggattaaaaaaactaaccatgttctgcacaacctcaacgccagatacaatagcggctatatttgcaagcccagtcctgaaaaatcataataaaaaaactactaaagcaacacaaaaataaatataaaacaatgaagcagatataaccacttaaaaaatataaaaaaaaacctcacccctcaaaattattttgccaatgagctcgtcaaatgtatttataggagaatctatataaaagaaaaatacaaaaacagtcatagagaaggaagaaaaaatgtatttaatggctctatcttccactcctacggatagaagcaccacagcaacacgagaacacttggaaaacaaccattaattctggcgagatggagcaagaacaatgaaattgacgtcaaataaataaatcatagcaaaacaatcataaaacaacactaa

SEQ ID NO: 399642 - DNA, 794 bp, Cannabis indica
ctttcgttttttttcttggggcttctagggttggatccttcttcaataattcaatctttctcagctaattgattagtaaatccaagccaaggtatagctcttgtgcctcctttgtattttcttgaagtttaaggaagtgaaattttgcatgcttggtgattttgatgttgtggctgctgtatctgtttattgttgttttcttaggcttaattatgttcagatgaatggattagaacaggttttagtggttgttagttgattttattcaagtttggagttttaaactcaaactttggtttcaatggtgaaatgttgtttagattatgttttctgtagttatattaggtttatttaaagtgatttaagcaggttttaatggctaattagttggatgagcaagctttgagttttatgaactcaagcttggctcatcaatggtggtttttgtatttgtgcatgaagctttattttgttgctttagaaatgttctctaaggtgtatagaacaagtctgtaaagtttggattggtttggggttgttttggtcgagttttgaatttttgaaccattcctgcactgaatcggaattccggttcagggaggcctgtaggaaccggaattccggttggcttccaggaatttttccctgaaccaaaattctggttggggaaccggtctaccggttggggcaaatttgggaacccttgtttttctcatttttgtgttatttagggtattgccatgttattcttcgatagggaaacttttagtttcaagtttaagtccctgggaagt

SEQ ID NO: 399643 - DNA, 573 bp, Cannabis indica
tttaggagcctgtaatttgctgaaaagttgttccaagcaggttggccggcacaccgaaattcgcaatcaaggtaagattagtataatattttgcatatgtttatacatgtttagcgtgcatgttagttgccgtcagaatagacaaatctatagccctcagattagcatatcagggcatcggtgaggtgtacatagagatacaccaagatgccaacagatatatgctaggctatcagatagtatgaattaattggtaccacatcagtatgattatagtactgagtataggcgtgatttgcggttagtcatactttatcaagatcgatcctgattcagtgagggttatggtttggtgtatgggcgcctgattataacccaggatagtagtatgtttattatattatgcttttcttactgagtctatcgactcacagtgctgttgctatgtgtaggtgagggcaaagctaaagttgaggagccgtgagagcgagcagatgaagattgtaatgtcgcggcggttaggcctagagtatacgatctttgggacatcagggcttttgttgttttgtcgct

SEQ ID NO: 399644 - DNA, 615 bp, Cannabis indica
tgaaaaaaagggaaaaaaataaagaaaaaacaagctgagcgataatacttgatgagatgacatggcacaaaactcaaacgtggtaaaaaaaaaaaatacacaaaaataaagaagaaaaaagtcaccacaaatctaacccaaaaaaaaaaaaaccaatattctaaagttttcagtagcatacaataacttaattaggagaacatggtcaaataaaaataataactgaaaaaaatacttaaaacacataattaaaactaaataaatctatataaactcagtttcaaccactgatgaaaaataaataaaggaaagatagaaagttaagaagaagagaagttcataccagaattagtggaagaagtattgtagcaagaaatagtttttagaaaaataatatagttgttccttgtgcaatatacttagggccaatacttagggcctagcccgtctatacttagggtcggctctatttgtaaaggggatattttcaaaaatatgggaaaaataaaccattttatgataaatatggcaagaaaactaaatgccacaaaatatggcattaactaaccaaccaaactacaaatatggttttttttaaaaaaaaaaaccataaaa

SEQ ID NO: 399645 - DNA, 605 bp, Cannabis indica
ttaagaggaattaataaaacatacgtaacaataaaaaaacttatatatgtgtatttttcttatttatttatttttatcattactttctttaaaatatttaattttcaataaatcaaaaattatttgagtaaattaatgggaatggcatggttgacataaaagtataatattatggctagttattaagtaaaattaaaccttgttgaaaagatgacatttgtcattaaattaacaagagagtgcaagcactcctcgttttaaaattatatttaccaaacactaagtagttttttctcacagcacagctacaactgttttttgtcacagcacagatacaattgctttttcccacagcacaactatattaaactggcccttagtattttatatgtcactactacaatgttagcctttagaggcagttttttcaaccccatttataaaaagggaagctaaagggtgtgaaaatacccgctatgttcgaaattgacatttagaggcggttttttgataaaaaccgtaggtataaaattgcattataccatttagaggcggttggaaatttttttttttttttttctgaattaccctatgccgtcggttcc

SEQ ID NO: 399646 - DNA, 729 bp, Cannabis indica
cactttaaaaaatatattttttattaaaaaaagatattaatataatagttatccaaatattaaaaataagtcaaagctcataccttttatctctattctatataaagtgtgcttatataacaaaattcttggttttatgaaaaattcataggtaactttttatttatattaaaaataaaatgatttattaataaaaataaaatggtttatgagaaattcatggtttaaaatatttaatttgatatcttaattattaataaacaataccataaatatacatctacgatcatataagaattttattctaaaactatacgatcatagattaagtggtcaaggtccaaagaaaaataataatttcttataatctgaaatcaagacacgaaaaacagaaactaattgaataggactctattcaattgaggtgtcgaccatgcatggtaagtaaaaagctatatattaaattttatgccatgatacaattaaaaattaaataagaatttactactatttatatattatatatatattgctaaagaatttttctatttttttttttttggctcgatcatgttataattatttgccttcacatctgaatatataaaatgtggcgaattctttgtttatgagaaattattgggtgacttttttttaaaatatttttttatatataaaatgtagctatgtaacagaattcttggtttaatttattatttatttttctgt

SEQ ID NO: 399647 - DNA, 753 bp, Cannabis indica
aaagtgtgaaaatccactcctttttatagctgaaaaaggataaaaaagatagaaaacatatccaattttcgaattcaggggcgggcattaaccctcatttttttaggtagtgagctttccacgcctctttgcctcaaaactaaggtacagtgttgaggcgcgcccatgccttgattagaatcgatcctctctgctaaattttgcccttttaatgtcctgacatgaaattgtagtgttgaggcgctactctattgttattatttctttgccttaagagctccatatgcatagaaacttttggatttctttctcgaattaattttctggtgctcttgccccaagagttgatttatttgacctttttctcatattttttcaatatttctccacttttcttctacattaaacctgcaaaataacaatcaccaaaagtgtaaatgtaacaccctaactagcataggcgtgttaacgtgattttaaacatactgtgcagctcgttgctaatcaatgaggttattgaaaatcgtgattaattaaaatttacttatttaattaaagacttaaagtattacatatataatatttcgggatcccgtttacaaaatactttacaaaagtttgttatacatataatcaagagtttgccgcctagcgactatacaacaaaagcctcaatgtcccaaagatcgtacgctttaggcctaaccgccccgacatgtaaaatcttcacctgctcgtattcacgactcctca

SEQ ID NO: 399648 - DNA, 554 bp, Cannabis indica
aatggagtgaagcgagccctcaatgaattgtaccaacatccttggccgaccaagagaagggtgagcctataggccggccaggatatgtgcacaagctagccagccaagaagtgacttccagaccaagggagctagtgttcgaccaagggaatctgacctctacaaggaaatggtgtacaaagttgtcctcaacttgtaaaaggttggcctccacgctcaaagactagcctcctcttggtgaagctataatgacctgccagatcctggcaggaacatgacctgccagaccctggcaagaccatggccggccaggattgacctggcaagacaatgtgtacaaccccaaaatgtggacaacaaagatgggctgcgaattaggcccccaaagtccaatagaatagctgaataatatctagaatcaagggcatttcagtcttttataaatatctaactaactatgctatttttatgagatttgaattgtaaacctagggtttaaggcttcctctataaggccttaaccctagcctaaaaacctaagttgcatctaagtc

SEQ ID NO: 399649 - DNA, 544 bp, Cannabis indica
ttcttttaagagaagcaattctcatatggaaagatagtttttaaaggaaactttgattattgtctttttccttattaaattcgattgtgtcttgatacaatcagaatatataaacagtttatggcaggaataaagactcaatagaagatcggactcgtttatggaaagtttccttttctggtcagatttgctatgtcaaaattcgtttctgatgctccagatcgagttttccttagtaaagttttgcaaagctatagattcgatcttgtggctgtcactaaggttcttatgttctataaatagaacctagagagcagccattcgaatcaactcttctagtattcagtttttgcatttttcttatttgtgagaagagattttctttgttttgtgagaacctagttgttcatctaggttctagtatgtttcgtgtctgttcttactctgtcttaagagtttgttagaacgacttgactgaacaaggaagtggttttcgggagaagacttgttcaagccttacttcgggaggaagtaagcactcaca

SEQ ID NO: 399650 - DNA, 833 bp, Cannabis indica
ctgcccaatcaagaagttcatacacagtattattatgccaagtatatttattgcctataaaattaagaggagaaagacaaaacttatggataaattgagcaaaatgatccatatcagaaacattataatagttactaccagttttatcatcaaagtccaaaaaactattaaaatcacccataatgagccaaggcaaattaggggaagaataaacaattcccaagtaacacaacgagcagaggaaataggagaaccataatagcaggtaaaatgaaacatagcattatccttgaagtttatattacaatcaaaatggttactagagaaggataaaatatttacataaatagttgctttccacaaaagaataaggcccccccccaaaactacttcccaaaaagatattgataaataaagacatattatcttaaaaagaaaaaaagcaaattgaacaatacataacgagagaatgtttaagcaaaaaagcaaattgaacaatacatataccatttactaacgataataataaaaaaaatatatattactaataataataaaaatattatattatattaactaaattatatactacaattaaaatatatataacatataacagcaacaaaattatataataaaatagaaatctattaaatattatttaaaataaaaaatatatcatacaattaaaatatataaaaataataattaaatatatatagcatgttaattaaattagggtaaataccattttggaccctgtattttgcaaaagttacagattggaccttatgttttgttaaatgactaaaatagaccctatattttctaaa

SEQ ID NO: 399651 - DNA, 1316 bp, Cannabis indica
aatgttggagcaacgtaccaacgcatggtaaatgatatgttcgagaaccgaattggacaaaatatggaagtctacatcgacgatatgctggtgaagttagtaaaaggtgaggatcatacaaaggacctcgcaacatgttttaacattctcagaaaatacgacatgaaacttaatcctaataaatgttcttttggggtttcttcaggaaaatttctaggtttcatagttaatgtgaaaggaattgaagccaatccggagaaaataaaggccttgatcaagatgccttcaccaacaaagccaaaagaagttcaggttttgacaggaagaatggaagcactcaacaggctcatttcgaagttaacaaataaatgtcttctatttttttttaatgttttacgaggcaataaaaaaattgaatggaagaaagaatgtgaggaagcttttaaaggcataaagaagcatttatcaacacctccaatttcggccaaaccaataactggaaaaactttatatctttatctagttgtcgcggagcatgccattagtgcgactttagtgcgagaagagggtaagcaccagcaacatgtttactatgtcaatgaaaggttactgggggcagagtcgagatacccacctctaaaaaaacttacattatgcttaattcacgcatctcgcaaattacggtcatatttctaggcacatccaattaaagtcttagcaaatcagccactaaagcaagttttatcaaaatttcatgctttaggaatattgataaagtggtcgattgagttggggcaatttgatgtaacttattacccgagagtgtcaatcaaaggacatgctttggctgacttttcaattgaaggaataaactctgaagaagacgcagatgttgagcgcaagacaaaaacatggaaactatatgttgatagggcttcaaatgacaatggctcgggggcagaagttataatgatatcgccaaataacttcaaatttcactacacgctaagatttcaatttgatacttcgaacaacgaggcagaatacgtggccttattagcgggtctaagaatagtcgaggcagtaaaagtaaaaaatattacgtgctatagtgactcatgttaacgcagatttttgttaaccaaatttgagcctcatgatagtgatttcacacagaaaaaataaaagctatagaaataaaaatatgaacacagggttttttatgtggttttgcagttaaaattctgcatagtccacgaatcaatcttattcagatttctgattgtttttcagtgcttctcttgtatgagtttttt

SEQ ID NO: 399652 - DNA, 1247 bp, Cannabis indica
gttgatgaaataatatgcacatattataatttatctataaaaaatattatcattaacaataaaaaattattaaaatattcttttaattactctctataagctataactataaaaaatgttaatagtttttaggcttttacattttaaattactttactcttatcttttttcttccattaaaatcttttataatttaatataaatgaaattattttgataactattatacttttacaagtaagaacttttttgagtgatatttttaatttttaatcatatattagctaataattgtacaacaaataaatataaataatcattgttatgaaatactatgcatacattataatttatctataaacattataattaacaaaaaaaattattaaaatattctaatcccttatataagtataataattatgtttgtattgatgaatagaaactatttgcaggcatacattataatttaagtataaacttgatcaacaattaaagaaaattagtaaaataatttgatttttttatataaattatcatagtagtataattatttatcatatatgtaataaaaatattattttttatgttattttttttttaattttgtaagtataatcacgtgcggagcacgtataattttactagttctattaaaaatatatagaaagaaagatattcagtgtaagaatttaaagaagtgatatagaatagatttaccagttttctattaattatttgagttttgaaagttttgtaaaacaagcactacttggatggaactatattccaaaagtatgaagagcatggcccattatggaagaagtatatatattcatggcatagaccaaatacaatgaagaaggagagaaataaaacaaaggaaaatgggacaccataacattcataaccggtttcgcattaggacagatcatgtgctgtggtgatctcgtgttacactctttagaggaaggcttgaccaaattttggacatacaatcatatccatttctcttttcgtctcaatacattttatgtatggactttaattctcttataatatcttttttctgtttgtttcatatatatactttatatatttatatatatacatataatatcttatattaaatgtggttatttaattagtttaacagattttatttttttccgttaaaattaagtgttaaaactaattccgttaaatcaatcaattaattatcttttctttgtttttttaaatttttt

SEQ ID NO: 399653 - DNA, 621 bp, Cannabis indica
ctactaaaccacaaaaaaaaaaaaaattagaatcaattataacggtaaaagtacaaatcaaaatcataaaaaatacacaaatttaaaagatacccagaccttaaaaaaatatatatctattataaaattgttagatctaaacaaagaaccccatcaaccacgacgaattcgcacatagacccttgcacaaatcagagagagtgacaaagagaaattgagataatagaaaatagagagggagctaacttttagggtctacgagcaccatggtggtgccgaatcatcatttctcgtgcactgtcactgtcctggccaacttgttagtcagagctggaacgagaaacggtgagagcaacacagaaggaccacgaatagagagagggagaatgagatctatcccagagtcgatggcctaacgtgctccgatgagactccaaatttgggctacatgctttggatcccgtcaccatcgaacgtcgtagacatatctgtcccatccccgccagccacagttggactcgaagccaactttggcgccgcaccaagctaagagagagagggagacaacgtggaaagagaagagaaaagaggttgatggagttaaggtccaggaaaaaaaaa

SEQ ID NO: 399654 - DNA, 504 bp, Cannabis indica
acattcaagacaatgtgggatggtccattggttatggtcttccaactgtggggcttgggatctccattttggtcttcttagttggtgtgccattttataggcacaagttgcctttagggagtccttttaccaagatggctaaggtgattttagcttcttttagtaaatggaagttgcctttgccaaatgacccaaatgacctttatgagttgagcttggaagagtacactaaaaagggtatcactaaaattgatcacacttcttcattaaggtaattttatatttactaccactttgttataactagctagctagcatttaccatattgattgttcccaacattactcgatttgtcataagatgatccgttgatgtaagacaagttagatctgcgcgtagggttcatccaacttaagaatccaaaaaaaaaatatttaaatatcacattttcttctaataaaggtcaaaaaagttctaggcccaaccaaactcaaaatcgcctt

SEQ ID NO: 399655 - DNA, 596 bp, Cannabis indica
gtatgcaaatgcataccatccgtgcgcggtcctggggaggggttggctgagaaacctccggcgaggaggctgtcagcaaggtgtcccgcgcgcgcatggccccaaattcagacagatctgcccttctgaccgagaaaacttggacaggagccttgtccgaagctacacacatccgagaaaagagggatccgcgcgcgcataggaggtgtcacacctcctgatttttgttttttttttaatttcaaaaatcataactaattcaaataaaatcaaaattgagttctgtacaaaagtgaatagcttaattttttccatactatccaataaaaataattccagaacaaaaatccaattgttttatgtaaaaatttcgcaaacatcaatcaatcatcaataaacacatagatcaacatgaatcacatccaaatcacacatacatcgttgtaaatccatattacttgaaagcaaatcaattactatggctctgaggccagttgttggactatattttaccaagatctatatttactaacaagtatgtttttaacatcctaatataaatttctaaaaagataaaaataaacaaataaaaggta

SEQ ID NO: 399656 - DNA, 1088 bp, Cannabis indica
ttttcgttaactaaaaatattagtcttttgtaataaatgaattacacaattaattatagcaataaataagcaacaaaaagtttttaacgtggttttgaagttaattcttcatagtccactagtccatctttttggagaaagtatttggaatacataatacaataatatcagtgataattatatctttctttttctctctagattttccctccctgttaccatgaatttgttcctatttatagatacatagggtgacagttattcccttaggatctattcattcacaaccactcatgaaactgttggagattattttactaggatctagatttactaacaagtatgttgtttaacgtcctaaatatgaattctctaaaataatagaattaaacacatataaagttaagaaaagcttacattggtggcagctgaataatatgtctccttccactcatatctctaaaccttgttcctttctgtcgtagagtattatcaagatttgagcctaattctcctttaggtgttggattcttcacagttttacacactatgatttagtacttgacttgctatgggtgggcatgtactctttcactataaggctcgaaaatataaggagaaagagagggagattcgaattctataaaaggaggttctcaagtttctagttgtctgacaaaaaatgaaaactagaatattaggttggatgagaatgtgaaccatcttattccttatataggatctctcctagtgttagatttgaattatatggatttaaaaaagataaaaattggctaaaactctcttaagttgccgaccatacaatgtggaccccactaattagatttttctcattttattcaataatttatcttctcttttactaatgtcacattttctaatttcaatcctttaaatgtcaaaactttttatttaataattaaaattcattatcaaataaaattgccagttaacttatttattaattagacttaataaaatctcttaattaacaaataaaccctaaaatttcttttcttcacaattaagcctttgctttgtcaaaaatcataaataagacatagtct

SEQ ID NO: 399657 - DNA, 646 bp, Cannabis indica
tacaaaatcaattatttatttatatccttaaatagaaatattttaatattcgatgttattctttgatcaacctttgataatttctacaagttttgggctcaatagttattcatagactcgactagagttttcttttcacgttaaggtatggtgatcatgttatcttacttttgagatgtgtagattaattcaaggttaggctttatatatatatgtgccatgataaatcctaattaataagtatgaaatttaggtttttcgcaagacaattatttctcaaggatcactctcattacaatcaaggctaggactccacatttgaggtaaggaaattaagtagaaacttttaagttttttgtatgaaatgatgttcaaaaggagtgggagtgaggtataagacttctatcctatttttatttgttcattattatattatgttgtttaaataatagacgatacaataggttcacattatttaagtaatagatatgtgtatgtggtttgaataatgaactgtacaatagattcacattatttaaactataaatatgtataattagtttgaataatggtcggtacaatagattcatattatttaaactaattatgttgtttggataatagacggtacaatagattcacatta

SEQ ID NO: 399658 - DNA, 582 bp, Cannabis indica
gtaactaaaatattgtcactaaatgtagtttctttttgtagtgcttattaaatattttcatgttcatcctctcagcaacaccattttgttgagagatttttctcactatcttgtgcctttaaattccattatcttaacagtatcctgtaaattcatcattacaaaattctaggccattatctattctcagggtttttagctttctgttagttagattttgaacaagtaattttcaatgaacaaacttttgaaaagcttcatttttatgtttttacaaaaaaaatccacacattcctagaatagtcatcaacaatagacaagaaataggcactatccctaattttggttttaatatgatttagttcttcgcaaattttttgtgtgcatatatttcattagtacttaaattacttgatcactaattaactgttttatgatttcaattcaaaatttgatcgaagtgagtattgattctactataataaaatagacatagatttcgatataggacgagagtacttatatggtttggataacatttagagttttttttttaaatgcctcttatatgtttaaatttat

SEQ ID NO: 399659 - DNA, 644 bp, Cannabis indica
aactaagccaaaagtttgttacaatcattgataacacaaccaaaagagacaccatgtctaagcaaacttctaaagtgcttgaacgacacccatacaatccgtctccacaagaacttgctgccagcctcttagtttgatccaactaaggacttcattgactccatagcctcagctaggagaggttccactgacgtcccttgaaagtgtttgcaaataccttcaattaaaagacctttgtcatctcttgccactgctccaatactgaagccttgcccatctccaaataaagcagcatccacattgatctttatgctattactccctggtttagacccttgaaatgtctctgttttctttattaagcgatcagcgaataaggttgctcatgcttttgcaaaaggtttcttattttattctgattgtacgtttcacttggaggatgctccggtggagttgctacctagtttggtagctgattttgatggttaataagattaacttttccattaaaaaaaaccaagtaatatgctatcttctcctttttttattattattattttatcataatagttaaaaaaaaattaatcattcactatatattaaataataacacaatattcactacaaaaaatattacttttaat

SEQ ID NO: 399660 - DNA, 584 bp, Cannabis indica
catttgtttaacaatagtaacatatagggttaatttgattcacaaaatcacttcgacaatgagtcattcttttattctgttcattgacgtgattttagactgaaaaaaaaatcttgggttgaagaaccaactctggcacatttcactcagctagttttttttttaacaatgattccacccagctagttcaaataaaaaaaataccagaatatcatgaaaacatattcatatataaatacaaattatatatatacaaagaaaattgcataatatctatacataatacatatatatatattaagtaatgccataaccgtgaatttggcaatcttagacgaatctgatttagtattatcatgtagtggaagttaattatttctttttgtttttatatataattaattacttaaaaaatattagggtaaatcagaataaaacattagagtcggtcaatggaaaaaaaaatacaccaacaattctcataactaagaattcggttatatagccacactttatatgaatagatatgtgaagtttttttttaatttttgtcataatataaaaaaatatttttatagtaaaaa

SEQ ID NO: 399661 - DNA, 1111 bp, Cannabis indica
acctttagtgacatgctttgtgtaactctgaatacttttagagttacgcactgtgcgtcactatatacacattttttttttaaaatataaataaataaataaatgtttagtgacacttcaaatttttagtgacacacattatgaaacacaaatgtaaaatttttactgcctaagaatgtgtgtcactaaaaattgcttaaaacatttagtgacatgcactttttatgcatgtcactaaagagtgtcactaaatgtataaattgtagtagtgtgtgccattcaatttcatagaagaaaatagaatgacatcataagcaaataatttataaaccattcattcaatgatatactatttaagcaaattctaattgaaaatgctaaaaggaaacattaaaggataatttcgatttgaaataagaatccaacgatgtcccgtttaggtgagactcaaagttattcttatattataaattcttcattgtttcatattgtaaacactaatctaagttgtcatctttagatgtacaactagatgttgcatttacaaatacttctctgtcaagatctaacactattatgtttgtctaacggatgacaatcctttgggatttgtcccattaaaacaacaacttaagtgagaccaacaatgaagattcaaaattatactacaattaataacagaaaacaacatagattcaatataaattcatacaaaattcaaaaatatcatacatttagcaagtaacaaagacatgtataaaaacaaaacaagcacatcttaaataatgtccaaggtttccaaggaactgatacagtgtcccagtaggcgagagtcaaagttatcattcattgaatagattagtcaactcatctaaaatggacacaattctagcagccttttatttgatcaaaataagaatccaacgttgtctcagtaggcgagagtcaaggttatcttattttatgaacttctaccattgtttcatacttcgtaaatttatctctaagtagtcaccgtaagggagagtctaatagagatgaaaacttacaaaatacttatctttcaagatctttacggtgttaaatgcttcaacaaataatcatccataag

SEQ ID NO: 399662 - DNA, 594 bp, Cannabis indica
aaaaaaacaaaacaaaaaaaaccctgaaacatcacacatgtggttggaaaagtttttgactttatttattattttattaattgtcgacttagatatgacccactaacgtctgtaatttttttttcttttcatgaacaaacttgtatatggtaaaatatttatacataaaaagaaaagatacatatattatagttttatgttataatacgacctgtggatattttaggaaattcagtctatattaatatgaagagattttttctattatagaccaaaaatagatgaaatttacatttatggccctaaaaaaggaaataaacaaaagtggaaactaaaaagttggtaattacaaaaataccggctgagaaaacggaaaccaccattctcaaccatttttcttctgaccagccgcagcttcttcgtgacccagcgatccaaccccaacaacccattctcaaccatttttcttccaaatccagcaaaatcaaaatctaaaaaaatgtagaactcctaggaaaccagctgaatcccgaaaatccaaaatcaaaaacgaaaagggaaaaaaaaaaccaggaaacctccattgatgtacaa

SEQ ID NO: 399663 - DNA, 645 bp, Cannabis indica
ctgaagtgggaaattgaattcttcataaggaaaaataacatgcatgtacagaagtatgtcaaggctgatcagaatcagaggggtgataataacaaagacttgctacctccaccagtagacggacatctacaagtcatcattagaggccgacacatagctggagattcaggcaaagcttgggagtggtatgccagaacagcacaacacgagcaagaagaagttatcctggtcgtagaagaaaggaagcctaaaatcccatgggcaggagagcccaacattacattcaacaacgaagatgctgtcaagatcaggtttccgcacaatgaccctttggtcatggaggtccagatagccaacaagatgatggccagaacaatgatagataatggagcctcttcaaacaccttattcaagactgcctatgaaaagatggggctctagctcaaagatctaaccccctgtctcctgcttgtatacggtttctccgtccatggagtcgcaccactagggcaaattctcttacccctcactgttgggcaagctctgacgaccataactataatggcgcaatttctggtattggacgttccatgtgttgggttttatgccctaaataaaactccatttcaatgtaatctattttat

SEQ ID NO: 399664 - DNA, 538 bp, Cannabis indica
caaaactttcctaaaaaaatccttaatttctagcatcaagttcgaactaataggaccaaatgggaaactttccaaataggaacaagatcacgatttggtcttcaatagctgccaaataaagattatttttttttgctatatacatagcaaaaccaaaattaacattttttttgaatgaaaaaggatgctttatttaaacattgatatcatccattacaatctttaacaattcggaaggtgaattgtttttaaagaaactacgatctgacaaataacaagaactacgcgcaaggaaatgcgcggccttattagcagaacgctttacaaagcacaattgaacatgagataattgtgagagtaggtactgacagtcttgcacaagcataccaaacaaagatggcagcaccactttggtatggatagcctgaacagcaacgagacaatcactttcaatcaccaccttactccatgttttccccttaatccaactaagggcttcttttattcccaacacttcaacagtttcgggtgaagaatt

SEQ ID NO: 399665 - DNA, 467 bp, Cannabis indica
tatacaggtcgtgtctagcttcccttataataacgaaatttggtaaatacgagttggaccaatccgtttgtacacctaattttttatacaaaattatatgaaaaattagattaaaacttgatacaatttattaattagttatcattaaataatatttataatttattttatatatataatttaaaaatttttaaacatccgctgtgaagcgcgagttgttttctagttacaacataaagcaaaaagaaaaatatgagaatggttgagcaatgattcaaaattaaaatgactataactaaacttgctaaaattaatgctactgttgctagaaaattgcttgcaagaaatgtaatatggtaaaaatggcttgaataactaatcccccctagttaggttttttccagttgctatagcattacctcaccattcctgcacagtgataacagaattttttatgtgtttacgag

SEQ ID NO: 399666 - DNA, 662 bp, Cannabis indica
gagagagagagagagaggttgatttgattatatggttgtgcttctacaaaagtttaagcggttaacccaccaaatgctgcctgaatccatgcataccagatcatctctcatttcatttcttttctttcccaaaattaactcaacttaaatgggagaggtatttttgatattatgtgaattgtgagagtgttttagttagtgtagatactgtttgatataatatttgtgtgattcatgaaagaattggttattttaagggccagtgatcacgattctgaagcaacttttctgtagtttaatacctcttgatcatattcgttcttcaagttccttaagacttttctattttaattttctttgtctatcgtttgttgttgtaaatgagttcaatgttttctttcttttttgtttcacaactctttttatattctttcttttttaatgtttttctttttgttataggtttgttttatattgatttttgttctattttgcgccattatttatggctttggcgccttacaaggctttagcacctattatatggttgtgcccctaattatttaggacagtttgtttaaatttttacgtttttcggtattgaatgtataagaaaattttgacacaataatattttaaagttaataagttatgcactatac

SEQ ID NO: 399667 - DNA, 538 bp, Cannabis indica
taaaaaaaaagtacgaaaccttagaccaaaacaaatagtaacaagttaaaactacaaatagtaaaaaaaaaaaaaaacactaaactgaaaaaatattgaaatcagttaatgattacacataaatattttctttttcttcttttttttttttgctataaaatgttagaatgttgtacatccattacccaaatatcatacaattttattaaaaataattgataaaataatagcctacaacccagttaaaagatatttctgttgaaacatcgatcaggattagaataaaaaaacttgtcaactaatcggttgcctaatttctggatcgtttaacaaaagaaaataaaataaattaagataaaaaatattgaagcatcacatctaaccttaaaaaaaaggatttttttaggaatatactaaattaggtaacttattacaaaaataacattatttttgaaaggggaacataatgacgtgacacgtcatcgtcttccccacggtaacctttaatggagcaaaggttatttttctttaatcttag

SEQ ID NO: 399668 - DNA, 864 bp, Cannabis indica
ctactcaggatagtttgcgtagctaggctttgaagcttgcacataccctagaacagcgagcggaggaagctagaatctttagagaggatacaccactacactctccactattaggggctcgttttgttccaccgtctgcatcgacgccccattctgcatctatgtcgtagtcagcatttattctcaacacttcacagcctcaggaaccaatatcttctaccatattggcaagattggagagtgttgagagggaacaacttgctttgaagcaaggccagactcatattctgaaaggtctgatagagattacgggttacttgaagaccctattggcactcataggagatccgagaaggcctaatgcagaggcagagccacagccagaccccgtctctctgagagatgagtttattcttcccaatgattatagactcgatgatgtggaagatgtactccatacacctcaaaacatgtcgatcacgtccattggagatacgcaagattcaaaggtgtaggttttagagaccgttccaacaccggtggagaagagatcaaagaagaggccgaggtggtttgacgagtacaccaaaatgaagaagaagatgaaaccatcgatagctcatgtgaatgttgacccacttcggcccgttgattagaagctgttacatagtttctgaaattggttagtgggaaccattagaaacaagtatccgagggacgttttcactaatgtacatggcgtggcttggttccaaaagctacttactaaaagggaatggctttctgataatgtaagtttcttaactaagtattatttgttgttatttgatgttgttatttattttattttttttaattgttcta

SEQ ID NO: 399669 - DNA, 814 bp, Cannabis indica
atcgataaagaaatttttagtttttgcggttaggttccaaaaaaaggttttagcaagttattttacccattttatatcaatgtgacatagggcatccattcagcgcatgattttctattcaggttgaccgacacacttaaatttagaaatggggtaagactagcataatatatatatgtatatatggatgtatgtaaattgcatgctgtgttggtgattcatatactaccaatactagtacggtagcggtggtggaggcattggtacaatatatgatgttcaaagggtatgatctagtgttaccaacactactatggttaagtacatagtgaatgtggtacaacactcaggggtacttggggtactgttcagccctaccaacactagcacggtagcaatactttgtgcatgtggtaaagaggtcgtaattttattaagaacattcttgatcatctatcaagccttgtagataggtgtatgggtgcctaaatacaaatcggtaatatattacgttatatgcttttctaattgagtgtgttgactcacagatattatttttatgtgtaggtaaagggaaagccaaagctgaatagaagtgagttcaaagcttggggatgattgtacatatcaagatggtacgacctggaaagttcagtcttaggacgacttgggcttcattttgtagtcgctgtgcgacatatctataaaaaatattttgaatattgatgtaaagttttaaaaatgggatctcgactttatgtatgaatatatgtatatattgatgaaagtttaaagttaaatcaaaattttagtt

SEQ ID NO: 399670 - DNA, 544 bp, Cannabis indica
cgggtagtcataggactagttctaatactttcttgctaaaattaaggtgatttagggttagaaattgagtttagaacttttttaacttaagtttgaacactagtggtgtttgccaattacgggctcgattttagaatctattacgtaagtatggtagtatgtatggtatatatgtgccctaagaagtttagggtggtttggtagcgtttcggtgagtgcgtaaacttggaaattcacatttttgcccctgataaactggccaactggcttgtaaaccggtcaaccgatgtaccgtttcgggcaacctcgagaactcgagaatcgtatttttgctataacttttcactcgggtatccgttcaaacgttctatataccgtttcaaagcttgcaacgagctctaccatatggtgtatattttagagctaaaatataagttttattttagtgtatttgaagtacggggtttggtatgaaaccttaggttgtccttgttggaatttattttaccaggatctaagatctactcacaagtatgtggtttaa

SEQ ID NO: 399671 - DNA, 556 bp, Cannabis indica
attcaggttgaaagtttgaagtaggaaagattattttctgtgtgtagatgatttctctttggtttttatgggttgaattttgtagagaaaaatttgatacttttgatactttaagtttctttgcttgaaattgaaagttcaaaaagattgcagcattggtaagatagttcgttttaagagtgatcatagaaaagattctaaaaatactatgtatgatgaattttgtaaatcttatagtatttttcatgaatttttctgctcctaaaactccttaacgaaaaagagtggttgaggatccctaccttcttgatcatgtttataagttaatcaaggcattgtatggcttgaaacaaacaccccgagcttggtatgagcgtctgagtttttactatctcatgattattgaagaggaaatgttgataaatcacagttcatcaaaaacattcaatttgatattatttttgctcaatcatatgctgatgatatagtttttggacctacttctaactctgaagtgcaaatttttgtccaacaaatgcaacaagagtttaaaatg

SEQ ID NO: 399672 - DNA, 575 bp, Cannabis indica
aatgctagacagattggcggggctagaatattattggtttcttgatggctactttggataccaccaaatagccatagcacttgaagatcaggaaaagactactttcacatgtccctatggtacctttgctttcagaagaatgccattcggattgtgcaacacccctgctacttttcaaaggtgtatgatggctatcttttctgacttaattgaatcctgtattgagatctttatggatgatttctcggtctttggctcctccttcgatcatttcttagaaaatttagaaaatgtgctaattatatacgagaagtctaacttggtgctaaactaggagaagtgccactttatggtaacagaaggaattgttctgggacacaaaatttcaaaagcaggaattgaggtggacaaggctaaagtttcaacaatagagaattttccacctccagtttctgtgaaaggaataaggagtttcttaggacatgctggtttctaccgacgatttattaaggacttctcaaagatctccaaaccattgtccagtttactgttaatggcgttccatttgagtttgg

SEQ ID NO: 399673 - DNA, 601 bp, Cannabis indica
ggggaggggcttaaaattatttggttaagttattcgttctttttagttattttgctttagtttagtttttttatttggctattagtcgattaaataagctagagatagttgtatgctactgttaattgttacatgtcttgaaattttaaaaattgtgtgcttaattctgttaactcgttggattagtttggatgcttctaaaacctgtgtatgaatgcaatttgatgatgtgtgaaatatgttataattattttactgtggtttgtggtaagactggttgaatagcttagaacttgtgtgtcctattttcttcatgcgaaatccttgacaacatttactaggaaaatgatttaggcagttgtttggatagtttgagcctttcaagcctaccataaaatgaattccttagtgaacccttttgagcctaaacctgtttcgtttcttcacccattgaactaaaagatgtatccacactgttgtttttgtcctcattacattttgaatggtatcataagccttacaataagtttgggggagtgaaatatatagtggtggaagtattgaaagaaaagaaaaaaaatcttgcgtgattgagaaacat

SEQ ID NO: 399674 - DNA, 1449 bp, Cannabis indica
aaaattcctcaagcataagtgaataaaattgacgaggaattgaaagaggataatgaagggagtgatggaaattagatttaaataacggaaggacaaaaataagaaatacaagtaggaacgacaaagaagcatctactttctaattaccctccatgaacttactttggagttaagcatacttaacttggggtaatctcaagatgggaaatctttcggagagtcatttcgaaaagcgtatgagtgaggacaaagtacgctagaaaaatttgtattagaatatagaattgatagtcgttcttgaggttatcaagaggaagggatgtgttaatagtaaagatttacaaggtatcgagatgagtgtatgttaataagtagaaataagaaatgctctaattgaatatctatcgaaaacgaatacttaacttgttaataagttaagtcagtagaccagtttagaaggtcccataggaggaacagaaagacacaattatgaactatgtattgtgggatcttatggtttcgaccaagtagtaacggttggacataccgagttaatatgctatcattagtgcaaacaatatatacgataaatgaggatatggaattcatacgaaggaatagtctaatcttgagaaatctcaaagttgatatccttggctatgatgttaagagttaatgaagattattgagaactatggggattaaagtaaaaatagtataatattttattattgaaagataggtaatctgggaagattaatggaatattagaaatctgctgtgagcataattgacaaaagtaaaattatcttagaataatctttttccctggcgaagtgtttgtctaaaagtgatgattatatgtaccattgatggtactttaataagtgtgatatgagaaagatgttgggtacttgttcactagaataacacaagtggtaaaataacatgatggaccaaaaagttctaaggaacttataaaatcatagtaagagttcgagttgtatactcgcttcattgagtacacagaaaagctacactgatttaaagcgtatggatattaaatttcaaatgagagaattagtatttctttgagtatcactgtaatatcccgataacctaatggtaagtaattaggatttataattatattatgggttaattagataataagtgggattatgatcctactaatatagttcaacataaatttaaattttgctataagtggataaataagcgtaatttataaattatagagatttagataatatatgtgaatgcaatatgagttaccggtgtaataaaaatattttcaggtttggcgacctttgagactcgatggggggctagaaatgtcataaccggtttaattgatagaatttatgggaatactatgataagttgataatatagatattggggtaattaggagtatgtgagatttaa

SEQ ID NO: 399675 - DNA, 594 bp, Cannabis indica
aaaataaaaatagagaaggcagtgtaagattataagtttattaattaattgcatagcatatatattacatcatataaatatatatatatatatatatactatggaatttattctaaacatacatagatatgattaattaaggatacttaattagattttcttgggtgtaaatataatccaaatgataagcagcttccaaagtccttctgctcaacattcttcttctccaataccttcttcacatattactttctccttattttcttccttaattacatcattctgcattaatttcaaaattaattaatcacattcattttttagttagataacaaaaccaaaaataataaatatataagtccgatcttggatatagacaggagcttaaaaaaataattcccttctaacaatatgtttttatttaattttaaaaataaacatattattttcttaaatatggcttaaaaataattttttttcgttataacccactaaaattcaaggctcagcccacatttatatatatgtatatatatatatatatatgaggaaattacattgtatatccactttatttttatttgtttttgattt

SEQ ID NO: 399676 - DNA, 2055 bp, Cannabis indica
gaagaactagaagagattgagattgacccagatattccgaccagaaagcttaaaattggaaaaagtttgttactcgaagtaaaatcagcattgatattatttttgagagcaaacctagacatttttgcctggtcagatgaggatatggtcggaaatgatccttctgtaattttgcacatcttaaatattgatcccaacgtccaaccagttcaacaaaatcgaagactattggacaaggagcgagccctagccctgaaggaagaggtagagaagctacgcaacaacaatttcataattgaagctttctacccagcttgggctgctaatcccgtactagtacccaagccgaacaataaatggcgagtttgtattgatttcaccgacctcaataaggcatgctctaaagattgtttttcacttccaagaatcgatcagcttgtggatgcaacagcaaggcacaaaatattaagcttcatggacgcctattcggggtacaatcaaatcaaaatgcatccaccagactaagaacatacaagtttctgaatagatatgaatctgtattgctataaagtcatgttgtttggtctcaaaaacgctggagcaacataccaaaggttggtaaataagatgtttgaagaccaaatcagacgaaacatggaagtgtatgttgaggacatgcttgcaaatccaggaaggctggggggcacatagatgacctggatgaatgcttcaaagtcctcacaaagtatagcatgaaactcaatcccttaaagtgatcctttggagtcagctcgggtaagtttttggactttattgtcaacgcccgaggaattgaagctaatctagagaagattcaagccatcctggatatgaaatcgccaacaagaaccaaggaagtgtaaagcttaacttgtcggatcgctgcactcagaagatttgtttcaaaatcaacagacaagtgtgttccattcttcaacatcctgcgaggaaacaagcaatttgagtggacggaggaatgtgaaaaagcttttcaagagctaaaaacgcaactcgcaaaacctcctgtactctcaaaacctctagacggagaagaacttgggatatacttggctgtaacggagcatgccgtgagtgttgtattgatcagagatgacaacaacatacaacatccggtctattacattagtaaaagactcattgaggcctaaggtcgatacccattgatagagaaactcacttactgcctgattctagcaacaagaaagttaaaaccctattttcaagctcatcctgtttgggtgtacactgaccaaccgttacgccaaatatcacaaaagtcggacgcctctggacggttactcaagtgggaagtagaactgggtcagtatgaaattacttttcaacccagaacagcaatcaaaagccaggccttagcagatttcatggtagaatgcataggcaaggaagaaagcatatcagaaagcaaccccgagccagtacaaataccttagccaagtaacaacgaagacaagccgacttggaaactacatgtggacgggtcagctacagatcaactatccggtgaaggaatcgccctggttaaacgtggggggcagcacctgcatgctgcaatcatgtttgggtttaaagcatccaataatgaggctgagtatgaagctttgatcatcagtttaaagctagcccgtgaaatgaaggttgaacacggtaaaatctacagtgattcacaactgatggtaaatcacgtatttggagaatacgaagctcgaggagaaaagatgatagcatatttgagcaaaatacatgatctgctcgcacagttcaaaagttatgctctcagacaaattctaagggaagaaaacacgactaccgacgcattagcttggctggcgagtagcaatgtaagtgatagagcaaatctggttcctatttagtttcttgaagaacctagcatcaccggcacggaagagattgaaatgattgatacttcccaaactggatgacgccaatagcggtctacctcaacactggggaact

SEQ ID NO: 399677 - DNA, 634 bp, Cannabis indica
gtaatcgggaaattgtgacttggctgagggaggagagggtcgctataaatgacattccgcacaatacgatttcgggtcgcgatcataccagcactaatgcaccggatcccatcagaactccgcagttaagcgtgcttgggcgagagtaaataatattagtaataataataataataaactaaaaatatgctataatatatttacacataatattattattattattattattattattattattattattattacacttataataatattcacaaataagtaaatattaaattatctccaataatttaattatttatctagcattatacacaccctcaaaataaaaaaaaaaagtaaagaaattctattgtcactaaaaagaaaaaaaatctcatacttcactaaactaattaatattcaaaatgataaattatccctattggcaaataaaataaactaataaaagtatagagaaaattaattacccttcaagaaagaggatattacatagtcttaggtggtgggagttttgaaataagatcaactttagttttgtcaactttgattcccacagatgaaatcacatgtcctaagacaattccacgttttaccataaaatgacatttttcccaat

SEQ ID NO: 399678 - DNA, 694 bp, Cannabis indica
gggaagaatacaaaccaaggcacataattataattacatttaaggtggaataactcgttaaaagcataattgacagagtatatttacaactcggttgactgaataatcttatgcgagataaagatatacaaatagttgccttgcacttcaacgagaaaccatgtaacttcaggtgtataagacgaggcactaacctcgattacgtggatgagatatagtgactgtgaagacacttagcgtataatatgcagcatataaactatgtataacagacgggtaaaccaaagaaagtgatagcaaggcgtccacctcgccatacgaagacatgcacacgaaaaagatcaccttgtcaccaaaaactgcgattgtcagatagggtgttatgtttccagagtaaaagcgacgagattcattatcaaccttgaaaagaaataggaaaagctccatcccgccatcaaggttagttctgctctattcccagcgagatgtcccaaaacgatacggtttgcaatgtatttaatacacattttattttgacccagtaaaatggactaatcacagctatgtgatattcaaataataaccgcatttattttacgtgatatgtaatcagaccccataattttaggggataattgttgtaaaaatatcagtcaactcagtaattgactgtctactatgtgattataaatag

SEQ ID NO: 399679 - DNA, 501 bp, Cannabis indica
ggctacacagtctaaatggcttcgcccacctatgcatgaattaaaaatgaatgttgatgcagcttgtgatgtttcccgtaacaaaattggtgttggtattatcgttcgaaattcttttggtcaagttgttgcggcttattcgaagcctctcacaggtagatacaagtcacaagaaatggaagctaaagctttactcacgggattagactgggctgctcatcacaatttgtcggttaatcatttggaatctgattccctggttttagttaattccattaactgtcaatctactgctatatcttcctttggtaatttagttttggatattaaaaatcgtttatcctatctctcctctgtttgtgtatctcatgttaagcgagatgctaaccaagctgctcatgacttggctaaacaagctttggtgttggatgatgattgtatgtggtttgaggaaattccctgtaaagaccgcttagtttaatttggaaatcagcagttaat

SEQ ID NO: 399680 - DNA, 1120 bp, Cannabis indica
cactgtcgccgaaaaagtaactgaaaaagtcacaagaattaaatgtctcaaatataactaaaaatagaactggttataacataatgaataaaaacaataataactcaaaccagttataattaaaataaaactagttctgtaatatattgaataaaaacaaataactcaaattagttataattaaaatagaaccggttctgttataatgaataaaaataaataacacgaaataactcaaaccagttataattaaaatagaaccggttatataacataatgaatacaaacaagtaacactcaataactcaaaccgattacaaattaaaaaataaagaagaaatcaattactaaaacaacagaaacataaattaaaaacaaaactagtttcacaacaaaataccttatagcacataatacctcataaaatcggttataatttttttttaaaaaaagtgaggatcaattccaaaaaatatcgaggtataaatatgaaaagaaccggttttataacataatgaataattcaaattggttataattaaaaatagaagcgattctataacataataaatgaaaaacaaataacacagaataactcaaatcagttataattaaaattgaaccggttttataacaaaataaataaatacaaaataactcaaaccatatataattaaaataaaactcgttctataacaatattataatgaataaaaataaataacatgaaatgactcaaaccaattattattaaaatagaattggttctataacataatgaataaaaaacaaataatacataataactcaaaatgattataattaaaaaaacaacgaggaaatcagctcctaaaacactgaaacataaattaaaaataaaacttattccacaacaaaataagtaaaaacgaataacacataattctcgtaaaatcgattataattttattttttttaaaaaaaaaaagtggtgatcaatttcaaaaatactgaagaataaatataaataaaactaatttcataataaaataaataaaaacaaataataccacacaataactcaaaatataatataaaaaaactggttatatttatcaactagttaaaaatttgaaacaaa

SEQ ID NO: 399681 - DNA, 505 bp, Cannabis indica
ttcttattttttgaattttttctttgctttacttgacactatttctttatttttcctttgatttactgataattttgctattttattttttgattctttgctggaaaagaaaaaaaaaacagttgctggaaaaaaaactcgttgtctatcgatgacttcttttttttttttttaattcatgtaaatgttatctagtaatgatattttattgcgctcagtcaaaatttaatttaatgtgttgattttttttttctttcgttcaaatgtatgagctagaatgagttatgttttttcaaatgtaaatgagttacaagcttatattacactttatttgatattaaacttatttgtgtgatgttgataattgtgagttcaatattctaaaatctgaaagattggtgaaaatgttgagggcctcacacttattccttcacatttatatttgatccaaaaaactagcttttctataacatagaggtggaatctatatgatcattatcaaagt

SEQ ID NO: 399682 - DNA, 516 bp, Cannabis indica
acaacaggtgtactcagacctaactcgaagggaccatatcaagtggtcaaagttctcgaatccagagcatacaaataaggtaagtatgatgaaaaaatgcaactcgttctagtaccacgatattggaagggggaacatttaagaaaatactaacaataaagtaccaggtcgaacaaccacactaagtactgagcatttacttttaagtgaatggcctgctgggcagaccacgctcaaaggtttcgacaaaagaaaaaacgtactcaggtcggatgaccatcatttaaagtacaatttcttatttctgcaatttgttttatttcatgttatgctaaaagatcagattagatcaaatagctccgatgtaagttactacggtaacaaacacatttttgatcaataaatgaatcaagatgtttatttcaaaattcaaattgagtcttaattattaacatgttgctagtttaccatccaatgtgtacaaaaggtttggtcgaacccaaaaccccgaacaga

SEQ ID NO: 399683 - DNA, 802 bp, Cannabis indica
ggtcctaggtcagggtctaggtctggggtgggttgtgggtctcaatcctagttctcatgcccgtgtctcgggtccaagtcccccacccaagtccgagtcctaggtctcgatctgagtccaggacctagtcggggttcgagtcttggtccgagttcgggttcgggatccaatcttggtctgggtatagatttgggtttgagtctaggtccaggtttgggtccgtctcgagttttgagttccgatctgggtctgggttctgaggcccatgtctaagtccccaatccaggtccgggtcctaggacccgattttggtccatgttcgggtttgggtcccagtcccaattttgatttcgattcagtgtctgggttcgggttatggtccgagtctgggttttggtcgaagtcctggtccgagtctaggtccaggtttgggtttaggttcggatcctggtctgggtctgcgttcgggtccaggtttgagttcgaatccccggtgtgggtccaagtctgggtctgggtcagggtcccggtccagatctaggtcccaagttttgatcttgatgtgggtccgagtctgggttcgagtctaggttcgtatctagatccctatctaggtccgcgtctgggtcttggattgagtcctaggtctaggtccgtgtatatgaccgtgcattggccagagttccgatctcgatttgggtctggggctaggtccgagtttggttcatggtctaggtttgggtcctgatcacggtcctagtcttgttcgagtatcctcgtttggaagttcttgttcaggttc

SEQ ID NO: 399684 - DNA, 594 bp, Cannabis indica
tataatttaattactatgttatttataacaatctatccattttttaattgtagacagtttttagttgtagacagttaacctaacaaagaagctaatgctacactaaaggagaatttaggagatgctattcggtgaactctatcattttagttgcaattgtttaaagttttattcactacatttttttgggaatcggatgactgtataataattttaaatttatgtttttgtgactgtaacattttggatactaaacgttgacatgaatttctttgtgttaggttttaatttaacgattcttataagaataaataatggtaacaaaaattaaaggacagaattttgaaagggttataacccaacccaacccaacccgatgtatagtttgttgggttgggttatacaaaaaataagttttgaatgggttagaaatttccaagccgacgtaattgggttggcttgttaaaataccttcaactcggccaacccaacccatgtacagccctacatgtgactaaatcaatggaaatgtcgtttggaaatattttgttttctaattttttaatcacaaaatgaaaataaaatttttgtttt

SEQ ID NO: 399685 - DNA, 711 bp, Cannabis indica
ttttttttttttttggttttagtattgagttaattgaactattttatgctagttttggttgttttggttgagatagaccaaggtttgagcttttaagctcaaacttaggtcattagtgacagacttgattctaggggtttttcttgcaattttctggttgtattatgttttttgtggcttaattaggtattttgaaaagtttggtgtaatttggggaaaacttgagcgagtttcaaagtttttagggttttctgaagagaactggttaaccggttgagtataaccggttaatcatgttgggttttgtgccctaaaaaaaaaccaattcaaaaaaaacaaaattactagttaataaagatcagaaatcgcattttatgttgcattgtcacatgattaatttcatgattatatttaatttataaattctattaggtccagaacatatgtatttgttcatgattatagtgttgtcaacacagtggaatataatcatgattatatgttcaaaagtttaattccctgatttgtcagttcactaaatttagactcgcatgataatcagtgataggtatgcttacaccttggataagtgttatgtcctttctagggcattcgcaaagtttaccagtatcggatgtatggagtaattggaagggaccgatattgatcttgggaaagatattataatacttaccgttgtatctttctgag

SEQ ID NO: 399686 - DNA, 653 bp, Cannabis indica
cactatgattgagtactaacttattatgtgtggaaacactctatcactaaggggtcgaaaatagaagagagaaagagagagagaaggattcaaatgagatagaaaagatggctcaaagtttgactcaaggaaagtgaattattaagctggaaattttgagtccatcactatctatttataggaatccatctaggtttcagtttgaattatttgacattaaaaaattgataaaataaatggtaaaatagacccaagtggccgaccatggatgtgggccctaccactttgcaattttgccattttttcaactatttatcttattttctcaaaaatgtcatatttttccaattcaaccacttaaatgccaaaactatttatttaataattaaaattaattatcaaataaaattgccatttaacatatttattaattagacttaataaagtctcttaattaacaaataaaccctagaatctcttttcttcacaattaagccctagcttagtgaaaattcataaactagacatagtctaattttagaattataattgattaattaaaatcaattaactgagtcttacaagcaatattgtctcaactagtatggggaccatgatcctatacaactgaccttccaataagcagatctaga

SEQ ID NO: 399687 - DNA, 641 bp, Cannabis indica
ggttgggaaactcccccaattggttcatcaggttctttattagcagctgtactagtcttcttcttccaagtcaccttgttttctttgttacagttcgccactgtatgtcctagcaaatcacaagcagtgcacttcgttggaagccattcatattctaccgattgttccattaactgttttctctcatttatgaacgaaatagtctttggggggttatcggagatcaccatatccacaagaacccgagcaaatttaaccatagatctttccatagtgactttgtccaccattatcggtttcccaattgtactcgcaagggcactgagattggttttaccccaatattgaagccccagcccattcagccgtatccacactggtaccgatttaatcattctggctgcatccatgtcggttgtccaaggtcggaggaccactggttttttgtcaaaatgaataacaccagtctctaaaattagatcacgagtagcttcgtctctgaatttcactagagtaaaccccgaattcatcctggccactttctcaatcccaagtttcccccataccctgttaacgaacccctcaaaaaccttgaaaggaggattggctcccaacacaatacaaacaatagcattcttcca

SEQ ID NO: 399688 - DNA, 807 bp, Cannabis indica
tagtgaaagtgaaatagaggtgtagttcttaccctatgttcaattgtataaaaaatattatcctttttgagtcatagtgtttaaccatattgacaattgattgatggctatcacattgtcttgctcattatttaactaagaagctcgacatcataaaacttgtacaactttttttgtctttgatttaaaattttccaaatgcatatgttaaaaaaaatcaaatagagtcctaaaaatatgggcagagtttcatgaggaatttctcgttcatcaggatctggttgcctcccattctcatttttgtgagagggtgatcattctgattttcagggggtatctcattttccctaggttgttcttctcaggcatcttcctgtctcctggttcgtgagccatgaggcctggctcttggtcttctcaccccatgttcaggttgattttgagcattagtcccctgtgctgctctagctgtagctgtgtcacgctctaattcagtgttccgtcgatgtgcctcttccagacggtgtctaaggtagcagttttccatttcttcatccctcgtcccagggttctggccattcccacactgagttctcctcgagcacgttgttagcgtactaggaccaatgtcaggttcggtcctccgggaacgtgtggtccgagtgctggggccaccatgaggttgagtccttgtggaacgggtggtccgtctggactgtgggttagtagaccttctggagcccatgggctctttcccaagacgatgatgagtttcctcatgcggggtattaacattttttaggtttt

SEQ ID NO: 399689 - DNA, 518 bp, Cannabis indica
gtttgagtgccaagatcctcctcattgtcacgaggaatttctcgttcatcagtttccagttgcctcccatctggctgttcgttctaattctcagggggtatctcatttcccctaggttgttcttcctaggcattttcctgtctcctggttcgtgagccatgaggcctgcctcgtggtcttctcactacaggttcaggttgattttgagcattcgtccccagtgccactctggccgaggctgcatcacgctctaattcagcgttccgacggtgcgcttcttttagacggcatctcaggcggcagtttcttgtttcataagtaccttttcccattgattgggcacctccacgattaatctcttcatccctcatcccagggttctggccactcccacgctaagttctcctcaagcgtgtttgtccgcgtactcggaccaacgtcgggttgggtcctctgggaacatgtggtccgtgtgctggggccaccctcagtttgagtcctcctggaatgggtggtcc

SEQ ID NO: 399690 - DNA, 879 bp, Cannabis indica
tatatctactatataataagaatggatttcacttttttattgtttttaaatcttttacatttttttattatttttttacaaattatatttttgtacttgttattggcgtccttaattagtagtacccaataattaactagattttttatttttactttttacgaataatttttgtactacattattattttttaacaaaatattttttgtatttgttattgtcatcttatggtggtcaataacataataatgtggtacctaataagtagctaagaatttttttaaattttttatgaataatctttgtactatatattatctttaaaataattttttaaaataattttttatactattattgttatgtagtatcttaaggtacttaatttatcagcaattttctaaacctattattaaattaaaatttgtaaaaactcatattaaaatacaccaataacgatatgctacattttgtggtgcttgacaccttaatgtacccgtaatatttttgttattaatatcataatatgtacatatctttattagctttaattgtgtttttttattatttttatgaatgatctttgtactctattttttagtaaataatttccggtactattattgatatgtagaaccttaaggtgctcaataccataccgatgtggtatctaataatttgttagcagttttctaaattatttatcaaaataaaatttgtaggaacttatattcaaatgctcaaataacgacatgctatcttttatggtgcttgacaccttaacgtgtctcttaacatttttgttattaatatgtacgcatctttattactttgattagaattttaatttttttaattatatataagtttgcaagaac

SEQ ID NO: 399691 - DNA, 796 bp, Cannabis indica
tattcaaataacaagaataaaaagagaggagcatgcatgtaagaaggtatgtgaattgatccatattttatgttatttagttcaatattaaatactttaggtggatatgaatattctttcctgtggtagaagatagtagctttatgaatattagttggtgtctatgttattgattccatgtttcttttattggctgcatccactctatgagaaggtagaaagcaagagaaggattgcttataatgagtcaggagattttgaagtttatcatttttattccaacttttaattggtcatgtaaaatatttttatttcaacttttaattgttaatttacatgttattctctctttgatattaaactggttgctcctcctttgaattgctatgattttggtatataagttactgtttggtatttttttttaattattgtaagaataagcaaggcatgctaattgcttgcaaactcacttgtggtcaagttagaatctcttcaccttaccatgtcattaatatgatctaacgggtttatactaataatataaagttattgttattggtaactaataattatttttaccgtctttaaatatgtcttttaaaattctatgatgattattttgagttattcttgaaactaaacgtttagtactatttgatgtattatttcaatatgttcttaaaaattctataataattaacataccaatttaattacaccctataataattttcttataatgtttttatttttatttttatttttatataaaaaagtgtaattaatatttgaa

SEQ ID NO: 399692 - DNA, 786 bp, Cannabis indica
acaaataaaaaaaaattgaatattcaaatgttacaaacgtatttatttaggtatttaggctaactaaaaaatacaaacatattttagatcaaaaagaaaaatataatacaaacatataattttgggcactcttcggcctctaacaaaatagtttcaagatagtttcatgacataacgcaaccataataattacttttttttgtagcaatttatatgtgtgtgtacatagatagatctgtaccccaaaatatatatgatggtgttggttaataagttaaacactttttttctcctaaatctatatttgtatagggaaatttcatttttaatgcttaaaaaaataccttctaacaaaatttagactcataattaatttatacaatttaatgctattgttttcaatttctacctaaaatacccccctttcattttccttctctctttgtctctttctcttcctcactctctttccctcaaactcaggcagaccaccaaccaccaccactgaacctcttctcctccaccaccgaacctcctcatctacccaaaacttaatccaacaacccccaaatctcacctacccaaatctttttctcttcctcctcctcgacttctctcaaccaccatcgccattcgccaccgcccacttaaccctcccccaatcagaagctcattgaattcgtatttgtttgagacattagatggtggtggagggtatgattttctggccaaaatggaattatcgatgggttatcgatactttgtcgatagtttatcgatggtttt

SEQ ID NO: 399693 - DNA, 790 bp, Cannabis indica
gagtattttgggtttaatgtaaactgaatctatttttaaaattttgaaatacataagtttagagaattaatttcccccattattttttgggttcataaaaaaaaagcattaaattaaaattattccttataatttgggttcataaaaaaagcattaaattaaaaatatattaaatctttaatttttggggtcctctgtagtagctagcttgcacaactatagggttggctctgatagtagattattttcactatttagggattgaattttattttcctgttagagccattacgctgctaaaatctacttgtaatcttcacaaaaggattatcaaaaaactcacttgatcataatcttgtgatcttggtatttgtaagagtagtacaataaaaaaggagtagattattattaaaatttaggaacttctataaatctgtcatttattgttcttagtaattatgatttatcaaaaaacttatttatcattttattgattaaacgtcgttgataaaaaaatggagatcaacaataatataaccaatgtgctatactctacctcaccaaaaaaaaaaaaaaacgttaaaaaaaaaaaaaaagttgcacatactcttctttttgatgtaaggaggcgtttggttgggaggaatgaaaatataggaataggaatgagaatgtgaataggaataagaatgggatggaataaaatttaaaatagacaaaaaaaaaaaaatagataaaaaaataattaattttttttccttgttacattggaatggtcattcctttcttt

SEQ ID NO: 399694 - DNA, 539 bp, Cannabis indica
gaaggaaatggacatttctagctattagaatatattttatcaggatctagatttactaacaagtatgtttattaacatcctaaatattaatttctaaaacaatcgaattcaaacacatataaagtttgagtaaccttaccttggttgcagcggaatataatgactcctccaactcaaatctctaacccttgttcctttctgtcaccgagtattatcaagatctgagcccaattctccttcaggtgtttggattcttcacagtcttatgggtgggcatgttgggaatattttaccaggatctagatttactaacaattatgttgaattaacatcctaaatataaatatatctaaaacaatgaaattaaacacatcagtttaagaaaatcttacattggttgcaacagaatataatgactcctttcgttcaagatctctagcccttgattcctttctatcgcagagcattatcaagatctgaacttggatctccttctcttctttgggtcggttaccaccgtcttactcactatgattgag

SEQ ID NO: 399695 - DNA, 872 bp, Cannabis indica
agtgttttatattgtatacaattttatatcttgagtttttttagttttctaacatttggtatcaaattgcttactctatatagtttaggcactataatttatgtagcaattgatatgcacatgttaattttttcaattacatattaattttgttattattttatgttgaaatttttatgttttgatcctataatgttagggcttttatttctcatgaaattatctttatattaatatattacatgctaaattttgtttgatatttatgagaatttcatatttaaagttgtattgtttatataattttattataaaattaattttaaattttttaattctattgattataaactgaaattgattatgaataatcgattctccattatttcttcatatttcaatttcttatttagtcgaaaaatcaatagtatttgtgttaaattctttgttttgaaacttttggattacacaattagatttatcatattgcccatcatttatacttgaaattgaatccatagattagagtgagaaaaccgagcaaaatccctcaatttcccactgttttcgtgatgttttttggtcagaaaacctccaccggacacgctgggtcttactcgggttgtttgacccgttttggagcagttggaggctgaagacaacctacctgggacgaagcccacttgcggttgctggagagtgagagagagtgagatagttttgtgacttccgtttttgactaatttttttccagcattattagaatttaatttctaatttttgatgatttttaataatttttgacttattttaataactattattaatttaattataaattatgtagttaaaaaaattattaaaaaataatt

SEQ ID NO: 399696 - DNA, 556 bp, Cannabis indica
ttaaacttaacaaaaaatttatacatcaaaaatcaaattataaaaccagatcttaaacatagaaaaacaatatgatattgtaataatttctcctccatcacttcacttccttgaatttagtcctaatcatcacaataatataaaaatcaaaaccacaatgtcagatatataaacaaaacccataaatcttactgtcaaccagtcccataaactcataaatctttaaagaaaaaatatacaaaatatttaatctgactatgttcgttgatgatgatggctcttggacgatggtaacctgtcgttggggaagaagaccggacacggaggtttgcgtgaagctcgggccgagaaccagagggagagaatgaaccgtcacgtccgaagtcatcctccgtcgatagatgcaaacgaataggctgaggtctgcgattggccactggtcaccgttcgggtttctgcgagcactagggtggccatcgtggcctggcagtgtcgtcgtgcaagggaagagaaagattttttggggtagaagagggttgttgatggctagagccag

SEQ ID NO: 399697 - DNA, 669 bp, Cannabis indica
cttcacctctctgtttaccatttccttctcaggcatgtgtgattttcttctcaattggagttagggttcgattcccttttccagcaaagctagtggttcgatttcgacggagttggtggtgcgagttttcctcaagcgaatcgagttgttcaggcggagatttggttgctcaggttcgattccacactctacttctaaccttactattctcccattttaacattgtggtagatttatccgattgcttactgagaaatccattaaaggaatttgagatcgtaatcaaataaaataatctgctttttgttttgttttgttgaattgtaatttcttagttgttgagaaacacaaacaatgccggaatttcttgtatgcttggtttatgctccaacaaatttatctgaaagagcagttgtttaagttggttaccgttttaaaaaaaaagtttataactaatcatttgcttatgtgggttttcggttatttgaataactcaatcttcagactgggtttggttactgagaaagttaagagtcaattccactatatttgttattaatttttttgctttttctttattttgtccgaaaaatatacataaatatttgctagttttgcttggatggtcatattgggtcatcatatcggtgaccaagaatgattttaggt

SEQ ID NO: 399698 - DNA, 777 bp, Cannabis indica
ttggacaagatttatgctgctattagtgtcattcaagttgggctatcatctagcatatctattggttttggtatcgagatacttggatctattaggtactagatagggaccaggttggtcttgtttgttattgtgctactggctagccgggcaagaacatctgctattgaattttcttctataagaatttctctgattgtgtactccttgagttgacttattaagtcatgtatcatacgtaggtaggccatcatcttttttcctcgagcagtgtattcacctagcacaaaattttccatgagttgggagttgttgaatatgtttaggtactttgaccggacctcgtgttcaaattttatttcgaaaataagagcttcatactctgcttcattgtttgaggctttgaaatcaaactttatgccaccatgaagttgctgcctccaggtgtaatgagggcaattcccacactagataattcatctatgcaagaaccatctacatgcaatttccatgttagaatctcttgcacttgctctcacttcttctctggattttgcttctgccttgatcttgtttagagtttttggggtgatatttgtgtattcagccacaaaattagcgagatcttggccttttattgccaccattggtttgtaggttatctcgtattatccttgtttgattggccatttaagcaaccgacctgacagttcaggcttctgtaacacttgttgtaggactagtcagtgtagattttgatgggatgagcttgaaagt

SEQ ID NO: 399699 - DNA, 547 bp, Cannabis indica
gttaggtttcattttttacctttaaaagtcagcatttttacccttgaactttgactaatacaaaattttgtccccttttattaaaaaaaaaattaaattataatactctattaattcaaaaaaattaataaaaattattaaaaatatgattaaaatattaaattaattgacaaatattaaatttacttaaaaattctaaattattcataaaaaaaaaaattttaaacttaattttatttataaacacgtatctttaaaattcaaatcaaaattattataaatgcaatagataatttaaacaaactaagtgttttaagaaaaaatcaagcttatttgtatttataaactcatatcttaacaaataaagaaaaataattaaaataaaaatataaaattattttgaaaaaaaaaaaaaagttaatgtttaacttaaacaaatctacatttaatgagaagaacaaaatagactcaaatttgtctcgtaaaatttaattttaaaattttaatttcgttgttaattttcataatcattcaaaatgactttttt

SEQ ID NO: 399700 - DNA, 676 bp, Cannabis indica
tactgtaggaattgtttggatagcactactatactatcaatacaatatatatgtgcaaacatagttacctaaaatgtcagaaaaagcaatgacataaatattattaaaagaacaaagaaaaaaagaaaaaagaagaaaaaaaataaataggattttaggagagttgtttggtcaatttttttttatgagtatgtacatgtatttatttaaaatcgtctataaattttaagaaaattttaaataatatataatattaaaaactaacatttaaataattacctattacaagtatgagaaaaaaaaatcaataaaatattttaactttaattatttttttacatagtaaactattcgaatttttttaaaagatttatgtgtgagcttaaataattacaatattcgcgatcacaaataaaaagttctccaacatgccaactcaattaaaaatctacctaaatactcctttaaaagtgcactgtagactttatatatcactacaaaaagtattacttttagttataataaaatttgtaactaaaagaacaaaaattgtgactaactataaatcgtcatttttatgttagtgattaaaaggtccgcgcggctaaaactattagttacaaaaattacaatttgttgtgactatttaaagtcacagtcagtacttgatgtggct

SEQ ID NO: 399701 - DNA, 805 bp, Cannabis indica
tgtgggtcatgagcgaggtggtgacgatgagcggagagacatcgagatagagagaagcgagctgcaccttaggattttggagccaggccttagtcttcggctgcctgagtagcaacagctgccgagtgatgaaaaacatgatcaaagagagggcaagaagatgaggtggccagagggggaaatgtaatcagctagggttttttattaaaccctttaacaattttaatgagaaagagaatggagagactctgtatgataaagagagagaaaaggtttttaatgttattgatttaagagagagagagccgtatatgtaataaaatataaatctgacatgtgaatttttttaaaatagtctactgtttactttcctaagaaaaaggtaaagtatattaataatgatttgttatattaatttttagaaaatataatatatttataaataaaaaatacattaattacagctgttttttttttaaaaaaaaaattatggttatgatatagtgacatgcaaagtgtgtcgggatatatttacctaatcgcaattggcgcgtcactataggttacaataaattttttttaaaaaaaataataaaaaactatgagagttaatctttagtgacacctcatatttttagtgacacacattatacgttactaacactaaatttttaaagtctttttgtgtgtgtcactaaaacttacccttaatcctttagtgacccgcacaaaagtgcgagtcactaaagagtgtcactaaagggtagaattgtagtagtgttaggatgttaatcaaacatacttg

SEQ ID NO: 399702 - DNA, 565 bp, Cannabis indica
ttgattttgctcatttcctctattttcgacatattatctgaaatagcctcaagaataagacttttaatcttgtctttcagctatcgacacgtcctatgtctttatggaatcaataatattttttttagatcctgcttgttccttgcatttctgattggttctagtttgggaaatgcaaccttgtttcgtttgcaaggatattttttcatgaattttgttaaactttgtatacacagaataaatcggtatgtacttctcatgtttcttctatttttcttttcttttgacgaatcttttgactcatccttcctttttccattcgcttgtttcccttgcttatgtcacctgttgtcactgttatagtgctattgttagctttacttgagctgagtttgtcttctgagcctgacttgacttgttttaattatgtgagcttctttctttcggatatatatcaaggctgtaataccctaagattaggaaattggattagcaaaccctaactagttaaatgtgtattaatgtggaattataaaattatatagtttaatatatatgaattata

SEQ ID NO: 399703 - DNA, 974 bp, Cannabis indica
ttaaatgacaggtacaaggtggcggtggggtttcaatcactaaggcctcctaattgtaaaattgaatggagttcaattatgtggagccgaatgaatatgcccgaacgtagttttattttttggctttccaggctcaatcggctcaaaacaaaggatagagtacaagtatataagcaggttgaagacacaaaatgcttattctgccaggctgaagaagaaactttgcaacacttgttctttgactgtcccttctcgtctcattgcgtaaggaaaatataaaagattggctttcttggaggatggcttccaattccctgcatcgaatagtaaggtggatctgaaaagcaaaggttagtaaggttaaaaagatgattcttgctgctgtcttggcagcccttgtgtactccatatgacgagctagaaatgacattctatggcaaaactcaatgccgactatagatagtatagtgtgcaaagttaaaaatgtgtcaaagaagagaatatcttgtacatgaccaaagaaaggatcaattagtgataaagaatggttagaagcattgtaaagttttaaaagtttattgtttcttttttaggttcttctacttggagaatgctatttggttgtataaaaatagtttgagcaatgaaattcacttgattcataaaaaaaacaaaaagatactgttcggtatatattttgaaattatatatactaattcatatatgtttaaaattttatatatactaacaagtaatagatattattagatagtcaaacataaataaaaaaaaaatcaaatgatactattgtgcaatcaaatactaagtaaaataaaattatattaatttttcatgtagtatatgatacacttttgttgaatatgatactgtggtgaaaaacaccctcaatacttggccaaaccagtgcctattaacaacaagaacaacaaaaacataacaagcaaacaagatta

SEQ ID NO: 399704 - DNA, 1903 bp, Cannabis indica
attgaaggaaagattaacttcagtgcctgttctcactgatcctaacagtgaggaaccatatgtggtgtttaatgatgcttcaggtactggattatgaggtgtactcatgcaaaatggcaaggtagttgcctatgcctctcaacaattgaaaccacatgagaagaattaccctacccatgacctagaacttgccacggtaatctttgtcttgaaaatttagagatgttatttatatggcgtaaagtttgagttatactcagatcataagagcttgaagtatatttttacccaaagggacttgaacttgaggcaaagaagatgggttgagtataaccctgggaaagctaatgtagtagctgatgcactaagtagaaagcctcatggtactttggcatgtttggctcttgaggactggaaaaggacaatcacagtgggtgattataacttgcaatactatgaaggggaaagaagtagcttgtatctctaacatagtggctacactagtactacttcaacaagttaagcaatgtggtgagcaactagacgggtggactgttaattgtgaagggtatctataccatatgggaacactagttgttgcagatatccctgatcttagggagtccattttgattgaggcccataaatccaaatttgttgtacatcctggaagtacaaagacgtaccaagatttaaagagacaatattggtgggaaggtaatgaaaagagatgtggccaactttgtagctaagggtatagtttgtcagcaagttaaggctgagcatcagagaccttcaggtttacttcaacctttgcctatactagaatggaagtgggaaaagattacaatggactatgttactgggtttccattgacacctttgaagcatgacactgtatgggtgattgttgatcgttttactaagtcttcccatttttttccaatcagaaaggattacaagcttaccaagctagctcgactttatgtagacaatatagttcgactacatggagtgccttcaagaattatttttgatagagatccttgattacatcaaggttttggaaggccttgcaacaagccttaagaaccgaacttcacttgagtactgcccatcatccacagacagatggaaagtctgagaggaccatacagactttggaagacatgctttcctcttgtgttttggattttggaggtagttggggagaacatttgtaactagtggaattcacatacaacaatagctaccaagccagtataggcacggctccttatgaggccttatatgggagaccctgcagataactattgtgttgggcagaactagatgagcatgttactattggaccccagattatcactagtaccactgaaaagatgaagggaatccaagaaagacttaaagttgttcagagtcgttagaaaagctttgacgatctccatcgacgggaatttgagtttgatgttggtgattatgtcttcttgaaagttattcatatgcatggcgtaacaaagattcggagtgaagggtaagctagccccgaggtatatgggaccttttgaggttatcaagagaattggggagattgcttatcgattaaacttaccaggacagttgagacatgttcataatgtgttccatgtgtctatgttgaggaagtatactccagatccgtcacatgttattgagtatgaggctatccctcttcaggaagatgtgacttatgaagaacaacttgtcaaaatcttggcgagacagctaaaagtgttaaggaacagagagattccagtagtcaaggtcttatggaaaagccacagggaagacgaggctacttgggagttagagtctgagatgtatatgaagtatcctcacttgtttaattttcaacttgaggttg

SEQ ID NO: 399705 - DNA, 458 bp, Cannabis indica
atatatatatatatgaatattgtgttggatcaaaatccttaatatgggctcgtatgtatattagtgtattggtatttaaaatttgacccaaataaagtgatcattttagtaattatgggtcattggtattaaagtatcatgggctaaatgtgtaaatactctaagcgatatttctaatttattgagggactaaattagaaatacttaaaaataataaactagatatgaggttataaattggtagtggtccccaagaaacaacagccaatttctattctcttcttttcccatcaagagagaaaattaaaaaactctaagtcttgttttcttggaagatcattacaaaaaacaaaaaaataaccacaaagattatctcaacaagatggattaagatcatcactatctatagattaaggtacgcttctgctatttgagttctttgttgggttttatgccct

SEQ ID NO: 399706 - DNA, 529 bp, Cannabis indica
ttatgagtgatagagaattctaagaaatagtatcagagctacatttgattgattctttgaggatttaagtttatgttcaagaaattcgaggattttatttttaatctaaaaattagggttttgatcttccatttataatttgaagttgtgatttcatgattatttgataacccaaatttaaatttcaagatgaattatatatatttattattttttttataagattttgatttttcatttataatttggggtttttcatttataatgggtggttatttttctacaaaaatatccacgtagaagagaggaagaccaaaagttcaaaaatgagaaagtatgcaagtgttgttggattaaatacttcatgtgggcacatatgtataatgtatatgctattataaaatgtgatgtaaaattaagtgaccaattatgttatcggaatcaaaagggtattaaattgtcatggaaataatgtgtagatactataagttaatttataatttgttgaggggccaaattataaataccc

SEQ ID NO: 399707 - DNA, 932 bp, Cannabis indica
tgagtcctccatccaaggtcactaaagcacgtttacgggatcttgaccagggcggctatctaggcaagttggaatgttatgttcgcgcctcgaactaccgagcctccaatccaaagaacgcgatgtgtgcctggtcgggtgctcattccaaacaaggggcactgctgcctttgcacctgtactttaggaaggtggcagactttttctgtctctgtctgacccaatttactcccaagggcatcaagtatctatctgccctgttcgttttctatgccaccaagaagtgggatatgacttctcctcatgaggttagctggtaagtaatccagtgctagccgggctgagggagctcatcaggagaatgaactcatttaactcaagcatgaagctaatttgaagggagatgcgggagccaaccagtatgctcaggagcatcttgagcaggaagacgaggttgaggaggagcaggtgacttcgctcaaaaggaagaagaaacttccagcagagcacaggcctgttgaacaagaaattcagatcagggagcacagtctacctgcttggccatccactcgtgtagtaggaaaggggaaagccatcctggaggagcaaagggacttgtcagatgacgatgagccatcaggtcttgctcgggcaaacgcttcttccgaagtacaagatactacgtcttgcctttaactttattaattatcatgctttcatacttctagtgcttttctctaaccatgttgcttttatttcgagcagacatgtctcaaaaaatgctcaaagctttgaagaagagagtgttggaaaatattttaccaggatctagatttacaaccaagtatgttttattaacatcctaatatgaattctaaaacaatgaaaataaacacataagagtttaaaaaaaccttacatttggtgcagcg

SEQ ID NO: 399708 - DNA, 656 bp, Cannabis indica
agtacaagtaagataatgtgacctcattattagttttacaatacttttagttttgctgaacacagttaataaaactgcagcaacatttccaccccttctgtcataccagaaatcactcctaaggatctagaaaaaaaaaaccactatattatattcaggtgcatacacaatggaaaaattactattctctcggtacaattgacatggttgtaagccaataacaaagagccctaccattgagataaagccgctgatagtaatgttatccttctgaattagatccttaagtaccgttgttctctctaaataactcaccagggagagcttccagccaataccaaaaccaacataacctgcagtttgattgcacttaaatatttgattattcaaaattaaagcatatacatgtatcataatttactaaactgaagtggaaaacaaaagtatatagaattaataaccttaatcatgcctattaaattaaacaatttaatttgtgataagataggcagacatatttaatcaaccttaaaaattcacttgattactgttaatttaagagatcaacctgctatactacataaggtataatatatgctatactatataaggtatattatatacatgactgaagtttttggaaagataaaatctta

SEQ ID NO: 399709 - DNA, 554 bp, Cannabis indica
caccagtggtactcaacactttttagattgcatcttatgattagttagtaatatttattaaaaattatttttttaagctatatagtacttaatacttaatatatgacaccgatgatgatactaggcaccaataatactttttaacatttttcattatatatataccataagtttgattgcatatttacatgtgtttcacgtgcattgcacgggaggttgcggctagtaatatataaataacattaaaacaacaacaaaaaataacatacatataataaaaaatcaacaataaattaattagagtacaacataaaaaagaccgtattttctgtaaataaaatcaaaaaaatcgtaaaaatgtttaaaattccgcaaaatcgtatttttgtaatttatttattattttgtgtatttgtgaaataatcccttttaagtaaacattaataagtaatcagggtcgggccttaactaagattgatttaggctcacaacttaaaaaatattattgtaaaaatacactttctttgtagtaattttcaaaaatatcacttttt

SEQ ID NO: 399710 - DNA, 651 bp, Cannabis indica
attcgggagccctgccaaaaccggctaaccatttttacaggtactggtaaaatcaactaaccgattttataccagtttcccgaaaacttcgaaatcttgctcaaaactccaccaaatgcaaccaaactttccagagtacctaattagggtatacacaatatattccaaccaataattcacagaaaaacccacggaaacaaattatgccattaaagacccaagtttgagtttcaaaactcaaacttgcacaattccaaccccatacacaaaaatcagctgcaaaaagctaaatttaactcaaatagaccttacaattcgaactacacaagaattaaaccctaacagcccctaattctcaatatcactacttgaaaccaataccaaaaacttgaaaaactaacaacaatatacaggctaggaattacctcaacttgattttcccttcaattccttgcaaaaaacaccagaaatcagcaaccaattccttggttatatctgggttcgaaagaaagaagggaaggagagaggttttatttgatttttctctaaatgaattatggattaacttagttaatctttgctgaaaaagaatgggaaggtgtcatcaacttaggtagccaccaaatcacacatttggttaattactaaaat

SEQ ID NO: 399711 - DNA, 513 bp, Cannabis indica
gtaattagaaaaatatataactacactcaacttaataagtttaattacgtaacttattatataatagattactctatgtgtttgtcttatgataggtgaattaatgtttgatgccaatatttatgtattcatattttcaaatttcaatcaatatatttttagattttcacaaaaatttatatttgtcgaatgacttactacttatgacaaataaaaaaaaatacaaaagttaaaataatattaatctcaacaaaattttacaaattaataaataaattcgtgcagtaataaaaaattaatcattatatgcctaccatattactcattctttttttttaattgaaatattgtccagggaaacaaaactaaaaaaaaaaattacacatttattatgctagtgtaattgattacacattaatttatttattatggtgacatttggtaacatttttattttttaattttttaattacaaaaataaaagtagaattttttgttttaaaaattttgttt

SEQ ID NO: 399712 - DNA, 811 bp, Cannabis indica
aaagtgataataaagaaaaaaaattaattctaaaaaataacataaataataggctaaaaatatcctaccacaaataaatgatataaaataatagaaaaaaattccaccaaaattattaaaatataattaaaagcaagatttaaaatttatctataaaaatctataatagcactctttgagattgttatccaatattttgcataatgatgtggcaaaagaatcaggtgacacgtgtcctgcatttcttgtatctaggcggaggtgaatgtcccgaatagactcgatattgtacgtcagcatgtataacctttgattacctgagtaggatgaaaatagaccatccaagcaatgtatgacctttgataagtttggcttgtcgaactacttccaaagagttaatcacttcagagtaatcttgcgatgccaagacacgaaagcaatccctacaatcatgggattgaatcagagaaatatagcaacctgttctagtttcctatttcttgtatcataattatgtaataaatgtaatttcctattttatacattgcaagcaaaaggaaaaccttccctcatgcattaagatcctataaatagtgacttagtctcactatgaaatggattgaaagaattgcttcagagagagagatataagagaattactcagagattcattgtaagagctttaagagagaaaaacacatcgctctttttctcgagttaatacaatttaagggaattaggctattaccacactcacggggccgaacctctttaaaatctggtgttaattattactttattatttttgctc

SEQ ID NO: 399713 - DNA, 510 bp, Cannabis indica
cttcatcacccttctccaaaaattttctctccttcttcctttctttcgaaccacctagagtccagctgaagtgtggatttcttttcagcttaattctgtgaattcagaggaatttgagtgcttcaatctaaggtagcatctcttgctttcctctttgctttttattttgttaatatagggtttttaggtttgaatttgtgaaatttggttctgtgatgatatttattgtttgaggttataatctggaagttgtatggtgattatctaagctactctaagctgaattgatttgttattttagtgtttggttggaatttgagtttaagagcttaagttggagctctaatggtggattggggttttgtttgatttgttgagttctgttggttgggattggtttagtgtagtgtatgcaggtattctggaggttattacaaagtttgggattgaattgtgaagtgggggtcggttttgaggttcccagctatgaaccggtcgaccggttctggg

SEQ ID NO: 399714 - DNA, 789 bp, Cannabis indica
ccttttcttggttttgaaatttggtgttatcggtggaagcttgacaagtgcaagggagatgaggtcgaagctcattgatctcgttccatatagcccgaagcttggtgaaataggcagtgatagattcgtctccttgtagtaaatctgtgagagattcttaaagttcaaaaagacgaggtccatttccttgactaaatctattagtaagctcagtccacatctcatgagcagtatcaggaaacattatactactcttaatatccaaagaaacacaatgaataatccaagacattaccatttggttacagcagatcaatgaatgaaacaatggattggacggatctggttgtggtaaggtgccatcgatgaagccagtcttatttttggcaccaagagtgatgtcaccgaattagttacactctagtcatggtagtaaacgagctatatgtcgtatccacagggagggaaaatatactcaaaaggacagttagtaattttacaagaataaaataagaaccttaaatgtgatgagattattgaaaaaaatgatttttgaaaattaaagaagtaattaaaatgagaagtaatcagaagatgattatggagacacaagcttcgtacatgctattatatttccctaataaaattgattctttaaactcaactataactctacaccattaattatagttggaaaatatgtataattaagctcactagaaaaatatgttccataattaaattaatactacttctaaaaatactatcatattatataatttaaatcga

SEQ ID NO: 399715 - DNA, 734 bp, Cannabis indica
ttacataaaattagtcttgaaaagtagagattaagaaccgatctcttacctcttagcgtaaaataagactctttaccactacaccaaataatatttaatatatattcttattatttaatattttatttatataataataataatattttttttcacaattttaggactctaagcattcgggagccaaggcgcatgcctggctcgcttactctcaggaccggccctgtaagcggattatgactcacatttcgattacatgagggaattgtgattcagtggataactctttagtacgcaataacatggattgttctgttaacgacaactagagtcagcttaaacataaggcaacttaggcaatcgtctaagggctcacaaaatttaaggcatacattttaagggtagtatacatttttcttgtaataatacgggtgatacatatacactaaaaaatatatttcatagattattaggaaaaaaaacttcatttaattaatttcaatatcaatattcactactaaatatcaacattacaatttgattaattttaatctaaaattttaaaactattaattaataattaataatgtcataaataaattttcttatacataaataaatttaaataatattataatagtttctaataattatacctattttattttgattatttttatgatgttgatttattttttgtaaaagatttttataaatgaattaaaattcattca

SEQ ID NO: 399716 - DNA, 552 bp, Cannabis indica
cttctctcactagatgaaccataaaatatattatgatgtcgaaaaaatatggtgaaaaatacttttcgaggttgcataatgttttgactatatgttcatgtaatgcatctaatttatttatttctaatactttcccgcataactaattaacgaaaatgcaaaatgtgtcaaacattctcgaatatttttcagcaggactaatctaatggtgattggaagtagatgttgcattaacgcattaaaatcatgtgatttcgtacccattagtttcaattcagtctcatttaccaagtttttgatgttaaacgagtaaccatcacgtactttcatatttgaaaatgatttaaaaactatttgttttccccttttggagtgaccatcgcattaaaatataatcattcacctttctttttaagtgccagagattgtcagatacccatttcaatgagatctaaacgactatttaaaccatccttagttttgttggggatatcaagtaaggtaccgataatactctcacacacatttttttcaatatgcatgacatccaaa

SEQ ID NO: 399717 - DNA, 728 bp, Cannabis indica
catttatcattttatagggtgcaaatagaattcttcttatttttctattaattttgaaaaataacacattttcttctaaataagagcttatttttcgggataattacctaagacactgttttttgtaaaaaaattacatttttacgtttaatgattttttctttacatttttacggttcccgtaaaaacaacacgaaaacaataagaaaactacataaaagtaacatgaaaataacatctaaataacatcaaaacaacaataaaaaataacatacacataacaaaaaatcaacaacaaattaacatgaatacaacataaaaagaccgtattttctgtaaataaaataaaaaaattcgtaaaaatgtttaaaattccttgaaaccgtatttttgtaatttttttgttgtttttgtgtatttgtgaaattatccctatttttttttttcttatggctcattatatttggaataagttgagaaatatatcttttttgtatttattaataaaaagcattctcatattatatttcattaaaaatatctaagtgagttgccctaacaaacctttaacttaaaccaaaatatcaataagcccgagccttaaaacatcaaacaattaaatttgagggctaagttgaaaaatactccttttattaatgaattaatcaaatttgcctctaattttatatttattaaaaacatgtctctttttatatgtattgtaccca

SEQ ID NO: 399718 - DNA, 764 bp, Cannabis indica
tcacacatcaactcgaagggcaattcccattttggtgaagtgactattggtgctgaaatcaatttctccttaagaacttggaatgccttcaaacattcttctccaaactcaaaaggaacgccattaacaagtagccttgataatggattagagatctttgagaaatccttaataaatcttcgatagaaaccagcatgactcaagaaactccttactcctttcacagaaactggaggtagaaaattgtctattgttgacaccctagctttgtccacctcaatccctgattttgagatcttgtgtcccaagactatccctcctgttaccataaagtgacacttctcccagtttaggaccaagtttgacttttcgcatctgattaacactttctccaaattctctaagcaatgatcaaatgaagaaccaaagaccgagaaatcatccataaagatctcaatgcatgattcaattaagtccaaaaagatagccatcatacacctttaaaatgtagcaggagcgttacataatccgactgacattcttctaaaagcaaaagtaccataaggacatgtgaaagtagtcttttcctgatcctcaggtgctatggctatttgatgatatccagagtagccatctaagaaacagtaatattctttccccgccaattggtctagcatctgatcaatgaagggcaaaggaaaatttcgggttgctttgttgagttttctataatcaatacaaatcctccaaccagtaactgttct

SEQ ID NO: 399719 - DNA, 826 bp, Cannabis indica
ataaaacaaagcaaaaatatactatataacaaaatctatataccaacaacccacaacaagtcataaaaaattaaaaaaaattgacaaactttcaaataaaaaagatttaacgaaactaatatagatataccataatctctaaataatttgcttctaattctaaaaaacaaatatgaaaaaattaattattgaattttttatgtggcaaaagacaatataaataataaataatatataaaaaaggatattatgctataagttttgaaatgggaattgttgcctttcccaaaatacgtggccgcgtctacgtatgacacgtggaccaaaaggacacctcacccgagaattagctgagtcgtatacagatggacaagtgtagttcggggagtgagcccccggagaagtacataaagcatgtccttcctctctgggagctaaaaatataataaagcatctcttgaggaaaacatattcgaacagtcacctcacatttaatgcagcatggggaaagcatccaggaacgcccataagaggacgtgtcagacaacgtaagccttatttacggcgactacaagataatcaaaggggctagtgacgactccattatgaagaatcacatcaatcaaggaatgataaagattaatctcacctaatccctacgatacctacgacataggttatgcatgtcctattttgtatctcttgggaacttgtgctcatacattactggtagtaaaagacaagtgaccccttttgaaccatccttgccaatctctataaatacccctgaacaaaataagaaaggggatcgaaaaaaaaaggagag

SEQ ID NO: 399720 - DNA, 1032 bp, Cannabis indica
tgaggagttatttaaagctaagtacctgcacaccatattgtggaaagaacgtctaaccattgatcagctaatgattgagcagttggacaagtcatttccaagcttgagggtactacacatatctgattataacatcaccaagtttccttattcaataggcaatttgaagtatttaagatatttgaagttagattgtcgcaacattgaagaaatatctaatacaatatgtaagttgtataatttggagacactattgttggaggaatgttatacagtttctcaactaccaaatgatataggaaatttaaccaagttgcgctacaaaatttgcaaacactaaatagatttgttgtgggaagtaatagagattctggtggtattgaattgttgaaagagttttcagatctacacgggagtctttctattaatggactagaaaatgtgagtagccttgaggaagtttcagatgcaccattattaaagagtaagaagtctcttagccacctatttttaatatgggatagtgaagctaaacttgatgagttgcacaaagaaagagaggtactcagtgccctccagcctcatccaaacttgaagaaactaaagattgagaactataatggcaacggtttcccaaattggatgggagatcctcgctgcttgtctaatttagtaagcatggagatgagacgttgtggtaaatgcagcttcttgccgtcgttgggacaactgccttctctgaaagatcttatcattcgggattgtggtgtggtgaaaatagattcaaagttttattgcactactagtactagtgttgattcttctgttgcaatacaaacaaagccattctttagatctttggaaaacatggtatttcagaaattgtttgagttggaagagtggtcatttatggaaggtggaggttttcctcgtcttaagagtgttcattttgagtattgtcataaactaaaagtgacattgttaggagattattttccgtcattgatagagcttgtagtagatggctgtgag

SEQ ID NO: 399721 - DNA, 697 bp, Cannabis indica
ctctctctctctctctccaccgttcgcactagtcagtaagttactttctctctcaatctctctttaactttgtatttcttttcaggcacgcaatggtagtcatagtgcagtggtggctctgagattaatattatattgctatttgtttaccaaaatttcaaaaacaataacgtgtcaagagtagcaacacgtggcacaaaaatattaagactaaagtaatgaagaatatgtaaagtcatgactattgggatgaccgttaatcatgaaaggtggtcatgaccgtcaaccatgaagggtggtcatgaccgtcaaccatgaagggtggtcatgaccgtcaaccatgaagggtgatcacgactgttagaatggaagtcagacgctcacttttacccctagcttgagtaaggtgggcgtttccaaaaaggaaaatgatggactaacaccttcgtaagtagaatgaacaatcattatgtacccacacgccaagttagtctaaggggtagatgaaactaccccaaccatagacataaaggtccactcaaaggtagatggtgacatccacataacactataactactgacaacatacaagggatcttgggggtcacccaagatgacgatggtcgccctcctcaagttgggttttaggggtgtcgcccccaagtatgggcttcatccccaaaggtggtcaacgacc

SEQ ID NO: 399722 - DNA, 1095 bp, Cannabis indica
  modified_base (321)..(321): a, c, t, g, unknown or other
cccatatttccatgttgccgagaaattgagaggaacgtctggagccgacttcgaagctaaaatctgaaatcactccattagagttttgttgaattaatctttcttgataatcaatccttcgatcgttcatttacaaatgaaaacaaaatatataaatatataaataaagaagggacttttgcaagaggaaagaagaagaagaagaagaagaagaataagtaagaagtaggaaaaaacaattagaggagtattgaaattggaagtttaaaggactagaggaaaatactatgttgatattaatatatattctcaataaaaaanaaaaaaaaaaaaaacttccgatataagttttgaatattaatgttgacactatgtatgattgtatttataattattttaataaagtatgaccaattgttatgagttgatattatcaaaggaaatcttttaatgaataatagttatttgtccttgtatggagattagaatcatactatactattaaatataaacacgaaattgggaaaaaaagagtagaaattatataaattatctgaaagaattaagagtttattttaggaattattacatagaaaatataaattgatattttatttacaaaaatactttcataaggtaaagataacatctataccttttatgtgattttaattactaaaatcctacttacactatcatcacttacacaattagacgatggttgcatggtggtttctgcgtagtaacacggtggttgcatcagacgaatcagaagatggttgcaaggtggttggccgaaggttgcattagacgaaggtttcaatcagacgaaaatttctaggtggttgctgggtggttggctaaaggttgcatcagacgaaggtttcaatcagacgaaataactgttagcaaaatgtttaggcaactatataatgcaactgttgtgaaaaattaaaattcaaaacagtgtttctacgtacgtaactctatctacatgtgtcttaatgatgtaatatgaataaattcaccattagaaatttagaaaacaacaaaaatacacatggataaacattttactatagtattgatgtaatt

SEQ ID NO: 399723 - DNA, 839 bp, Cannabis indica
atgtccagattcaatgaatataaaatattcatttatcagaatcaataatattattttattttcttaattagaaatattctaatatataaaacacataaccaacaacataaaaataactctaaaacaataaaaaaaaatagctataaatcaatagaaaaagatatcaatcttattaaaatatgaaaattattcataaatcaactccgaataaattacaaaaatgtcaaaaaaaaaaaaaaaacgcttttataaattgtgtaaagagagaaagatataaaaagagtgctcttaatttttttctaagatagaaaaagagtgttaaaaaaaatatgagaaaaaaatattaaagtaaaagaatcatattttacgtaaaggttaaaaaaattaatttaagatttttttttttttataaaatgtaattaattaaataaaaatagaatgaaatggtttaagtgttaaaaaataaaataaaattttgtgagccagtgaaaacttgttagaaaaaaaaaatatataaaaatttacatttattatatatattttatatgtaaagataaaaaaaaatagtagagaggatacataagaaaagaaagaaaaaaaagaagtcagctaaaaaaacaataaaaaaaaggtgattctacaatgcacttttttaaaagggatgtactaatgcaccctctatttatttcggcatctagaaaaaaaatttagtctaatttttttttatattcatgtatattatagttatttaagatatcctacaaaattttaagaaattcgaaataatttacaatttacaaaataagattcaaacagtctattttagacgcgtataaaat

SEQ ID NO: 399724 - DNA, 698 bp, Cannabis indica
aaagatgccaaatttgacatctactgtaaaaatcccattcacttttataggtctttatatatccagctcatatattgaattataaatcatttgagcaagtttcaagccccaaaaacttaatgtatatttagaaacaaataaaagatagtagttaagcaccaaatacttgaaaacaaaaaaagtctttactaaacaattcataactttttcaaaaaataaaaaataataaagtaaacaattaaataataaagtaaacaattaattgaaataaacgtgacccattccatgatacatataatatccaagtggtcaaaatataaattaaaatttaaaggtataaaagtggtggcctcaatctgcaattcttagctatgattattagtaagaaagtcatcccatgttaaaaattgtgattattatttacttagcattaatattatatagaatacttttttaatgggtactaaataaatttaagtcaaattcaatttttttaatggagttttttttttttaaattaatgaaacaactctatcatataaaaataagagatttttttaattaaataaaaaaataagtataaaatcttaaattttcctaattaataatatacctattaatatatacatatatatttaagggaagaggcttcaatggttacatttttattgtaaccatcatggttacatttttttaag

SEQ ID NO: 399725 - DNA, 597 bp, Cannabis indica
gtctaggtttgaaatcgggttatatggtaggaccgggagtgaggtcctaggccgggtctaggtttgggtttgaagtcggggtccgagttagaagctagggtctatggtaggggttgggaccgggggtctgaggccgagtctggctctgggttcgggtgctggtctgcgtccaagtctgaggttgagggtcgaggttgttgaggtcttatgccctaaataaaatctaattctgatgtaatcttatttacttatcaataaaatatcaaagatcatttttcgctattgtacattgcgtggttcacatgttactttcatgattatttaattaatatataaattttgctaaattttaaacatatagttattcacaattacagtgttgtcaccataatgaaaaataatcatgattatatgcttcaattagtcctatttttaattaggattttaaagtatttttaattagttttagctgtgttttgtgtaattttacgcttttgattattaatattttcaagtttagcattggagaagataaagcaaattcgagaaaaaaaattgtaaaaagaattaattaaatgaacttttattgctagagca

SEQ ID NO: 399726 - DNA, 454 bp, Cannabis indica
agagagagagagaatatctgataccatattagtaaagtgattttattgtattaaaatgaaataatgtgtacaaaatgagtttatatagggggaaggatatccaaccctagaatacaccaaacctaactaggaatatccttatcactataaccagacaccaaaagtaaatatacaatatttaatatttaatattatctgagaaaaatacaagtaaaagacctatagaattaaaagaaatccataaaaatgtaaaagaaaagagagaatatttcacaaatacatcaaataacaaaaaaattacaaaaatatagttgtaccgaattttaaatatttaaaatatttttacaatttttatgattttatttacagaaaatataatctttttatattgttctcttgttagtttgttgttgattttttgttatctgtatgttatttaatgttatttttcttt

SEQ ID NO: 399727 - DNA, 1015 bp, Cannabis indica
aataagaattatatacagctcatagtttagcaaatcatgcccttcgattagacgataaactattaattcgagaagttctaccgccaattgtgtattgatacatcgttaattcatgaataattttgttcattgcctaaaaaaaatagatttgttttttaatttattcattttaagaaacaaactaatttaagtatgtattgtaagtataccttatagcggcacaaagtacttttttgtgcatcaatataaataaaaatttaataaaataaacaactttgcttttttatatcatatactaattaacaaataaactttttatttaggcaaaatattttattgactctagtctctatctgcatggcagtatggtttacaaagtactattgaaaatcaacaaaggaataatatgtatgttagttgtatatataatatattccactaattcttaaaatattcataatgatttatagtgctgaaattttagttcaaaatagacagttacaacgtgttttaaaaaatgtataggtacaattagttgtttaatatttctgaaaatataatatttgggatgtaaactcactactacaaaattcactattcacgtcggtcaacgcgactgttcatcgcgttgaccgacgtaaatagtgtcattttaaatataatcgtcattttaaaaatgacgcaaataattaatgatttgcgtcggtgcctaatccttcactaattagataaccgacggtaaaagttaaaattgaaaaaaaaatatatatatatacaattagcgtcattttaaaagcctcgctaacgtgttctctatcatttttaagctgacactaaacatgttccaagagtgacaatacctcttattgttcacttactcaaatttcttagacccaattcatttcgtgaacccttagtgtgcgattgagctggtcgaagacctcttggcgattctcatccgcctctgcgccaaaccttcaaatccctccgccactccgtctcggtcggtcctctc

SEQ ID NO: 399728 - DNA, 578 bp, Cannabis indica
ccgattcccaaattttttcatttggattgtgttcaagagttgacacactctttttttatgctttttgacacttgttggtaatgtaggaacttggcatagcatcaacacccaagagccaactttggttcctctttattgatacctacaaaacaaacttatatctttctttttggtacccacataactttgggtcctttgatgttagtctttaaaacctttggtatccaaatagccttaccaaaataggcattcattttcacatggcaacaggatttagtgtgaccatcttggttacaataagtacaagttaagttcaaattagtagatgatttgaaaaagaaattcctaagaaatttttgtttcacgctagtgttatatcctataccactttctgaaaaagcagattttggactcccaagcatcattttaaaattctcttttccttttgtaaaactgtaaaccaccttgtttgaatcatcaattttagctttcaagtttacaacatctttttcaataaggaacaatttttgcattgggtttcaatcaaaaactccttttctttgactttcaaagcctca

SEQ ID NO: 399729 - DNA, 975 bp, Cannabis indica
gaaaaaaacctagaatgttttggactttcggtcttcctgtttttgtagggctagaaccctagttttcatatttttctcaaggtttagtgcagtattaggttgttggtctttaggactggattttgggaatggcttacttaaagttatttgcccgtttatgtaatgtgacataggacctccattcagctcgagaattttccattacagttgaccggcgtacttgaatttggaaacaaggtaagaatagtatagaacattttgtatatgcgaatgtatgtatgtgtgatatatatacatgttgtgtcgtgattgtatatgatttgggtgatatcatagtgtcacaaccattgtgtcggttcggcagtacagtcatcgtactggttaagagtggtactcaccccagaaagtattaattgatgctatcatagcagcacaaccattttgtcggttcaggagtacaggtatcgtactgtttgaaagtgatatcatgggaaattatactttcgggtactgttgatgctatcatagcggtgtgaacatagtgcaggtcccccagtgcggtcatagttgtggtagtgggtgatatcatggtcagtagtaccaactattaagaacattcttaagtcatctggtaagccttgtggataggtgtatgggcgctagacacaagtcaagaatatatgatttgttgtatgcttttcttactgagtctgttgactcactgatgctactttcatgtgtagataaaggaaaggtaatggttgaacaagagtgagctctaggcttggatgaagattatatatgtcaagacgacacaacctggagggttcggtctcgagacatctagggttttattttgtagtgttgtgcgaccagattataaatttattttgatatagtttgtaaaatttttaatacgggatcccgacttatgtaaataaccctataaaagtttataaagtttaataattaaat

SEQ ID NO: 399730 - DNA, 594 bp, Cannabis indica
ttaaaagaatgaagcattaccatttcagaaaaggtcgagatgttggacgaaaatccaacatgatgacacctagagcaatatacctctaaactagagccttgcctgagaacaaaaatgaggcaagaatgatgagaagaaaagttgctaggtacctaatcctaaatggagcaatgtacagacaaggcttctcattgctgctcttaaggtgtgtcactaagacaaaagtcatgcgattattgatagaagtgcatgaaggcttctacggaaatcatgctgggggcaaagcctatccaaaaagatactccaacaggggtacttttggccaacaatgattaaggattcaatggactatgttaaaaaatgtgacaagtttcaaagattctcgaagatcttgagagctccacccaatgagctcacattgatgcagtctccttggccttattctatatggggaatagaccctattggtcaactcccaaaaggaaaagcatgtgtgcaatatgtcgtagtcatagtagactacttcaccaagtggacagaagctgaatccctggcgacaataacttctaaaaaagtcctcgactttattgtcaa

SEQ ID NO: 399731 - DNA, 898 bp, Cannabis indica
cttatatgtcaatatcgttattggtctaattaagtatcggatcccatataatttaatataataacttttaaagaatatagctgaccaatcgcaatgcgacatatcaagaaagtgctagacactactagtgactaatagcaatactcttaagttaaaataataatttacaatttaattaggacattttttattagaaacacaagtaggattataatgttaaaaaataagtcaaattaatctattgtctaatttcctaattatttgacaaaaaaaattaaaataaagttaaataaaaaaattagcagttaataattttaaaaacatttatattcaccgcttagaaaacagcagaatagatctctgcaggtgatatttgagtttttgaattaagactactttttattgattggactcgtgatagagctatagtgtatatatatatatataggggatatctagtatacgcccccttcaatttacctcatggcatagggatgttaaatggccaataagaattaagaaaaaaaagtgtacacatgatattaatataatcctttacagccaattctttttcttaacaaaaaataataattgctttatcaataacggtgggctgactctattttgttacaggtattttttttttttaatatttcaataaaaacaatccatttaaatttttaatactataaattattgataaattttcaaaaattcatataatatttcaataataataatatacactatcatataacaaaaaagaaaattatgaaattggtattatcaccggaaaaatcaccaaaaagctagttccttcatcaagaaaccgatttcttcatcaagaaaacaatttcttggtaattttttcggtgatttttttggcgacaatgccaat

SEQ ID NO: 399732 - DNA, 1145 bp, Cannabis indica
tggatttacaaggagtacgggggcatgcatgctgcagaatttttccttgccactctgtcggaagccgcacagtaatggtatttcaagtcggctcctagaaagtttagttcatggaaaaccttttctttggaattccatgcgcaattctcttcctcgcgtcagctcccattgcatttgggagatttggtcgaagtaaagcaacgaccaggcgagccactccgggcatacatcagcagattcatgacggaagcgaccaaagtttcgcgggtaaccgaggatggaaagttatccgcgatactggggggcattgaagtccttggtgaactttggaaagatataagaaagaacgggccggtagactcaatgagtgatttccttgaccgagccgaaggcttcatcaagctcgaagaagccattcaacgagcagaaggtgagcaaaagccgggcaaaacgaaggctccttccactggaacatccgcccaacttcccaaatattccaacaattcaagtggcaagcgttcaagcaacaaccacaagcaaggaaacgcgaagaaaggaaagttcactgataaatccggacagactccccgtgatcatgccaaacacactgcattcactattctaactgaagatatagagagtgtatatatggcaacttagtcgttaatcccgtacaagaagcccgggcccatgaagaaagataccaataaaagggacatgacaaaattttgtcggttccacagagactacgcccacgacactaacaaatgttataatctgaagcgggaagttgaatttctaataaagaaaaacaatccgcacttgcagaagtatgtcaagaccaaccaaggtcaaaacaaccaagatcttctacctccacccgtcgatggacacttacaagtcattattggaggcccgcacattgttggagattgaggtaaagcttgggagaggtatgcccggacacctcagcacgagcaagaagaagtcatcctggccgtgcaagaaaggaagcccaaagttccacgagcaggagagccaaccataactttcaacgatgaaaacgttgtcaagattagatttgtgcacaacgacccgctggtcgtggaagtccagatagcaaataaaatggtggctagaaccat

SEQ ID NO: 399733 - DNA, 1108 bp, Cannabis indica
tagtaaacaccttttagagttgtcaactgttgtaatattttttttttaaaagaagatgaaaaatattatgtgaataagagagaaaatataaaaaataatatttttaagatgatctgtgcattttggcaactacagatatagttccctactctatcctttaaaatatatcatacattaacttctttaaaatatatcacaatttttttttaaaagaaaattaatatattttattgatttcaaagctataatattaatatttacacatattttcatataagaaataaaattgaaaccctaacaattaacaaaatatgtttagaacaatgaatagtattctataaatgtgaagacttttttcagttttaaccaaaaaaaagtaattgttgacctcgcttttggccaacgacaatgagtcttaattgtaagcgacaagtaatataatatagatgtaatataataaaataaataaagacacatagtttttatagaggttcggccccgagcagttcggtaatagcctactccccttgatttgtattgacttaagaacaaagaatgcagtgattcctttcttagagctcttacaatgatatctctgagtatatactcttagataagttttttcgaccatttgcctagtgagaatagatcactatttatagggctataagctttgagggaaaagtttcccttctgtttcaatgtctataattggtaagattacatgtaacaccctaactagcataggcgtattacgtgatttttaaacatactgtgcagctcgttgctaatcaacgaggtttatggaaatcgtgattaattaaaatttttgctttttaattaaacttataaaatattttatacaaaaatactcgggatcccgattacaaaacactttacaaaagtttactgtctaatacaaaatacttgtcgcctagcgactaattacaaaagcactgctgtcccgaggatcgtacgctccaggcctaaccgccccgacatgtacaatcttcatcggctcgtcctcacggttcctcagctttggcccttgcccttacctacacatgaacatagcactgtgagtcgacagactcagtagaaaaagcat

SEQ ID NO: 399734 - DNA, 560 bp, Cannabis indica
tgccatcaaaatttaaaatttaagacctcaacagtcaactctaaagagctaatcagctaatcatatttttgttgttttttaaaataaaatatggagaaagttatgattagaattgagagatatataagcgccgccaaaatttttaattgagcgcataaatgtcattaaatgtactctaacagaaaaacaaatgccatcaacacaattaatatactaacgactgcaatcaaaatgggattttgttagcagatttttttattagttaagtgtcaccaccaaccctaaagaatatatgagattttaccgctaataactctgaactatacacataataatttctcaaaaaataaaaatcacagctgaagaattcaaaatgaatattatgatcaatataggttggattgattaagaggataaaagcacgaatttgaaaaactgagtgttttagcgcccttcaaatactgatacggtagcttcattcacagttgttgcagtgtgtggttgaggttggcaagtaaagaagggttgtttaggttgaggacgatgtgtctctttgatca

SEQ ID NO: 399735 - DNA, 491 bp, Cannabis indica
tttaatttaaaaaatttaatatctgaccttaaatttaaaaataagataagatataatcaaatttaaaaataagatagataattaagcaaaaaagatagatatttactattttcaaattcaaattacactaatatcatgaattaattttaaaaaaaaataattaatttaattatgatatttagaattgaattaggaatagtaaatgtctaaatacaaaactacacaaaaaatcggaagttaaatccatgaaatagcatgaaaaatcgaagaaaacgaaaaaaaaaattgcgagctgtacggacagtatgctacgcgcgcaaggggagtgcacggccgagcaagctcagcgctggaggtgtctggtaggatttccgcgcgtggaagctcgatttcagacatggattcgtgtccgtgcgcgtgctgtccgagggaagcgcctcatgcgcgcgcgtggggcagtgacaccatcccgatatttttcaaaacttcaa

SEQ ID NO: 399736 - DNA, 640 bp, Cannabis indica
tgcttcgaactgagtaatgagattagcagacaccccctcactgtattcaataaagggagtgtcttctaaagagtgttcagatgtacaacacccctcttcctgaacttttgaaaagagggattcactaattcttgaataggagttgtacacatggcccgtgtaggaggtaggcttaacagttgaggtgacccttgttggtcaatatccttggagaaacatctagtcaccatgttctcttcggaatgagttagggcttgctttgggaatccttacactgtcacttctagccttctttgggaaggagaaaggcgtcctacacccctcatctaataaagggtgttcattgatctcagcagatgccccctgttgaccttggcggttgacaaagattacgatcggaggcctaatcggggtacctcctactaattcccttgtttcaagagggtttggtgaaggtgaagtgtttttccccctcttgccttttgttgccttcctacctctccgagtttgagaagtcggtgttgcctcagtttcctccgcagaggtaaccatcactgaggcgacagtgggcaagaaaataggaacggaaccaatcaagatatgctcatggccccattcctggatcattacgggggagcca

SEQ ID NO: 399737 - DNA, 1182 bp, Cannabis indica
gcagaacaaaaaagtatacaatcagttaatatactgttaaaattgtcaatactctactaataaatgctatattttctgaattttgcctgtactcgcgttgtaacaaattattatttcataatatttttttttccttaaaaatgaacacagggtaatgatgttgaacctaataactaataataatatatattttttcaatttttaattgtatcgtgacgtttttaataacgtagaaaaaaactagcataaaatttagtatacgtgcctcgcacgtaactttttgctagtctttataaaagagtgaatatggtattttaacatcaattatatattgttgataagaccattatacaataccatattataaaaaaattaacaaaacattagtaattttattatgtaatactaatttagtactatatttaaattagactcatgtatcattatattttattttgtaagatttatatttaaattataacttaacttaatagagagaataatcggtaattttttaaaaatacgtaaataaaatttatatttactctatgataaaattacacaaagcatttatgtaaagaaaagcataaagaatttgaggtggtattttataatattttttatctattttatttattttatgagaattttagtaaatttagctcatcttataaatttataaatattaagaaatatgactttttagtaacttttttttcttcgtaattaaaatcatacatggattaaaaaatacatgaacagtatacttctaaactataaataaaatatttttacattcactttgatttgtctaaaaataaatcggtgattgatcattaactattgcccaattaattataatttttttaaaatattttgagtaatcaaatcaactttaattatatacttatctaatatactagcaaaaagatacgtgcgaggcacatatactaaattttatgttatttgaacgtgatacaattaaaaattaaagaaaaaatattattagttattaggtgagattattattacgtgtatttaaatattatagtttataatgttgtcaattaaaagtgaatgccgaatgcaatatattagtgtttaagaaaggttgatgatttaaatatattcttaagttaatccaaaaataaattaaaaattgatgttccaatacttaaagaa

SEQ ID NO: 399738 - DNA, 595 bp, Cannabis indica
atataatggtctttctctctctacaaaaaaaaaaaaatgaaacctcctacaatattaaaaaaaatcaataatttaagatgccaaaaaataaagtaagttgggctagagcttattttgtatgtgcctaaaatattttttaagaagtctattgtaattgataattttaatgccacctgtgcatataaaagttgattataagtttataaataaaaaataattgtaaaaattgattgaagacataaaaaaaaaattcaatttttttctgcattattattgttaatttagaaaagaaaaataaatagacaatttatgtgttatatgaaaatataaagagttatactctttaagggatcctaactttgagaattatctttttattttaggatactgattttgcataatgtttaaatctaattaactcaaatattaaaataattcaagtaatttctctatcatacccttgtcttcttttaaatttcttctctttattttattctctctaatcgtaatcttttcattattggttaaaagttgtagttaaagttacttgaaaaatcttatcaacttctttattttatttattctttaaaatatt

SEQ ID NO: 399739 - DNA, 700 bp, Cannabis indica
ggctaaaccctctcaactatcacaccacttgtacttaacactccaagctcaaattttgatagtaaaactctctaaactactaaattgcttacaaatttaaggtgtcatctatttttttataattaacttgccaatatagattgcttaggtgtcatctactaaattgccacttgcttaacactccaagctcaaattttgatagttaaactctctaaactactaaattgcttataaatttaaagtgtcatctatttttttataattaacttgccaatatagattgcttatgtgtaaacttttgtacatatgtcaaatttatattggtacatcttatattattattttaaaaatataaaatttatttaaaaaattataatatatttttatttttttaatattttatttaattttcgaatgaattttgaaaataatatttaaataataatattagttgtaccaatataaacttatcatgtgtacaagattgtacacataaacaacccatagtgacagttaaccgaatgatatcttaagtttgctactagttcagtagtttggaggattttactgccaaaatttgaacttagagagttaaatgcaagtaaaacgacagttgggagggtttagccgcaaaaactctaaacacatatattctcttagaatgggagatcacgtaggcttgcctaaatttaaaaaaaaa

SEQ ID NO: 399740 - DNA, 509 bp, Cannabis indica
ttaccaataatctcaacccaatttaataacaagcatacaacaaaccaaactcaaatccaatccaagatagcactaaatcacccaacatgtagcaagaacaacctaacccatgcataaccaaaatcaacaaacttaaacatgtttctatcacaatattcagcaaagaaacataaattaaaatcaagaaaactacctcaaatacttgcacaatcaagcctcaagcctcccaacaccttcctttcaaacaaccaacttcaaataaactagttcttcacaaattaagctttgaaaatggaaaggggtgaaagagagggagagggttcggtgagagagagagaaaaccagaaaaatacaattcattttctctaaaaatccaataaattcaatttaattcaataatggtcaaatgagcattttgcccttagggctataaaacatacatattcattttcaagggcataaatgccatttcacactcaaatattgccaaataaatttcagattataac

SEQ ID NO: 399741 - DNA, 619 bp, Cannabis indica
atcaaacaattaaacaatacaccgtccaacaatatttatagttgcagctatggcaagcaactataaatcttgataatacataaatacaaaagaattattcattatataattttagttagttaaattaaaaatatgacacttaaaaaacgtacatgtaaaataaatatacatatcaattcgcttccaaaccagatgcaagcaagcccgtagattaatactccagctccactaatgtcaccaaaagtttttgcagagtcaaaaaaataaaactagcgggcattaacatttgattttagtttcgaagaaaacttcaaaataataaaagcaattgaattgagagtcgtaccgagaaccctatttgaattgaacccatacaaacgacaacgacgtacaataaaagaaagtccaacgtaagagttttatatgcctgagtttaattgattttattaaatgtgctcttaatgtgcttttgattgagattttagaatatatagttttattaactattatcatatagttgagttttttttttttttttaaaaaaaaaagttttgtccattgattttttttactttttgctattgattatgggattaatgttatcaaaaacgtattataa

SEQ ID NO: 399742 - DNA, 797 bp, Cannabis indica
cattttggtacttttattgagaggcagaatcataaattcgctctttacttcaaatttaatcataaacacgatggtggtacaaactcgtagaggcgtgatcaatccggtaaatccatcgacaatggatcccgcattgcagaatccaggaaatgcaggggttccaccatccacgaatcctgaataaccaatcacgcaatcaccaaccgtgggtcatggtgtgacatctcctgtgaatggaatcgcacccgctgtgcaagagactggaaataccaattcagcagccaacctaggtattcccaatactggagttccgccagcaacaaatgtctgaacaaccgttggagatgacatcgagatccagaacctccgtgatgctcttggactcatgcaaggccatactaataccctgtatcatgatcaagaagagctctgtgctgcagtgaaccttgcatttgaagagcaaaggcgtttgttcactggatggacggataaagaggtggaaacattgagggctcagcaagcagccactgacgaccgaacaagacaggccaccgtactgatacgaagagcctatcaagctactaatcaacaacctgcaaccagcattccgctaggcgagtcagacgaagatcccgctgggaacgcttctcagactctgaacggtcagtcgcccaatccctggtcataggtttcgcctgtgggcaaagcggtaggcggccagaccttatctagtaattcgtcaggagagattatacctaataactctacccaggttaacagttccggccaagtgatcg

SEQ ID NO: 399743 - DNA, 864 bp, Cannabis indica
attaaataagtcattaaaattctcaatataaaatgtctaaactcttctattttggtggggttgattgtttgattgaattatatatgtatatttgtggtggagggtgtttttgtattaattgtaggtactatatatacagtagagtgaggatgagtgtgccctattagatacggcacacacgagctactactactcataaatattatgctgcattatatataatacatatatatataaatatatatatatatatatatatattatgtatgcatgtgtgtgatagataaattgataatgataatgatagcaacttaccggcggtgcctgtttccaagttcagatgtgactcactcacctcatctactattcttcatttcattcttatatataaacatagagtaatttacggtgaaaatatttaaatttttaactttataataacacttattattagagttagtcccacattgttaatgtgtggaaataaattgtggtatataaaatgaatgagctattcctctcattgtcaattggttttgagatggaacctcattcatcttatccccgaattctaacacttataaactaatgcttctttttttgctagctaaagtactttcggttataatttttgacaattgttgtaggcagactcacataaaggcgacaaagaggtattgagaatcatgaggtttcatcttaaaattaattagtagtgagtggagtagttcatgttcttatatatgacttaatactctaccattttattctatgtgagaaaatgtctacaatattctccctcaagataatgactattttttactcatcaatattgaaccgtatcagagtggacatagtcactat

SEQ ID NO: 399744 - DNA, 1058 bp, Cannabis indica
cataaaacccaacaatgaaagccgagccatggctaactgtgatcaccaagatcttgaattttatgggcgtcacttgaaatgatagagtggtatgtgccactttccaatttcaagaagacgctttagtttggtgggacatggtgtccatgattcatgatgtgacaactatgacctcggagaaattccaggagctattaaatgacaagtactataatgaggcagtgagaagtgccaagagaaaagaattcactcatttgacttagaaaggaaatatgagtgttactgagtatacaacgcaatttgaccatttggcgaggttggcctcgggaattatgccaaatgccaagtgactttagtaagaaagaaaaatacctggatgggttaaatgcaaagatcaggcacgatctaatgactactactaacgacaaaactacttatgcagaaatggtgaataaagcactgcaagctgagggtgcagtgggatgtatgattgagtctggtgggactccggttgttggccgggctcctaaccctcctgcattaggctttagcaggggaggtagtggcttagccactgatcaaaaaagaaaggcatctacgataaccagtggctctagtcaaaacaagaggttccgagggaaccagggtcgaggcaatcgacagggtaattctgagacccgatacacttacccagggtgccccagttgtaaaaggcatcatctgggggagtgtaaagggcagaggtgcttttagtgtggcatgccagggcattacaagagggattgtccccaactcagaaccgaagcaccaaagactacagcgaaacccactccaacaagggtgttcgccataactcaggctgatgtagaagcgaaaacttctgttgtaacatgtgagctctcgctcaacaactcttatttctctgtattgtttgactctggggccactcattcttatgtggcagccagaatttttagtaagttggatagaccacatgatagttataaatcagggtttggaaccctattacctggcagagagttagttatctccaaaag

SEQ ID NO: 399745 - DNA, 1050 bp, Cannabis indica
ttttttagattctatgtctaatagaatagagataagttctgttcaaacaattttactacagttccgcattattaaattgtttgataatttcacttggtaattattaaaaatggaatttcaagataaatagaatacacaatggaactgtttagaacgagtagacaatgagtctacagctctttgatccacatactcgtgagtatgagcttgcaactcattgatccacatactcatgagtatgagctttctgctcaaaaatcttgcccttcaagtctcgaagagttggatttttggtgacaatggtgttgctccaattcagaatccttggaatcgaagatgaaactcttttacagaaagagttgaccatagcaggacaacattcataaaaccaaaccgtaaaaacccacggacatcccaaagccctataccaaccatcatactggcctcccttctctgccttcttatttttcattataatcccatgctgaaatctacctttgaatgaatcaatagtcaatttaaaggattcccgaccccaacaatactcgtcccaccgaccgctatccacaatatctagatcaaaccaagatacttctttatcaggagtattactaagaagaaacactgaataaaatacaacacatccattttcaatccaagtgactcatccaaaccccacctactacgcaaaaaagcatcctcaatggctttgtggtaattgatttttacaccacgaaaacagatttctaccaactgatttgattcttgtgaaaacaacaacttgctgcaatcaccgaaacaatcaattccaaaaatcaaataaaattcctcagcactaaaccgtatgcaacggccagcaaccttagcccaaaactctttaggattgggctggaaaacttcccttagtaataaactatgaacaacttggggatgaaaaacaaactcaggcatatctagaaaatgacaaaactgagtttaacgaaacatggacagtaaattaacagacaaagttttcttaatattatctatgatagaaaaaagactagtgca

SEQ ID NO: 399746 - DNA, 535 bp, Cannabis indica
gcaagtggttgagtggctcttttggtggaattggtgaaggggagtctatgacttttcccttgctgacaagcattacagaattgaaaattctttaaagtgcctgtatgtggaatgattggtaagagtttctacaatgtggacatagctgcatgtcccaatttacagtgccaaagatttatatcagagatgttggaaacatgaaaaatagactgctcattgggagaaaggaaatttttattaattgaatgtgtgttacaagattggtgtgtactagcacacttaggattacaatgacattctttattacagatacaaccagtggaaagagactcaaaaagtaaacaagatttacattgcagagaagatacgtgtgggacttgaggaatcaccaagaaggtaaacggccatctctagctttccctttgagcagaacagacccggttgtcttgtccttgacaaagcaccaatttttgtgaaattcaagaaaaatgtcagtatcttgagtgagcttagaaacactaacaagattcttagt

SEQ ID NO: 399747 - DNA, 504 bp, Cannabis indica
ttcagtatgtggtataattatccttaattttacttaaaaaaaaaggcttaattccactatggtccggagtagagtctaatggccgaaacccaaaactttttgctggagttcagactaaacaactaccaaactagtgttgttcaacttcttataaggaaattacacatatacatgtttttaatttgatgtctttaatttatattctttattttaaaatttattatgtttatttcttttttcaattattttactaattttatccatatcatttcacgatagttttcattcttctctaattaaaattttgcctcaattttcctacaaacctacacatccatctacaaagtacacaaatctattatgtttgaaattatatcttaattatgtgagtgtgtgaggataatttgggtacaatactcataaaagaaagtatatttgaattaaattttatttaagagtaaatttgattaatgtatataaaaaaaagtattctttaacttctcc

SEQ ID NO: 399748 - DNA, 695 bp, Cannabis indica
caacctatattcctataaataagagcagattacagagaaaaagtgatgagaaaattgtgagaaaaatactataattccgatattgtattttgtactcaaaaaaatacaattaataaaaaaagactcgtggaggatgtagattttaattacaaaaccacgtaaaaatatctagagttattaatttctaaattatttaatattatttttctaaagtatttattacgtaaaggcttattaattttggttaacgaaaatctatgttaatagtttggtgctttcattgagagccttatagtgataaactcaaaaaaaatcctccttacaaacagaaatttatccatggctgataacaatcaaaatgatgaaaattgccctgaagaaactacacatcgccctgggaaagagctaatgggttctcaaagaccccatactactagaacatcacgttcaaggagaaactatggtggtaataatcaaaaccaagaaagaaggaatgaagataccaataattctaccggatatgtacctagaagtgaggatgcttatgatccaactaggtatgtaccattactgaaattggaaaatagaaaactccggtagcgcttagccaaatctaaccgatgaaatgctgagttggaaagagaggctgcagcggcaagggtgaatcaaggaactaatactcaaaatcaacctga

SEQ ID NO: 399749 - DNA, 1104 bp, Cannabis indica
gctcctcatatttgtatgtaaataatatgtttcctggtttcgaattgtttaacggcgtagtgcgcacccaatgaatcatgccaacgtggactcttaccccatactgatccaaccctcctaaattcttattcctaatctaatttgtctctctcttctttattaatattatttttttttacatttaaatttttttactgcatttaatttgggaaatctactctggtgacaccgaagattaattaaaagatgagatctcaccttctatttctgttaatatatactattttactagttgaagatagagtccgttaatatataataacaattaacaaatatgaagaatttatttttcaatagataacaaattttaatactagcttttcataaaaaaaaaaaaatcaatactagtttattttgtcgaaaataaaaattatatatataattaaaattttaaattatcagctatgtaatatttaaaaaatagctctactatttcaatcaaaatactcacaactttctttacctaaaaagcaaagttaatttagtttacttgttgcagattgtatttctctcttaaatgatttaaggaatgtttctcttatctttgttaaacgatctgcgaataagaccgccaattatttggctaagcatgcttgtttatactcaagttgtaattatagtaagggtttgtccctacggatttgcaagctattgttatagctgatttgcattaataaaattactactttttcaaaaaaagaaaaagcaaagctaatttgttcagaaaaaaaaaaaagctaagctaattaatttggattaaacttcagatataaaaatatatatctgttttgttaatagctatttaacataaaacattttttctgttttaacattacaattggtgtttttttttttttttatatttttaaattcattgtaaatatctaaattatatcttttattaatatttttataaaaaaatattttctattattatttaaaactaaaaataaaaattatgataaactaaaaatactaaggttcatttatatgcttacagagttagttcccaaatatattaatgcatttttgtcttaatatttg

SEQ ID NO: 399750 - DNA, 796 bp, Cannabis indica
tataactataaaaataaaataaccatatataatcacacaaaaaatattatacttcaataacttttttactagtgagaacttccataacatcatgagagggaatcttcacctgtgaaaatttctccttacactaaatacattaaaaaacactcagaacaaaaaaaaccattaaaaaacataaaaatcaagtatataatactaaaaactaaataacatatatagaacaacaaaacatataaaatttaacaaaatcagagagcgatgaacaaaatcccaaattgatatttgacactgaacatgcacaaacaaaaaccctaaaataaataccaaaaaaatagaaaatcctaaacttcataaaaaaaaattgaaaacaaaacatagtaaaaaggcataaacaacaataagatgattaaaacctcccctcacacctcccaaagataattacgtgtcagtttcactatctttatcaaaaataaaaagatatatatctttgttactttccttgtcaaaaaaatataaacttatctgaaatggtaaaaactaagttaacaaccatccgtaaccacaattgaaaaaatatgaatcaatttttcaaactgttgcccctgatttcacccaatatacgtggaccaaccgaacagggacacgtggatcagataatttgtgaatatttgctaagtctttgtatgccacaaggaaacaccctgggcataggtcccggaggaggcacccggagtgcaaggtgctcccggatgctcgcatagcataaagcctctccgtgaggtgtcaggcttct

SEQ ID NO: 399751 - DNA, 606 bp, Cannabis indica
tccaaaataagcgatcaaatccgtacttttgcagattggattagatttgaattattatgcagatagaatttgattcaaaatatgaaattcgcacttagtgcgaatcaaatgcactatgagaaaaataatacggattggattggatgaacacacatagtaattatacataattttatggtggtatgagaatttgagactgtaattgagacctctaaactatccccaattacagagctacaatataattatgtggtaaaaaaaattatataattacacaaaattctaattttcttttggcttttcaaacacgctcttgtggtgtgttttgaagtaattgtgtaattattagggtagtaattatacactaaagtaattacactatattttaaaatataatgcatttttagatgtaattagtaattgtatataaattcttattttttatatttgacaaatgagttagtaattatacaatttaataacattaattatttaaaattagtaatattttgtagttacacacttacaccttgaaaaaccgtgtttttgtaaatgtcagttgtatataagaaaatataaaaactgtaagcgtttgcagcagcagaa

SEQ ID NO: 399752 - DNA, 731 bp, Cannabis indica
gctggtagggataaaataaagctctttagcagtattactgataaaatatggaagttacttagcagctggaaagagcaattattctcagttggtggtaatgaggttctattgaaagcggttgtgcaagctatcccaacttatgctatgagttgcttccgtctgccagtcactttgtgtaatcaaattgaaagcatgatgtcaaacttctggtggggatcaacatcatctggtaatgcaattcattggaaaaagaattccctttgcaaggctaaaattcatggtggtttaggctttcggaatttcatacttttcaaccaagcactccttgctaaacaagcttggagattgttggaatctccgaactctctccttggacgtgttctacatcacagatattttctaaatgggaacttacttgcagcagggttaggtgctactccatctttaacatggagaagtattgtttgggggaaagagcttttagttcaaggtttgaaatggagagtgggtactggtgaaaacatcacttgtaaatcagattcatggcttcctggtcacactacattcactcctttctccttcaaaggatctgatgcttctttacatgttgctgatcttatagatcaacatcgacaatgggacatcacagctatatcggctaattttggtccagctgattttgacaggattttggctataccgcttagcctttatcctactgaagatgttct

SEQ ID NO: 399753 - DNA, 768 bp, Cannabis indica
gatccttctataatttcacaggttctaaatattgacccaaattttcggtctgttcaacaaaaataaagacttttggacaaggaggtagccctagcgttaaaagaagaggtagaaaagctacgcaacaataatttcataattgaagctttctacccaacctgggttgctaatcccgtactagtacccaagttgaacaagaaatggcgagtatggattgatttcaccgacctcaacaaggcgtgcccaaaagactattttccacttccaagaatagatcaacttgtggatgcaacagcagggcacgaaattttaagcttaatggacgcctactcagggtataatcaaaccaagatgcatccagcagaccaagaacatacgagtttctgaacagatatgggtctgtattgctataaggtcatgccatttggtctcaaaaaggctagagctacataccaaagattggtaaacaagatgttcaaagatcagatcagacgaaacatggaagtgtacgtggatgatatgcttgtcaaatccaggaaggctatggggcatatagattatctggacaaatgcttcaaagtccttaggaagtaaaacatgaaactcaatcccttaaagtgctcctagtttgctcgagtaagtttctaagcttcattatcaatgcccaaggaattgaagccaatacagagaaaattcaagccctcctcgatacgaaatcaccaataaaaaccaaggaagttcaaagtttgactggtcggattgccgcac

SEQ ID NO: 399754 - DNA, 744 bp, Cannabis indica
catggtttgtaaggagagaccactgccatctccttgtggcagtggtcaccaaaattggagagcactgccattttcttatagtaatgagcgcatatacctttttttcttgaggatttgatgccatattcactttatgcataaacccaaattattgtcatgcctaaataagtcaagtccttgttggttttggcagattgaggtttataatgaaaaaatgctcgcgcgggcccatgaaccctagtttgggcacacttaggtgtgtgagtcccgatgctaaatggttggttagcgtttttgagtcctctagaagttccatgggaccctcaagaatgatgtcttgatttattgaacatttatgagccttggtcaaagtcgcaaggttgtacttttttttagttttcgaaaattaggcataacactatataatctttgttttgtattcattctcttaaaatattttaaactatcatttgatctatatattggaaacagtttttaaaattctaatttcaagctttcttcctagagctaagaaccacatatccaaatgctttaaacatatatgatgactactaaatattttctccctataaactatatataaactcaattcaattgtggtaataacaataacaacagatacatattacaataaagaaaaacaaagagaataaagcttacccaggatcttcatatttagcaaagataaattctaaaaaacttttctcacagctcttcaaagat

SEQ ID NO: 399755 - DNA, 730 bp, Cannabis indica
ttggctaatagacataaatggaaaggctcttattttaataattatactagtctactgaaatatcatttatagaagctaagtgttttaaggataaaatacattcaagggtttatcgtatttttttgaccttgacgtggcaatgagaatggatgacatgtgttccacatatttgctacctgagcagagggaagtattcctagcagccaattaatggttaatctaaatacttgtaacactcggatgtccaaacaagttaatcaagaagatgtctgactaagatacatacatatctatgccgagcaagtcgtataagttggcagttccaaagatcggtctctttgcttccaagacacgaaaacaatccctataaatgtgtgattgagttagagaataaagacaatacaccttagtttcttattctttttacattgtaattatagaattaacgtagtttcctattttatttattatagattaagggaaaccattcttcatgtattatgcccctataaatagtggcataatctctctattaagggggacaaaagaattaatcctgaaatgcactcaagagagaatagtgatctaagagagaaaataactcagacatccattataagagctttagagaggaagaacactttattccttctctcaagtcaatacaactacaaggagagtaggctattgttgggttttgtgccctaaataaaacccattacaatctgat

SEQ ID NO: 399756 - DNA, 603 bp, Cannabis indica
taaccctgactcatgtcttcacttgatcaacaatattaccataaattatcgctttcttacctttataatattctagggtaataaccctagacaacatttaattaagctcaaaggtactagtttaccaagtctagcttatttatgccttgaacgcacaattcataatctcaatatacatacatatatcatggtatataaatacttattaacaattcactagggtaataatcctaggccaataaaccgctcactttagagtaataactctaattccggtttataattactcatgtatatatataatattccatataagcgccaccgcgcataactctacgtgctagctattgtcttacctgatgtcccgcaaatatagagattttaaatccctgagtgctcctgaccaagtgtcggtaatcctagtcacaatcctgggatacacaagtatagggttaatccctaaatctactttcacataatataaaattggcattcaaaatacagataaacatatatagctcggaatgagctttcctacgatataaagaacgttcaaaacggagtctcgagtcaaaagttatggcaaaaacaaaatcgagaaaa

SEQ ID NO: 399757 - DNA, 615 bp, Cannabis indica
tttacaaaatttaggagaattcaaaaaattttacatgactaaaaataagttacaaactgtttgttgcacgtgactcttttattatatacacttagtaaaataaactatttgaatattattttttatattgtaaattatttcaaatttcttaaaattttataaaatttcttaaataactataacatatagaactatcgaaacattaaacttaatttttttaaatgtcgaaaaaaaaaaaaaatgcatcaatttacattatttttttttaagaagtgcattgtaaaagtaccaaaaagtaacatatatatcattagttttcaactttttaattttatttttcaaatgaaaaagcttacatagattgttaattaatgaattcctccccccacccctctcttaaaaaaaaaaacaaaaaataaaaaattaactttaaccctaacataatcgcaaatcagtaataccaaaactcataaaaccttcacttagaccttcggaaatagtaaatcctccatatcaccctcgatgaaatgcccacattcatctttgagcatcaagtatttttttaagaaaggcattacattttagccaattttcatttatatacaagtaaatgta

SEQ ID NO: 399758 - DNA, 967 bp, Cannabis indica
aactttatcactgattatcatgtaatcaagtgtacagacaaatcatgggtcataaactttgaaacatataatcataattatattctactgtgttgacaacactataatcatgaataattatatgttctggatttaatagaatttatacattaaacatttaatcatgaaaaaaattatgtgaaccatgcaagataaaatgatttttgattcttttattaattagcaaatctgattatattagagtttaatttagggtataaaatcccaaaaaaactctcacttgcactaatataaaaccaaaagtgcatttcaactaatctcaacactttgatgttcaaatcaagtgcagtatgtagtattatctttgtaataaatctgacaggttgtattcaatacaaactttctccaccattacatctccttaattacaaaatctttgatattgtgaaattcttttctatatgtttactccacttggggtactagattctttattatttggaaactatatctgtgttagtcaggtagtaacactagtagttaatccattactgggataacgccaaaaactgtataaatttttccacaggctgaataattatctagtagcagtctatgttgggttttgtgccctaaataaaacacttatagattgctatgttgggtttagtaaatcatgattatgtttaatgtacatattctattaagtccagaacatatatctgttcatgattataatatcgtcagcacaatggaatataatcatgactatatgttcaaaagtttaagtcccatgatttgtcagttcactgaatttagactggcatgataatcaacaataaggtatacttacaccttggataagtgttatgtcatttctagcacattggcaaagtttaccagtattggatgtatggagtatacattggaagggaccaatattaatcttcgataagatatcctaaac

SEQ ID NO: 399759 - DNA, 2077 bp, Cannabis indica
atctggtcccggccacttgtcccagtctagtttcggttcaggtcctgggtcccaagtccgagtttgggttcgggaccgagagtggggtgtggttctaggtcccgagtgtggttccatgtttgggtttgagtttgggtctaggttcagcactaagtataggtataagttgggatctaggtttggctcccgattcgggtctaggtcttggttggagtctggcacctggtccagttacagttctgggtctaggtttaagtccagttactgttctaggtctaagtccaagttctggttacggttccagtcccgttcccgcatcccggtctacttccggtttcgtttcaaacttttggtcgcagggtacggattcgggtccaagtttgggtttgggactggttttggtctgggtctttgttcgggtcctcgtcttattctagttcgggtcccgggtcttgggccgggtcctaagtttaggatggggtctgagttcggggttgtgtcccgatagtcaagtccttatttccgggtccaaggttgggtcccgtctctcgagtttggggtcgagttttgggtcttcatcccagttccggtgcctagtttctagtccaagtcctcaatcaggatccagatcctttgtcaaaatttgtgtccatgttcgggtttggggcccaagtcccccatctaggtctagatcttaggtcctggtctaggtccaagttcaggttcgggtttgactctcaagtttgggtccgagtctaggtcccagtacgggttcaggtgttagtttgggtctgggtccagaatgagtccaagtccctatttgggtccaggtcggggtcccaaaccggggcccaatcaaggtctaggtcacgaaccaggttttggtctgggttttggtccgggtttaggtcttgagtttgggtctaggtttgggtttggatctgggtctgggtcttggtcctgggttccgatctcggtttgggtatgggtctgggcccgtgttcaggtttgggtttagggtttagggtttagtatttagggcttagggcttagggtttaggggtaagtgtaaagagtttagaatttagggtttaaggtttaggatttagagtttaatggtccgcttcaagatccggttccaatttcaggtcacagggtacgagtcctggtttaggtctaggtccgtgttttggttcaggtctgactcttagtcccaaatcaaaacacaaaccacatgtcgagtctagtttctagttttggtatgggttcgagttctggtctgggtctaggtccgagcctaggtctaattaccagatttagacaccgaatatgggtcgggtccaagcctcgggtcttgggtccagtctcgggtctaaatccagatcctagtccagttctagctcatgtcttgggtcctggtctgggtcttatgtccaagtttgggtctaggtttgggtcttgggcctgagtcatgggtctgagtccccgattcaggtcagggtcctaggtcccaatctgggttagggtcccagtccgagtgcaagtcccagtcgatgttcggaactggtccttctcccgggtcttggcctggtctgggtttatttaatggttcggttctgaggtcccgtgtttgagtatcgggtcccggtcccggtcccagtctaagttctagtcctactccaagtttaggtctcggtcctagtctgggtctaagttcgagtcgtgatctatgtccaggtctgagtcctgagtttgagtctgagttttggcacgagtctgggtctgggtccaggtctaggtctgggtttgggtctaggcccagttttcagtccgtgtctgtgtccgagtcttggtctgagtctgggtttgggtctatgttcgagttctggtacgggaatgggttctggtcaaggtctcgggtcacgggtcctaggtcccaggtcctggcgcaagtctgggtctgcgttcgggcctgggtttgctattgatcccagtctgggtccgggtcagtgttcggttctgtgtcttgatccggttttggatcaaggtccaactcctgttctagggtccttattct

SEQ ID NO: 399760 - DNA, 738 bp, Cannabis indica
ttttattacatgtcatgtgattgatggaatacgaaacttatgttctacaacgacaaggaagaaacagattgtgagaatccaaattgaagaaaagatgtcttctaaaccacggtaaacacattatatctaaattgacatttgaaattaattgacattcataccaacccttatatattctgtataaattattagtgcaaggacatatgtataactcgacgatggtaccgagttactagatgttgtgatgtttggagatgttgcagaaaacatattttcatgtactggagttcaattaaagtcatattcggatgaggtaaatataaaaagataaatatataaaatttatacattttcataaataaaagtataatgaatcttatcttaatcatcataaaaataatatcaataattatttttacagaaatataggttgtttgtccaaaaaactacaaagaaattatcggccaaaaaatgatgaattcagttgtatgtagatccaaaacgaacaataagttcaaagtacaatcaattcaccattcaagcagctgagccgatggaagattagcaagaagtttcactatactctttttagtttttctaataaatttctatattaagactttatttaataaattttttcttctattttaagatcgcacattttctttaattttcattacataatgcttactttaaattttacagaacacatatattgttcctctaaattttctataa

SEQ ID NO: 399761 - DNA, 564 bp, Cannabis indica
tagtcaacccagttatagaagttgtgaacttgcatccacttctctattccatgatgaagacacttttctaattatgtccttgtatatctcccaagcttcatatagagactcattgtcatgttgcatgaaattgttgatctatgatctcagtctggctaccttagtaggagggaagagcttagagagaaatttcaaggtcagttcctcccaagtgtcgataaaatttggtggcaaagatgccaactagcctggactgaccttgagaatatatgggcctaagacaaattagattttggagccctcataaatatatataaaaaacattgaaaaagagtttcatgggatttgaactcatgacattggataatatatcatacactccaaccaaactaagctatgaatatttattatttataatacacttaattttacttaaataaaagcctaatgaaactttttatttttattttaggcccccaaaaagtgtgggccctaggcacgagcctagaccgcgtatgcctagggccggctttgcaaccagctcttggctcgatcccttaatga

SEQ ID NO: 399762 - DNA, 574 bp, Cannabis indica
aaaaaaaaaaacaattaagacagctaaaaaacaaatgtagaacaccttaacaataatattaaacaactataaaacaacaaaaagacaattacaaagtaacagaaaaataacaagacatcgtcccagttacaatatgcaaaataatatctacttctcaatatgtatttgtattacgaaataaaaaatattaaaaatgaaaatagggtataaatagaataagtgtaaaaaattctttgccacaatataattgtaaagtttgaaaaaaaaatacaatattttatgtaaaaacttctaaaatctagttacttatccaaactaaatgaaaatacttattagtttgattagaaattagatgcatttgatttttaaatactctactcaacatctgatcgtatctaattgaatagtaaaaattaattacccaaaatatgagaaaattttaagagtttattttttatgccataaataaataaagttaagtggttatgagttttttttgtttttttacatttatatgggtttttttatgccatatttttgtaaaaaaaaataaaaatcctatatttataaaaca

SEQ ID NO: 399763 - DNA, 748 bp, Cannabis indica
taaaataatttccaacaatgtacatatcggccgtggggtcttggcttctgggaagcaggatcgccggcaaaagtttgccggtgagttacacatacttttgccggcgagcttaagcgccggcaaaagtagcttttcttgtagtgtggaggtagtaactcttggttattgtcattcctctgaccctgatcggtcgttacataattctgcaagtttgggttgtttttccttattaggaattcaatttcccgcttcaggttgttacattcattagtgtcatggccatagtctccgtggaatcgacaaaactttgtcatgtccctcttgctgacatcttttttcatgggcccgggcttcttatatggggccagcgactgagttgccatataaatactttttacgtctttagtcaagatagagaatgcagtgtactttgcttgattctctcggggagcttgttctgatttgccggcaaattttccattcttcccattcctttgcttgtggttgttgttggaacgtttaccacttgagcttgaattatttgggtaatggggaagttgggcggatgttccagtagaaggagcctttgactagccaagcttttgctcaccttccgctcgttgaatggcttcttcgagcttgatgaagccttcagcacggccaagaacatcacttattgagtctaccagcacgttcttccttatatccttccaaagtttgtcgaggacttcaatgccccccagtatcg
